United States Patent Application Publication US 2024/0271122 A1 - sequence listing, part 4

SEQ ID NO: 5917 - DNA, 1656 bp, Saccharomyces cerevisiae
atggcatcgcaggctacaactcttcgaggctataacattagaaaacgagataatgtatttgaaccaaaatcaagtgaaaacctcaacagcttaaatcaaagcgaagaagaagggcatattgggagatggccacctttaggttatgaagcagtatctgccgagcaaaaatcggcagttcaattgcgtgaatcgcaagcaggagcgtcaataagcaacaatatgaattttaaggcgaatgacaagtctttttccacatctactgctggaagaatgagtccggatacgaattcattacaccatatattacctaaaaatcaagttaagaataatggacaaacaatggatgccaattgcaataataacgtatccaatgatgctaatgttcctgtttgtaagaactgtttaacctctacaacaccattatggagaagagatgagcatggagctatgctttgtaatgcgtgtggtctctttttaaagcttcatgggaaacccaggccaattagtttgaaaactgatgtaataaagtctcgaaataggaaaagtaatacaaatcatgcacataatctggacaactttcggaatcagacgctgattgcagagcttaagggtgattgtaatatagaatcaagcggtcgcaaagctaacagagtaacatctgaagataaaaagaaaaaaagttcgcaacttttaatgggaacatcatctactgcgaagatatccaagaagccaaaaacggagtctaaggaaagaagcgattctcacctatcagcaacaaaattagaggtactgatgtcgggagattgttcgagaccaaacttaaagcctaaactgcccaaacaagatactgctatataccaagagaagttacttacgttcccaagttatacggacgttaaagagtattcaaattctgcacaccaatctgcttttatcaaagaacggtcgcaattcaacgcagcctctttccccctcaatgcttcacattcagtaacatcaaaaacaggcgcagattctcctcaattacctcacttatcaatgctgcttggaagcttgagcagtacttcaatatcaaataacggaagtgaaatagtgtccaattgcaataatggtattgcctctaccgccgcaactctggcacccacttcttcacggacgactgactctaatccatccgaggtaccgaatcaaattagatcgacgatgtcttccccagatataatatctgctaagcgtaacgacccagcccctttatctttccacatggcttctattaacgacatgcttgagacgagagatcgtgcgattagcaacgtgaaaaccgagacgacaccgcctcatttcataccgtttctacaatcttctaaagctccctgtatatccaaagcaaattcacaatccatctcaaatagtgtttctagttctgatgtttctggacgaaaatttgaaaatcacccagctaaagatttaggtgatcagttatccactaaattgcacaaagaagaagaaattataaagctcaaaactagaataaatgagttagaacttgttacagatttatataggagacatatcaatgaattagacgggaaatgtcgagctcttgaggaacgtttgcaaaggacagtaaaacaagaagggaataaaggaggatag

SEQ ID NO: 5918 - DNA, 1656 bp, Artificial Sequence
  Description of Artificial Sequence: Synthetic polynucleotide
atggcatcccaggctacaactcttaggggctataacattagaaaaagagataatgtatttgaaccaaaatctagtgaaaacctcaacagcttaaatcaaagcgaagaagaagggcatattgggagatggccacctttaggttatgaagcagtatctgccgagcaaaaatctgcagttcaattgcgtgaatctcaagcaggagcgtctataagcaacaatatgaattttaaggcgaatgacaagtctttttccacatctactgctggaagaatgagtccggatacgaattctttacaccatatattacctaaaaatcaagttaagaataatggacaaacaatggatgccaattgcaataataacgtatccaatgatgctaatgttcctgtttgtaagaactgtttaacctctacaacaccattatggagaagagatgagcatggagctatgctttgtaatgcgtgtggtctctttttaaagcttcatgggaaacccaggccaattagtttgaaaactgatgtaataaagtctagaaataggaaaagtaatacaaatcatgcacataatttggacaactttagaaatcagacgttgattgcagagcttaagggtgattgtaatatagaaagtagcggtcgcaaagctaacagagtaacatctgaagataaaaagaaaaaaagttctcaacttttaatgggaacatcttctactgcgaagatatccaagaagccaaaaacggagtctaaggaaagaagcgattctcacttaagtgcaacaaaattagaggtattaatgtctggagattgttccagaccaaacttaaagcctaaattgcccaaacaagatactgctatataccaagagaagttacttacgttcccaagttatacggacgttaaagagtattctaattctgcacaccaatctgcttttatcaaagaaagatctcaattcaacgcagcctctttccccctcaatgcttctcattctgtaacaagtaaaacaggcgcagattctcctcaattacctcacttatctatgttacttggaagcttgagcagtacttccatatccaataacggaagtgaaatagtgtccaattgcaataatggtattgcctctaccgccgcaactttggcacccacttcttccagaacgactgactctaatccatccgaggtaccgaatcaaattagatctacgatgtcttccccagatataatatctgctaagcgtaacgacccagcccctttatctttccacatggcttctattaacgacatgcttgagacgagagatcgtgcgattagcaacgtgaaaaccgagacgacaccgcctcatttcataccgtttttgcaatcttctaaagctccctgtatatccaaagcaaattctcaatccatctctaatagtgtttctagttctgatgtttctggaagaaaatttgaaaatcacccagctaaagatttaggtgatcagttatccactaaattgcacaaagaagaagaaattataaagctcaaaactagaataaatgagttagaacttgttacagatttatataggagacatatcaatgaattagacgggaaatgtagagctcttgaggaacgtttgcaaaggacagtaaaacaagaagggaataaaggaggatga

SEQ ID NO: 5919 - DNA, 5310 bp, Saccharomyces cerevisiae
atgtcttcgttgagtgaccaattagctcaagttgcttccaacaatgctactgttgcgttggatagaaagagaagacaaaaacttcattctgcttctttgatttataactcaaagacggctgcaacacaagattacgatttcatttttgaaaacgctagtaaggctcttgaagaattgagccaaattgagccaaaatttgccattttctcaagaacactcttttcagagtcttccatttctcttgatagaaatgtccaaacaaaagaagaaattaaagatttggataatgctatcaatgcttacttgctattggcttcttctaaatggtatttagcacctacactacatgcaacagaatggttggttcgtcgttttcaaatacatgttaaaaacacagagatgctgcttttgtccactctcaactactaccaaacacctgtctttaagagaattctcagcattattaagttgccccctttgtttaattgtttgtcgaattttgttagaagtgaaaagcccccaacggcgctaaccatgataaagctctttaatgacatggattttctgaaactttataccagttatttggatcaatgtattaagcataatgcaacgtatactaaccagcttttatttacaacatgctgctttattaacgttgttgctttcaattcaaacaacgatgaaaaactgaatcagcttgttccaatcttacttgaaatatctgctaaacttttagcctctaaatcaaaggattgtcaaatagctgcacataccatattagttgtatttgctacagctttgcctttaaagaaaacaattatcttagctgccatggaaaccattctttcaaacttagatgctaaagaggcaaaacattcagcactcctcacgatttgtaagctgttccaaacattaaaaggacaaggtaacgtagatcagctaccttccaaaattttcaagttatttgatagcaagttcgacactgtgtctatactaaccttcttagataaggaagacaaaccagtttgtgataaattcattacttcctatacaagatccatagcaaggtatgatcggtccaaattgaacattattcttagcctactaaaaaaaataagactagaaagatacgaagttaggttgataatcactgatttgatttacctttccgaaattttagaggacaagtcacaattagtagaactattcgaatattttatctccataaatgaagatttggtgttaaaatgtttgaaatcattgggactgacaggcgaactcttcgaaatcaggcttactacatctttgttcactaatgccgatgttaacaccgacattgtaaagcagttaagcgaccccgtggaaactactaaaaaggataccgcttcatttcaaacattcttggataagcattcagaattgataaacacaacgaatgtgtccatgctaacagaaactggagaaagatacaaaaaggttttatctttattcactgaagctattggtaaaggctataaagcaagttccttcttgacttcatttttcactactttagaatcaagaataacgtttttgttaagagtaactatatctccagccgctccaaccgcgctaaagctaatatctttaaacaatattgcaaaatatattaatagtattgaaaaggaagttaatatttttactttagttccatgcttgatttgcgctttgcgagatgcttctataaaagttaggactggcgtgaagaagattctttccttgattgctaaaagaccatccactaagcactactttttgtctgataaactttacggagagaacgttaccattcctatgttaaatcccaaagatagtgaggcatggttatcaggatttttgaatgagtacgttactgagaattatgacatatccagaattttaacgccaaagagaaatgaaaaagtctttttgatgttttgggctaatcaagccctactaataccttctccgtatgccaagacagtgttgttggataacctgaacaagagtccgacttatgcatcttcttattcctccctatttgaggaatttatttcccactacttagaaaacagatctagttgggaaaagagttgtattgctaataaaacaaactttgagcattttgagcgctctttagttaatttggtatcaccaaaagaaaagcagtcattcatgatcgattttgttctcagtgctcttaactcagattatgagcagttagctaacatagctgccgagaggcttatcagcatattcgcttcattaaataatgctcaaaaactaaaaatcgtccaaaatatcgtggattcttcgagtaacgtagaatcatcgtacgatacagtcggtgtactacaatcattgccgttagattccgatatttttgtatccatactaaatcaaaacagtatcagtaacgaaatggatcagacagacttttctaaaagaagaagaagacgttcatcaacaagtaaaaacgcatttttgaaagaggaggtttcgcaactggcggaattgcacctgagaaagttgacgattattttggaagcacttgataaagtcagaaatgttggatccgaaaagcttttgttcactttactttccttattatcagatctggaaactttggatcaagacggtggattaccggttttatatgcgcaagaaactttgatttcttgtacgctgaacactatcacatacttgaaggaacatggctgtacagaactaaccaacgtaagggcagatatattggtatccgctattagaaattctgcatctccgcaagtccaaaacaaactattacttgtaattggatctcttgctactttaagttcggaagttattttgcattctgtaatgcctatctttacttttatgggagcccatagtattcgtcaagatgatgaattcacaactaaagttgttgagcgtacgatactaactgttgtccctgccttgatcaagaatagcaaaggaaatgaaaaagaggaaatggagttccttttgttgagcttcacaaccgctttgcaacatgttccaagacataggagggttaaattattttctacgttaatcaaaacacttgatccagtaaaggcactgggctcgttccttttcttgattgcacaacagtattcttcagctttagtcaactttaaaattggcgaggcaagaatattaattgagtttattaaggccctactcgttgatctacatgtcaatgaggaattatcaggtttgaatgacttactcgatatcatcaaattgttgacatcatcaaagagctcctcggaaaagaagaaatcactagaatcccgtgtcttgttttcaaatggtgtcttgaatttttcggaaagtgaatttttgacatttatgaacaatacctttgagtttatcaataaaataaccgaggaaacagatcaagattattacgatgtgaggagaaatttaagactaaaggtatattctgttttgttagatgaaacaagcgataaaaagttaattagaaacatcagggaagaatttggaacccttttagaaggtgttctttttttcattaattctgtagaattaaccttttcatgtataacttcccaagaaaatgaggaagcttccgactctgaaacatcattatcagatcacacgactgaaataaaggagattctattcaaggtgcttggcaatgtgttacaaattctaccagttgacgagtttgttaatgcggtattacccttactcagtacatccactaatgaagatattagataccacctaacgttggtaatagggtccaaattcgagttagaaggctctgaagctattcctatagttaacaatgtgatgaaggttttgctcgacagaatgcctttggaatctaaatctgttgttatttctcaagtaatattgaacacgatgacggctttagtgagcaaatatggtaagaagcttgaggggtccatattaactcaagccctcacccttgctactgaaaaagttagttctgatatgacagaggtcaagatatcttcgttggcattgataactaactgtgttcaagttttaggagtcaagtcaattgcgttctatccaaaaatagtcccaccttctattaaattatttgatgcttcattggcagatagtagtaacccattaaaagagcagttgcaagttgctatactgttgctgttcgccggtctaatcaaaaggataccaagtttcttgatgtcaaatattttggatgttttgcatgttatttatttttcccgtgaagttgacagcagcattaggctgtcagtaatttcattgataattgagaatatagatttgaaggaagttttgaaagttttattcagaatttggtccactgaaatagcaacgtccaatgatacagttgctgttagtctatttttgagtacattagaatccactgttgaaaatattgataaaaaatccgcaacctcacaatcgccaatattttttaagttactattatctttattcgaatttagatccatttccagtttcgataataatacaattagtaggatagaggcatccgttcacgaaatttccaactcttacgtcctgaagatgaatgacaaagtatttagaccgctatttgttatattagtaagatgggcgtttgacggtgaaggcgttacaaatgcaggtatcactgaaacagaaagactgttggcatttttcaaatttttcaacaagcttcaagaaaatttgagaggtataattacttcctatttcacgtatttgttagaacctgttgatatgttgttaaaaagattcattagcaaggacatggaaaacgttaatttaagacgtttggtaatcaactctctaacctcttcgctaaagtttgatagagacgaatactggaaatcaacttccagattcgagttaatttctgtatccttggtcaatcaactatctaatatagaaaactctattgggaagtacctggtcaaggcaattggcgctctggcttctaacaatagtggcgttgatgagcataaccaaattttgaataaactaatcgttgaacacatgaaagcttcctgttcctccaatgaaaaattatgggctattagagccatgaagttgatatactcaaagataggtgaaagttggttagttctattgccacagctcgttcccgtcatcgctgagttattggaagatgatgatgaagagatcgaacgtgaagtcaggaccggtttggtcaaggttgttgaaaacgttttaggggaaccttttgataggtatttagattag

SEQ ID NO: 5920 - DNA, 5310 bp, Artificial Sequence
  Description of Artificial Sequence: Synthetic polynucleotide
atgtcttctttgagtgaccaattagctcaagttgcttccaacaatgctactgttgcgttggatagaaagagaagacaaaaacttcattctgcttctttgatttataactccaagacggctgcaacacaagattacgatttcatttttgaaaacgctagtaaggctcttgaagaattgagccaaattgagccaaaatttgccattttcagtagaacactcttttctgagtcttccatttctcttgatagaaatgtccaaacaaaagaagaaattaaagatttggataatgctatcaatgcttacttgttgttggcttcttctaaatggtatttagcacctacattgcatgcaacagaatggttggttcgtcgttttcaaatacatgttaaaaacacagagatgttacttttgtccactctcaactactaccaaacacctgtctttaagagaattctcagcattattaagttgccccctttgtttaattgtttgagcaattttgttagaagtgaaaagcccccaacggcgttgaccatgataaagctctttaatgacatggattttttgaaactttataccagttatttggatcaatgtattaagcataatgcaacgtatactaaccagcttttatttacaacatgctgctttattaacgttgttgctttcaatagcaacaacgatgaaaaattgaatcagcttgttccaatcttacttgaaatatctgctaaacttttagcctctaaatccaaggattgtcaaatagctgcacataccatattagttgtatttgctacagctttgcctttaaagaaaacaattatcttagctgccatggaaaccattctttccaacttagatgctaaagaggcaaaacattctgcactcctcacgatttgtaagcttttccaaacattaaaaggacaaggtaacgtagatcagttgccttccaaaattttcaagttatttgatagcaagttcgacactgtgtctatattgaccttcttagataaggaagacaaaccagtttgtgataaattcattacttcctatacaagatccatagcaaggtatgatagatccaaattgaacattattcttagcttgttgaaaaaaataagattagaaagatacgaagttaggttgataatcactgatttgatttacctttccgaaattttagaggacaagtctcaattagtagaattattcgaatattttatctccataaatgaagatttggtgttaaaatgtttgaaatctttgggattaacaggcgaactcttcgaaatcaggcttactacatctttgttcactaatgccgatgttaacaccgacattgtaaagcagttaagcgaccccgtggaaactactaaaaaggataccgcttcttttcaaacattcttggataagcattctgaattgataaacacaacgaatgtgtccatgttaacagaaactggagaaagatacaaaaaggttttatctttattcactgaagctattggtaaaggctataaagcaagttccttcttgacttcttttttcactactttagaatctagaataacgtttttgttaagagtaactatatctccagccgctccaaccgcgttaaagttaatatctttaaacaatattgcaaaatatattaatagtattgaaaaggaagttaatatttttactttagttccatgcttgatttgcgctttgagagatgcttctataaaagttaggactggcgtgaagaagattctttccttgattgctaaaagaccatccactaagcactactttttgtctgataaactttacggagagaacgttaccattcctatgttaaatcccaaagatagtgaggcatggttatctggatttttgaatgagtacgttactgagaattatgacatatccagaattttaacgccaaagagaaatgaaaaagtctttttgatgttttgggctaatcaagccttgttaataccttctccgtatgccaagacagtgttgttggataacttgaacaagagtccgacttatgcatcttcttattcctccttatttgaggaatttatttcccactacttagaaaacagatctagttgggaaaagagttgtattgctaataaaacaaactttgagcattttgagcgctctttagttaatttggtatctccaaaagaaaagcagtctttcatgatcgattttgttctcagtgctcttaacagtgattatgagcagttagctaacatagctgccgagaggcttatcagcatattcgcttctttaaataatgctcaaaaattgaaaatcgtccaaaatatcgtggattcttccagtaacgtagaaagtagttacgatacagtcggtgtattacaatctttgccgttagattccgatatttttgtatccatattgaatcaaaacagtatcagtaacgaaatggatcagacagacttttctaaaagaagaagaagacgttcttctacaagtaaaaacgcatttttgaaagaggaggtttctcaattggcggaattgcacttgagaaagttgacgattattttggaagcacttgataaagtcagaaatgttggatccgaaaagcttttgttcactttactttccttattaagtgatttggaaactttggatcaagacggtggattaccggttttatatgcgcaagaaactttgatttcttgtacgttgaacactatcacatacttgaaggaacatggctgtacagaattgaccaacgtaagggcagatatattggtatccgctattagaaattctgcatctccgcaagtccaaaacaaattattacttgtaattggatctcttgctactttaagttctgaagttattttgcattctgtaatgcctatctttacttttatgggagcccatagtattcgtcaagatgatgaattcacaactaaagttgttgagcgtacgatattgactgttgtccctgccttgatcaagaatagcaaaggaaatgaaaaagaggaaatggagttccttttgttgagcttcacaaccgctttgcaacatgttccaagacataggagggttaaattattttctacgttaatcaaaacacttgatccagtaaaggcattgggcagtttccttttcttgattgcacaacagtattcttctgctttagtcaactttaaaattggcgaggcaagaatattaattgagtttattaaggccttactcgttgatttgcatgtcaatgaggaattatctggtttgaatgacttactcgatatcatcaaattgttgacatcttccaagagctccagtgaaaagaagaaatctttggaatcccgtgtcttgttttctaatggtgtcttgaatttttctgaaagtgaatttttgacatttatgaacaatacctttgagtttatcaataaaataaccgaggaaacagatcaagattattacgatgtgaggagaaatttaagattaaaggtatattctgttttgttagatgaaacaagcgataaaaagttaattagaaacatcagggaagaatttggaacccttttagaaggtgttctttttttcattaattctgtagaattaaccttttcttgtataacttcccaagaaaatgaggaagcttccgactctgaaacaagtttaagtgatcacacgactgaaataaaggagattcttttcaaggtgcttggcaatgtgttacaaattttaccagttgacgagtttgttaatgcggtattacccttactcagtacatccactaatgaagatattagataccacttaacgttggtaatagggtccaaattcgagttagaaggctctgaagctattcctatagttaacaatgtgatgaaggttttgctcgacagaatgcctttggaatctaaatctgttgttatttctcaagtaatattgaacacgatgacggctttagtgagcaaatatggtaagaagcttgaggggtccatattaactcaagccctcacccttgctactgaaaaagttagttctgatatgacagaggtcaagatatcttctttggcattgataactaactgtgttcaagttttaggagtcaagtctattgcgttctatccaaaaatagtcccaccttctattaaattatttgatgcttctttggcagatagtagtaacccattaaaagagcagttgcaagttgctatattattgttattcgccggtttgatcaaaaggataccaagtttcttgatgagtaatattttggatgttttgcatgttatttatttttcccgtgaagttgacagcagcattaggttaagtgtaatttctttgataattgagaatatagatttgaaggaagttttgaaagttttattcagaatttggtccactgaaatagcaacgtccaatgatacagttgctgttagtttatttttgagtacattagaatccactgttgaaaatattgataaaaaatccgcaacctctcaatctccaatattttttaagttattattatctttattcgaatttagatccatttccagtttcgataataatacaattagtaggatagaggcatccgttcacgaaatttccaactcttacgtcttgaagatgaatgacaaagtatttagaccgttgtttgttatattagtaagatgggcgtttgacggtgaaggcgttacaaatgcaggtatcactgaaacagaaagattattggcatttttcaaatttttcaacaagcttcaagaaaatttgagaggtataattacttcctatttcacgtatttgttagaacctgttgatatgttgttaaaaagattcattagcaaggacatggaaaacgttaatttaagacgtttggtaatcaactctttaacctcttctttgaagtttgatagagacgaatactggaaatctacttccagattcgagttaatttctgtatccttggtcaatcaattatctaatatagaaaactctattgggaagtacttagtcaaggcaattggcgctttggcttctaacaatagtggcgttgatgagcataaccaaattttgaataaattaatcgttgaacacatgaaagcttcctgttcctccaatgaaaaattatgggctattagagccatgaagttgatatactccaagataggtgaaagttggttagttttattgccacagctcgttcccgtcatcgctgagttattggaagatgatgatgaagagatcgaacgtgaagtcaggaccggtttggtcaaggttgttgaaaacgttttaggggaaccttttgataggtatttagattga

SEQ ID NO: 5921 - DNA, 1152 bp, Saccharomyces cerevisiae
atgattgtttcatttggtgatgcaacaacaagaacttccgaagttcaattggttaggtgtactcaaggtctaaacctttggaagctgcatcaagttcatgccgtttacaaaagagttgtccatgataccttaggtgccgatgaaggtaatgctttactcgatcaaattttggctgacacgaatctatatccaccttggatgtgtgttcttttatatgcattttgttccgctatggtcactccgtatgcctttggtggcgattgggtaaacctggcaatctcattttttatggggctttgtgtggggtcattacaatttattctttcacaaaagtcatacatgtattcaaacgtcttcgaaatttctgcatctattgtcgttagcttctgcggtagagcttttggctctatccctcgttctcacatctgctttggtgcagttacacaaggctcattggcattaatcctgccaggttatattattctgtgtggtgcactagaactgcaaagtcgaagcctagttgctggcgcggtccgtatgttctacgccattatttattctttgtttttgggttttggcataacattgggctcagctttgtttggatggatgtatcacaatgccactaacgaaatttcatgtcctcaattaatttctccgtggttcaggttcctcttcgttccagcgtttaccattagtatctcgttattaaatcaagcacacatctcacaactgccagttatggtcttcatttcttgcaccggttatgtcgtaacatattgggccggtaagcattttgcgaattcgacagagtttactgccgccttagctgcatttgtcataggtgttttaggtaatctatattccagaatttggaaaggtttagcggtatcagctatgcttcccgcaatcttcgttcaagtgccatctggtattgcttcacaaaattcgttgttgtctgggttgcaaagtgcaaatacaattgttaatgctaatgaaaccattacgacaagcacctccgatccatcgtcctcaatgtcatttggtatgacaatgattcaagtttgtgtcggtatttctgtgggactatttgcttcttcactctttgtctacccctttggtaaaaagaaaactggtcttttcagtttataa

SEQ ID NO: 5922 - DNA, 1152 bp, Artificial Sequence
  Description of Artificial Sequence: Synthetic polynucleotide
atgattgtttcttttggtgatgcaacaacaagaacttccgaagttcaattggttaggtgtactcaaggtttgaacctttggaagttgcatcaagttcatgccgtttacaaaagagttgtccatgataccttaggtgccgatgaaggtaatgctttactcgatcaaattttggctgacacgaatttatatccaccttggatgtgtgttcttttatatgcattttgttccgctatggtcactccgtatgcctttggtggcgattgggtaaacttggcaatctctttttttatggggctttgtgtggggtctttacaatttattctttctcaaaagtcctacatgtattccaacgtcttcgaaatttctgcatctattgtcgttagcttctgcggtagagcttttggctctatccctcgttctcacatctgctttggtgcagttacacaaggctctttggcattaatcttgccaggttatattattctttgtggtgcattggaattacaaagtagaagcttagttgctggcgcggtccgtatgttctacgccattatttattctttgtttttgggttttggcataacattgggctctgctttgtttggatggatgtatcacaatgccactaacgaaattagttgtcctcaattaatttctccgtggttcaggttcctcttcgttccagcgtttaccattagtatctctttattaaatcaagcacacatctctcaattaccagttatggtcttcatttcttgcaccggttatgtcgtaacatattgggccggtaagcattttgcgaattctacagagtttactgccgccttagctgcatttgtcataggtgttttaggtaatttatattccagaatttggaaaggtttagcggtatccgctatgcttcccgcaatcttcgttcaagtgccatctggtattgcttctcaaaattctttgttgtctgggttgcaaagtgcaaatacaattgttaatgctaatgaaaccattacgacaagcacctccgatccatcttcctctatgagttttggtatgacaatgattcaagtttgtgtcggtatttctgtgggattatttgcttcttctctctttgtctacccctttggtaaaaagaaaactggtcttttcagtttatga

SEQ ID NO: 5923 - DNA, 1164 bp, Saccharomyces cerevisiae
atggacggtagaaatgaaaaaccaaccactcctgtgtcagattttcgggtgggaagctccgagcaaagtcaagcgggagtgaatcttgaagatagtagtgaccatcgcacttccaattcagccgagagcaaaaaaggcaatttaagtggtaaaagcatcagtgatctaggtatttctaataatgataacaaaaatgtaagattcactgctgatacggatgctctagaaaatgatttgtcttcaagatctacagaaaccagcgataattctaagggcacagatggacaagatgaagaagataggcctgctcgccacaagaggaagcctaaagtttctttcacacatttaaggaacaatggtaaggatggagacgatgagacgttcatcaagaagataataaataacctgactggaaatcaagggggtttggtccctggcttggcaccaataccttcagaaaatgaaaatgggaagaatgatatagaaaaaaataaccgtaatgaagaaattcccttatccgatctagctgatgcgtctaaaatcgtagacgttcatgagggcgacgataaagaaaaactggaggctctcaaattagaaggtgacgtaaattgtacgtcggatggcgaaacgttaggctcaagttcaaaaaattcatttctggctcctgcagtggatcattttgatgattatgcagaaaacaattcatccgacgataacgaagggtttattgaaacctccacatacgtaccccctccatctcaagtgaaaagtggagtactagggtcattattgaaactttaccaaaatgaagatcaaaattcaagctcaatcttttcagattcacaagctgtaacaacagatgatgaaggtatttcttctactgctggaaacaaagacgtaccagttgccaagcgtagcagattacaaaatttaaaaggcaaggctaaaaaaggcagaatgcctagactgaagaaaagactaaaaactgaagcgaaaattacggttcacattgcagacattttacaaagacaccggttcatcctacgcatgtgtagagctcttatgatgtatggtgctccgacgcataggcttgaagaatatatggttatgacttctagagtccttgaaatagatggtcagttttgtatcttccaggttgtatga

SEQ ID NO: 5924 - DNA, 1164 bp, Artificial Sequence
  Description of Artificial Sequence: Synthetic polynucleotide
atggacggtagaaatgaaaaaccaaccactcctgtgtctgattttagggtgggaagctccgagcaaagtcaagcgggagtgaatcttgaagatagtagtgaccatcgcacttccaattctgccgagagcaaaaaaggcaatttaagtggtaaaagcatcagtgatttaggtatttctaataatgataacaaaaatgtaagattcactgctgatacggatgctttggaaaatgatttgtcttctagatctacagaaaccagcgataattctaagggcacagatggacaagatgaagaagataggcctgctcgccacaagaggaagcctaaagtttctttcacacatttaaggaacaatggtaaggatggagacgatgagacgttcatcaagaagataataaataacttgactggaaatcaagggggtttggtccctggcttggcaccaataccttctgaaaatgaaaatgggaagaatgatatagaaaaaaataaccgtaatgaagaaattcccttatccgatttggctgatgcgtctaaaatcgtagacgttcatgagggcgacgataaagaaaaattagaggctctcaaattagaaggtgacgtaaattgtacgtctgatggcgaaacgttaggctccagttctaaaaattcttttttggctcctgcagtggatcattttgatgattatgcagaaaacaattcttccgacgataacgaagggtttattgaaacctccacatacgtaccccctccatctcaagtgaaaagtggagtattagggtctttattgaaactttaccaaaatgaagatcaaaatagtagctctatcttttctgattctcaagctgtaacaacagatgatgaaggtatttcttctactgctggaaacaaagacgtaccagttgccaagcgtagcagattacaaaatttaaaaggcaaggctaaaaaaggcagaatgcctagattaaagaaaagattgaaaactgaagcgaaaattacggttcacattgcagacattttacaaagacacagattcatcttacgcatgtgtagagctcttatgatgtatggtgctccgacgcataggcttgaagaatatatggttatgacttctagagtccttgaaatagatggtcagttttgtatcttccaggttgtatga

SEQ ID NO: 5925 - DNA, 1938 bp, Saccharomyces cerevisiae
atggttgaaaaacgtagtagacagagttccagtagtggctcagagttcagtgttccacctgatgtcgataacccgccactttctatccctttgaagactttatcagacagatatcagctgatcgaaaaactaggtgcaggatcatttggttgtgtaactttagccaaagcgcaatttcctttatcgaacatattgggtaaacaacatgatataaggggtactttaatggatcagcctaaaaatggtcaccaaaactatataacaaagacacaaggtgtagtggctataaagacaatgatgacaaaactgcatacactccaggattatacgagggtcagagaaattaagttcatactggcaatcccagcgaatgaccatctgatacaaatttttgaggtctttattgactctgaaaattaccaattacatatcgtaatggaatgtatggagcaaaacctatatcaaatgatgaaacatagaaggcgccgagttttttcgattccttctttgaaatctattctatcgcagatactggctgggttaaaacacatccacgaacataatttcttccacagagatttaaaacctgaaaatattcttatcacaccaagtacccagtattttgaaaaggagtacatgaaccagattggatatcaagataactatgtcattaaacttgcagattttggtttggcacgccatgttgaaaataaaaacccgtatacggcctacgtttccacaagatggtatagatcgcctgaaatattattaagaagtggttactattccaaacctttggatatttgggcattcgggtgcgtggcggtggaagttactgtattcagagctctcttccccggtgctaacgaaatcgatcagatatggaaaattttagaagttcttggtacacctatcaaacgttctgattttgttaatacaaaccacatcacagctccaccacctggtggattttgggatgatgccagtaatttggtccataaattaaacttgaaattgccttatgtagaaggttcatcgttggatcatctactttctagctcccaactatccgatttatctgaggttgtcaaaaagtgtttaagatgggatcctaatgaaagggcaacagcccaagagctttgtgaaatgccattttttgaaaacaccgtggcatcccaagtagacgcaagaggcaatgtgactaatacagaacaagcattgatttttgcaggtataaatccagtagcgaccaacacaaagcccatatattttaactcttcaacaaaattgcccgcagaaacagagtctaatgatattgatatcagcaacaacgatcacgattctcatgctatgtgctcaccaacattaaatcaagaaaaactaactttggtagaatttttaaacgaattcgttgaagaagataatgatgatcactcaatacctgatgttggaacagattctaccatttcagattctattgatgagactgaattatcaaaagaaattcgtaataatttggccctttgtcaactaccagatgaagaagtcttagatcattcattatcgaatattaggcagttgacaaatgatattgaaattataaataaagatgaagcagacaacatggaacagctattttttgacctggaaattcctgaaaaggatgagtttcagagaaaacaaccatttaatgaacatgcagatattgatgaagacatcgttctaccatatgtgaacaactcaaattacacacatacagataggtcacatcatagaggtgataatgttttgggtgatgcctctttaggcgattcgtttaattcaatgccagattttactccaagaaatttcttgatacctacattaaaaaaatcacgggaaaagttcgagcctcatctatccaattcaaaccaacattttggaaatgtaaccttctaa

SEQ ID NO: 5926 - DNA, 1938 bp, Artificial Sequence
  Description of Artificial Sequence: Synthetic polynucleotide
atggttgaaaaacgtagtagacagagttccagtagtggcagtgagttcagtgttccacctgatgtcgataacccgccactttctatccctttgaagactttaagtgacagatatcagttaatcgaaaaattgggtgcaggaagttttggttgtgtaactttagccaaagcgcaatttcctttatctaacatattgggtaaacaacatgatataaggggtactttaatggatcagcctaaaaatggtcaccaaaactatataacaaagacacaaggtgtagtggctataaagacaatgatgacaaaattgcatacactccaggattatacgagggtcagagaaattaagttcatattggcaatcccagcgaatgaccatttgatacaaatttttgaggtctttattgactctgaaaattaccaattacatatcgtaatggaatgtatggagcaaaacttatatcaaatgatgaaacatagaaggcgccgtgttttttctattccttctttgaaatctattttatctcagatattggctgggttaaaacacatccacgaacataatttcttccacagagatttaaaacctgaaaatattcttatcacaccaagtacccagtattttgaaaaggagtacatgaaccagattggatatcaagataactatgtcattaaacttgcagattttggtttggcacgccatgttgaaaataaaaacccgtatacggcctacgtttccacaagatggtatagatctcctgaaatattattaagaagtggttactattccaaacctttggatatttgggcattcgggtgcgtggcggtggaagttactgtattcagagctctcttccccggtgctaacgaaatcgatcagatatggaaaattttagaagttcttggtacacctatcaaacgttctgattttgttaatacaaaccacatcacagctccaccacctggtggattttgggatgatgccagtaatttggtccataaattaaacttgaaattgccttatgtagaaggttcttctttggatcatttgctttctagctcccaattatccgatttatctgaggttgtcaaaaagtgtttaagatgggatcctaatgaaagggcaacagcccaagagctttgtgaaatgccattttttgaaaacaccgtggcatcccaagtagacgcaagaggcaatgtgactaatacagaacaagcattgatttttgcaggtataaatccagtagcgaccaacacaaagcccatatattttaactcttctacaaaattgcccgcagaaacagagtctaatgatattgatatcagcaacaacgatcacgattctcatgctatgtgctctccaacattaaatcaagaaaaattaactttggtagaatttttaaacgaattcgttgaagaagataatgatgatcactccatacctgatgttggaacagattctaccatttctgattctattgatgagactgaattatccaaagaaattcgtaataatttggccctttgtcaattaccagatgaagaagtcttagatcattctttatccaatattaggcagttgacaaatgatattgaaattataaataaagatgaagcagacaacatggaacagttattttttgacttggaaattcctgaaaaggatgagtttcagagaaaacaaccatttaatgaacatgcagatattgatgaagacatcgttttgccatatgtgaacaacagtaattacacacatacagataggagccatcatagaggtgataatgttttgggtgatgcctctttaggcgattcttttaattctatgccagattttactccaagaaatttcttgatacctacattaaaaaaaagcagagaaaagttcgagcctcatttgtccaatagcaaccaacattttggaaatgtaaccttctga

SEQ ID NO: 5927 - DNA, 1683 bp, Saccharomyces cerevisiae
atgacttcaccggaatcactatcttctcgtcatatcaggcaaggaaggacatacacaaccacagacaaggtcatatcgcggtcgtcgtcgtactcatctaatagttcaatgtctaaagattacggcgatcacacacccttgtccgtcagcagtgcagcttcagagacattaccctcacctcagtatatgccgataaggacattcaatacaatgcctacagctggcccaacgcctttacatttatttcaaaatgacaggggcattttcaaccatcattcttcatcaggctcatcaaaaacggcatcaacaaataaaagaggaatagcagcagcagtagcattggcaactgctgccaccataccatttccactgaaaaaacagaatcaagatgataattccaaggtctcggtaacacacaatgaatcatcgaaagaaaataaaattacaccctccatgagagcagaagataacaaacctaaaaatggttgcatctgcggttcaagtgactccaaggatgagttgtttatacagtgtaacaaatgtaaaacgtggcagcacaagttatgttatgctttcaaaaaatcagatccaataaaaagagattttgtttgcaaaagatgtgacagtgatacgaaagtgcaggttaatcaagtaaaaccaatgatattccctagaaaaatgggagatgagcgattatttcaattttcatccatagtgacaacttcagcatcgaacacaaatcagcatcaacagtctgtgaataacatagaggaacagcccaagaaacgtcaacttcattataccgccccaacaactgaaaatagcaatagtatacggaaaaaattgaggcaagaaaaactggtagtatcaagccactttctgaagccactactgaatgaggtaagttcttccaatgacacggaattcaaagcaataacaatatcagagtataaggacaaatatgttaagatgtttattgataaccattatgatgacgattgggttgtttgttctaactgggaaagctcaaggtcagctgacatcgaggtaagaaaatcatcaaatgaaagagattttggagtcttcgctgcagattcttgtgttaaaggtgagctaattcaagaatatttgggcaaaattgattttcaaaaaaattatcagacagatccaaataatgactatcgtttgatgggaacgacaaaacctaaagtactttttcatccacattggcctttatatatagactctcgagaaacaggcggattaacaagatacataagacggagttgtgagcccaatgtggaactagtaacggtaagaccgcttgacgaaaaaccaagaggagataatgattgtagagttaaatttgttttaagggctataagagatattcgtaagggagaagagataagcgtagaatggcaatgggatttgagaaatcctatttgggagataataaatgcatctaaagatttggattccctaccggatcccgacaagttctggttgatggggtcaataaagactattttaacaaattgtgattgtgcatgtgggtacttgggccataattgtccaataactaaaatcaaaaacttttctgaagaattcatgaggaatacgaaggaatccctatctaataaatcttactttaatacaataatgcacaactgtaagccataa

SEQ ID NO: 5928 - DNA, 1683 bp, Artificial Sequence
  Description of Artificial Sequence: Synthetic polynucleotide
atgacttctccggaatctttatcttctcgtcatatcaggcaaggaaggacatacacaaccacagacaaggtcatatccagatcttcttcctactcttctaatagttctatgtctaaagattacggcgatcacacacccttgtccgtcagcagtgcagcttctgagacattaccctctcctcagtatatgccgataaggacattcaatacaatgcctacagctggcccaacgcctttacatttatttcaaaatgacaggggcattttcaaccatcattcttcttctggctcttctaaaacggcaagcacaaataaaagaggaatagcagcagcagtagcattggcaactgctgccaccataccatttccattgaaaaaacagaatcaagatgataattccaaggtctccgtaacacacaatgaaagttctaaagaaaataaaattacaccctccatgagagcagaagataacaaacctaaaaatggttgcatctgcggtagtagtgactccaaggatgagttgtttatacagtgtaacaaatgtaaaacgtggcagcacaagttatgttatgctttcaaaaaatctgatccaataaaaagagattttgtttgcaaaagatgtgacagtgatacgaaagtgcaggttaatcaagtaaaaccaatgatattccctagaaaaatgggagatgagagattatttcaattttcttccatagtgacaacttctgcatctaacacaaatcagcatcaacagtctgtgaataacatagaggaacagcccaagaaacgtcaacttcattataccgccccaacaactgaaaatagcaatagtataagaaaaaaattgaggcaagaaaaattagtagtatccagccactttttgaagccattattgaatgaggtaagttcttccaatgacacggaattcaaagcaataacaatatctgagtataaggacaaatatgttaagatgtttattgataaccattatgatgacgattgggttgtttgttctaactgggaaagcagtaggtctgctgacatcgaggtaagaaaatcttccaatgaaagagattttggagtcttcgctgcagattcttgtgttaaaggtgagttgattcaagaatatttgggcaaaattgattttcaaaaaaattatcagacagatccaaataatgactatcgtttgatgggaacgacaaaacctaaagtactttttcatccacattggcctttatatatagactctagagaaacaggcggattaacaagatacataagaagaagttgtgagcccaatgtggaattggtaacggtaagaccgcttgacgaaaaaccaagaggagataatgattgtagagttaaatttgttttaagggctataagagatattcgtaagggagaagagataagcgtagaatggcaatgggatttgagaaatcctatttgggagataataaatgcatctaaagatttggattccttaccggatcccgacaagttctggttgatggggtccataaagactattttaacaaattgtgattgtgcatgtgggtacttgggccataattgtccaataactaaaatcaaaaacttttctgaagaattcatgaggaatacgaaggaatccttatctaataaatcttactttaatacaataatgcacaactgtaagccatga

SEQ ID NO: 5929 - DNA, 450 bp, Saccharomyces cerevisiae
atggctcacagggctttcatacaggttataatcacaggaactcaagtttttggaaaagcattcgccgaggcgtatagacaagcggcttcacaatcagtgaaacaaggtgctacaaatgcatctagaaggggaacaggaaaaggcgaatatggtggtattacgttggatgagagttgtaaaattttaaatattgaagaatccaagggcgatttaaacatggacaagattaataacaggtttaactatctatttgaggttaacgataaagaaaaaggtggaagcttctacttacagagcaaagtttatcgagcagcagaaaggttaaaatgggaactggctcagagagaaaaaaatgcgaaggcgaaagcaggggacgcttcaacagcgaaacctcctccgaattcaacaaattcatctggtgcagataatagtgcaagcagcaatcagtag

SEQ ID NO: 5930 - DNA, 450 bp, Artificial Sequence
  Description of Artificial Sequence: Synthetic polynucleotide
atggctcacagggctttcatacaggttataatcacaggaactcaagtttttggaaaagcattcgccgaggcgtatagacaagcggcttctcaatctgtgaaacaaggtgctacaaatgcatctagaaggggaacaggaaaaggcgaatatggtggtattacgttggatgagagttgtaaaattttaaatattgaagaatccaagggcgatttaaacatggacaagattaataacaggtttaactatttatttgaggttaacgataaagaaaaaggtggaagcttctacttacagagcaaagtttatagagcagcagaaaggttaaaatgggaattggctcagagagaaaaaaatgcgaaggcgaaagcaggggacgcttctacagcgaaacctcctccgaattctacaaattcttctggtgcagataatagtgcaagcagcaatcagtga

SEQ ID NO: 5931 - DNA, 1857 bp, Saccharomyces cerevisiae
atgaccaaaaaactaccttcagagttgaaacagacgagaaagtctatccagacagcttgtgaattctgtcataccaaacatatacagtgtgacgtagggaggccatgtcaaaactgtttaaaaagaaatattgggaagttttgcagagataagaaaaggaaatcaagaaaacgaattgagaagcatggaacacaaccatacttgaatttggggaagaggctggtaatacatgatgtgccgtcgaagacggtatccccctcaagcgtacatctgcagcgagattttctatcttcagatcaggaaaaaccaggcaaaacacctgcccacaatacgaatatccaatatacgtataatataaatgataactttcaaagcgctggatctattccacgtattacgaacttcaatacgaataaccgccagaccgtcttagaaaatacttctaataatatatcagcttcacaagcagtacatttaatgaatgaccccatcatacccaccgtacggaagagtactctcaatttaaagtcgcatttcctagagcaacataaagcaatgcagcagccgctggctaccaattgtttggttgctacttcaaacgttcctgtgcactctggaatggacgatagtaataagagtgacgatgatgtcgatgacgaaactaatattcactttgatagtatgtggtgcaatgacgaatacatgaaattaaaggatatagtagatatttcaacgccgtttttaccgaataactcccagatattttccctccaagaatcagaatatcccaatcctagcgcatctacacggggaaattcgtcattgcatttaacgaaccttttaaactcgacaaaaagcgtgaatgaccaaaaggactcctcgatcggccattccacttctactttcaatacatatgatgaagtagtgtctaggccctttatatctttagacatgctgcatttgaatcgtggagcaaacgctaatacacacccatcacataacgccaaactggaaagcgaatgtgacagttctagtcactccgatgcagatctggagaaacatgataccgatttcatatcaccttcaaagtttcgtgaattagtaaagactcctcaagacctatatgacaataaatgtttaataaaaccgcataattacaagctcgcatacaccaaactgctaactactttaagaaaaaaatttcttgaaggagctgaaattgataaatctgcctcagtaaaagacgaacacagtacccaaaagcataatttgagatatgatttagaagttataatacgctctatactagaaagatatgctccaattttcatttcgttaacatccaatatgattgaagaggatttgctattacaggaagttaccttgcaaagggctttattagatttggagaacatggcaaaattagtaagctgcacaccgatgtgcatctggagaagatcaggcgagatttgttttgtcagtaacgaattctattctttaacaggttttaacaaaaatttactattagaccgcacctcctttatttttgaatatctggatcataaaagcgtttcgaattactttcaaatatttaacgaattgctggcatttggttacaatgatatcaataaaaggaaaaaactattgatgttgaacgcatgttcttctacctcgtcaaaaattacagaagggttttcttttactacggatggaaaagcaatctttactaagtgcaatttattattaagtaacggtctttatttgaagtgtgcctgttgttggacagtaaaaagggactcgtttaatatcccaattctcgtaatgggacaatttttaccaatttttgaaatggactga

SEQ ID NO: 5932 - DNA, 1857 bp, Artificial Sequence
  Description of Artificial Sequence: Synthetic polynucleotide
atgaccaaaaaattaccttctgagttgaaacagacgagaaagtctatccagacagcttgtgaattctgtcataccaaacatatacagtgtgacgtagggaggccatgtcaaaactgtttaaaaagaaatattgggaagttttgcagagataagaaaaggaaatctagaaaaagaattgagaagcatggaacacaaccatacttgaatttggggaagaggttagtaatacatgatgtgccgtccaagacggtatccccctctagcgtacatttacagagagattttttatcttctgatcaggaaaaaccaggcaaaacacctgcccacaatacgaatatccaatatacgtataatataaatgataactttcaaagcgctggatctattccacgtattacgaacttcaatacgaataaccgccagaccgtcttagaaaatacttctaataatatatctgcttctcaagcagtacatttaatgaatgaccccatcatacccaccgtaagaaagagtactctcaatttaaagagtcatttcttggagcaacataaagcaatgcagcagccgttagctaccaattgtttggttgctacttctaacgttcctgtgcactctggaatggacgatagtaataagagtgacgatgatgtcgatgacgaaactaatattcactttgatagtatgtggtgcaatgacgaatacatgaaattaaaggatatagtagatatttctacgccgtttttaccgaataactcccagatattttccctccaagaaagtgaatatcccaatcctagcgcatctacaagaggaaattcttctttgcatttaacgaaccttttaaactccacaaaaagcgtgaatgaccaaaaggactcctctatcggccattccacttctactttcaatacatatgatgaagtagtgtctaggccctttatatctttagacatgttgcatttgaatcgtggagcaaacgctaatacacacccatctcataacgccaaattagaaagcgaatgtgacagttctagtcactccgatgcagatttagagaaacatgataccgatttcatatctccttctaagtttcgtgaattagtaaagactcctcaagacctttatgacaataaatgtttaataaaaccgcataattacaagctcgcatacaccaaattattaactactttaagaaaaaaatttcttgaaggagctgaaattgataaatctgcctctgtaaaagacgaacacagtacccaaaagcataatttgagatatgatttagaagttataatacgctctatattggaaagatatgctccaattttcatttctttaacatccaatatgattgaagaggatttgttattacaggaagttaccttgcaaagggctttattagatttggagaacatggcaaaattagtaagctgcacaccgatgtgcatctggagaagaagcggcgagatttgttttgtcagtaacgaattctattctttaacaggttttaacaaaaatttattattagaccgcacctcctttatttttgaatatttggatcataaaagcgtttctaattactttcaaatatttaacgaattgttggcatttggttacaatgatatcaataaaaggaaaaaacttttgatgttgaacgcatgttcttctacctcttctaaaattacagaagggttttcttttactacggatggaaaagcaatctttactaagtgcaatttattattaagtaacggtctttatttgaagtgtgcctgttgttggacagtaaaaagggactcttttaatatcccaattctcgtaatgggacaatttttaccaatttttgaaatggactga

SEQ ID NO: 5933 - DNA, 2460 bp, Saccharomyces cerevisiae
atgtggaaatggaatgtgcgcagatgggcgggcgcaagagtaaacattagcaagaaccgattaagtgtaattaacgttggaagtagatacttatcgaccgcaagaagtccactgtctaaggttagaaatataggaattatagcccatatcgatgcaggtaaaactaccacaacagagaggatgctttattatgcaggaatctcaaagcatattggagacgtcgacactggcgatacgataactgattttttagagcaggagagatcccgaggtatcacaattcaaagcgctgcgatttcattcccatggcgaaatacttttgcaataaatcttattgatacgccgggacatatagattttacttttgaagtgattagggctttgaaagttattgattcatgcgtggtcattttggacgctgttgccggcgtagaggcacagacagagaaggtttggaagcaaagtaaatcgaagcccaaaatctgctttatcaacaaaatggatcgtatgggggcgagtttcaaccatacagtcaatgacttgataaataaatttatgagaggaacaactaccaaaccggtgttggtaaacattccttactatcgaaaacaaccgactagcaatgattatgttttccaaggtgttattgacgtcgtaaatgggaagcgattaacctggaatccagaaaatcctgatgaaattatcgtggatgagttggatggtacttctcttgagcagtgtaatcgttgtagggaatcgatgatagagactttgactgaatacgacgaagatttagtccagcacttcttagaggaggcagaaggcgattactccaaggtttccgcacagtttttgaacgcttcaataagaaaactgactatgaagaatatgattgtacctgtcttatgcggtgcgtcttttaaaaatattggcgtgcagcctctattagatgctatagttaattatctcccttcgcccattgaagccgaactaccagaactaaatgataaaaccgttccaatgaaatatgaccccaaagttggatgtttagtaaacaacaacaaaaatctttgcattgctcttgcattcaaagtgattacggatccaatcaggggtaaacaaatattcattagaatttattcaggtacactaaacagtggcaataccgtttataattctactactggggaaaaatttaaattgggtaaattactgataccccatgcgggaacatcacaacctgtaaatattttaactgcgggccaaatcggattgcttactggctctacagtcgaaaacaacatatctactggagatacactaataacgcattcgtcgaagaaggatgggttgaaatcacttgataaaaaaaaggagttgacgttaaaaatcaattctatcttcattcccccaccagtttttggtgtttccatcgaaccaaggactttaagtaataaaaaatcgatggaagaagctttaaacactttaattactgaagatcccagtctttcaatttctcaaaatgatgagactggccaaacggttttaaacggtatgggtgaattacaccttgaaattgccaaggatcgattggttaatgacctaaaagcagatgttgaatttggtcagttgatggtgtcctacaaagaaacaattaattcagaaacaaatatagaaacgtatgagagtgatgatggatatagattctccttatctctgctaccaaattccgatgcccttcctaactgccttgcatatccattaggagtcaacgagaattttctgataatggaaaaaaatggtaattgggataaagaatggaaataccaagtttctttcgaatcaattctaaattctattattgcaagttgcattgtgggacttcaaagaggcggaaaaatagctaactttcccttatatgcatgctccatcaaaatcaatagcgattggtcagtcccacctgatattgaaactccacaagaaatcttaaaaattactagaaacttaatttttaaagctctcaatgacttaaaacctgaaaaatacaaccttctggaacccatcatgaatcttgatctaacaatccctcaatctgatgttggtacggtgttacaagatctaacaggagcaagaaaggctcaaattctgtctattgaagacgaatcaagcgtgtcaaattctggcgcatccacttgtaattctccagagaacagcaataggatatatattccctctgatgctgttacaaccctacacgcaaccaaagataaaaaaaacactcaagagaccagttctaatgtaaaaaaaattataaaagcgaaagtgccactaagggaaattaccacctacaccaataagctaaggagcttatcgcaagggaggggtgagttcaatattgaatattccgatatggagaaagttaccaacgatcgcctacaatcaatacttcacgacttgtag

SEQ ID NO: 5934 - DNA, 2460 bp, Artificial Sequence
  Description of Artificial Sequence: Synthetic polynucleotide
atgtggaaatggaatgtgcgcagatgggcgggcgcaagagtaaacattagcaagaacagattaagtgtaattaacgttggaagtagatacttatctaccgcaagaagtccattatctaaggttagaaatataggaattatagcccatatcgatgcaggtaaaactaccacaacagagaggatgctttattatgcaggaatctccaagcatattggagacgtcgacactggcgatacgataactgattttttagagcaggagagatccagaggtatcacaattcaaagcgctgcgatttctttcccatggagaaatacttttgcaataaatcttattgatacgccgggacatatagattttacttttgaagtgattagggctttgaaagttattgattcctgcgtggtcattttggacgctgttgccggcgtagaggcacagacagagaaggtttggaagcaaagtaaatccaagcccaaaatctgctttatcaacaaaatggatcgtatgggggcgagtttcaaccatacagtcaatgacttgataaataaatttatgagaggaacaactaccaaaccggtgttggtaaacattccttactatagaaaacaaccgactagcaatgattatgttttccaaggtgttattgacgtcgtaaatgggaagagattaacctggaatccagaaaatcctgatgaaattatcgtggatgagttggatggtacttctcttgagcagtgtaatcgttgtagggaaagtatgatagagactttgactgaatacgacgaagatttagtccagcacttcttagaggaggcagaaggcgattactccaaggtttccgcacagtttttgaacgcttctataagaaaattaactatgaagaatatgattgtacctgtcttatgcggtgcgtcttttaaaaatattggcgtgcagcctttattagatgctatagttaattatctcccttctcccattgaagccgaattaccagaattgaatgataaaaccgttccaatgaaatatgaccccaaagttggatgtttagtaaacaacaacaaaaatctttgcattgctcttgcattcaaagtgattacggatccaatcaggggtaaacaaatattcattagaatttattctggtacattgaacagtggcaataccgtttataattctactactggggaaaaatttaaattgggtaaattattgataccccatgcgggaacatctcaacctgtaaatattttaactgcgggccaaatcggattgcttactggctctacagtcgaaaacaacatatctactggagatacattaataacgcattcttccaagaaggatgggttgaaatctcttgataaaaaaaaggagttgacgttaaaaatcaattctatcttcattcccccaccagtttttggtgtttccatcgaaccaaggactttaagtaataaaaaatctatggaagaagctttaaacactttaattactgaagatcccagtctttctatttctcaaaatgatgagactggccaaacggttttaaacggtatgggtgaattacaccttgaaattgccaaggatagattggttaatgacttgaaagcagatgttgaatttggtcagttgatggtgtcctacaaagaaacaattaattctgaaacaaatatagaaacgtatgagagtgatgatggatatagattctccttatctttattaccaaattccgatgcccttcctaactgccttgcatatccattaggagtcaacgagaattttttaataatggaaaaaaatggtaattgggataaagaatggaaataccaagtttctttcgaaagtattttgaattctattattgcaagttgcattgtgggacttcaaagaggcggaaaaatagctaactttcccttatatgcatgctccatcaaaatcaatagcgattggtctgtcccacctgatattgaaactccacaagaaatcttaaaaattactagaaacttaatttttaaagctctcaatgacttaaaacctgaaaaatacaaccttttagaacccatcatgaatcttgatttaacaatccctcaatctgatgttggtacggtgttacaagatttaacaggagcaagaaaggctcaaattttatctattgaagacgaaagtagcgtgagtaattctggcgcatccacttgtaattctccagagaacagcaataggatatatattccctctgatgctgttacaaccttacacgcaaccaaagataaaaaaaacactcaagagaccagttctaatgtaaaaaaaattataaaagcgaaagtgccattaagggaaattaccacctacaccaataagttaaggagcttatctcaagggaggggtgagttcaatattgaatattccgatatggagaaagttaccaacgatcgcttacaaagtatacttcacgacttgtga

SEQ ID NO: 5935 - DNA, 2037 bp, Saccharomyces cerevisiae
atgggactcttagctttgggcacgcctttgcagtggtttgagtctaggacgtacaatgaacacataagggatgaaggtatcgagcagttgttgtatattttccaagctgctggtaaaagagacaatgaccctcttttttggggagacgagcttgagtacatggttgtagattttgatgataaggagagaaattctatgctcgacgtttgccatgacaagatactcactgagcttaatatggaggattcgtccctttgtgaggctaacgatgtgagttttcaccctgagtatggccggtatatgttagaggcaacaccagcttctccatatttgaattacgtgggtagttacgttgaggttaacatgcaaaaaagacgtgccattgcagaatataagctatctgaatatgcgagacaagatagtaaaaataacttgcatgtgggctccaggtctgtccctttgacgctgactgtcttcccgaggatgggatgccccgactttattaacattaaggatccgtggaatcataaaaatgccgcttccaggtctctgtttttacccgatgaagtcattaacagacatgtcaggtttcctaacttgacagcatccatcaggaccaggcgtggtgaaaaagtttgcatgaatgttcccatgtataaagatatagctactccagaaacggatgactccatctacgatcgagattggtttttaccagaagacaaagaggcgaaactggcttccaaaccgggtttcatttatatggattccatgggttttggcatgggctgttcgtgcttacaagtgacctttcaggcacccaatatcaacaaggcacgttacctgtacgatgcattagtgaattttgcacctataatgctagccttctctgccgctgcgcctgcttttaaaggttggctagccgaccaagatgttcgttggaatgtgatatctggtgcggtggacgaccgtactccgaaggaaagaggtgttgcgccattactacccaaatacaacaagaacggatttggaggcattgccaaagacgtacaagataaagtccttgaaataccaaagtcaagatatagttcggttgatcttttcttgggtgggtcgaaatttttcaataggacttataacgacacaaatgtacctattaatgaaaaagtattaggacgactactagagaatgataaggcgccactggactatgatcttgctaaacattttgcgcatctctacataagagatccagtatctacattcgaagaactgttgaatcaggacaacaaaacgtcttcaaatcactttgaaaacatccaaagtacaaattggcagacattacgttttaaaccccccacacaacaagcaaccccggacaaaaaggattctcctggttggagagtggaattcagaccatttgaagtgcaactattagattttgagaacgctgcgtattccgtgctcatatacttgattgtcgatagcattttgaccttttccgataatattaacgcatatattcatatgtccaaagtatgggaaaatatgaagatagcccatcacagagatgctatcctatttgaaaaatttcattggaaaaaatcatttcgcaacgacaccgatgtggaaactgaagattattctataagcgagattttccataatccagagaatggtatatttcctcaatttgttacgccaatcctatgccaaaaagggtttgtaaccaaagattggaaagaattaaagcattcttccaaacacgagagactatactattatttaaagctaatttctgatagagcaagcggtgaattgccaacaacagcaaaattctttagaaattttgtactacaacatccagattacaaacatgattcaaaaatttcaaagtcgatcaattatgatttgctttctacgtgtgatagacttacccatttagacgattcaaaaggtgaattgacatcctttttaggagctgaaattgcagaatatgtaaaaaaaaataagccttcaatagaaagcaaatgttaa

SEQ ID NO: 5936 - DNA, 2037 bp, Artificial Sequence
  Description of Artificial Sequence: Synthetic polynucleotide
atgggactcttagctttgggcacgcctttgcagtggtttgagtctaggacgtacaatgaacacataagggatgaaggtatcgagcagttgttgtatattttccaagctgctggtaaaagagacaatgaccctcttttttggggagacgagcttgagtacatggttgtagattttgatgataaggagagaaattctatgctcgacgtttgccatgacaagatactcactgagcttaatatggaggattcttccctttgtgaggctaacgatgtgagttttcaccctgagtatggcagatatatgttagaggcaacaccagcttctccatatttgaattacgtgggtagttacgttgaggttaacatgcaaaaaagacgtgccattgcagaatataagttatctgaatatgcgagacaagatagtaaaaataacttgcatgtgggctccaggtctgtccctttgacgttgactgtcttcccgaggatgggatgccccgactttattaacattaaggatccgtggaatcataaaaatgccgcttccaggtctttatttttacccgatgaagtcattaacagacatgtcaggtttcctaacttgacagcatccatcaggaccaggcgtggtgaaaaagtttgcatgaatgttcccatgtataaagatatagctactccagaaacggatgactccatctacgatagagattggtttttaccagaagacaaagaggcgaaattggcttccaaaccgggtttcatttatatggattccatgggttttggcatgggctgtagttgcttacaagtgacctttcaggcacccaatatcaacaaggcacgttacttgtacgatgcattagtgaattttgcacctataatgttggccttctctgccgctgcgcctgcttttaaaggttggttggccgaccaagatgttcgttggaatgtgatatctggtgcggtggacgaccgtactccgaaggaaagaggtgttgcgccattattgcccaaatacaacaagaacggatttggaggcattgccaaagacgtacaagataaagtccttgaaataccaaagtctagatatagttctgttgatcttttcttgggtgggtctaaatttttcaataggacttataacgacacaaatgtacctattaatgaaaaagtattaggaagattattggagaatgataaggcgccattggactatgatcttgctaaacattttgcgcatctctacataagagatccagtatctacattcgaagaattattgaatcaggacaacaaaacgtcttccaatcactttgaaaacatccaaagtacaaattggcagacattacgttttaaaccccccacacaacaagcaaccccggacaaaaaggattctcctggttggagagtggaattcagaccatttgaagtgcaattattagattttgagaacgctgcgtattccgtgctcatatacttgattgtcgatagcattttgaccttttccgataatattaacgcatatattcatatgtccaaagtatgggaaaatatgaagatagcccatcacagagatgctatcttatttgaaaaatttcattggaaaaaaagttttcgcaacgacaccgatgtggaaactgaagattattctataagcgagattttccataatccagagaatggtatatttcctcaatttgttacgccaatcctttgccaaaaagggtttgtaaccaaagattggaaagaattaaagcattcttccaaacacgagagattatactattatttaaagttgatttctgatagagcaagcggtgaattgccaacaacagcaaaattctttagaaattttgtattacaacatccagattacaaacatgattctaaaatttccaagtctatcaattatgatttgctttctacgtgtgatagacttacccatttagacgattctaaaggtgaattgacatcctttttaggagctgaaattgcagaatatgtaaaaaaaaataagccttccatagaaagcaaatgttga

SEQ ID NO: 5937 - DNA, 1824 bp, Saccharomyces cerevisiae
atgagtaacgaagcttaccagcatgatcataccgtaaatcctcaccagaagatagttgtgaacagctacgattggttacagttccgtgatgagcaagatcactgtaaaagtaagaacccgataacgcacgcttctccaggggtcggttcgaatgcacagaattcagacatagcggaggcccctcaggtattccacccttcctatcaatctctggtcaacgtaccgtccgagagcccgcgacctgatcagacttcagggtccaatcctgccgttggactgcttcataatgcagaggacaaagcgtcagggcaagaagaagaaggaagtcaatatgagattcaatattcggtatttcgtccgctgcatgcatatccaaccaagggcctagcatatgagcagctccgaagaaaagaagaacaagaacagagggaaaacttcaaccatttggtttctgactgtattgaggctgtagagacatttggacgcgaactcgagagaatccaaactggctcaagtgggtcgtactttgtgtatggaacacgggccgacgaaagcgttccggtgggggtcttcaagcccaaggatgaggaaccatatggcccattttctcccaaatggaccaaatgggcacaccgcacgtttttcccatgtctgtttggcagaagttgtctgattccaaacctcgggtacatctgtgaaagtgcggctagtttgttggataggcgactggaaacgcatctagtaccctatacagatactgcatctatagagtcttttaatttttatgataatagaaaaaaatgggtattgggatacaaccttcagaagaagaaacaaaaaaagctgggttctttccaactttttttgaaggagtacatcaacgccgatgagttctttcataaatacccattacctgggatgtattcagatgttaaacattcatttcatcgtaagtcatccggcgaagatatcaatcataaaccagagacaaccaggaacctaacagatgagacagaaccgtccaagcaaataaattcctctccaatttcgacggaatctgaagaaaattcgaaatttgaatggacagaatcaagtttgagtcagttcagattggaactagaaaaactaattatccttgattatataatgagaaacacagatagaggtctagacaattggatggtgaaactaatcaaactttcaaacaataagtggagactcaagttagccgccatcgacaatgggttgtcctttccctggaagcatcctgatgagtggcgtctgtacccatatggctggttgtatttgcctctgcaactactagccaaaccattttctgagcaaatgagatctcatttcctaccgatattgacaagcactaattggtgggaagagtcgtaccaagaattcttggccctatttagcagggaccaagattttaacgtccgaatgtggaagaagcaatgggcagtattaaaaggacaggcgttcaacgttgtcgaaacattgaaagacccacgacaaggccccttggaattggttagaaggacaaggtgccaggtaatagatgagaagatgcaagttccctgttgcccacctccagtttctattttcaaaaacgccatagacgaacctattggatcatattccacttcaccaatggtactccctagcaccccaagcacaattccatttcatgcacataaccaaagcaatagtaatcctgtatactatgattccactctgcacccatttgctaataaaacagtgatagcagagcggctacaaatagtcaattccacccccgtattcacctggtgttga

SEQ ID NO: 5938 - DNA, 1824 bp, Artificial Sequence
  Description of Artificial Sequence: Synthetic polynucleotide
atgagtaacgaagcttaccagcatgatcataccgtaaatcctcaccagaagatagttgtgaacagctacgattggttacagttccgtgatgagcaagatcactgtaaaagtaagaacccgataacgcacgcttctccaggggtcggtagtaatgcacagaatagtgacatagcggaggcccctcaggtattccacccttcctatcaatctttggtcaacgtaccgtccgagagcccgagacctgatcagacttctgggtccaatcctgccgttggattgcttcataatgcagaggacaaagcgtctgggcaagaagaagaaggaagtcaatatgagattcaatattctgtatttcgtccgcttcatgcatatccaaccaagggcttggcatatgagcagctcagaagaaaagaagaacaagaacagagggaaaacttcaaccatttggtttctgactgtattgaggctgtagagacatttggacgcgaactcgagagaatccaaactggctccagtgggtcttactttgtgtatggaacaagagccgacgaaagcgttccggtgggggtcttcaagcccaaggatgaggaaccatatggcccattttctcccaaatggaccaaatgggcacaccgcacgtttttcccatgtttatttggcagaagttgtttaattccaaacctcgggtacatctgtgaaagtgcggctagtttgttggataggaggttagaaacgcatttggtaccctatacagatactgcatctatagagtcttttaatttttatgataatagaaaaaaatgggtattgggatacaaccttcagaagaagaaacaaaaaaagttgggttctttccaactttttttgaaggagtacatcaacgccgatgagttctttcataaatacccattacctgggatgtattctgatgttaaacattcttttcatcgtaagtcttccggcgaagatatcaatcataaaccagagacaaccaggaacttaacagatgagacagaaccgtccaagcaaataaattcctctccaatttctacggaatctgaagaaaattctaaatttgaatggacagaaagtagtttgagtcagttcagattggaattggaaaaattgattatccttgattatataatgagaaacacagatagaggtttggacaattggatggtgaaattaatcaaactttccaacaataagtggagactcaagttagccgccatcgacaatgggttgtcctttccctggaagcatcctgatgagtggcgtctttacccatatggctggttgtatttgcctttacaattattagccaaaccattttctgagcaaatgagatctcatttcttgccgatattgacaagcactaattggtgggaagagagttaccaagaattcttggccttatttagcagggaccaagattttaacgtcagaatgtggaagaagcaatgggcagtattaaaaggacaggcgttcaacgttgtcgaaacattgaaagacccaagacaaggccccttggaattggttagaaggacaaggtgccaggtaatagatgagaagatgcaagttccctgttgcccacctccagtttctattttcaaaaacgccatagacgaacctattggatcctattccacttctccaatggtactccctagcaccccaagcacaattccatttcatgcacataaccaaagcaatagtaatcctgtatactatgattccactttgcacccatttgctaataaaacagtgatagcagagagattacaaatagtcaattccacccccgtattcacctggtgttga

SEQ ID NO: 5939 - DNA, 2241 bp, Saccharomyces cerevisiae
atgaatttgttttggccatcggaaaccaaaaagcaaaatgaaatacctggtggcgattatacacctgggaactcaccttcagtacaaaagggttatcaattcctcaatcgagacatatttaaaagttgtccacgaattatggaaaggcagtttggtgagtgtctgcacaatagaacgcatttaatcaaggatttaatttcttctggcaatgttggactaggtcccattgagattgttcacatgtcctacttaaacaaacatgaaaaagaagagtttggtgaatatttctacgttacagggatcgaagtttccggtcctgcaatgcccgtagagtttcttgaagtgctaaaatcgagtaagcggatttccaaaaatatatcgaataatatcatattgacttattgctgttttaattttttcagcaatctagacatccgtattagatacgatgctgacgatactttccagacaacggcaattgactgtaacaaggaaaccactgacctgaccatgacagaaaaaatgtgggaagaaacgttcgcaagttctgtcatccgagcgataataacaaatactaatccagagttaaaacctcccggtttagtagagtgtccattctacgttggaaaagatactatctcctcttgcaaaaagatcatagaattactctgccgattcttaccacggtcactgaattgcgggtgggattctaccaagagtatgcaagccaccattgtcaataactatttaatgtatagtttaaaaagttttattgcaatcacgccaagcctagtggattttacaatcgactacctgaaaggacttaccaagaaagatccaatccatgacatatactacaagacggctatgatcacaattctagatcacatagaaacaaaggagttagacatgataactattttaaatgagacgctcgacccccttttatctctgctaaatgatttaccgcctcgcgatgctgattcagcacgattaatgaattgcatgagtgacttgctgaacattcaaacaaattttttgttaaacaggggtgattacgaactagcattaggcgtctctaacacatcaaccgaactagccttagactcttttgaatcttggtacaacctagcgagatgccacatcaaaaaagaggagtatgaaaaggctctcttcgcaataaattcaatgcctcgtttgcgcaaaaatgatggacacctggaaacaatgtacagtaggtttcttacctccaattattataaaaagccattgaatggtacccgcgaacactacgacttgactgcaatggaattcacgaatctctcgggaacgttgaggaattggaaagaggatgagttaaaacggcaaatttttggaagaatcgcaatgataaacgaaaaaaaaatcggttatacaaaggaaatctgggatgatattgcgataaagttgggtccgatttgtggtccacaatctgtgaatctgattaattatgtctcccctcaagaggtcaaaaacataaaaaatatcaatttaatagcaaggaatacgatcggcaaacaattgggatggtttagtggtaaaatatatgggttattaatggaaattgtgaacaaaattggttggaatggcttattaaacatccgaacagaagctttcatgatggaaactgaattctatcaagcttctaacaacattatcgatgaaaacggtcatataccgatggaatcccgaaagaaaaggttttgtgaagggtggctagatgatttatttttagatttatatcaagacttgaaattgagcaagattagcctaagcaataaagatgaaaaacacagcggattagagtgggaacttttgggtttgatcatgctgcgtacctggcattgggaagatgccgtagcttgtctaagaacaagcatagtagctcgattcgaccccgtaagttgccagcagctgctaaaaatatacctgcaacctccaaaaaatattcaagaggttacattactagacacagataccataataagtttattaattaagaaaatatcatatgattgcaggtattataattattgccagatatttaatctgcaactgctagaaaagctatgcaacgaattggggacgcatatactgcgtaataagatccttcttcaaccttccataggagacgaaatcatggtcatgatcgatgccatgcttgcgtggatagccgacctagatcacacagtacaaccttga

SEQ ID NO: 5940 - DNA, 2241 bp, Artificial Sequence
  Description of Artificial Sequence: Synthetic polynucleotide
atgaatttgttttggccatctgaaaccaaaaagcaaaatgaaatacctggtggcgattatacacctgggaactctccttctgtacaaaagggttatcaattcctcaatagagacatatttaaaagttgtccaagaattatggaaaggcagtttggtgagtgtttgcacaatagaacgcatttaatcaaggatttaatttcttctggcaatgttggattaggtcccattgagattgttcacatgtcctacttaaacaaacatgaaaaagaagagtttggtgaatatttctacgttacagggatcgaagtttccggtcctgcaatgcccgtagagtttcttgaagtgttgaaatctagtaagagaatttccaaaaatatatccaataatatcatattgacttattgctgttttaattttttcagcaatttggacatccgtattagatacgatgctgacgatactttccagacaacggcaattgactgtaacaaggaaaccactgacttgaccatgacagaaaaaatgtgggaagaaacgttcgcaagttctgtcatccgtgcgataataacaaatactaatccagagttaaaacctcccggtttagtagagtgtccattctacgttggaaaagatactatctcctcttgcaaaaagatcatagaattactctgccgtttcttaccaagatctttgaattgcgggtgggattctaccaagagtatgcaagccaccattgtcaataactatttaatgtatagtttaaaaagttttattgcaatcacgccaagcttggtggattttacaatcgactacttgaaaggacttaccaagaaagatccaatccatgacatatactacaagacggctatgatcacaattttagatcacatagaaacaaaggagttagacatgataactattttaaatgagacgctcgacccccttttatctttattgaatgatttaccgcctcgcgatgctgattctgcaagattaatgaattgcatgagtgacttgttgaacattcaaacaaattttttgttaaacaggggtgattacgaattggcattaggcgtctctaacacatctaccgaattggccttagactcttttgaatcttggtacaacttggcgagatgccacatcaaaaaagaggagtatgaaaaggctctcttcgcaataaattctatgcctcgtttgcgcaaaaatgatggacacttggaaacaatgtacagtaggtttcttacctccaattattataaaaagccattgaatggtacccgcgaacactacgacttgactgcaatggaattcacgaatctctctggaacgttgaggaattggaaagaggatgagttaaaaagacaaatttttggaagaatcgcaatgataaacgaaaaaaaaatcggttatacaaaggaaatctgggatgatattgcgataaagttgggtccgatttgtggtccacaatctgtgaatttaattaattatgtctcccctcaagaggtcaaaaacataaaaaatatcaatttaatagcaaggaatacgatcggcaaacaattgggatggtttagtggtaaaatatatgggttattaatggaaattgtgaacaaaattggttggaatggcttattaaacatcagaacagaagctttcatgatggaaactgaattctatcaagcttctaacaacattatcgatgaaaacggtcatataccgatggaatccagaaagaaaaggttttgtgaagggtggcttgatgatttatttttagatttatatcaagacttgaaattgagcaagattagcttgagcaataaagatgaaaaacacagcggattagagtgggaacttttgggtttgatcatgcttcgtacctggcattgggaagatgccgtagcttgtttgagaacaagcatagtagctagattcgaccccgtaagttgccagcagttgttgaaaatatacttacaacctccaaaaaatattcaagaggttacattattagacacagataccataataagtttattaattaagaaaatatcttatgattgcaggtattataattattgccagatatttaatttacaattattggaaaagttgtgcaacgaattggggacgcatatattacgtaataagatccttcttcaaccttccataggagacgaaatcatggtcatgatcgatgccatgcttgcgtggatagccgacttggatcacacagtacaaccttga

SEQ ID NO: 5941 - DNA, 3177 bp, Saccharomyces cerevisiae
atgtcagggtccttttggaagtttggacaagattttggttcacagtctccattagctaaactgttgaacagggctttcattaagatcgatgataagcccactagtacggaagcagggaaaattgactctaatagcacagatgaaagtttagaaagcaattcttttaaatcagaagacgaagaagaagaatatgagctgcctaacagagaagaagactacaaagcttataagccaaacctgtctctactgaatgatcttttagatgatgaggagttatatacagaactgatgtgctcgaacttcaagctactagtgtacttgaagtaccctgaagttttgtccaaattgatagattatgtcagaaatagtaccatacttgagtccaatattgatagagttacttcagaagacagagatttagtacgtggtgaagacaaggacacaacggaggactttgagaatgctaaagcagataagaaaaacattgatggtacttttgaagaaaaagaacgtactcgtagtggtgaagaagaggaactggaaaatgaagaaaatgatagtgcatctgaggatactagagtcactctacctcatgaactagaggaacatgatgatacgcgaagagccagaatagcggccgaaatattgtccgctgacgtgtggcccatatcatctgctttgattgaaaacgaaggacttctcgctaagctttggtcgatcctcaggctaccttctccattgtcaattgaagcgtcaacatattttatgaaaataaacgaacgcctcttggatatgaatatggacggaataattgaattcatattaaaaaaggaacacattgttgacgattttttagcacatatagataatccgcctttgatggattttttattaaaagtaatatcgaccgataagccagaaatatcaaatggagttatacaactgtttaaaaaacagaacttggttccaaagttgattcatttactcgatcctgtttttgattcttgcacacaatctgcagccggtgattttctgaaagctctggttactattagcggtaactgtcctaatgagattacttcgagcatagggcctaatgaattaacaaggcaattagtttctccaaatatgatgaaacaacttatggatataatgctcaagggaggcaattcgttaaataatggcgttggcattatcattgagctgataaggaaaaacaattctgattatgataccatacaaacaaattatactaccatagaatctcatccgccaacagatagagacccaatttatttaggatatttggttaaaatgttttctgaacacatggccgatttcaacaaaatactaactgagaagaagattccccttttacagacgtcctatggaacgattgaaccgttgggatttgaaaggtttaagatctgtgaacttattgctgaactattacactgctcaaacatgactttattgaatgaaccgagtgcctatgacattgtaagagagcgtgatgccgaaagagagagaatcttcaattcacaaaattacgtagattctaacgatcgtagtgaattaaaagaaaatgaagacgacaatacaggtgatgctgatgatgaagtggaagatgatacaaatcaggtagaatccgctaatacctccattgatggtgaagaagttatcgataagttaaattctttacagatagaaaccaacaaagtaaaccagaacatgaataatgaagagcaacatagtttaatgccagacttcaacaatggtgattttaaggacgaggaagatgaaaatccatttgaaccccaatattcagacgtcattttggattcttctgatatagaaaaaaactttcgtgtgtctcccaacgttggagatcagctgaaaatcagtttacaagataccagagtaatagatactatgctcgaaatgttttttcacttccagtggaacaatttccttcataacgtagtgtacgatgttgttcagcagatttttaacggtcccctcaaaataggttataataggttccttttagatgatctcctaatcaacatccgtttaactgatatgattattaacggaaacaatgaatgcatagaatatgagaaaggacatgacaccaggcttggatatatgggccatttgaccctaattgcggaagaagtcaccaaatttactgcatatattgaagagatgaacatcacctttgaaaatactgaagtaatgagttctttatttgagagtaaatggattgcctatacggaggatgttctagaggatctaaaggagaaatacaacgccatattaggcgatatagctgaagaaggagacatgttgcaagatgaagaagaggatgctgtatacgacaagggagagcgcactatgggtacagtcgatgactacattaatgacataatgcaaatggacaatgtacggtgtcaagaggaggaagaggatgaaggagaagggtatgtcagctttgatgaagatgaaccccaagaatatcgtaatggtgattccgttagaagcaaagaatcgaattcatcagaaggcaaacgtgaccaagagcagctttactatgagtacgttaacgaagatggtacaaaaacaagattaaacttcaatcctgattctgacgccacggaacaagttccaggtgaagtgaatcgcgatcataagataccattgaagcttaagcgaagttttacggatgcatgcaaatctgaaacaataccaaataatacagttaatgctaaggaagaaagtgtatttcaatttagcaatgaacttagtgacggctgggagtcatcaccttctaattctatacccaagcgtgcttctccatcaaaaaatggcatgaattcacctatgtttcaacaccagtttgaacttcatagccccaccgatgaatttggaggtcataaagacgaaatattaagcgcggaaggccatgactacgacatagatgaatacgatgaactgagcgatgacagtgatgaagagtatgataactgtgaagacgaagacagtttggattatgctgattccgccgcatatgcattgtgtagatccaaaagtaaggacaagatatcatgggatgaagaagaacaggcgcgattaatgggcgttgtaaaatttaattcagagcattacagggactag

SEQ ID NO: 5942 - DNA, 3177 bp, Artificial Sequence
  Description of Artificial Sequence: Synthetic polynucleotide
atgagtgggtccttttggaagtttggacaagattttggttctcagtctccattagctaaacttttgaacagggctttcattaagatcgatgataagcccactagtacggaagcagggaaaattgactctaatagcacagatgaaagtttagaaagcaattcttttaaaagtgaagacgaagaagaagaatatgagcttcctaacagagaagaagactacaaagcttataagccaaacttatctttattgaatgatcttttagatgatgaggagttatatacagaattgatgtgcagcaacttcaagttattggtgtacttgaagtaccctgaagttttgtccaaattgatagattatgtcagaaatagtaccatacttgagtccaatattgatagagttacttctgaagacagagatttagtacgtggtgaagacaaggacacaacggaggactttgagaatgctaaagcagataagaaaaacattgatggtacttttgaagaaaaagaacgtactcgtagtggtgaagaagaggaattggaaaatgaagaaaatgatagtgcatctgaggatactagagtcactttacctcatgaattagaggaacatgatgatacgagaagagccagaatagcggccgaaatattgtccgctgacgtgtggcccatatcttctgctttgattgaaaacgaaggacttctcgctaagctttggtctatcctcaggttgccttctccattgtctattgaagcgtctacatattttatgaaaataaacgaacgcctcttggatatgaatatggacggaataattgaattcatattaaaaaaggaacacattgttgacgattttttagcacatatagataatccgcctttgatggattttttattaaaagtaatatctaccgataagccagaaatatccaatggagttatacaattatttaaaaaacagaacttggttccaaagttgattcatttactcgatcctgtttttgattcttgcacacaatctgcagccggtgattttttgaaagctttggttactattagcggtaactgtcctaatgagattacttccagcatagggcctaatgaattaacaaggcaattagtttctccaaatatgatgaaacaacttatggatataatgctcaagggaggcaattctttaaataatggcgttggcattatcattgagttgataaggaaaaacaattctgattatgataccatacaaacaaattatactaccatagaatctcatccgccaacagatagagacccaatttatttaggatatttggttaaaatgttttctgaacacatggccgatttcaacaaaatattgactgagaagaagattccccttttacagacgtcctatggaacgattgaaccgttgggatttgaaaggtttaagatctgtgaacttattgctgaattattacactgcagcaacatgactttattgaatgaaccgagtgcctatgacattgtaagagagcgtgatgccgaaagagagagaatcttcaattctcaaaattacgtagattctaacgatcgtagtgaattaaaagaaaatgaagacgacaatacaggtgatgctgatgatgaagtggaagatgatacaaatcaggtagaatccgctaatacctccattgatggtgaagaagttatcgataagttaaattctttacagatagaaaccaacaaagtaaaccagaacatgaataatgaagagcaacatagtttaatgccagacttcaacaatggtgattttaaggacgaggaagatgaaaatccatttgaaccccaatattctgacgtcattttggattcttctgatatagaaaaaaactttcgtgtgtctcccaacgttggagatcagttgaaaatcagtttacaagataccagagtaatagatactatgctcgaaatgttttttcacttccagtggaacaatttccttcataacgtagtgtacgatgttgttcagcagatttttaacggtcccctcaaaataggttataataggttccttttagatgatctcttgatcaacatccgtttaactgatatgattattaacggaaacaatgaatgcatagaatatgagaaaggacatgacaccaggcttggatatatgggccatttgaccttgattgcggaagaagtcaccaaatttactgcatatattgaagagatgaacatcacctttgaaaatactgaagtaatgagttctttatttgagagtaaatggattgcctatacggaggatgttttggaggatttgaaggagaaatacaacgccatattaggcgatatagctgaagaaggagacatgttgcaagatgaagaagaggatgctgtatacgacaagggagagcgcactatgggtacagtcgatgactacattaatgacataatgcaaatggacaatgtaagatgtcaagaggaggaagaggatgaaggagaagggtatgtcagctttgatgaagatgaaccccaagaatatcgtaatggtgattccgttagaagcaaagaaagtaattcttctgaaggcaaacgtgaccaagagcagctttactatgagtacgttaacgaagatggtacaaaaacaagattaaacttcaatcctgattctgacgccacggaacaagttccaggtgaagtgaatcgcgatcataagataccattgaagcttaagagaagttttacggatgcatgcaaatctgaaacaataccaaataatacagttaatgctaaggaagaaagtgtatttcaatttagcaatgaacttagtgacggctgggagtcttctccttctaattctatacccaagcgtgcttctccatctaaaaatggcatgaattctcctatgtttcaacaccagtttgaacttcatagccccaccgatgaatttggaggtcataaagacgaaatattaagcgcggaaggccatgactacgacatagatgaatacgatgaattgagcgatgacagtgatgaagagtatgataactgtgaagacgaagacagtttggattatgctgattccgccgcatatgcattgtgtagatccaaaagtaaggacaagatatcttgggatgaagaagaacaggcgagattaatgggcgttgtaaaatttaattctgagcattacagggactga

SEQ ID NO: 5943 - DNA, 654 bp, Saccharomyces cerevisiae
atgtcaaaaaaacttgcgtcaccattgtccttcttacccctttataatttgctttctgctgttggttggtcttatttgctttacttggtcatctccttgtacccaaaagttggacagccagcattcttctaccaaactaaaaatgtcgctacccttgttcaatgtggtgctataatcgagatcataaactcatttttaggagttgtacgttccccattgctgaccactgttgcacaagtgtcttcaagactactagttgtcctcggcatcttccaattgttgccaaacacaagtggtgttcaatcagttgtttacatatcattattactggcatggtctataactgagatcgtcagatacttgtattattttttcatgttggtattcaagaatggcgcaccaaagatcttaattctattaagatataatttgttctggattttgtaccccactggtgttgccagcgaactacgcattatttactgtgctttaaatgcagctgaatctcagtattctttactttacaaaagaattttaatagcggccatgctcgcttatatcccaggcttcccaatgctcttcctacacatggtagcacagagaaagaaagtcatgaaaagtttaagatcctctttcgggaagaaactaatttga

SEQ ID NO: 5944 - DNA, 654 bp, Artificial Sequence
  Description of Artificial Sequence: Synthetic polynucleotide
atgtccaaaaaacttgcgtctccattgtccttcttacccctttataatttgctttctgctgttggttggtcttatttgctttacttggtcatctccttgtacccaaaagttggacagccagcattcttctaccaaactaaaaatgtcgctacccttgttcaatgtggtgctataatcgagatcataaactcttttttaggagttgtacgttccccattgttgaccactgttgcacaagtgtcttctagattattggttgtcctcggcatcttccaattgttgccaaacacaagtggtgttcaatctgttgtttacatatctttattattggcatggtctataactgagatcgtcagatacttgtattattttttcatgttggtattcaagaatggcgcaccaaagatcttaattttattaagatataatttgttctggattttgtaccccactggtgttgccagcgaattacgcattatttactgtgctttaaatgcagctgaatctcagtattctttactttacaaaagaattttaatagcggccatgctcgcttatatcccaggcttcccaatgctcttcttgcacatggtagcacagagaaagaaagtcatgaaaagtttaagatcctctttcgggaagaaattgatttga

SEQ ID NO: 5945 - DNA, 486 bp, Saccharomyces cerevisiae
atgctacaactgaaattcatatggccagtggccagaatcacacctatttataggccatttaccagtcatccattcagaaatttagctacttcctcaagcatcagtagtacaaaagctaagactactaagacagatacaactccactaaaattatcaaatgaactatatgcaatattcaagattcataatcgtccatatttggtgaccgagggcgacagagttattcttccattcaaattgaagcaagcggaggtgggtgacattttaaacatgaccgatgtaacaactttaggatctagaaactacaagctagttggtcatccaatcaatacttctctgtatactttaaaagcaaccgttgttgggaaaactaaaagggctttccaaactagggaggtaacgaagagaagaaatagacgggtccgtcatgcaaagagtaaaggtgatttgacaatcttaagaatatcagaactgagtatgaactga

SEQ ID NO: 5946 - DNA, 486 bp, Artificial Sequence
  Description of Artificial Sequence: Synthetic polynucleotide
atgttacaattgaaattcatatggccagtggccagaatcacacctatttataggccatttaccagtcatccattcagaaatttagctacttcctctagcatcagtagtacaaaagctaagactactaagacagatacaactccattgaaattatccaatgaattgtatgcaatattcaagattcataatcgtccatatttggtgaccgagggcgacagagttattcttccattcaaattgaagcaagcggaggtgggtgacattttaaacatgaccgatgtaacaactttaggatctagaaactacaagttggttggtcatccaatcaatacttctttgtatactttaaaagcaaccgttgttgggaaaactaaaagggctttccaaactagggaggtaacgaagagaagaaatagaagagtccgtcatgcaaagagtaaaggtgatttgacaatcttaagaatatctgaattaagtatgaactga

SEQ ID NO: 5947 - DNA, 4437 bp, Saccharomyces cerevisiae
atgccctttttgaggaaaatagcggggacagcacatacacattctaggtctgattcgaactcatctgtgaaattcggccatcagccgactagttcggtagcatcaaccaaaagttcaagcaaaagccctcgtgcaacatctcgcaaaagcatttatgatgatattagaagccaatttcccaacctaacccccaactctacctcttctcagttttacgaaagcacgccagttatcgaacaatcctttaattggacgacagatgaccacatctcagctggaacgcttgaaaacccaacgagctttacaaacagttcttataaaaatgacaatggacctagtagcctctctgattcgaggaaatcctccggtggcaatagcgtaaatagtttgtcctttgacaagctaattctatcgtgggatcctacagaccctgatgaatggacaatgcatcgcgtcacctcatggtttaaatttcatgattttccagaatcctggatattgtttttcaaaaagcatcaattgtttggtcacagatttataaagttgcttgcatatgataatttcgctgtttatgaaaagtatttgccgcagactaaaactgcttcatataccaggtttcagcagttattgaaaaaaacaatgaccaagaacgtaacaaatagccatattcgtcagaagagcgctagcaaacttaaaagttccaggtcttccagcgaatcgatcaaatcaaaattaaaaaatagtaaatcgcaagaggatatttcaaattctagatcaacgtcagaatctgcattgagcccaacaaaatcgggcccttccaagaccgatgaaaagaattttttacattctacttcaacacaccaaaaaaccaaaagcgcaagttcactatacagaagaagttttatatccctaagaggctcatcatcgagcaatgcttcctcagcaaaatcaccttcaaacatcaagttaagtataccggctcggccgcactcaattattgaatctaacagtacacttaccaaatcggcgagcccacctgcatctccttcgtatcctagcatatttagaagacatcacaaaagtagttcatctgagtcgtcattattaaattccctttttggtagtggaataggcgaggaagctccaacaaagcctaatccacaaggtcatagtctgtctagtgaaaatttagctaaaggaaaatctaaacactatgaaactaatgtgtcttcacctttaaaacaatcttcactacccacttcggatgataaaggtaatttatggaataaattcaaaagaaagagccaaataggggttcctagcccaaatacggtagcttatgtaacgtctcaagaaactccatccttaaaatcgaattcgagtactgctaccttaaccgtacaaacggcagatgtaaatataccatctccatcttcatcaccaccgccaatacccaaaactgcaaacagaagtttggaggtcatcagcacagaagatacacctaaaatttcttcaaccacggcgtcttttaaagaaacgtatcctgattgtattaatccagacaagacagttccagtgccggtaaataatcaaaagtatagtgtaaagaactttttactggaccaaaaattttatcctctgaagaaaacagggttaaatgatagtgagaataaatatattctggttaccaaagataatgttagttttgttccgctaaacttaaaaagtgtagcaaaattatccagtttcaaagaatctgctctcacaaaattgggaatcaatcacaaaaatgtcactttccatatgacagactttgattgcgatattggtgctgcaattccagatgatactttggaatttttgaaaaaaagcttgtttttgaacacttctggaaaaatttatatcaaagaccaaatgaagcttcaacaaaaaccgaaacctgctcctctcacctcagaaaacaatgttcctttaaaatcggtgaaaagtaagagttcaatgaggtccggaacaagcagtctgatagcatcgacagatgatgtttccattgtcacttcgtcttctgacataacatcatttgatgaacatgcatcaggaagtgggcgcaggtacccccaaaccccgagttattactatgacagagtttccaatactaatccaactgaagaattgaattattggaatattaaagaagttctttctcatgaggaaaatgcaccaaaaatggtttttaaaacaagtccaaaattagaactcaacctaccagataaaggaagtaaattaaatattcctacccccataacagaaaatgaaagcaagagtagttttcaagtgctaagaaaagatgaggggactgaaattgatttcaatcatcgtagggaatcgccttatacaaaaccagaactggcaccaaaaagagaagctcccaagcctcccgcaaatacttctcctcagaggaccttatcaacttctaaacagaataaaccgatccgcctagtgagggcaagtacaaaaatttcgagaagcaaaagatcgaaaccattgccgccacaattattatcatctcctatagaagctagcagctcgtctcctgattcgcttacttcctcatatactcctgcttcgactcatgttttgataccgcaaccttataagggtgcaaacgatgttatgcgtaggttgaaaacagaccaggactcgacgagtacttccccatctttgaaaatgaaacagaaagtgaatcgctcaaattcaactgtatcgacttcaaattcaattttctattctccttcaccattgttaaaaagaggtaactcaaaaagagttgtttcgtcgacatctgcggccgatatatttgaagagaatgacataacattcgcggatgctccgccgatgtttgacagcgatgatagtgatgacgattctagttcatccgatgacattatctggtccaagaaaaaaacagctcctgagactaataatgaaaacaaaaaggatgagaaaagcgataacagttctacgcattctgacgaaatattctatgattctcaaacgcaggacaaaatggagagaaagatgacctttagaccatctccggaggtcgtttatcaaaatttagagaaattcttcccaagggctaacttagataagccaatcactgaaggaatagcttcaccaacatctccgaaatccttagacagcctactttcaccaaagaatgtggcttcatcgagaactgagccaagcactccttcccgtcccgtccctcctgatagctcatacgagttcatacaggatggacttaacggtaaaaataaaccattgaatcaagctaagacacctaaaagaacaaaaaccataagaaccattgcacatgaagctagtttagcaagaaaaaactctgtaaaactaaaaagacagaacaccaaaatgtggggtacaagaatggtcgaagtgaccgaaaaccatatggtgtcaattaataaagccaaaaattcgaaaggtgagtataaggaattcgcctggatgaagggtgaaatgatagggaagggatctttcggtgctgtttatttatgtttaaacgttactacaggtgagatgatggccgttaagcaggttgaggtccccaagtatagctcacaaaatgaagccattctaagtaccgtggaagcattaagatctgaagtgtccacgttaaaagatttagatcatcttaatattgttcaatacttaggttttgagaataaaaacaatatttacagtttgtttttagaatatgttgctggtggctccgtgggatccttgattagaatgtatggaagattcgatgaaccgttgatcaaacatttaacaacacaagtattaaaaggattggcatacctacactcgaaaggtattctccacagggatatgaaggcagacaacttacttttggatcaagatggtatctgcaaaatcagtgacttcggaatttcaagaaaatcaaaggacatatactctaattcggatatgaccatgcgaggaacagtcttctggatggctcctgaaatggttgatacaaagcaaggctacagtgcaaaagttgatatatggtctctgggatgcatcgttctggaaatgtttgctggtaagcgcccgtggtccaacttagaagtcgtcgcagccatgttcaaaattggaaagtcaaaatcggcaccaccaattcctgaggacactttaccattgatatcgcaaatcggacgaaattttctggacgcatgcttcgagataaatccagagaaaaggccaaccgctaacgagcttctttctcatccttttagtgaagtaaatgaaacattcaatttcaaatctaccagactcgcgaagtttataaagtcaaatgataagttaaactcttcaaaattaaggataacctctcaggagaataaaactgaatag

SEQ ID NO: 5948 - DNA, 4437 bp, Artificial Sequence
  Description of Artificial Sequence: Synthetic polynucleotide
atgccctttttgaggaaaatagcggggacagcacatacacattctaggtctgattccaactcttctgtgaaattcggccatcagccgactagttctgtagcatctaccaaaagtagtagcaaaagccctcgtgcaacatctcgcaaaagcatttatgatgatattagaagccaatttcccaacttgacccccaactctacctcttctcagttttacgaaagcacgccagttatcgaacaatcctttaattggacgacagatgaccacatctctgctggaacgcttgaaaacccaacgagctttacaaacagttcttataaaaatgacaatggacctagtagcctctctgatagtaggaaatcctccggtggcaatagcgtaaatagtttgtcctttgacaagttgattttatcttgggatcctacagaccctgatgaatggacaatgcatcgcgtcaccagttggtttaaatttcatgattttccagaatcctggatattgtttttcaaaaagcatcaattgtttggtcacagatttataaagttgcttgcatatgataatttcgctgtttatgaaaagtatttgccgcagactaaaactgcttcttataccaggtttcagcagttattgaaaaaaacaatgaccaagaacgtaacaaatagccatattcgtcagaagagcgctagcaaacttaaaagttccaggtcttccagcgaaagtatcaaatctaaattaaaaaatagtaaatctcaagaggatatttctaattctagatctacgagtgaatctgcattgagcccaacaaaatctggcccttccaagaccgatgaaaagaattttttacattctacttctacacaccaaaaaaccaaaagcgcaagttctttgtacagaagaagttttatatccttgagaggctcttcttctagcaatgcttcctctgcaaaatctccttccaacatcaagttaagtataccggctaggccgcactctattattgaatctaacagtacacttaccaaatctgcgagcccacctgcatctccttcttatcctagcatatttagaagacatcacaaaagtagttcttctgagtcttctttattaaattccctttttggtagtggaataggcgaggaagctccaacaaagcctaatccacaaggtcatagtttatctagtgaaaatttagctaaaggaaaatctaaacactatgaaactaatgtgtcttctcctttaaaacaatcttctttacccacttctgatgataaaggtaatttatggaataaattcaaaagaaagagccaaataggggttcctagcccaaatacggtagcttatgtaacgtctcaagaaactccatccttaaaatctaatagtagtactgctaccttaaccgtacaaacggcagatgtaaatataccatctccatcttcttctccaccgccaatacccaaaactgcaaacagaagtttggaggtcatcagcacagaagatacacctaaaatttcttccaccacggcgtcttttaaagaaacgtatcctgattgtattaatccagacaagacagttccagtgccggtaaataatcaaaagtatagtgtaaagaactttttattagaccaaaaattttatcctttgaagaaaacagggttaaatgatagtgagaataaatatattttggttaccaaagataatgttagttttgttccgttgaacttaaaaagtgtagcaaaattatccagtttcaaagaatctgctctcacaaaattgggaatcaatcacaaaaatgtcactttccatatgacagactttgattgcgatattggtgctgcaattccagatgatactttggaatttttgaaaaaaagcttgtttttgaacacttctggaaaaatttatatcaaagaccaaatgaagcttcaacaaaaaccgaaacctgctcctctcaccagtgaaaacaatgttcctttaaaatctgtgaaaagtaagagttctatgaggtccggaacaagcagtttgatagcaagcacagatgatgtttccattgtcacttcttcttctgacataacatcttttgatgaacatgcatctggaagtgggcgcaggtacccccaaaccccgagttattactatgacagagtttccaatactaatccaactgaagaattgaattattggaatattaaagaagttctttctcatgaggaaaatgcaccaaaaatggtttttaaaacaagtccaaaattagaactcaacttaccagataaaggaagtaaattaaatattcctacccccataacagaaaatgaaagcaagagtagttttcaagtgttgagaaaagatgaggggactgaaattgatttcaatcatcgtagggaatctccttatacaaaaccagaattggcaccaaaaagagaagctcccaagcctcccgcaaatacttctcctcagaggaccttatctacttctaaacagaataaaccgatccgcttagtgagggcaagtacaaaaatttctagaagcaaaagaagtaaaccattgccgccacaattattatcttctcctatagaagctagcagctcttctcctgattctcttacttccagctatactcctgcttccactcatgttttgataccgcaaccttataagggtgcaaacgatgttatgcgtaggttgaaaacagaccaggacagtacgagtacttccccatctttgaaaatgaaacagaaagtgaatcgcagtaattctactgtatccacttccaattctattttctattctccttctccattgttaaaaagaggtaactccaaaagagttgtttcttctacatctgcggccgatatatttgaagagaatgacataacattcgcggatgctccgccgatgtttgacagcgatgatagtgatgacgattctagttcttccgatgacattatctggtccaagaaaaaaacagctcctgagactaataatgaaaacaaaaaggatgagaaaagcgataacagttctacgcattctgacgaaatattctatgattctcaaacgcaggacaaaatggagagaaagatgacctttagaccatctccggaggtcgtttatcaaaatttagagaaattcttcccaagggctaacttagataagccaatcactgaaggaatagcttctccaacatctccgaaatccttagacagcttgctttctccaaagaatgtggcttcttctagaactgagccaagcactccttcccgtcccgtccctcctgatagctcttacgagttcatacaggatggacttaacggtaaaaataaaccattgaatcaagctaagacacctaaaagaacaaaaaccataagaaccattgcacatgaagctagtttagcaagaaaaaactctgtaaaattgaaaagacagaacaccaaaatgtggggtacaagaatggtcgaagtgaccgaaaaccatatggtgtccattaataaagccaaaaattctaaaggtgagtataaggaattcgcctggatgaagggtgaaatgatagggaagggatctttcggtgctgtttatttatgtttaaacgttactacaggtgagatgatggccgttaagcaggttgaggtccccaagtatagctctcaaaatgaagccattttaagtaccgtggaagcattaagatctgaagtgtccacgttaaaagatttagatcatcttaatattgttcaatacttaggttttgagaataaaaacaatatttacagtttgtttttagaatatgttgctggtggctccgtgggatccttgattagaatgtatggaagattcgatgaaccgttgatcaaacatttaacaacacaagtattaaaaggattggcatacttgcactctaaaggtattctccacagggatatgaaggcagacaacttacttttggatcaagatggtatctgcaaaatcagtgacttcggaatttctagaaaatccaaggacatatactctaattctgatatgaccatgagaggaacagtcttctggatggctcctgaaatggttgatacaaagcaaggctacagtgcaaaagttgatatatggtctttgggatgcatcgttttggaaatgtttgctggtaagcgcccgtggtccaacttagaagtcgtcgcagccatgttcaaaattggaaagagtaaatctgcaccaccaattcctgaggacactttaccattgatatctcaaatcggaagaaattttttggacgcatgcttcgagataaatccagagaaaaggccaaccgctaacgagcttctttctcatccttttagtgaagtaaatgaaacattcaatttcaaatctaccagactcgcgaagtttataaagagcaatgataagttaaactcttctaaattaaggataacctctcaggagaataaaactgaatga

SEQ ID NO: 5949 - DNA, 2622 bp, Saccharomyces cerevisiae
atggcaaacactgtaggaggaattctgtcgggtgtaaatccgttccactacaactccagttcgccgcttacattatttctctttcaagcatgtctcatactactggtatgcaatttaattcacattcccttttcaatgatgaggcagcctaaagtcatttcagaagttatatctggtgttattttggggcctactatatttggtcaaattccaaactatacaaacacaattttccctacatcatcgatcccggggctaaatttagtggcgaatttgggaataatactgtttatgttttttttaggtttagaagtggatattgctttcatcaagaaacacctaaagaaagcactcgtgataggtatagtcactttagcagtgccattcggttttggttgtctgctggcgattcctttatttcacacttatgcaaacaaaacagaaggcgaaaggcatattaaattctctgtcttcatggtatttatagctgtttccatctccgttacggcttttccagttttatgtcgtattttaaatgaattgcgcttgatcaaggatagagcaggtatcgttgtccttgcggcgggtatcattaacgatataatgggatggattttgttagcattaagtattattctttctagtgcagaagggagccctgtcaataccgtttatattctgcttatcacgtttgcatggtttttgatttatttctttcccttaaaatacctattaagatgggtgctcataaggacccatgaattggacagaagcaagccttcaccgttggcaacgatgtgcattctattcatcatgttcatttctgcttattttacggatattattggagttcatcctatttttggcgccttcattgctggcttagtagttcctagagatgatcactacgttgttaaattaacagaaaggatggaagatattcctaacattgttttcattccaatctactttgctgttgcaggattaaatgtcgatttgactctattaaatgagggaagagattggggctatgttttcgccacaatcggcatcgccattttcaccaaaattatttcaggtactcttacagctaaacttactggcttattttggagagaagccactgcagccggtgttttgatgtcatgcaaaggtatcgttgaaatcgttgtcttaactgttggtttgaatgcgggcattatcagtagaaaaatatttggtatgtttgtgttgatggcattagtttctacttttgtcactactcctctgactcagcttgtttacccagattcataccgggatggtgttcgcaaatccttatctacacctgcagaagatgatggtgcagcagatggtctcgattctgagggtgtggacaagactgaaattaacactcaacttaattcattggcagatgttagcaaatatagaattggtgaactgaccacggtgataaacactacagaagcgatctctccatctctaaagctgctaaattacctgtctttaggggtatctcccaagcctaagaataataaacataagaacgaaacctccttgagcagaatgacaacagctactgattccacattgaaatctaacacattcaaaataaaaaagatggttcatatctggtctaaaagcgttgacgatgtggataccaatttaagtgttatagatgaaaaattgaccccgtttgagggagtcggtgcattgagggccattcatttacgattgctcactgaacggacaactgatctgctgcaatcatcttctctatataatgatgatccccactttaccgcaaatacagattcactattacaaatttttgatatattttcaaacctgagcaaaataccattttcaagtgaagtcatattttctacaatgcgtgaaaaggcagctaatatagcgacgatgaaaatggattccacagatctgatcttattgccattaaaaggggcctcgtatgagtatagagggagcccagtcttcattgatgaaaaatacgcaaactttgatcacatttattctcatctcctaggtctgaatgaactatcatctactttcttcaagtctattttccagtcactcaaggcaaattttgccgttcaaatttcaaatacctatggcagattaaatgctgatcgctttaagaggaaacggttcaatttattacttccaaaaccatacctgacacaatccgattatcttggactatatcttctcttattgatatgctatagagatggctataataatgataatgcatcctgtagtatatttattaacagcaagaatattgatttcgcaaaagatttgtcaactgcatttgctgagcatgactggctaaacgaatctaccattaaaattgtggatatcccctttgaaacgaaagttccagaagaagcaattgaaaagccgtcctttatagagactgtgcttgatgttggtttatcagatactgctttagctgatatagaggagactacctttattattggagaggaccttcctgatgaaagtgagcccttcagcgaagaggtgaggactgtaatatttgaagggtcgaatcgtcgttttgacacccttattgtgcaccatttttcgtctgaataa

SEQ ID NO: 5950 - DNA, 2622 bp, Artificial Sequence
  Description of Artificial Sequence: Synthetic polynucleotide
atggcaaacactgtaggaggaattttatctggtgtaaatccgttccactacaactccagttctccgcttacattatttctctttcaagcatgtctcatattattggtatgcaatttaattcacattcccttttccatgatgaggcagcctaaagtcatttctgaagttatatctggtgttattttggggcctactatatttggtcaaattccaaactatacaaacacaattttccctacatcttctatcccggggttaaatttagtggcgaatttgggaataatattgtttatgttttttttaggtttagaagtggatattgctttcatcaagaaacacttgaagaaagcactcgtgataggtatagtcactttagcagtgccattcggttttggttgtcttttggcgattcctttatttcacacttatgcaaacaaaacagaaggcgaaaggcatattaaattctctgtcttcatggtatttatagctgtttccatctccgttacggcttttccagttttatgtcgtattttaaatgaattgcgcttgatcaaggatagagcaggtatcgttgtccttgcggcgggtatcattaacgatataatgggatggattttgttagcattaagtattattctttctagtgcagaagggagccctgtcaataccgtttatattttacttatcacgtttgcatggtttttgatttatttctttcccttaaaatacttattaagatgggtgctcataaggacccatgaattggacagaagcaagccttctccgttggcaacgatgtgcattcttttcatcatgttcatttctgcttattttacggatattattggagttcatcctatttttggcgccttcattgctggcttagtagttcctagagatgatcactacgttgttaaattaacagaaaggatggaagatattcctaacattgttttcattccaatctactttgctgttgcaggattaaatgtcgatttgactttattaaatgagggaagagattggggctatgttttcgccacaatcggcatcgccattttcaccaaaattatttctggtactcttacagctaaacttactggcttattttggagagaagccactgcagccggtgttttgatgagttgcaaaggtatcgttgaaatcgttgtcttaactgttggtttgaatgcgggcattatcagtagaaaaatatttggtatgtttgtgttgatggcattagtttctacttttgtcactactcctttaactcagcttgtttacccagattcttacagagatggtgttcgcaaatccttatctacacctgcagaagatgatggtgcagcagatggtctcgattctgagggtgtggacaagactgaaattaacactcaacttaattctttggcagatgttagcaaatatagaattggtgaattgaccacggtgataaacactacagaagcgatctctccatctttgaagttattgaattacttgtctttaggggtatctcccaagcctaagaataataaacataagaacgaaacctccttgagcagaatgacaacagctactgattccacattgaaatctaacacattcaaaataaaaaagatggttcatatctggtctaaaagcgttgacgatgtggataccaatttaagtgttatagatgaaaaattgaccccgtttgagggagtcggtgcattgagggccattcatttaagattgctcactgaaagaacaactgatttattacaatcttcttctttgtataatgatgatccccactttaccgcaaatacagattctttattacaaatttttgatatattttccaacttgagcaaaataccattttctagtgaagtcatattttctacaatgcgtgaaaaggcagctaatatagcgacgatgaaaatggattccacagatttgatcttattgccattaaaaggggcctcttatgagtatagagggagcccagtcttcattgatgaaaaatacgcaaactttgatcacatttattctcatctcttaggtttgaatgaattatcttctactttcttcaagtctattttccagagcctcaaggcaaattttgccgttcaaatttctaatacctatggcagattaaatgctgatcgctttaagaggaaaagattcaatttattacttccaaaaccatacttgacacaatccgattatcttggattgtatcttctcttattgatatgctatagagatggctataataatgataatgcatcctgtagtatatttattaacagcaagaatattgatttcgcaaaagatttgtctactgcatttgctgagcatgactggttgaacgaatctaccattaaaattgtggatatcccctttgaaacgaaagttccagaagaagcaattgaaaagccgtcctttatagagactgtgcttgatgttggtttaagtgatactgctttagctgatatagaggagactacctttattattggagaggaccttcctgatgaaagtgagcccttcagcgaagaggtgaggactgtaatatttgaagggtctaatcgtcgttttgacacccttattgtgcaccatttttcttctgaatga

SEQ ID NO: 5951 - DNA, 2076 bp, Saccharomyces cerevisiae
atgacaaggttcatgaacagctttgccaaacaaacgctgggatatggcaatatggcgacagtggagcaagagagctcagctcaggctgttgattctcattcaaacaacacaccgaagcaagctaagggtgttcttgcagaggaactaaaggatgcattgcggttccgggacgaaagagttagtattattaatgcagagccttcttcaacactgttcgtcttttggtttgtggtttcatgctatttccctgtgattactgcctgcttgggtcccgtagctaacactatctcgatagcctgtgtagttgaaaaatggagatccttaaagaacaactccgtggtgacaaatccacgaagcaatgacaccgatgttttgatgaatcaagtaaagacagtttttgatcctcctggtatttttgccgttaatatcatctctttggtactgggttttacgtcaaatattatactaatgctacatttcagtaagaagttgacgtatcttaaatctcagttaataaatataacaggatggacaatagctggagggatgcttttggtggacgtgattgtatgctccttgaatgacatgcccagcatctacagtaagactatcggattttggtttgcctgtatcagttctggtctatatttggtatgcaccattattttaacaatacattttattggatataaattaggaaaatatcctccaacgttcaaccttttgcccaatgaaagaagtatcatggcatacactgtactattgtctttatggttgatttggggtgcgggtatgtttagcggtttattgcacatcacttacggaaatgcattatatttctgcacggtatcattattaaccgtgggactaggtgacatcctgcccaagtcggttggcgccaaaatcatggttttaatcttttcgctatctggtgttgtcttgatgggtttaatagtgtttatgacaagatccatcattcaaaagtcctctggcccaattttctttttccacagagttgaaaaaggcaggtccaaatcgtggaaacattatatggatagtagtaaaaatttatctgaaagggaagcgttcgacttaatgaagtgtatccgacaaacggcctcaaggaagcagcattggttttctttgtcggtgactattgcaattttcatggctttttggttattgggagctcttgtattcaaattcgcagaaaattggtcgtacttcaattgtatttacttttgtttcttgtgcttattaaccattggatacggagactatgctccaaggactggtgcaggccgtgctttttttgtgatttgggcgttgggagccgtgccattaatgggggctatcctatctacagtcggtgatctgttgtttgacatttccacttctctggatattaagatcggtgaatcattcaataataaagtcaagtccatcgtttttaatgggcgtcaaagagcactttcctttatggtgaacactggagaaattttcgaagaatctgacacagctgatggtgatctggaagaaaatacaacgagctcacaatccagtcaaatttctgaattcaacgataataattcagaagagaatgattctggagtgacatcccctcctgcaagcctgcaagaatcattttcttcattatcaaaagcatctagcccagagggaatacttcctctagaatatgtttcttctgctgaatatgcactacaggactcggggacctgtaatttaaggaacttgcaagagctacttaaagccgtcaaaaaactacatcggatatgtctggcggataaagattacacacttagtttttccgactggtcgtacattcataaactacatttgaggaacattacagatattgaggagtacacacgcggacccgaattttggatatcacctgatacgcccctcaagttcccgttaaatgaacctcattttgcttttatgatgcttttcaagaacatagaagaattagttggtaatctagtagaagacgaagagctttataaagttataagcaaaagaaaatttttgggtgagcatagaaagacactttga

SEQ ID NO: 5952 - DNA, 2076 bp, Artificial Sequence
  Description of Artificial Sequence: Synthetic polynucleotide
atgacaaggttcatgaacagctttgccaaacaaacgttgggatatggcaatatggcgacagtggagcaagagagcagtgctcaggctgttgattctcattccaacaacacaccgaagcaagctaagggtgttcttgcagaggaattgaaggatgcattgagattcagggacgaaagagttagtattattaatgcagagccttcttctacattgttcgtcttttggtttgtggtttcttgctatttccctgtgattactgcctgcttgggtcccgtagctaacactatctccatagcctgtgtagttgaaaaatggagatccttaaagaacaactccgtggtgacaaatccaagaagcaatgacaccgatgttttgatgaatcaagtaaagacagtttttgatcctcctggtatttttgccgttaatatcatctctttggtattgggttttacgtccaatattatattaatgttgcatttcagtaagaagttgacgtatcttaaatctcagttaataaatataacaggatggacaatagctggagggatgcttttggtggacgtgattgtatgctccttgaatgacatgcccagcatctacagtaagactatcggattttggtttgcctgtatcagttctggtttatatttggtatgcaccattattttaacaatacattttattggatataaattaggaaaatatcctccaacgttcaaccttttgcccaatgaaagaagtatcatggcatacactgtacttttgtctttatggttgatttggggtgcgggtatgtttagcggtttattgcacatcacttacggaaatgcattatatttctgcacggtatctttattaaccgtgggattaggtgacatcttgcccaagtctgttggcgccaaaatcatggttttaatcttttctttatctggtgttgtcttgatgggtttaatagtgtttatgacaagatccatcattcaaaagtcctctggcccaattttctttttccacagagttgaaaaaggcaggtccaaaagttggaaacattatatggatagtagtaaaaatttatctgaaagggaagcgttcgacttaatgaagtgtatcagacaaacggcctctaggaagcagcattggttttctttgtctgtgactattgcaattttcatggctttttggttattgggagctcttgtattcaaattcgcagaaaattggagttacttcaattgtatttacttttgtttcttgtgcttattaaccattggatacggagactatgctccaaggactggtgcaggccgtgctttttttgtgatttgggcgttgggagccgtgccattaatgggggctatcctttctacagtcggtgatttattgtttgacatttccacttctttagatattaagatcggtgaatctttcaataataaagtcaagtccatcgtttttaatgggcgtcaaagagcactttcctttatggtgaacactggagaaattttcgaagaatctgacacagctgatggtgatttggaagaaaatacaacgagctctcaatccagtcaaatttctgaattcaacgataataattctgaagagaatgattctggagtgacatcccctcctgcaagcttacaagaaagtttttcttctttatccaaagcatctagcccagagggaatacttcctttggaatatgtttcttctgctgaatatgcattacaggacagtgggacctgtaatttaaggaacttgcaagagttgcttaaagccgtcaaaaaattgcatagaatatgtttggcggataaagattacacacttagtttttccgactggagttacattcataaattgcatttgaggaacattacagatattgaggagtacacacgcggacccgaattttggatatctcctgatacgcccctcaagttcccgttaaatgaacctcattttgcttttatgatgcttttcaagaacatagaagaattagttggtaatttggtagaagacgaagagctttataaagttataagcaaaagaaaatttttgggtgagcatagaaagacactttga

SEQ ID NO: 5953 - DNA, 3525 bp, Saccharomyces cerevisiae
atgtcgtcgaacaatgatctttggttgcatttagtatcccagttaaatactcaacagagagcagcggccctctttgattacactagagggctgcaggtcattgccggtcccggcacagggaagactaaggttttaacttcaagagtagcgtatcttattctgcaccaccatattcatccccgcgatattatagtgactactttcactaacaaagctgctaacgaaatgaaagagcgtttgcaagaaatgttacgcggggcaggcgtgaatatttcggagctcttaattggtacttttcatagtatttgcctgaaaatactttatagatttggccacttggtggatctacagaaagactggagaattattgatgagaaggaaatagatgtcattttagatgatatgatcgaaaaagttcccgaccaaataagggattatgcttcctcaatcacaaggaaagtaaatctttgtatgccgagtaaaaatggagatgaatggactattcatccgaagctgatcaagaaacagatatcaaagctaaaatcaaacgcaatattacctgaggaatacatcttagattcgaatcatgacgccgcgcttggttacttttaccaaatataccaatcagagctaagcaagaaaaatacgttagattttgatgacttattaatgtacacctttcgtttgctgactagagtgcgtgttttatccaacataaagcatgttttagttgacgaatttcaagatactaacggcattcaattggacttgatgtttctttttgctaagggaaatcatcatctttcgagggggatgaccatcgtaggtgatcctgatcaaagcatatatgctttcagaaacgccttagcgcacaactttctagaaatgggcagaaaatgtcccatcgagtactcaactatcatacttgttgaaaattatcgttcatcacaaaaaattctaaatacaagcgaaattttaataacgcaacaaaacaaaggtcggcagaatagggctccactccgtgcccaatttgacctggattttccaccagtttacatgaatttccccgcttactttttggaagcaccttctttagttcgggaactactatatttgaaggcattgccaaacctattcacatttaatgactttgctatcctagtaagacaacgaagacaaattaaaaggatcgaaagtgcattaatagaacatcggataccctataaaattattaggggccacagtttctgggattccaaggaaacaagagcgatgttaaatttattaaaattgatattttctccgaatgacaaacatgcaattcttgcttcacttttatatccagcaaggggccttggtcctgctaccggtgagaagattaagaacgcattggacacgttagctaccgatgtgtcatgtttccaaatattgaaagacataagtagtaaaaaaataatgctagacataccgacgaaaggccgttctgtgattgctgacttcatttcaatgatagaaaattgtcaattgttgctccagagcactttactagggggtctttcagatttatttgataagctatatgaattatcaggtctgaaatacgaatacttgtacaaggatggtaagaaaaaaaatgatcagcttgaaaaatccgaacctaatttattaaacgcaagacataagaatattgaacttttgaaaaactatttcctggctcttctttccaagtcagaatcttcagataaagaaaaaaatgaagccattaaagcagcaacagatgaagccgaaccaatagagaacaaggtcatcactccaaaagaatacctccgtaatttcttcaattcactttcccttcattctgatgcagctgaggaggaagagtcggaatccaataaagatgcaaaaataaaacgtgagaagaatgggtttgtcacgatatctacaattcacggtgccaaaggtcttgagtggccggtagtttttattcctggatgcgaagaaggtataattccttgtgtgttcaacgatgataagaaagacgaatcagaggaggacgaagaagaagatcaagaaaatagtaagaaagatgcaagcccaaaaaagactagagttttatccgtggaagattctatagatgaggaaagaagaatgttttttgttgcacagactcgtgcaaaatacctgttgtacctatcaaatactgtaactgtggaagatgtcgatagaccaagaattgcaagccgatttttgactactgacttgataaaagccatgtccgatagccaaaaattatttgaaagtacgaatagtatcaaaaaactataccgaattttgaacaaaaagccgcctgctgaagatgataaactattctcccttgaccaattgcgcaaagactataaccaattcattgaaaataggagagaaaggatgatttggcaagggatacaaatgaatgatgtctatggaatacagttgtctagaaataaattattgggttctgttagtgatttcacgtcagctgcggaccagttacgactcgaaacgcaaaactctatattcccacagaagaaacttattgaaaaatcacgcccatccaaaatcaatggcaattacgctcctaaaagtagagttaaaagtccagaaaaaaggtacgctccagaaactacatcattccattctcctacaaagaaaaaggtgtatgcacctcaatacgtttcaacaactaatgtacctagtaggcaggagtttcattcttctactgggaaaaatattccttttctgagaagagaagataggtccatcacagacatatcaccacgatcatcaacgaggtcgttaaaaggagcatctccaaataagacgagccacatgtcagatgatttaatgagaccatcacctacgaggaaggacaaagttactcgtaatattcatttcgcaactgcaggaactttcagaatagaaacccagtcaaatgttgatgaactgcatcctccggaatactccaataaatcagggcagtcgcttacgtcgagtgaattttctgggttttctagcgcgtgcagtaattctgatcagccaacgaacttaatagaagatataaacaacgaattagatctatccgatgaggagttattaaatgacatatcaatagaaaggaggagagagcttttgggctcgaaaaagacgaaaaaaataaaaccaaaaactcgaaatagaaagtctaagagaggtgacaaggttaaggtggaggaagtgatagatttgaagagtgaatttgaggaagatgacagcagaaatacaacagctgctgagttattacataatccggatgacactacagttgacaatcgtccaataatctccaatgctaagtttttggctgacgcagcaatgaaaaagacacagaaattttccaaaaaggtgaagaatgaacctgcatcaagtcaaatggatatattttctcagctgtcacgtgcgaaaaaaaagtcaaaattaaacaacggtgaaatcatagtcatcgattag

SEQ ID NO: 5954 - DNA, 3525 bp, Artificial Sequence
  Description of Artificial Sequence: Synthetic polynucleotide
atgtcttccaacaatgatctttggttgcatttagtatcccagttaaatactcaacagagagcagcggccctctttgattacactagagggttgcaggtcattgccggtcccggcacagggaagactaaggttttaacttccagagtagcgtatcttattttacaccaccatattcatccccgcgatattatagtgactactttcactaacaaagctgctaacgaaatgaaagagcgtttgcaagaaatgttacgcggggcaggcgtgaatatttctgagctcttaattggtacttttcatagtatttgcttgaaaatactttatagatttggccacttggtggatttacagaaagactggagaattattgatgagaaggaaatagatgtcattttagatgatatgatcgaaaaagttcccgaccaaataagggattatgcttcctctatcacaaggaaagtaaatctttgtatgccgagtaaaaatggagatgaatggactattcatccgaagttaatcaagaaacagatatccaagttgaaaagtaacgcaatattacctgaggaatacatcttagattctaatcatgacgccgcgcttggttacttttaccaaatataccaaagtgagttgagcaagaaaaatacgttagattttgatgacttattaatgtacacctttcgtttgttgactagagtgcgtgttttatccaacataaagcatgttttagttgacgaatttcaagatactaacggcattcaattggacttgatgtttctttttgctaagggaaatcatcatctttctagggggatgaccatcgtaggtgatcctgatcaaagcatatatgctttcagaaacgccttagcgcacaactttttggaaatgggcagaaaatgtcccatcgagtactccactatcatacttgttgaaaattatcgttcttctcaaaaaattttgaatacaagcgaaattttaataacgcaacaaaacaaaggtagacagaatagggctccactccgtgcccaatttgacttggattttccaccagtttacatgaatttccccgcttactttttggaagcaccttctttagttagagaattattatatttgaaggcattgccaaacttgttcacatttaatgactttgctatccttgtaagacaaagaagacaaattaaaaggatcgaaagtgcattaatagaacatagaataccctataaaattattaggggccacagtttctgggattccaaggaaacaagagcgatgttaaatttattaaaattgatattttctccgaatgacaaacatgcaattcttgcttctcttttatatccagcaaggggccttggtcctgctaccggtgagaagattaagaacgcattggacacgttagctaccgatgtgagctgtttccaaatattgaaagacataagtagtaaaaaaataatgttggacataccgacgaaaggccgttctgtgattgctgacttcatttccatgatagaaaattgtcaattgttgctccagagcactttattagggggtctttctgatttatttgataagctttatgaattatctggtttgaaatacgaatacttgtacaaggatggtaagaaaaaaaatgatcagcttgaaaaatccgaacctaatttattaaacgcaagacataagaatattgaacttttgaaaaactatttcttggctcttctttccaagtctgaatcttctgataaagaaaaaaatgaagccattaaagcagcaacagatgaagccgaaccaatagagaacaaggtcatcactccaaaagaatacctccgtaatttcttcaattctctttcccttcattctgatgcagctgaggaggaagagagtgaatccaataaagatgcaaaaataaaacgtgagaagaatgggtttgtcacgatatctacaattcacggtgccaaaggtcttgagtggccggtagtttttattcctggatgcgaagaaggtataattccttgtgtgttcaacgatgataagaaagacgaaagtgaggaggacgaagaagaagatcaagaaaatagtaagaaagatgcaagcccaaaaaagactagagttttatccgtggaagattctatagatgaggaaagaagaatgttttttgttgcacagactcgtgcaaaatacttgttgtacctttctaatactgtaactgtggaagatgtcgatagaccaagaattgcaagcagatttttgactactgacttgataaaagccatgtccgatagccaaaaattatttgaaagtacgaatagtatcaaaaaactttacagaattttgaacaaaaagccgcctgctgaagatgataaattattctcccttgaccaattgcgcaaagactataaccaattcattgaaaataggagagaaaggatgatttggcaagggatacaaatgaatgatgtctatggaatacagttgtctagaaataaattattgggttctgttagtgatttcacgagcgctgcggaccagttaagactcgaaacgcaaaactctatattcccacagaagaaacttattgaaaaaagccgcccatccaaaatcaatggcaattacgctcctaaaagtagagttaaaagtccagaaaaaaggtacgctccagaaactacatctttccattctcctacaaagaaaaaggtgtatgcacctcaatacgtttctacaactaatgtacctagtaggcaggagtttcattcttctactgggaaaaatattccttttttaagaagagaagataggtccatcacagacatatctccaagaagttccacgaggtctttaaaaggagcatctccaaataagacgagccacatgagtgatgatttaatgagaccatctcctacgaggaaggacaaagttactcgtaatattcatttcgcaactgcaggaactttcagaatagaaacccagtctaatgttgatgaattacatcctccggaatactccaataaaagtgggcagtctcttacgtccagtgaattttctgggttttctagcgcgtgcagtaattctgatcagccaacgaacttaatagaagatataaacaacgaattagatttatccgatgaggagttattaaatgacatatccatagaaaggaggagagagcttttgggctctaaaaagacgaaaaaaataaaaccaaaaactagaaatagaaagtctaagagaggtgacaaggttaaggtggaggaagtgatagatttgaagagtgaatttgaggaagatgacagcagaaatacaacagctgctgagttattacataatccggatgacactacagttgacaatcgtccaataatctccaatgctaagtttttggctgacgcagcaatgaaaaagacacagaaattttccaaaaaggtgaagaatgaacctgcaagtagtcaaatggatatattttctcagttatctcgtgcgaaaaaaaagagtaaattaaacaacggtgaaatcatagtcatcgattga

SEQ ID NO: 5955 - DNA, 1473 bp, Saccharomyces cerevisiae
atgtcgactttaaaacagagaaaagaggactttgtgacagggctcaatggcggttctataacagaaattaacgcagtgacatcaattgctttggtaacttacatatcatggaacttattgaaaaattccaaccttatgcctcctggcatttccagcgtgcaatacataattgattttgcattgaactgggttgctttgcttctatctattactatttatgctagtgaaccataccttctaaacacgctaatactgttaccttgtttgctcgcattcatatatggaaaatttactagctcgagtaaaccttctaatccaatatacaataaaaaaaaaatgattacacagcggttccaactagaaaaaaagccgtatattactgcgtatcgtggtgggatgcttattctgactgctattgccatcttggctgtagattttccaattttcccaaggaggtttgccaaggtggaaacttgggggacatccctgatggatcttggtgtaggatcattcgttttcagtaacggtattgtttcttctagggcactgttgaaaaacctaagcttgaagagtaaacccagcttcttaaaaaatgcatttaatgccttaaaatcaggaggaactctattgttcctaggattgctgaggttgttttttgtaaaaaatttggaatatcaagaacatgtcacagaatatggggttcattggaatttttttatcaccctatcattgttgccacttgtattgacctttattgatcccgtcacaagaatggttccacgctgctcaattgcaatattcatttcatgcatttatgaatggctacttttaaaggacgatcgcactttaaactttttaattttggctgatagaaattgtttcttcagtgctaatagagaaggcatcttctcatttctaggttattgctcgatttttctttggggccaaaacacgggattttacttgttgggaaataaaccaactttaaacaatctttataagccttctacgcaagacgtagttgcagcatcaaagaagtcttcgacttgggactattggacttcagtaaccccattaagtggcctctgtatatggagtacaatttttcttgttatcagccagttggtttttcaataccatccttatagtgtttcaagaaggtttgctaacttaccatatactttgtgggtcattacttataatttactatttttgactgggtactgcttgactgacaaaattttcggtaattcttcggaatattataaagttgccgaatgcttggaatcaatcaactccaatgggttgtttttatttttgttggcaaatgtctctactggtttagtcaatatgtctatggtcacgatagattcttcacccttaaaatcattcctggttttgttggcatactgctcattcatagctgtcatatcggttttcttgtatagaaaaagaatattcattaagctataa

SEQ ID NO: 5956 - DNA, 1473 bp, Artificial Sequence
  Description of Artificial Sequence: Synthetic polynucleotide
atgtctactttaaaacagagaaaagaggactttgtgacagggctcaatggcggttctataacagaaattaacgcagtgacatccattgctttggtaacttacatatcttggaacttattgaaaaattccaaccttatgcctcctggcatttccagcgtgcaatacataattgattttgcattgaactgggttgctttgcttttatctattactatttatgctagtgaaccataccttttgaacacgttgatattattaccttgtttgctcgcattcatatatggaaaatttactagcagtagtaaaccttctaatccaatatacaataaaaaaaaaatgattacacagagattccaattggaaaaaaagccgtatattactgcgtatcgtggtgggatgcttattttgactgctattgccatcttggctgtagattttccaattttcccaaggaggtttgccaaggtggaaacttgggggacatccttgatggatcttggtgtaggaagtttcgttttcagtaacggtattgtttcttctagggcattattgaaaaacttgagcttgaagagtaaacccagcttcttaaaaaatgcatttaatgccttaaaaagtggaggaactttattgttcttgggattgttgaggttgttttttgtaaaaaatttggaatatcaagaacatgtcacagaatatggggttcattggaatttttttatcaccttatctttgttgccacttgtattgacctttattgatcccgtcacaagaatggttccacgctgctccattgcaatattcatttcttgcatttatgaatggttacttttaaaggacgatcgcactttaaactttttaattttggctgatagaaattgtttcttcagtgctaatagagaaggcatcttctcctttttaggttattgctccatttttctttggggccaaaacacgggattttacttgttgggaaataaaccaactttaaacaatctttataagccttctacgcaagacgtagttgcagcatccaagaagtcttctacttgggactattggacttctgtaaccccattaagtggcctctgtatatggagtacaatttttcttgttatcagccagttggtttttcaataccatccttatagtgtttctagaaggtttgctaacttaccatatactttgtgggtcattacttataatttactttttttgactgggtactgcttgactgacaaaattttcggtaattcttctgaatattataaagttgccgaatgcttggaaagtatcaactccaatgggttgtttttatttttgttggcaaatgtctctactggtttagtcaatatgtctatggtcacgatagattcttctcccttaaaatctttcttggttttgttggcatactgctctttcatagctgtcatatctgttttcttgtatagaaaaagaatattcattaagttgtga

SEQ ID NO: 5957 - DNA, 2295 bp, Saccharomyces cerevisiae
atgaagccctttcaaggaataacattttgtccgactgcaataaataatgaaatcttagctaaaaaaatatcaaagaaaattattaagttaggaggtatattttctaaagatttgaccagacaagttaatgtccttgttgttgggtccaccaccaatacaaacaaatttaaatttgcggtgaagcatagattcgatatcatatttattgacattcaagccattgatgacatttatcagctctggctgtctggagaaaatatattgccggactctaatacggcaacaatgacaggatccacctatgagatgctgaagatactttaccggcgattttcgtttaaatatttgcataacttcaatatcttcattggcagaataaccgacactaacataacttccatcgattcattggttaggagtattaaaaagttagggtgttctagttataactatcaaaactttgtaatcaaagatacctcttcacacaatgatgacgatgatcaaggtcagaatgggcagatatccatttttgttacggatactttactaggagcaagagttaacgctgctattgaacaaaatatacctattgtacatttcaaatggattctcgattgccaaaaaagaagcgcactgttaccgtacgatccctattatcttttaccaaatattaaagacctgccctatgattcaatcggatcaaactcttgcgattgctgggataaaataaacaccacctttccaaccaatatcgatgcccaatcctctctgcagcggcagcaatcctccagtaccctgactccttcgctcccgaaaacatcatccctcttgaataaatttaaaccaaagggtgaaaaaatatgggacaaggcaatgtctctacagcagcatagtaagacaaatttttcagtactagggcagtcaccattatcgataaataacaaacaagaagatttaagtgataatagtactttgattttcaaaaattgtgcgtttatcattcatcatatttttcctggcaatcaccgttcaatactaaccaaaattgttgttcaaaatgggggtaaaattgagacgtcttacttgagcggcatttacgatcattcttattacatcattccaagtaataaagctcttgactccttcaatgatttacctgagattatagatgataatgatggtatagttacagaatttttcattgaacgctgcttgtattatcaaaaattactacacccaatagatttatggtcaaaacccttcctcagcacaatagagtttcaagtttcgtcttcttcaaagttattgcatcatgaattttcttcttccccttttctgaatgttactatcactggattctctggcgtagagctgttacatctgactaaagtattaaatcttctaaaaccaatgggcatcaattatgtagaatacctcaataaatccactgacattctgctaatcaacttagcagctttacccagtatcccgaaaacccatccgttatggtcgaatgaatttagcgatctttttactcagttttgcattaataacaataatgatgatcctggtgataataacagaaaagattttcaaaataattcaatcttgagaaattcgatgaaaaggaaaattgaatatatcaagaaattccactccataccggtagttactccagcatttatttttaaattattgtccgctgcatctggagaaaataatgaaatctttttaaacaatatcaagtggtgtattatctgcccaagaggacacaaggacgattttaaatgtaagataaaaaaaccatactataccagcattagttcagaaaaaaagtaccaaaacaatgatccaaaaatcgacaaaactattcttttgaaaagaaacaattcctcattatcggagcactctatgaaagataccaaaaacgaattattgcagaaaattagagaaactgattctggaagaaaaaagcgtagtgtctcatcgagtatcatggatgtttcttcagagagacaaatgccggatacgaaaaggatcaagttggagtcactgccaaaaaatttcgttcctaaacaaattaaacgaaccacgagttggggcacaataatgtcagaaaatgtgcctacagagcagccgactgcaatttctaatccagaagagatcccaagaactgaggaagtttcacatactcaagttacctatggctccattcaagataagaaacgtactgcctctttagaaaaacctatgagacgacagacaagaaatcagacaaaggaattagattcttga

SEQ ID NO: 5958 - DNA, 2295 bp, Artificial Sequence
  Description of Artificial Sequence: Synthetic polynucleotide
atgaagccctttcaaggaataacattttgtccgactgcaataaataatgaaatcttagctaaaaaaatatccaagaaaattattaagttaggaggtatattttctaaagatttgaccagacaagttaatgtccttgttgttgggtccaccaccaatacaaacaaatttaaatttgcggtgaagcatagattcgatatcatatttattgacattcaagccattgatgacatttatcagctctggttatctggagaaaatatattgccggactctaatacggcaacaatgacaggatccacctatgagatgttgaagatactttaccgcagattttcttttaaatatttgcataacttcaatatcttcattggcagaataaccgacactaacataacttccatcgattctttggttaggagtattaaaaagttagggtgttctagttataactatcaaaactttgtaatcaaagatacctcttctcacaatgatgacgatgatcaaggtcagaatgggcagatatccatttttgttacggatactttattaggagcaagagttaacgctgctattgaacaaaatatacctattgtacatttcaaatggattctcgattgccaaaaaagaagcgcattattaccgtacgatccctattatcttttaccaaatattaaagacttgccctatgattctatcggaagtaactcttgcgattgctgggataaaataaacaccacctttccaaccaatatcgatgcccaatcctctttgcagagacagcaatcctccagtaccttaactccttctctcccgaaaacatcttccctcttgaataaatttaaaccaaagggtgaaaaaatatgggacaaggcaatgtctttgcagcagcatagtaagacaaattttagcgtattagggcagtctccattatctataaataacaaacaagaagatttaagtgataatagtactttgattttcaaaaattgtgcgtttatcattcatcatatttttcctggcaatcaccgttctatattgaccaaaattgttgttcaaaatgggggtaaaattgagacgtcttacttgagcggcatttacgatcattcttattacatcattccaagtaataaagctcttgactccttcaatgatttacctgagattatagatgataatgatggtatagttacagaatttttcattgaacgctgcttgtattatcaaaaattattacacccaatagatttatggtccaaacccttcctcagcacaatagagtttcaagtttcttcttcttccaagttattgcatcatgaattttcttcttccccttttttgaatgttactatcactggattctctggcgtagagttattacatttgactaaagtattaaatcttttgaaaccaatgggcatcaattatgtagaatacctcaataaatccactgacattttattgatcaacttagcagctttacccagtatcccgaaaacccatccgttatggtctaatgaatttagcgatctttttactcagttttgcattaataacaataatgatgatcctggtgataataacagaaaagattttcaaaataattccatcttgagaaattctatgaaaaggaaaattgaatatatcaagaaattccactccataccggtagttactccagcatttatttttaaattattgtccgctgcatctggagaaaataatgaaatctttttaaacaatatcaagtggtgtattatctgcccaagaggacacaaggacgattttaaatgtaagataaaaaaaccatactataccagcattagttctgaaaaaaagtaccaaaacaatgatccaaaaatcgacaaaactattcttttgaaaagaaacaattcctctttatctgagcactctatgaaagataccaaaaacgaattattgcagaaaattagagaaactgattctggaagaaaaaagcgtagtgtctcttccagtatcatggatgtttcttctgagagacaaatgccggatacgaaaaggatcaagttggagtctttaccaaaaaatttcgttcctaaacaaattaaaagaaccacgagttggggcacaataatgtctgaaaatgtgcctacagagcagccgactgcaatttctaatccagaagagatcccaagaactgaggaagtttctcatactcaagttacctatggctccattcaagataagaaacgtactgcctctttagaaaaacctatgagaagacagacaagaaatcagacaaaggaattagattcttga

SEQ ID NO: 5959 - DNA, 2490 bp, Saccharomyces cerevisiae
atggccaagaggaaatatggcaggtcttattccctcgatgatacagattcctgcagcaataaagtcctgatagtaccaaccggtcaaagctcctctaacgcaatcactgatttctctgtcagaaaggcgcatgcttgcgatagatgcagactgaaaaaaatcaagtgtgacggtttaaaaccgaactgttcaaactgtgcgaaaattgacttcccttgcaaaacctcggataaactgtcgaggagaggtcttccaaaggggtatacagaactactagaaaaagaggtcgtccgtttgacaaatatgaatgcgagttccagcgccaatgcaaattctaatttgccgttcattaatgatacattttattgttttgataattacaacactcagtctgaaaatcaaaggtttttgggacatttgacatggaatattctaactaatacttttcctactcaaaaagcagtagtttttacagacgatcgaaataatattgatctacaactgcaactgttaacaaattttttgaacctgaatggtgactttaatcatctcccaaattttcttttacttaaatatgattataaccttcagtttttgaaaaatttgttgtctgtcattattaaagatttttttaaaaggcaaaattctttgctacttctattataccctacaaatttatggaaaaatttgctattagacaagattaattcaaccgcaatgacaggtgaacccataactctactggcgttactttatattattcaatttacttggtcttgttttgatgatttcaagctttttaaagtcacgaagcttattgtttctctgacaacaaacagcaaattagacttgaaagttttgcaattggttaacttatccatcttttattttatgggcgcctctgttgactcttgtaaaagtaaaagctcgttaacagaacattcaaatgtaaattcagtaatatggaccaatgatttgctaaacctaaactttacaaatattttgaatatgggattgtacataaatcccaaaaatttaattcctatatcaggcaacaataataataataaatctaatgaagaggatgatagaatagtgacattttggtgctttcaattcttaagctcatggtggtccttaattcaaggtttaccaaagtccaactttttaactgaagaatttcaaccgaaatcaatctcggttctagaaatccccaggctgaagccctttgaaattttgttaaacttcatcatatattctttggatggatgtaatttgttgaatatctcatctttaaatgtttcggacccaaatttccaatttttccagaatgaactggaaagctttaaaaaaaatttattactgtggaacctttatcacaatttgagtgatcacgataacttccgattcttaacatccagttcaaataaaaaactaacaacaaatttactacttaagaatttgacgggtctaaatcacaaactcaatcaacctgattttgtggagattcaattaactttattttacttgagtttaaaattaatgactttaaaggaaggggaccaagatttgaagaaagaggatatctcgttagagatattgtccctatattttttaattcttacagatgactctaataatgatgataatcaacagttacaaccacagcaactaaatctctaccattttacgcccttcaatagtattgacattattgacttatgtttaaacaatttaaacaattggtcattatcacttaaatacgaaagtggtcaaaaccagccccactcaagtaaaataaagtttgaaaaatttcaaaactttttaaatcactggtgtccaatatggtactatgatgaattttccacaaacccttttttacaaatcctcaaaatcaatttcaaattacttccttttgagacaatccattactcacaagaagagcaacgattgttaataagtttgaataaattgagatatttggatgccgtatcgagctttaattcaagttcagtcaagtcgaatttcgcgtctaaggtcaatacccagctaaaccttttgcaacactcgagttctaactccaatttcctagatgcgtcaccatacgattttaataaaatttttatgaacaactttgaaaactatgactacgaaacagatgaaggatatgcggaagatgatgatgaagaggatagtgacagtgacaatagcttaccactagaaattccttttaaaaaaagtaaaaataaatgcaagaataggaataaagagctttcacaaaggttatccctatttgaaaacagagatagcaattcggtagatttcaacacagatacaaatttaaatttaaaccctgattcgccatcagttacgtcttctaagaaaaaatatttagatcatattattttagataaccgagacatcgttagcaaccatgactccagtaaacaaaaattcaagatccagaatattttgaactcgaccttctaa

SEQ ID NO: 5960 - DNA, 2490 bp, Artificial Sequence
  Description of Artificial Sequence: Synthetic polynucleotide
atggccaagaggaaatatggcaggtcttattccctcgatgatacagattcctgcagcaataaagtcttgatagtaccaaccggtcaaagctcctctaacgcaatcactgatttctctgtcagaaaggcgcatgcttgcgatagatgcagattgaaaaaaatcaagtgtgacggtttaaaaccgaactgttctaactgtgcgaaaattgacttcccttgcaaaacctctgataaattatctaggagaggtcttccaaaggggtatacagaattattggaaaaagaggtcgtccgtttgacaaatatgaatgcgagttccagcgccaatgcaaattctaatttgccgttcattaatgatacattttattgttttgataattacaacactcagtctgaaaatcaaaggtttttgggacatttgacatggaatattttgactaatacttttcctactcaaaaagcagtagtttttacagacgatagaaataatattgatttgcaattacaattattaacaaattttttgaacttgaatggtgactttaatcatctcccaaattttcttttacttaaatatgattataaccttcagtttttgaaaaatttgttgtctgtcattattaaagatttttttaaaaggcaaaattctttgttacttttattataccctacaaatttatggaaaaatttgttattagacaagattaattctaccgcaatgacaggtgaacccataactttattggcgttactttatattattcaatttacttggtcttgttttgatgatttcaagctttttaaagtcacgaagcttattgtttctttaacaacaaacagcaaattagacttgaaagttttgcaattggttaacttatccatcttttattttatgggcgcctctgttgactcttgtaaaagtaaaagctctttaacagaacattctaatgtaaattctgtaatatggaccaatgatttgttgaacttgaactttacaaatattttgaatatgggattgtacataaatcccaaaaatttaattcctatatctggcaacaataataataataaatctaatgaagaggatgatagaatagtgacattttggtgctttcaattcttaagctcctggtggtccttaattcaaggtttaccaaagtccaactttttaactgaagaatttcaaccgaaatctatctccgttttggaaatccccaggttaaagccctttgaaattttgttaaacttcatcatatattctttggatggatgtaatttgttgaatatctcttctttaaatgtttctgacccaaatttccaatttttccagaatgaattggaaagctttaaaaaaaatttattattatggaacctttatcacaatttgagtgatcacgataacttcagattcttaacatccagtagtaataaaaaattaacaacaaatttattacttaagaatttgacgggtttgaatcacaaactcaatcaacctgattttgtggagattcaattaactttattttacttgagtttaaaattaatgactttaaaggaaggggaccaagatttgaagaaagaggatatctctttagagatattgtccttatattttttaattcttacagatgactctaataatgatgataatcaacagttacaaccacagcaattgaatctctaccattttacgcccttcaatagtattgacattattgacttatgtttaaacaatttaaacaattggtctttatctcttaaatacgaaagtggtcaaaaccagccccacagcagtaaaataaagtttgaaaaatttcaaaactttttaaatcactggtgtccaatatggtactatgatgaattttccacaaacccttttttacaaatcctcaaaatcaatttcaaattacttccttttgagacaatccattactctcaagaagagcaaagattgttaataagtttgaataaattgagatatttggatgccgtatccagctttaatagtagttctgtcaagagcaatttcgcgtctaaggtcaatacccagttgaaccttttgcaacacagcagttctaactccaatttcttggatgcgtctccatacgattttaataaaatttttatgaacaactttgaaaactatgactacgaaacagatgaaggatatgcggaagatgatgatgaagaggatagtgacagtgacaatagcttaccattggaaattccttttaaaaaaagtaaaaataaatgcaagaataggaataaagagctttctcaaaggttatccttatttgaaaacagagatagcaattctgtagatttcaacacagatacaaatttaaatttaaaccctgattctccatctgttacgtcttctaagaaaaaatatttagatcatattattttagataacagagacatcgttagcaaccatgactccagtaaacaaaaattcaagatccagaatattttgaactctaccttctga

SEQ ID NO: 5961 - DNA, 1017 bp, Saccharomyces cerevisiae
atgtcaaccacagcatccacgccttcatctttacgtcatttgatttctataaaagatctttctgatgaagaattcagaatcttagtacaaagagctcaacatttcaagaatgtttttaaagcaaataaaacgaatgatttccaatccaaccatctgaaactattgggtagaactatagccttaatatttactaaaagatcaactagaacgagaatttcgaccgaaggtgcagccaccttctttggtgcccaaccgatgtttttaggtaaagaggatattcagcttggtgtcaatgaatcattttacgataccaccaaggttgtatcatctatggtttcatgtatttttgcccgtgtgaacaaacatgaagacatacttgctttttgcaaggattcctctgtaccgatcatcaactctctatgtgacaaattccaccctttgcaagcaatttgtgatcttttaacaataatcgaaaacttcaatatatctctagatgaagtaaataagggaatcaattcaaaattgaagatggcatggattggtgatgccaataatgtcataaatgatatgtgcatcgcatgtctgaaattcggtataagtgtcagtatttccactccccccggtattgaaatggattccgatattgtcgatgaagcaaagaaagttgctgagagaaacggtgcgacatttgaattaacacacgactctttaaaggcctccaccaatgccaatatattagtaaccgatactttcgtttccatgggtgaagaatttgcgaaacaggccaagctgaaacaattcaaaggttttcaaatcaatcaagaacttgtctctgtggctgatccaaactacaaatttatgcattgtctgccaagacatcaagaagaagttagtgatgatgtcttttatggagagcattccatagtctttgaagaagcagaaaacagattatatgcagctatgtctgccattgatatctttgttaataataaaggtaatttcaaggacttgaaataa

SEQ ID NO: 5962 - DNA, 1017 bp, Artificial Sequence
  Description of Artificial Sequence: Synthetic polynucleotide
atgtctaccacagcatccacgccttcttctttacgtcatttgatttctataaaagatctttctgatgaagaattcagaatcttagtacaaagagctcaacatttcaagaatgtttttaaagcaaataaaacgaatgatttccaatccaaccatttgaaacttttgggtagaactatagccttaatatttactaaaagatctactagaacgagaatttctaccgaaggtgcagccaccttctttggtgcccaaccgatgtttttaggtaaagaggatattcagcttggtgtcaatgaaagtttttacgataccaccaaggttgtatcttctatggtttcttgtatttttgcccgtgtgaacaaacatgaagacatacttgctttttgcaaggattcctctgtaccgatcatcaactctttatgtgacaaattccaccctttgcaagcaatttgtgatcttttaacaataatcgaaaacttcaatatatctttagatgaagtaaataagggaatcaattctaaattgaagatggcatggattggtgatgccaataatgtcataaatgatatgtgcatcgcatgtttgaaattcggtataagtgtcagtatttccactccccccggtattgaaatggattccgatattgtcgatgaagcaaagaaagttgctgagagaaacggtgcgacatttgaattaacacacgactctttaaaggcctccaccaatgccaatatattagtaaccgatactttcgtttccatgggtgaagaatttgcgaaacaggccaagttgaaacaattcaaaggttttcaaatcaatcaagaacttgtctctgtggctgatccaaactacaaatttatgcattgtttgccaagacatcaagaagaagttagtgatgatgtcttttatggagagcattccatagtctttgaagaagcagaaaacagattatatgcagctatgtctgccattgatatctttgttaataataaaggtaatttcaaggacttgaaatga

SEQ ID NO: 5963 - DNA, 2484 bp, Saccharomyces cerevisiae
atgcctagcccatatgacggtaaaagaacagtaactcagcttgttaacgagttagaaaaggcagaaaaactatccggtagaggcagagcttatagaagggtttgtgacttatcacacagcaataagaaagtaatttcatggaaatttaacgaatgggattatggcaaaaatactatcactttgccatgtaatgcaagaggcttatttattagcgatgatacaacgaatccagttattgttgctagaggatacgataagtttttcaatgtaggcgaggtcaactttaccaagtggaattggattgaagagaactgtacagggccttacgatgtcactataaaagccaatggttgtatcatttttatatctggtttagaagatggtaccttggtagtttgttcgaagcattctactggacccagagcagacgtagacaggaaccatgcagaagcaggtgagaagcaacttttaagacaactggcggcaatgaacatcaatcgaagtgattttgctagaatgctatatacccataatgtcaccgctgtggcagaatattgcgatgattcatttgaagaacacatcttagagtatccccttgaaaaagctggcctatacttacatggtgtaaatgttaataaagcggaatttgaaacttgggatatgaaagatgtttcgcaaatggcgagtaaatacggattcaggtgcgtccaatgcattacatcgaacaccttggaggatttgaaaaagttcctagataactgctctgcaaccggatcttttgaagggcaagagattgaaggttttgttatcaggtgccacttgaagagtactgaaaagccattttttttcaagtataaatttgaagaaccgtatttgatgtaccgtcagtggagagaagttactaaagactatatttccaacaagtcaagagtgtttaaatttagaaagcataaatttataaccaacaagtatcttgatttcgcaatcccaatattggagtcatcacccaagatctgtgagaattacttgaaaggttttggtgtgattgaattgagaaataagtttctacaatcatatggcatgagtgggctggaaatcttaaaccacgaaaaagtggccgagttggaattaaaaaacgccattgattatgataaagtagacgaacgcactaaatttttaatctttccaatatcagttattggatgtggcaaaacaacaacttcccagacattagtgaatttgttccctgacagctggggtcatattcaaaatgatgatattacaggtaaagataaatctcaattaatgaaaaaatcattggaactattatccaaaaaagaaatcaaatgtgtcatagttgacagaaacaatcaccaattccgcgaaagaaagcaattatttgaatggttgaatgaactaaaagaagattatttggtgtatgatacgaacatcaaggtaatcggcgtgtcattcgcgccatatgacaaactatcggaaataagagacataacactgcaaagagtaatcaaaagaggtaacaatcaccaaagtattaaatgggacgaattaggagagaagaaagtggtaggcatcatgaatgggtttttgaaaagatatcaacctgttaatttagacaaatcaccagataatatgtttgatttaatgatagagttagattttggacaagcagactcttcattaaccaatgcgaaacaaatcctcaatgaaattcataaagcttatccaattttggtaccagagatcccgaaagatgatgaaattgagacagcgttcagaaggagcttagattacaaacctactgtgagaaaaatagttggtaaaggcaacaataatcaacaaaaaacgcctaagttaattaaacctacatatatctcagctaaaatagaaaactacgatgaaattattgaattggtcaagaggtgtattgctagcgatgcagagctgactgagaaattcaagcatttactagctagtggaaaagttcagaaggaacttcatataacattaggtcatgtcatgtcgtcccgtgaaaaagaggcaaaaaagttgtggaaatcatattgtaacagatacactgaccagataacggagtacaataacaaccgcatagaaaatgcacaaggctctggtaataaccaaaatacgcaggtaaaaacgaccgacaaactgaattttaggctcgaaaaactatgttgggatgaaaaaatcattgctattgtagtggaactgtctaaagataaagatggatgcataattgatgaaaacaatgagaaaattaaagggttgtgttgtcaaaacaaaattcctcatattacgctgtgcaaacttgaaagtggtgttaaggctgtttattccaatgttctatgtgagaaggttgaatctgctgaagttgatgaaaatataaaagtggtgaaattggacaactcgaaggaatttgttggcagtgtatatttaaatttttag

SEQ ID NO: 5964 - DNA, 2484 bp, Artificial Sequence
  Description of Artificial Sequence: Synthetic polynucleotide
atgcctagcccatatgacggtaaaagaacagtaactcagcttgttaacgagttagaaaaggcagaaaaactttccggtagaggcagagcttatagaagggtttgtgacttatcccacagcaataagaaagtaatttcttggaaatttaacgaatgggattatggcaaaaatactatcactttgccatgtaatgcaagaggcttatttattagcgatgatacaacgaatccagttattgttgctagaggatacgataagtttttcaatgtaggcgaggtcaactttaccaagtggaattggattgaagagaactgtacagggccttacgatgtcactataaaagccaatggttgtatcatttttatatctggtttagaagatggtaccttggtagtttgttccaagcattctactggacccagagcagacgtagacaggaaccatgcagaagcaggtgagaagcaacttttaagacaattggcggcaatgaacatcaatagaagtgattttgctagaatgctttatacccataatgtcaccgctgtggcagaatattgcgatgattcttttgaagaacacatcttagagtatccccttgaaaaagctggcctttacttacatggtgtaaatgttaataaagcggaatttgaaacttgggatatgaaagatgtttctcaaatggcgagtaaatacggattcaggtgcgtccaatgcattacaagtaacaccttggaggatttgaaaaagttcttggataactgctctgcaaccggatcttttgaagggcaagagattgaaggttttgttatcaggtgccacttgaagagtactgaaaagccattttttttcaagtataaatttgaagaaccgtatttgatgtaccgtcagtggagagaagttactaaagactatatttccaacaagtctagagtgtttaaatttagaaagcataaatttataaccaacaagtatcttgatttcgcaatcccaatattggagtcttctcccaagatctgtgagaattacttgaaaggttttggtgtgattgaattgagaaataagtttttgcaaagttatggcatgagtgggttggaaatcttaaaccacgaaaaagtggccgagttggaattaaaaaacgccattgattatgataaagtagacgaacgcactaaatttttaatctttccaatatctgttattggatgtggcaaaacaacaacttcccagacattagtgaatttgttccctgacagctggggtcatattcaaaatgatgatattacaggtaaagataaatctcaattaatgaaaaaatctttggaattattatccaaaaaagaaatcaaatgtgtcatagttgacagaaacaatcaccaattccgcgaaagaaagcaattatttgaatggttgaatgaattgaaagaagattatttggtgtatgatacgaacatcaaggtaatcggcgtgtctttcgcgccatatgacaaattatctgaaataagagacataacattacaaagagtaatcaaaagaggtaacaatcaccaaagtattaaatgggacgaattaggagagaagaaagtggtaggcatcatgaatgggtttttgaaaagatatcaacctgttaatttagacaaatctccagataatatgtttgatttaatgatagagttagattttggacaagcagactcttctttaaccaatgcgaaacaaatcctcaatgaaattcataaagcttatccaattttggtaccagagatcccgaaagatgatgaaattgagacagcgttcagaaggagcttagattacaaacctactgtgagaaaaatagttggtaaaggcaacaataatcaacaaaaaacgcctaagttaattaaacctacatatatctctgctaaaatagaaaactacgatgaaattattgaattggtcaagaggtgtattgctagcgatgcagagttaactgagaaattcaagcatttattagctagtggaaaagttcagaaggaacttcatataacattaggtcatgtcatgtcttcccgtgaaaaagaggcaaaaaagttgtggaaaagttattgtaacagatacactgaccagataacggagtacaataacaaccgcatagaaaatgcacaaggctctggtaataaccaaaatacgcaggtaaaaacgaccgacaaattgaattttaggctcgaaaaattatgttgggatgaaaaaatcattgctattgtagtggaattatctaaagataaagatggatgcataattgatgaaaacaatgagaaaattaaagggttgtgttgtcaaaacaaaattcctcatattacgttatgcaaacttgaaagtggtgttaaggctgtttattccaatgttttatgtgagaaggttgaatctgctgaagttgatgaaaatataaaagtggtgaaattggacaactccaaggaatttgttggcagtgtatatttaaatttttga

SEQ ID NO: 5965 - DNA, 1872 bp, Saccharomyces cerevisiae
atgcccgctgaaattgacattgatgaagctgacgtattagttttatcacaggagttacaaaagacaagtaaactcactttcgaaatcaataaatctttgaaaaaaattgcagctacatccaatcaatccagtcaactcttcactcctattcttgctagaaataatgttttaaccacattacaaagaaatattgaaagtacattgaattccgttgcctcagttaaggatctagcaaacgaagcttccaagtatgagatcattttacaaaagggtattaatcaagtcggtttaaagcaatacacccaagtagtacataagctagatgatatgttggaagacattcagtctggacaagccaatcgagaagaaaactcagaattccatgggattttaactcacttggaacaattgatcaaacgtagcgaggctcaactaagagtatattttatttcaattttgaacagtattaaaccgtttgatccacaaatcaatatcaccaaaaagatgccatttccatactacgaggaccagcagttaggcgctttatcgtggattttagattattttcatggaaattcagaaggttctattatacaggacatactcgtcggtgaaaggagtaaattaatcctcaagtgcatggcattccttgaaccttttgccaaagaaatcagcactgcaaaaaacgccccgtatgagaagggcagtagcgggatgaacagctacacggaggccttattaggcttcatcgccaatgaaaaatcactagtagacgacctctactctcaatatacagaaagtaaaccccacgtcttgtcacagatcttgtcgcctttaattagcgcatatgctaagcttttcggtgcaaatttgaaaattgtacgaagcaacctcgagaactttggattctttagttttgagctagtggaaagcataaatgatgtgaaaaaatctcttcgaggcaaggaactacaaaactataatttattgcaagattgtacgcaagaagtacgtcaagtaacacagtcattattcagagatgccattgataggattatcaaaaaggcaaattctatttctactattccttccaataatggtgtcactgaagcaactgtagataccatgtcaagactaagaaagttcagtgagtacaaaaacggatgtttaggcgccatggacaatatcacacgtgaaaattggttaccatccaattataaggagaaagaatacactttgcaaaacgaggctttaaattgggaagatcataatgtattactatcatgttttataagtgattgcatagacactttggcagttaatcttgagagaaaggcacaaatagcactgatgcctaaccaagagccagatgtggctaatcctaatagctctaaaaataagcacaagcaacgtattggattcttcattttaatgaacctgacgcttgttgagcagatcgtggaaaagtcagaattaaacttaatgttagctggagaaggtcactccagattggaacggctgaagaaacgttatattagttatatggtatcagattggagagatttaactgcaaatttgatggattctgtgtttattgatagtagcgggaagaagtcaaaagacaaagaacaaataaaggagaaatttagaaaattcaatgaaggattcgaagatttagtatcaaaaacaaaacagtataagctttcagatccatcattgaaagtaactttgaagtcagaaataatatcgttggttatgcccatgtatgaaagattctacagtagatataaagactctttcaagaatcctagaaagcatatcaaatatacccctgacgaactaactactgttcttaaccaattagtgagatag

SEQ ID NO: 5966 - DNA, 1872 bp, Artificial Sequence
  Description of Artificial Sequence: Synthetic polynucleotide
atgcccgctgaaattgacattgatgaagctgacgtattagttttatctcaggagttacaaaagacaagtaaactcactttcgaaatcaataaatctttgaaaaaaattgcagctacatccaatcaatccagtcaactcttcactcctattcttgctagaaataatgttttaaccacattacaaagaaatattgaaagtacattgaattccgttgcctctgttaaggatttggcaaacgaagcttccaagtatgagatcattttacaaaagggtattaatcaagtcggtttaaagcaatacacccaagtagtacataagttggatgatatgttggaagacattcagtctggacaagccaatagagaagaaaactctgaattccatgggattttaactcacttggaacaattgatcaaacgtagcgaggctcaattgagagtatattttatttccattttgaacagtattaaaccgtttgatccacaaatcaatatcaccaaaaagatgccatttccatactacgaggaccagcagttaggcgctttatcttggattttagattattttcatggaaattctgaaggttctattatacaggacatactcgtcggtgaaaggagtaaattaatcctcaagtgcatggcattccttgaaccttttgccaaagaaatcagcactgcaaaaaacgccccgtatgagaagggcagtagcgggatgaacagctacacggaggccttattaggcttcatcgccaatgaaaaatctttagtagacgacctctactctcaatatacagaaagtaaaccccacgtcttgtctcagatcttgtctcctttaattagcgcatatgctaagcttttcggtgcaaatttgaaaattgtaagaagcaacctcgagaactttggattctttagttttgagttggtggaaagcataaatgatgtgaaaaaatctcttaggggcaaggaattacaaaactataatttattgcaagattgtacgcaagaagtacgtcaagtaacacagtctttattcagagatgccattgataggattatcaaaaaggcaaattctatttctactattccttccaataatggtgtcactgaagcaactgtagataccatgagtagattgagaaagttcagtgagtacaaaaacggatgtttaggcgccatggacaatatcacacgtgaaaattggttaccatccaattataaggagaaagaatacactttgcaaaacgaggctttaaattgggaagatcataatgtattattaagttgttttataagtgattgcatagacactttggcagttaatcttgagagaaaggcacaaatagcattaatgcctaaccaagagccagatgtggctaatcctaatagctctaaaaataagcacaagcaacgtattggattcttcattttaatgaacttgacgcttgttgagcagatcgtggaaaagtctgaattaaacttaatgttagctggagaaggtcactccagattggaaagattaaagaaacgttatattagttatatggtatctgattggagagatttaactgcaaatttgatggattctgtgtttattgatagtagcgggaagaagagtaaagacaaagaacaaataaaggagaaatttagaaaattcaatgaaggattcgaagatttagtatccaaaacaaaacagtataagctttctgatccatctttgaaagtaactttgaagtctgaaataatatctttggttatgcccatgtatgaaagattctacagtagatataaagactctttcaagaatcctagaaagcatatcaaatatacccctgacgaattgactactgttcttaaccaattagtgagatga

SEQ ID NO: 5967 - DNA, 3141 bp, Saccharomyces cerevisiae
atgcccatggaccaatctatctcatctccattgtttcccatggaaaaggatattgatatccccctcgatgctacacccttggcacaaagttcatcattacagctttttattcatttagctgaaccagttgttttcctccaaggctttgaccctcagaagacggaatatccctcggttgttcttcggggctgtctagtggtaagaatactgaaacccacaaagctgaaaagcataagtctttcgttcaaaggatattctagaactgaatggcctgaaggtatccctcctaaaagacaagaattcgtggaaatcaaagatattgtagaccatacatgggctctatatccgccaactgaacagaagagcaagaaaaagatggatgcttccgcacctaatgagagcaacaatgcagctaataattttttgacgaaggaaagtggtgcctctctttatagaacactgtctgataatgaaactataacaagcagaaaaaattctatatcaggtttgtcctcgttgaacttgtcacctctaggtgcacctggaaattcctctgtcaacgtaaaagacagagaaagtagacaaagatctagatcttcgtcagtcacttcttccaatggaccatcaagaaacctatccccgataaatttattgaagagagccacgtctccttccgtgtctcaccacaactataaacctacgaccacttccatcttttccgacttgttgaataacacctttacccataatgatgcagcatcgcatcatggtcatcatatccccaccagtagcaatcatctggcaatgacaagcaacaacttcaccagcgggtctggaggagaattttttgtctttcaaccaggcgactatatttatgctttcgaagaactaattcctcaagcatacccagaatctattaaagctgatttcggatttgtggaatacttcttatttgccagtatagagagacctggtgcctttaaatcaaacattagcgcccggcaagtggttaatatcgtacggacacaggctcataattctgtggaagaaagtgagccgattatcatatctagagattgggaaaaccaattatattatgatatcgttatagcatcaaaggatattattttagatgcttttctgcctatcacgttcaaattcgctcccctcgataaagttacgttgcatagaataagaatttatgtgacagagacaatggagtattattgtagagaaaagaaggttcataggatggagcccaccaagaaatttttattgacagaacagaaaggtcctaaattaccgaacttgcccaatgatgcaaatttgtcaaaggccaagaatatggggaacctgttgcaggatccaaagaatggtgatttagtgaataaagagtatgagtaccagatttttattccgagtcgtttcaacaaccatcagcaattgcatccagatacttcttatgaaaacatcaaagcaaaccattggattaaaatttgcctgagactgtctagagtagtagataataaaaggaaacattacgaaattagtattgactcgccaatacatgttttacatagattgtgctcgcatgcaaatacccttttaccgagctatgatggacatcctgcttcttttccaaaagaaacagattcctcaatttcctcaatattggaatcgtctgatgacaatataaatctataccataactctaatattttctttcccaaggaagtcctttcgtctccagtactttcgcccaatgtccaaccattagacattttaatcccacatttaccttccacttcattgaccagaaactctaggcaattcaataggaactcaaaatcccatccgagtgataataccatcttcaattctgcaaagttgaaatccaacatatatcaaccggagagtttgcaaagagaattagcatcaccccaggcaatcccgctctctccaataacatcgccaatgtcaaatatggaagtgcctccgccagattttgacttttcttccgatttcatatctgatgctgcttccggaaccactactactgaggtatcttcatcagagtcgagcatcttaccacgggatccaccatcttataaggatactgtgttgcatgacaacaatcaaaaaaggaggcctaattccaaacatccgacgcctccaagtttaaaagcttcccatccaaataaaaattcggataagaattcttcagaaactttgaataaaaaagaatcgatgtcaaagatagaagaaaataaacacaaaagagagacaactcctaaaaagagagaaaatagggacgtgaaaagtttatcaaccccacaacgcgaggaaagcaaagactcgacatccactgggaatcaaagtaacgaaaagaacagaaaaagagtattaagcctatcgtcttcattacatagctcaccaaataatagcggatttgcgcattcagctttaggaaatctgagcaatgaatcattaagatcattgaatagaagggaaagtgttcaagataatttaccgtccacaataagacacgataatccttttttcacagatttaaatcaagttttaatagaagacgaacttaaaaatcatgataaaaatgaactaaatcgacattctacaaatacttcgagcacccccgcctcagctagatcctcttttgactattcaggaattaatataagcaaggacaagttgaacatggaaccattactgagtaaaacggaaacgttgactaataaagttaatgaagactcctttttaaggcctaatgattcatacgttgatctacttgaaccctcagtagatactacgattgatatcactgcgccgtacgctagaaattcctctgcttggcatcctttacaaaacgataacgataacaatcagttttctccacttttgggaagtaacgagaatttcttgaatgcagctaatgcacaaaattctgccgaatcagatcataataatgacattttcacacagggctcaggattaacggaaagctctaagaattctgattccgaggaaagatttatttcaagactttcttcacccgagaaagtactgattaatacgttagataatgaatctggattacaaagtataaatgagagtaccctttag

SEQ ID NO: 5968 - DNA, 3141 bp, Artificial Sequence
  Description of Artificial Sequence: Synthetic polynucleotide
atgcccatggaccaatctatctcttctccattgtttcccatggaaaaggatattgatatccccctcgatgctacacccttggcacaaagttcttctttacagctttttattcatttagctgaaccagttgttttcctccaaggctttgaccctcagaagacggaatatccctctgttgttcttaggggctgtttggtggtaagaatattgaaacccacaaagttgaaaagcataagtctttctttcaaaggatattctagaactgaatggcctgaaggtatccctcctaaaagacaagaattcgtggaaatcaaagatattgtagaccatacatgggctttgtatccgccaactgaacagaagagcaagaaaaagatggatgcttccgcacctaatgagagcaacaatgcagctaataattttttgacgaaggaaagtggtgcctctctttatagaacattatctgataatgaaactataacaagcagaaaaaattctatatctggtttgtcctctttgaacttgtctcctttaggtgcacctggaaattcctctgtcaacgtaaaagacagagaaagtagacaaagatctagatcttcttctgtcacttcttccaatggaccatctagaaacctttccccgataaatttattgaagagagccacgtctccttccgtgtctcaccacaactataaacctacgaccacttccatcttttccgacttgttgaataacacctttacccataatgatgcagcatctcatcatggtcatcatatccccaccagtagcaatcatttagcaatgacaagcaacaacttcaccagcgggtctggaggagaattttttgtctttcaaccaggcgactatatttatgctttcgaagaattgattcctcaagcatacccagaatctattaaagctgatttcggatttgtggaatacttcttatttgccagtatagagagacctggtgcctttaaaagtaacattagcgccagacaagtggttaatatcgtaagaacacaggctcataattctgtggaagaaagtgagccgattatcatatctagagattgggaaaaccaattatattatgatatcgttatagcatccaaggatattattttagatgcttttttacctatcacgttcaaattcgctcccctcgataaagttacgttgcatagaataagaatttatgtgacagagacaatggagtattattgtagagaaaagaaggttcataggatggagcccaccaagaaatttttattgacagaacagaaaggtcctaaattaccgaacttgcccaatgatgcaaatttgtccaaggccaagaatatggggaaccttttgcaggatccaaagaatggtgatttagtgaataaagagtatgagtaccagatttttattccgagtcgtttcaacaaccatcagcaattgcatccagatacttcttatgaaaacatcaaagcaaaccattggattaaaatttgcttgagattatctagagtagtagataataaaaggaaacattacgaaattagtattgactctccaatacatgttttacatagattgtgctctcatgcaaatacccttttaccgagctatgatggacatcctgcttcttttccaaaagaaacagattccagtatttcctccatattggaaagctctgatgacaatataaatctttaccataactctaatattttctttcccaaggaagtcctttcttctccagtactttctcccaatgtccaaccattagacattttaatcccacatttaccttccacttctttgaccagaaactctaggcaattcaataggaactccaaatcccatccgagtgataataccatcttcaattctgcaaagttgaaatccaacatatatcaaccggagagtttgcaaagagaattagcatctccccaggcaatcccgctctctccaataacatctccaatgagtaatatggaagtgcctccgccagattttgacttttcttccgatttcatatctgatgctgcttccggaaccactactactgaggtatcttcttctgagagcagcatcttaccaagagatccaccatcttataaggatactgtgttgcatgacaacaatcaaaaaaggaggcctaattccaaacatccgacgcctccaagtttaaaagcttcccatccaaataaaaattctgataagaattcttctgaaactttgaataaaaaagaaagtatgtccaagatagaagaaaataaacacaaaagagagacaactcctaaaaagagagaaaatagggacgtgaaaagtttatctaccccacaacgcgaggaaagcaaagactctacatccactgggaatcaaagtaacgaaaagaacagaaaaagagtattaagcttatcttcttctttacatagctctccaaataatagcggatttgcgcattctgctttaggaaatttgagcaatgaatctttaagaagtttgaatagaagggaaagtgttcaagataatttaccgtccacaataagacacgataatccttttttcacagatttaaatcaagttttaatagaagacgaacttaaaaatcatgataaaaatgaattgaatagacattctacaaatacttccagcacccccgcctctgctagatcctcttttgactattctggaattaatataagcaaggacaagttgaacatggaaccattattaagtaaaacggaaacgttgactaataaagttaatgaagactcctttttaaggcctaatgattcttacgttgatttacttgaaccctctgtagatactacgattgatatcactgcgccgtacgctagaaattcctctgcttggcatcctttacaaaacgataacgataacaatcagttttctccacttttgggaagtaacgagaatttcttgaatgcagctaatgcacaaaattctgccgaaagtgatcataataatgacattttcacacagggcagtggattaacggaaagctctaagaattctgattccgaggaaagatttatttctagactttcttctcccgagaaagtacttattaatacgttagataatgaatctggattacaaagtataaatgagagtaccctttga

SEQ ID NO: 5969 - DNA, 1815 bp, Saccharomyces cerevisiae
atgcatttccccaaaaaaaagcattccggaaatctctccgtggtggaattgccgaaggaagctctccaagattctttaactgctgctcagattactttcaagagatatgcccaccccaatggcaatgccggtagcgcagagaggccgagacatctaaaggtggaatctgcgcctgtcgtgaaatctgagccttctttgccgaggatgagacaaccggaaccgagaagtataaatcatcaatactctagggaaacgcttccaggccattctgaagccttttccgtaccgacgactcctctgcagacaatccattatgatgtaaggaataaagcgtcaaattcgccaagtagtatagcagctgcagagacagctgcatacctagcccacacaaattcatttagtaacagatcatccggtgtcggcagccgggatccagttatggatactgaaacaaaaccgccacgtgctccttcagccttgaaaaatgagctgcaattgaacagaatgaggatacctccgccgtcatatgataataatgttcgttcacgatctatttcgccacaagtatcctactctacctcgctgtcatcatcgtgttccataagttccgatggagaagaaacttcttatagagaaaaaagcaccgatgaggcatttcctcctgaaccttccatgtcttcttatagtcttgcgtccaaagcctcagcaaaggcttctctaacggacccctcacagcggcagcaagagtcagactatacggcaatgaataaactcaatggaggaaatataatatataaaggcactttacccgacctaataccgcgaagccaaaggaagacaagtaaacccaggttcaagcacaggcttttacgatcacctgagcagcagcaagaaaacttatcacgtgtgtattcggaccaaacgcagaatggtagggcaatcataaacacgcagcaaaatgtaaagttaaagacaactatgaggcgcgggaagtacgcaattacagacaatgatgaaacttttccctacgacagaaagtctgtatcatcagactcagacacagatgaagattctaatgtgatggaaatcaaggacaagaagaagaaaagtcgtcgctctaagataaagaaggggttgaaaacaacagcagctgtagttgggagtagtacctctgtccttccgttccctcatcaccatcatcatcaccatcagctccataacccgaattctcatcacttacacacgcaccatcatacaagttctcacaaattcaatgaagataaaccgtggaaatctcatagagatctcgggtttattaccgaacaagaaagaaaaagatacgagtctatgtgggtatcaaacagatactcgtatttgcgcttgctgccgtggtggccctctctcgcgaatgaagacgacgagtctcacttacagcccttaaatttaccgcaagacggcctgatgcttaacttagtcgtaaaagatatatggtatcgatcaaacctacccagggatcttctagtgcaaatatacaatatggtcgacacaagaaaagacggtaccttagacagaaaatcgtttatagtgggcatgtggctggttgatcaatgtctctatggccgaaagctaacgaatgagctggaccagagagtttggaatagcgttgacggctatgttctcggtacaattaacgtgaagcctgccacttccgatcactatcacaacgctaataaccctctagataagccatcaaagctttcagtccgacaggaattgaaaaacatcaaacgcgatctcagaaatgtcagaatatga

SEQ ID NO: 5970 - DNA, 1815 bp, Artificial Sequence
  Description of Artificial Sequence: Synthetic polynucleotide
atgcatttccccaaaaaaaagcattccggaaatctctccgtggtggaattgccgaaggaagctctccaagattctttaactgctgctcagattactttcaagagatatgcccaccccaatggcaatgccggtagcgcagagaggccgagacatttgaaggtggaatctgcgcctgtcgtgaaatctgagccttctttgccgaggatgagacaaccggaaccgagaagtataaatcatcaatactctagggaaacgcttccaggccattctgaagccttttccgtaccgacgactcctttgcagacaatccattatgatgtaaggaataaagcgtctaattctccaagtagtatagcagctgcagagacagctgcatacttggcccacacaaattcttttagtaacagaagttccggtgtcggcagcagagatccagttatggatactgaaacaaaaccgccacgtgctccttctgccttgaaaaatgagttacaattgaacagaatgaggatacctccgccgagctatgataataatgttcgttctcgttctatttctccacaagtatcctactctacctccttatcttcttcttgttccataagttccgatggagaagaaacttcttatagagaaaaaagcaccgatgaggcatttcctcctgaaccttccatgtcttcttatagtcttgcgtccaaagcctctgcaaaggcttctttgacggacccctctcagagacagcaagagagtgactatacggcaatgaataaactcaatggaggaaatataatatataaaggcactttacccgacttgataccgagaagccaaaggaagacaagtaaacccaggttcaagcacaggcttttaagatctcctgagcagcagcaagaaaacttatctcgtgtgtattctgaccaaacgcagaatggtagggcaatcataaacacgcagcaaaatgtaaagttaaagacaactatgaggcgcgggaagtacgcaattacagacaatgatgaaacttttccctacgacagaaagtctgtatcttctgacagtgacacagatgaagattctaatgtgatggaaatcaaggacaagaagaagaaaagtcgtcgctctaagataaagaaggggttgaaaacaacagcagctgtagttgggagtagtacctctgtccttccgttccctcatcaccatcatcatcaccatcagctccataacccgaattctcatcacttacacacgcaccatcatacaagttctcacaaattcaatgaagataaaccgtggaaatctcatagagatctcgggtttattaccgaacaagaaagaaaaagatacgagtctatgtgggtatccaacagatactcctatttgcgcttgttaccgtggtggccctctctcgcgaatgaagacgacgagtctcacttacagcccttaaatttaccgcaagacggcttaatgcttaacttagtcgtaaaagatatatggtatagatctaacttgcccagggatcttttagtgcaaatatacaatatggtcgacacaagaaaagacggtaccttagacagaaaaagttttatagtgggcatgtggttagttgatcaatgtctctatggcagaaagttgacgaatgagttggaccagagagtttggaatagcgttgacggctatgttctcggtacaattaacgtgaagcctgccacttccgatcactatcacaacgctaataaccctttggataagccatctaagctttctgtcagacaggaattgaaaaacatcaaacgcgatctcagaaatgtcagaatatga

SEQ ID NO: 5971 - DNA, 2196 bp, Saccharomyces cerevisiae
atgtttagagtatttggttcatttggatcaaagggtaatcaatcttctggtgaagagcaatcaacaaagacaaaacaggttctgaagcaggctaatgactttgagatcgccttaaaggcaatggattttgtccttgatgatagaacggatgaagggttgaatttgctgaaaaaagctgaaatggaaactggttcagatcaaactatcttgactttggcaagaggtgttattgaatttcttcaagccactttgagttttgaaactgaagaaatgaaaagagctgcaattactttaggcaaagctgagcaaatgtcctggaaaagtaagcaaaatgctgaaaagaccaattttaggagcagttcaatatatcctcccggtactgtctatgctgtaacatatactgagtcatgtctgttgcatgccttgttgatgttatttagtgaaagcatgatggaagcagccaaggctttgctaaagttaaggagggcttatacaatgttacaagatatcatggttactgtcaaaaaagctgaacgatcgaaaaattcgagctctccctctccaagcgaaaagagccaagagtcatgcggaagttttgtttctgcagagacaactttcatatcggttgatataccatacaaattgtcttccgaggacaagtccaatccactcctattggaatttgctgaaaaaatctacacgatgagaatgggaaggttatcaggtgcccatattggcaatactccatcttttcataggttaagggatgatttgggtttacagacgactccgtctcaagcttccgaccgccattctgtttcagatgatttcgatttagaacaggctaccatcgacgaattcatccattcaggtgctaatttatgctatggtatcttgcaagtcgtcttatccttacttccacctgcaatcggtgctgtgctatctattgttggattcaagggatcccgtgaagaaggtttgaggctagtttggaaggctacaaaggagagaaatgttcacgggtgtataggtttgttaggtctgatgttttattacgacggtcctttccaatttacagatgctgactttgatataccaccaaacgataatggatcgagggctttaaacaaaagcagaacaaacgatagtagccttttaccaggttatatggacagtgcaaccttattgcatcctggaaaaattctggaggacgcattactaaaagcaagagcactttttcctaatagtgccctgtggctgctaaatgaggccaaaatgcttgctggaaagggcaggcttcgtgattctctggccctaatggactctattgatgtcaatagtatccgtatgagacaagtgaaatcgttgatggtgtttgaacgtgcgatccttttagtcaacttacacgaatacaacagagctgccgatgatttaataagtttgcttgatattagtgattggtctcacgcattgtacacttattttgcgggttgctgttacttggaaaattggaggatgacacaattaggcttattaaatgacggtaaagaacaattctataaagagcgggctcgagaactcatatttgacgctccatctttgttaggtaagaaaacgttcaaatccaaaaatcttccattggatagattcatgcttagaaaagttcaacaatttaataatatgcagaagaaattaaacctacaagaaccactagactcaatagcaacatcacctgtccatgaactggcttatttctacaacggttacaacaggatgactgaaaacgatttaattttgaccaaaaagatgttgacagagtatcacaaccccgccattgattcggaagacccagatcaagagctgatcagaaacttactactatccttgaccttaagaagattgggggatgctgaaagaggtttagccttgttagatgacattgttctgccaaaaatattctacattcaaaatggcaaagtcaaatatttcaaaaaaaccgaagacccatgggcatatccagccgctctttatgagagagctttattctgttggaaactgggtggcatggaaagtttgaatgaatgtagggaatggctgctaagagcccaaaattatgccgccgattacgaattgagtacgcgtatcggtatgaagatcaaagccgcccttgatagagttgaaaacgcgcttgcttaa

SEQ ID NO: 5972 - DNA, 2196 bp, Artificial Sequence
  Description of Artificial Sequence: Synthetic polynucleotide
atgtttagagtatttggttcttttggatccaagggtaatcaatcttctggtgaagagcaaagtacaaagacaaaacaggttttgaagcaggctaatgactttgagatcgccttaaaggcaatggattttgtccttgatgatagaacggatgaagggttgaatttgttgaaaaaagctgaaatggaaactggttctgatcaaactatcttgactttggcaagaggtgttattgaatttcttcaagccactttgagttttgaaactgaagaaatgaaaagagctgcaattactttaggcaaagctgagcaaatgtcctggaaaagtaagcaaaatgctgaaaagaccaattttaggagcagtagtatatatcctcccggtactgtctatgctgtaacatatactgagagttgtttgttgcatgccttgttgatgttatttagtgaaagcatgatggaagcagccaaggctttgttgaagttaaggagggcttatacaatgttacaagatatcatggttactgtcaaaaaagctgaaagaagtaaaaatagtagctctccctctccaagcgaaaagagccaagagagttgcggaagttttgtttctgcagagacaactttcatatctgttgatataccatacaaattgtcttccgaggacaagtccaatccactcttattggaatttgctgaaaaaatctacacgatgagaatgggaaggttatctggtgcccatattggcaatactccatcttttcataggttaagggatgatttgggtttacagacgactccgtctcaagcttccgaccgccattctgtttctgatgatttcgatttagaacaggctaccatcgacgaattcatccattctggtgctaatttatgctatggtatcttgcaagtcgtcttatccttacttccacctgcaatcggtgctgtgttatctattgttggattcaagggatcccgtgaagaaggtttgaggttggtttggaaggctacaaaggagagaaatgttcacgggtgtataggtttgttaggtttgatgttttattacgacggtcctttccaatttacagatgctgactttgatataccaccaaacgataatggatctagggctttaaacaaaagcagaacaaacgatagtagccttttaccaggttatatggacagtgcaaccttattgcatcctggaaaaattttagaggacgcattattgaaagcaagagcactttttcctaatagtgccttatggttgttgaatgaggccaaaatgcttgctggaaagggcaggcttcgtgattctttggccttgatggactctattgatgtcaatagtatccgtatgagacaagtgaaatctttgatggtgtttgaacgtgcgatccttttagtcaacttacacgaatacaacagagctgccgatgatttaataagtttgcttgatattagtgattggtctcacgcattgtacacttattttgcgggttgctgttacttggaaaattggaggatgacacaattaggcttattaaatgacggtaaagaacaattctataaagagagagctagagaactcatatttgacgctccatctttgttaggtaagaaaacgttcaaatccaaaaatcttccattggatagattcatgcttagaaaagttcaacaatttaataatatgcagaagaaattaaacttacaagaaccattggacagtatagcaacatctcctgtccatgaattggcttatttctacaacggttacaacaggatgactgaaaacgatttaattttgaccaaaaagatgttgacagagtatcacaaccccgccattgattctgaagacccagatcaagagttgatcagaaacttattattatccttgaccttaagaagattgggggatgctgaaagaggtttagccttgttagatgacattgttttgccaaaaatattctacattcaaaatggcaaagtcaaatatttcaaaaaaaccgaagacccatgggcatatccagccgctctttatgagagagctttattctgttggaaattgggtggcatggaaagtttgaatgaatgtagggaatggttgttaagagcccaaaattatgccgccgattacgaattgagtacgcgtatcggtatgaagatcaaagccgcccttgatagagttgaaaacgcgcttgcttga

SEQ ID NO: 5973 - DNA, 1470 bp, Saccharomyces cerevisiae
atgtccaatgctgctttgcaagtttatggcggcgacgaagtttccgcagtagtcattgatcctggctcatacacaacaaatattggctattcgggttctgacttccctcaatcaattctgccctctgtttacggtaaatacactgcagatgaaggcaataagaaaatattttctgaacaatcaattggaattccaagaaaagattatgaactgaaacctattatcgagaacggtctagtcatagactgggataccgcacaagaacagtggcaatgggcattgcagaacgaactctatttgaattccaactccggaataccagctctgttaactgagcccgtttggaatagcacagaaaacaggaaaaaatctttagaagtgctcttagaaggcatgcaatttgaagcctgttacttagcacccacatcgacatgcgtttcttttgcagcaggtagacccaattgtttggttgttgatattggacatgatacttgcagcgtcagtccaatagtggatggtatgacattatcaaagagtacaagaagaaattttattgctgggaaatttatcaatcacttgattaaaaaggcattggaacccaaagaaatcataccacttttcgcaatcaagcaaagaaaaccagagtttataaaaaaaacattcgactatgaggttgataaatcgctgtatgattacgccaataaccgagggttctttcaagagtgcaaagaaacactttgtcatatatgcccaacaaaaactttggaagaaacgaaaacagaattaagttctacggctaaaagatctattgaaagtccttggaatgaggagattgtttttgacaacgaaactcgttacggctttgctgaagagcttttccttccaaaagaagatgacatcccagcaaattggcctcgctcgaactctggagttgtgaaaacttggcggaatgattacgtgccgctaaaaagaaccaagccaagcggagtgaacaaatcagacaagaaagttacaccaactgaagaaaaggaacaggaagctgtaagcaaatctacttctccggctgcaaatagtgcagacactccaaatgaaaccggtaagagaccgttagaagaagaaaagcctcctaaagaaaataatgaattgattggtctagcggatcttgtttattcgtctataatgagcagtgatgtggatctaagagcgacactagctcataatgttgtccttacaggcggtacatcctctattcctggattaagtgataggttaatgacagaactaaacaaaatactaccatcccttaaatttagaatattaacaacagggcacactatcgaaaggcaataccagtcatggcttggcggtagtatacttacaagtctgggaacatttcaccaactgtgggttgggaaaaaggaatacgaagaggtgggcgtcgaaagattgcttaacgataggtttagatag

SEQ ID NO: 5974 - DNA, 1470 bp, Artificial Sequence
  Description of Artificial Sequence: Synthetic polynucleotide
atgtccaatgctgctttgcaagtttatggcggcgacgaagtttccgcagtagtcattgatcctggctcttacacaacaaatattggctattctggttctgacttccctcaatctattttgccctctgtttacggtaaatacactgcagatgaaggcaataagaaaatattttctgaacaatctattggaattccaagaaaagattatgaattgaaacctattatcgagaacggtttggtcatagactgggataccgcacaagaacagtggcaatgggcattgcagaacgaactctatttgaattccaactccggaataccagctttattaactgagcccgtttggaatagcacagaaaacaggaaaaaatctttagaagtgctcttagaaggcatgcaatttgaagcctgttacttagcacccacatctacatgcgtttcttttgcagcaggtagacccaattgtttggttgttgatattggacatgatacttgcagcgtcagtccaatagtggatggtatgacattatccaagagtacaagaagaaattttattgctgggaaatttatcaatcacttgattaaaaaggcattggaacccaaagaaatcataccacttttcgcaatcaagcaaagaaaaccagagtttataaaaaaaacattcgactatgaggttgataaatctttgtatgattacgccaataacagagggttctttcaagagtgcaaagaaacactttgtcatatatgcccaacaaaaactttggaagaaacgaaaacagaattaagttctacggctaaaagatctattgaaagtccttggaatgaggagattgtttttgacaacgaaactcgttacggctttgctgaagagcttttccttccaaaagaagatgacatcccagcaaattggcctcgctctaactctggagttgtgaaaacttggagaaatgattacgtgccgttaaaaagaaccaagccaagcggagtgaacaaaagtgacaagaaagttacaccaactgaagaaaaggaacaggaagctgtaagcaaatctacttctccggctgcaaatagtgcagacactccaaatgaaaccggtaagagaccgttagaagaagaaaagcctcctaaagaaaataatgaattgattggtttggcggatcttgtttattcttctataatgagcagtgatgtggatttgagagcgacattggctcataatgttgtccttacaggcggtacatcctctattcctggattaagtgataggttaatgacagaattgaacaaaatattgccatcccttaaatttagaatattaacaacagggcacactatcgaaaggcaataccagagttggcttggcggtagtatacttacaagtttgggaacatttcaccaattatgggttgggaaaaaggaatacgaagaggtgggcgtcgaaagattgcttaacgataggtttagatga

SEQ ID NO: 5975 - DNA, 3669 bp, Saccharomyces cerevisiae
atgtctgaagaacaaaccgctattgactctcccccttccactgtcgaaggatctgttgaaaccgtaactaccattgattcgccaagtactactgcctccactattgctgctaccgctgaagaacatcctcagttggagaaaaagccaactccattgccatctttgaaggatcttccttctttgggttcaaatgctgccttcgcgaacgttaaggttagctggggcccaaacatgaaacctgctgtctctaactcgccatcaccttccccttctgctccttcattgactactggccttggggccaagaggatgcgttcaaagaacatccaagaggctttcactttggacctgcaatctcagttgtcaatcaccaaacctgaattatctcgtattgtccaatctgttaagaaaaatcatgatgtttctgttgaatcaactctttctaagaatgctcgtacctttttggtttctggtgtagctgctaacgttcatgaagcaaagagagagttagtgaagaaattaacaaaaccaatcaatgctgtcatcgaggtcccatccaaatgtaaagccagtattatcggttcaggtggtagaactattcgtgaaattagtgatgcctacgaagttaaaatcaatgtctcaaaggaagtcaatgaaaactcatatgatgaagacatggatgatactacaagtaacgtttctttatttggtgattttgaatcggtcaacttggctaaggctaaaatcttggccattgttaaggaagaaaccaagaatgccacaatcaaattagtcgttgaagatgaaaaatacctaccatacattgatgtttccgagtttgcctccgatgagggtgatgaagaggtcaaagtccaattctataaaaaatcgggtgatattgtcatattgggtcctcgtgaaaaagcaaaagccacgaagacatctattcaagattatttgaaaaaattagcttctaatttggacgaagaaaaggtcaagattccatccaagttccagtttttgattgatgcagaagaactaaaagaaaaatacaatgtcattgtcactttcccatcaactcctgatgatgagcttgtgtcatttgtcggtttgcgcgataaggttggtgaagctatcacctatgccagatcgtcttcaaagagctatgtggttgaatctttagatatttccaaggctcatagtaagaatctgacccatgccaaaaatctaatcatgtatttcaccaagtactccgttttaaagggtcttgaagaatctcatcctaatgttaaaatatctttaccatccatacagtcattgccaacagctgaaactgttaccatccacatcagcgcaaaatctgatgaggcaaacgatatcaaggccgttcgtaaagaattgatttcttttgtgaacaatattccaccttccgaaaccctggttatcacagatttggattacgagttgttcggcgggtctattaaacattgtttattagcttccgaaagcagcgttgcctttgttcaattcggtgattattatccaaatgataacagtattttacttgttgctttaactgaagatgaagatttcaagccatctattgaagagattcaagcatctttgaacaaggccaatgagtcattaaactctctacgtactaaacaaaacaacatggagactaaaacttacgaattttccgaggaggttcaagactcattgtttaaaccatcttccgctacatggaaattgattatggaggacatttctgaacaagaaggccaccttcaaattaaactacatacccctgaagaaaatcagttaactgttagaggtgatgaaaaagctgccaaagctgctaacaaaatttttgaatctattttgaattctccatcgagcaaaagcaaaatgactgttaatattccagccaactcagttgccagattaattggtaacaagggctccaacctacaacaaattcgtgagaagtttgcctgccaaattgatattccaaacgaagagaacaataatgcttcgaaagataagactgtcgaagttactttgactggtttagaatacaacttgactcatgccaagaaatatttggctgccgaagccaaaaaatgggctgatatcatcacaaaggaactaattgttccagttaagtttcatggtagtctgattggtccacacggtacttatcgtaaccgtttgcaggaaaaatacaatgtcttcattaacttcccaagagacaatgaaattgtcaccattagaggcccttctcgtggtgtcaataaagctcatgaagaattgaaagctctgttagattttgaaatggagaacggacataagatggttattaatgttccagctgagcacgtcccaagaattatcggtaagaatggtgacaatatcaacgacatcagagctgaatacggtgttgagatggatttcttacaaaagagcaccgatccaaaggctcaggaaactggtgaggttgaactggagatcactggttctagacaaaacataaaagatgccgccaaacgtgtggaatccattgttgccgaagcctccgattttgtcactgaagtcttgaaaattgatcacaaataccataagtcaattgttggtagcggtggtcatattttaagagaaattatctccaaggctggtggtgaagaaattagaaataagtctgttgatattcctaacgcagactccgaaaataaagacattaccgtacaaggtcctcaaaagtttgtcaaaaaggttgtcgaggaaattaacaagattgtcaaggatgctgaaaatagtgttactaagaccattgatattccagcagaaagaaagggtgctttgattggccctggtgggattgttcgtcgtcaactagaatccgaatttaacattaacttattcgttcctaataaggatgaccctagcggcaaaataactattaccggtgcaccagaaaatgtcgagaaagctgagaagaaaatcttgaatgaaataatcagggaaaattttgaccgagaagtcgatgttcctgcctccatttatgaatatgtttcagaacgtggtgctttcatacaaaagttgagaatggatttatccgtcaatgtaagatttggtaacacctcaaagaaggctaacaaattagctcgtgctccaatcgaaattcctctagagaaagtctgtggatctaccgaaggcgaaaatgcagaaaagactaaatttaccatcgaagaagtcggtgcaccaacttcttccgaggaaggtgatattaccatgaggttgacatatgaaccaattgatttgagtagcattctctctgacggtgaagaaaaggaagtcacaaaggacacttcaaacgattccgctaagaaggaagaagctctcgatactgctgttaagttgattaaagaaagaattgccaaggcaccatctgctacatatgccggttacgtctggggtgctgataccagaagattcaatatgattgttggcccaggtggttctaacatcaaaaagattagagaagcggccgacgttatcatcaacgtcccaaggaagtctgacaaagtcaatgatgttgtgtacattagaggtaccaaagctggtgtcgaaaaggccggtgaaatggttttgaaatccttaagaagatag

SEQ ID NO: 5976 - DNA, 3669 bp, Artificial Sequence
  Description of Artificial Sequence: Synthetic polynucleotide
atgtctgaagaacaaaccgctattgactctcccccttccactgtcgaaggatctgttgaaaccgtaactaccattgattctccaagtactactgcctccactattgctgctaccgctgaagaacatcctcagttggagaaaaagccaactccattgccatctttgaaggatcttccttctttgggtagtaatgctgccttcgcgaacgttaaggttagctggggcccaaacatgaaacctgctgtctctaactctccatctccttccccttctgctccttctttgactactggccttggggccaagaggatgcgttccaagaacatccaagaggctttcactttggacttgcaatctcagttgtccatcaccaaacctgaattatctcgtattgtccaatctgttaagaaaaatcatgatgtttctgttgaatctactctttctaagaatgctcgtacctttttggtttctggtgtagctgctaacgttcatgaagcaaagagagagttagtgaagaaattaacaaaaccaatcaatgctgtcatcgaggtcccatccaaatgtaaagccagtattatcggttctggtggtagaactattcgtgaaattagtgatgcctacgaagttaaaatcaatgtctccaaggaagtcaatgaaaacagttatgatgaagacatggatgatactacaagtaacgtttctttatttggtgattttgaatctgtcaacttggctaaggctaaaatcttggccattgttaaggaagaaaccaagaatgccacaatcaaattagtcgttgaagatgaaaaatacttgccatacattgatgtttccgagtttgcctccgatgagggtgatgaagaggtcaaagtccaattctataaaaaatctggtgatattgtcatattgggtcctcgtgaaaaagcaaaagccacgaagacatctattcaagattatttgaaaaaattagcttctaatttggacgaagaaaaggtcaagattccatccaagttccagtttttgattgatgcagaagaattgaaagaaaaatacaatgtcattgtcactttcccatctactcctgatgatgagcttgtgtcctttgtcggtttgcgcgataaggttggtgaagctatcacctatgccagatcttcttccaagagctatgtggttgaatctttagatatttccaaggctcatagtaagaatttgacccatgccaaaaatttgatcatgtatttcaccaagtactccgttttaaagggtcttgaagaatctcatcctaatgttaaaatatctttaccatccatacagtctttgccaacagctgaaactgttaccatccacatcagcgcaaaatctgatgaggcaaacgatatcaaggccgttcgtaaagaattgatttcttttgtgaacaatattccaccttccgaaaccttggttatcacagatttggattacgagttgttcggcgggtctattaaacattgtttattagcttccgaaagcagcgttgcctttgttcaattcggtgattattatccaaatgataacagtattttacttgttgctttaactgaagatgaagatttcaagccatctattgaagagattcaagcatctttgaacaaggccaatgagtctttaaactctttacgtactaaacaaaacaacatggagactaaaacttacgaattttccgaggaggttcaagactctttgtttaaaccatcttccgctacatggaaattgattatggaggacatttctgaacaagaaggccaccttcaaattaaattgcatacccctgaagaaaatcagttaactgttagaggtgatgaaaaagctgccaaagctgctaacaaaatttttgaatctattttgaattctccatccagcaaaagcaaaatgactgttaatattccagccaactctgttgccagattaattggtaacaagggctccaacttacaacaaattcgtgagaagtttgcctgccaaattgatattccaaacgaagagaacaataatgcttccaaagataagactgtcgaagttactttgactggtttagaatacaacttgactcatgccaagaaatatttggctgccgaagccaaaaaatgggctgatatcatcacaaaggaattgattgttccagttaagtttcatggtagtttgattggtccacacggtacttatcgtaaccgtttgcaggaaaaatacaatgtcttcattaacttcccaagagacaatgaaattgtcaccattagaggcccttctcgtggtgtcaataaagctcatgaagaattgaaagctttattagattttgaaatggagaacggacataagatggttattaatgttccagctgagcacgtcccaagaattatcggtaagaatggtgacaatatcaacgacatcagagctgaatacggtgttgagatggatttcttacaaaagagcaccgatccaaaggctcaggaaactggtgaggttgaattagagatcactggttctagacaaaacataaaagatgccgccaaacgtgtggaatccattgttgccgaagcctccgattttgtcactgaagtcttgaaaattgatcacaaataccataagtctattgttggtagcggtggtcatattttaagagaaattatctccaaggctggtggtgaagaaattagaaataagtctgttgatattcctaacgcagactccgaaaataaagacattaccgtacaaggtcctcaaaagtttgtcaaaaaggttgtcgaggaaattaacaagattgtcaaggatgctgaaaatagtgttactaagaccattgatattccagcagaaagaaagggtgctttgattggccctggtgggattgttcgtcgtcaattggaatccgaatttaacattaacttattcgttcctaataaggatgaccctagcggcaaaataactattaccggtgcaccagaaaatgtcgagaaagctgagaagaaaatcttgaatgaaataatcagggaaaattttgacagagaagtcgatgttcctgcctccatttatgaatatgtttctgaacgtggtgctttcatacaaaagttgagaatggatttatccgtcaatgtaagatttggtaacacctccaagaaggctaacaaattagctcgtgctccaatcgaaattcctttagagaaagtctgtggatctaccgaaggcgaaaatgcagaaaagactaaatttaccatcgaagaagtcggtgcaccaacttcttccgaggaaggtgatattaccatgaggttgacatatgaaccaattgatttgagtagcattctctctgacggtgaagaaaaggaagtcacaaaggacacttctaacgattccgctaagaaggaagaagctctcgatactgctgttaagttgattaaagaaagaattgccaaggcaccatctgctacatatgccggttacgtctggggtgctgataccagaagattcaatatgattgttggcccaggtggttctaacatcaaaaagattagagaagcggccgacgttatcatcaacgtcccaaggaagtctgacaaagtcaatgatgttgtgtacattagaggtaccaaagctggtgtcgaaaaggccggtgaaatggttttgaaatccttaagaagatga

SEQ ID NO: 5977 - DNA, 900 bp, Saccharomyces cerevisiae
atgaaactttctaaattatcgatcttaacctccgccttagccacgtctgcattggccgctcctgccgttgttactgtcactgaacacgcccatgaggctgcagtcgttactgtgcaaggcgtagtttatgtcgaaaacggccaaacacgtacaacttacgaaacactagctcctgcttccactgccactccaacttctacagctacagctttggttgctccccctgtcgctccttcctctgcttccagcaattccgatgtggtcttgtctgctttgaagaacttagcctctgtttggggtaaaactaccgattcaacgaccacgttgacatcttctgaatctacatcgcaatcgttggctcaagctactacgacttctacacccgctgctgcttccaccacttccacacccgctgctaccaccaccacttctcaagccgctgctactagctcagcatcgtcttcggatagtgacctgtcagattttgcctcttctgtgttggctgaacacaacaagaagagagctttgcacaaggacacaccagctttgtcctggtccgatactttggcctcctacgctcaagactatgctgacaactatgattgctccggcactttgacccattctggcggtccatacggtgaaaacttggctttgggttatgacggcccagctgccgtcgacgcttggtacaatgaaatttccaactacgacttctcgaatccaggcttttcaagtaacactggccactttactcaagtcgtttggaagtccaccacccaagttggttgtggcatcaaaacctgtggcggtgcatggggtgactatgtcatctgtagttacgaccccgcaggaaactacgaaggcgaatacgccgataatgtcgagcccctagcttaa

SEQ ID NO: 5978 - DNA, 900 bp, Artificial Sequence
  Description of Artificial Sequence: Synthetic polynucleotide
atgaaactttctaaattatctatcttaacctccgccttagccacgtctgcattggccgctcctgccgttgttactgtcactgaacacgcccatgaggctgcagtcgttactgtgcaaggcgtagtttatgtcgaaaacggccaaacacgtacaacttacgaaacattggctcctgcttccactgccactccaacttctacagctacagctttggttgctccccctgtcgctccttcctctgcttccagcaattccgatgtggtcttgtctgctttgaagaacttagcctctgtttggggtaaaactaccgattctacgaccacgttgacatcttctgaatctacatctcaatctttggctcaagctactacgacttctacacccgctgctgcttccaccacttccacacccgctgctaccaccaccacttctcaagccgctgctactagcagcgcatcttcttctgatagtgacttaagtgattttgcctcttctgtgttggctgaacacaacaagaagagagctttgcacaaggacacaccagctttgtcctggtccgatactttggcctcctacgctcaagactatgctgacaactatgattgctccggcactttgacccattctggcggtccatacggtgaaaacttggctttgggttatgacggcccagctgccgtcgacgcttggtacaatgaaatttccaactacgacttcagtaatccaggcttttctagtaacactggccactttactcaagtcgtttggaagtccaccacccaagttggttgtggcatcaaaacctgtggcggtgcatggggtgactatgtcatctgtagttacgaccccgcaggaaactacgaaggcgaatacgccgataatgtcgagcccttggcttga

SEQ ID NO: 5979 - DNA, 2646 bp, Saccharomyces cerevisiae
atgctggagtttccaatatcagttctgctaggatgcctagtagccgtcaaggcacaaaccacgtttccaaacttcgagagcgatgtgctgaacgagcataacaagttcagagcgctacatgttgacacagcgccgctcacctggtccgacactctggccacctatgcgcagaactacgccgaccaatatgattgttcgggtgtcttaacgcattccgatggcccatatggtgagaaccttgcccttggttacacagacacgggagcggtggacgcctggtacggggagataagcaagtataattattcaaatcccggattttctgaatccacgggtcacttcacacaggtggtttggaagtcaaccgccgagattggatgtggttataaatattgtggtacgacatggaacaattatattgtgtgctcctacaaccctcctggaaactacctgggtgagtttgcagaggaagtggaaccacttataagcactgtttcctcgtcctcatcctcgtcctcttctacctcaactacatcagacacagtctccaccatctcatccagtattatgcccgctgtagcgcaagggtatacaacaacggtatcgtctgcggctagcagcagttctttaaaatcgacgaccataaaccctgccaagaccgctaccctcactgcgtcctcttctaccgtaattactagtagcacagaatcagttggatcctccactgtctcatcagcctcaagctcttctgtcactacttcctatgctacctcctcgagtaccgtcgtctctagtgatgctacttcatccactaccaccacctcatcggttgctacatcgtccagtaccacttcttccgaccctacctcgagcactgctgctgcttcttcttctgatcctgcctcaagttccgctgccgcttcctccagcgcgagtaccgagaacgccgcttcttctagcagcgccatctcgagctcttcatcaatggtttctgctcctttgagtagtactcttactacttccaccgcaagctccagaagtgtaacttccaattcagttaattctgttaagtttgcaaacacaactgtgttttctgctcaaacaacctcttctgtaagcgcctcattatcatcatctgtagctgctgacgatattcagggtagcacttccaaggaggccacaagctcagtttccgaacatactagtatagtaactagtgcaactaatgctgcccaatatgcaacgagacttgggtcatcttccagaagttcttccggggccgtctcttcctcagctgtgtcgcaatctgttctgaattccgttatagccgtcaacaccgacgtatctgtaacctcagttagtagcacagcccataccacaaaggacaccgccaccacttcagtaaccgcctcagaaagtatcacttcggaaactgctcaggcttcaagttcaacagagaagaatattagtaacagtgccgccacatcgagtagcatttactccaacagtgcttctgtgtcaggacacggtgtaacatacgctgccgaatacgccattacatccgagcaatcctctgcgcttgccacatctgtgcctgctacaaattgctctagtatcgtgaagaccacaactttagaaaattcgagtaccacaaccatcacagccattactaagagtactacaaccttggccactactgctaacaactccacaagggcagctaccgcagtaaccatagatcccacattggaccctaccgacaactcagctagtccaaccgacaatgctaaacacacctctacatatggatcttcttccacaggcgcatctttagatagcttacgcacaaccaccagtattagtgtctcaagcaacaccacacagttagtctctacctgcacttccgagagcgattattccgatagtcctagcttcgccatctccactgccaccaccactgaaagcaatctgatcacaaacaccatcacagcttcttgtagtacggatagtaatttccctacctccgctgcttcttctacagatgagacggccttcactagaacaatctcgacatcttgtagcactttgaacggcgcctcaacccaaaccagtgagctaaccacatcgcctatgaaaaccaacacggtggttccagcttcttctttcccttcaactacaaccacttgtctagaaaatgatgacactgccttttctagtatctacactgaagtcaacgccgcaactatcattaaccccggagaaacatcttctctcgctagcgatttcgccacatctgaaaagccaaacgagcccacttctgtcaaatccacctcaaacgaaggcacctcttccacaacaacaacctaccaacagactgttgctacactgtatgccaagccctccagcacaagcctaggtgcaagaacaactactggtagcaacggtcgttcaactaccagccaacaagacgggtctgccatgcatcagccaacttcctcgatctacactcaactaaaagaaggcacatcaaccaccgcaaaactttctgcatacgaaggtgctgcaacacctctttccattttccagtgcaatagtctagctggaacgattgccgcttttgtcgtagctgttctgttcgccttctag

SEQ ID NO: 5980 - DNA, 2646 bp, Artificial Sequence
  Description of Artificial Sequence: Synthetic polynucleotide
atgttagagtttccaatatctgttttgttgggatgcttagtagccgtcaaggcacaaaccacgtttccaaacttcgagagcgatgtgttgaacgagcataacaagttcagagcgttgcatgttgacacagcgccgctcacctggtccgacactttggccacctatgcgcagaactacgccgaccaatatgattgttctggtgtcttaacgcattccgatggcccatatggtgagaaccttgcccttggttacacagacacgggagcggtggacgcctggtacggggagataagcaagtataattattctaatcccggattttctgaatccacgggtcacttcacacaggtggtttggaagtctaccgccgagattggatgtggttataaatattgtggtacgacatggaacaattatattgtgtgctcctacaaccctcctggaaactacttgggtgagtttgcagaggaagtggaaccacttataagcactgtttcctcctcctcctcctcctcctcttctacctctactacaagtgacacagtctccaccatctcttccagtattatgcccgctgtagcgcaagggtatacaacaacggtatcttctgcggctagcagcagttctttaaaatctacgaccataaaccctgccaagaccgctaccctcactgcgtcctcttctaccgtaattactagtagcacagaatctgttggatcctccactgtcagttctgcctccagctcttctgtcactacttcctatgctacctcctccagtaccgtcgtctctagtgatgctacttcttccactaccaccacctcttctgttgctacatcttccagtaccacttcttccgaccctaccagtagcactgctgctgcttcttcttctgatcctgcctccagttccgctgccgcttcctccagcgcgagtaccgagaacgccgcttcttctagcagcgccatcagtagctcttcttctatggtttctgctcctttgagtagtactcttactacttccaccgcaagctccagaagtgtaacttccaattctgttaattctgttaagtttgcaaacacaactgtgttttctgctcaaacaacctcttctgtaagcgcctctttatcttcttctgtagctgctgacgatattcagggtagcacttccaaggaggccacaagctctgtttccgaacatactagtatagtaactagtgcaactaatgctgcccaatatgcaacgagacttgggagttcttccagaagttcttccggggccgtctcttcctctgctgtgagtcaatctgttttgaattccgttatagccgtcaacaccgacgtatctgtaacctctgttagtagcacagcccataccacaaaggacaccgccaccacttctgtaaccgccagtgaaagtatcacttctgaaactgctcaggcttccagttctacagagaagaatattagtaacagtgccgccacatctagtagcatttactccaacagtgcttctgtgtctggacacggtgtaacatacgctgccgaatacgccattacatccgagcaatcctctgcgcttgccacatctgtgcctgctacaaattgctctagtatcgtgaagaccacaactttagaaaatagtagtaccacaaccatcacagccattactaagagtactacaaccttggccactactgctaacaactccacaagggcagctaccgcagtaaccatagatcccacattggaccctaccgacaactctgctagtccaaccgacaatgctaaacacacctctacatatggatcttcttccacaggcgcatctttagatagcttacgcacaaccaccagtattagtgtctccagcaacaccacacagttagtctctacctgcacttccgagagcgattattccgatagtcctagcttcgccatctccactgccaccaccactgaaagcaatttgatcacaaacaccatcacagcttcttgtagtacggatagtaatttccctacctccgctgcttcttctacagatgagacggccttcactagaacaatcagtacatcttgtagcactttgaacggcgccagcacccaaaccagtgagttgaccacatctcctatgaaaaccaacacggtggttccagcttcttctttcccttccactacaaccacttgtttagaaaatgatgacactgccttttctagtatctacactgaagtcaacgccgcaactatcattaaccccggagaaacatcttctctcgctagcgatttcgccacatctgaaaagccaaacgagcccacttctgtcaaatccaccagtaacgaaggcacctcttccacaacaacaacctaccaacagactgttgctacattatatgccaagccctccagcacaagccttggtgcaagaacaactactggtagcaacggtcgttccactaccagccaacaagacgggtctgccatgcatcagccaacttcctctatctacactcaattgaaagaaggcacatctaccaccgcaaaactttctgcatacgaaggtgctgcaacacctctttccattttccagtgcaatagtttggctggaacgattgccgcttttgtcgtagctgttttgttcgccttctga

SEQ ID NO: 5981 - DNA, 99 bp, Saccharomyces cerevisiae
atgccgatattggtttggcaactaccgaaaagcaagaagctaaaaactttgaagtatagaatatgttttagagaattcttcgaccgagttgaaacatga

SEQ ID NO: 5982 - DNA, 99 bp, Artificial Sequence
  Description of Artificial Sequence: Synthetic oligonucleotide
atgccgatattggtttggcaattgccgaaaagcaagaagttgaaaactttgaagtatagaatatgttttagagaattcttcgacagagttgaaacatga

SEQ ID NO: 5983 - DNA, 396 bp, Saccharomyces cerevisiae
atgcacatatcgctccctacgagaaacaaatcttattttcgaatacgtacacgtacatatcaaataggcttatatcattctgactcttcaccaatcagggacatatcagtactacatctgttaatagcaacgttatgcactattttttttccaatttttttttcgttgagtaaagttcaggtcgtacagtggcaaggaacgactatttctaaaaactgtattgccttaaccatgtctttccccttgaacgctatccctggcatgtatctgataattgctttccctcgtctacaaacagtaattcccctgcagcgaaatactcctgttcgaattacgaaatcggtgatagtgaaaggcgcagtgagcgtgccacggatctcctctccgatgcactag

SEQ ID NO: 5984 - DNA, 396 bp, Artificial Sequence
  Description of Artificial Sequence: Synthetic polynucleotide
atgcacatatctctccctacgagaaacaaatcttattttagaatacgtacacgtacatatcaaataggcttatatcattctgactcttctccaatcagggacatatctgtattacatcttttaatagcaacgttatgcactattttttttccaatttttttttctttgagtaaagttcaggtcgtacagtggcaaggaacgactatttctaaaaactgtattgccttaaccatgtctttccccttgaacgctatccctggcatgtatttgataattgctttccctcgtttacaaacagtaattcccttgcagagaaatactcctgttagaattacgaaatctgtgatagtgaaaggcgcagtgagcgtgccaagaatctcctctccgatgcactga

SEQ ID NO: 5985 - DNA, 87 bp, Saccharomyces cerevisiae
atgccagggatagcgttcaaggggaaagacatggttaaggcaatacagtttttagaaatagtcgttccttgccactgtacgacctga

SEQ ID NO: 5986 - DNA, 87 bp, Artificial Sequence; identical to SEQ ID NO: 5985
  Description of Artificial Sequence: Synthetic oligonucleotide

SEQ ID NO: 5987 - DNA, 3570 bp, Saccharomyces cerevisiae
atgtacaagctacaagtggtcttggtgcctccgagtcttcaggcgacgatgccaatacagtttggctacggaccaaccatcgccgaatcttctcaattgttgccaaacagaactaatatggcgcaaagcgccggagatgcctctttgcagtatgctaatctgagatctgccaatgtgagtttcacgccaagctatttcaaccagtctaggtttaggaagtttcttttgtttaccaagccgacaaacacgctgttgaacttgagtgatgaaatcatcgataagtgtgaaaaaatgtacccgagtttgcaagaagacattgaaattttgagtttgcaagataacagcggttgtgaccttgatccggattttttggtaaaggacgttttcaatgtaaataatatcgtaagagttatattgaagaatgagatagatctggacgattccgcaccagtgtcactttataagtcggtaaaacgatccaagttgaacaacgggtcgccccagtcggtgcagccgcaacaacaaatcccgtcctcttcaggtgttcttcggattgccaagaagaggccacctacaggaaccacgacaacaacaaccattcgtagtgccactaatggatccatgagggtttctaccccattggctaggcaaatttatcctccaccttcttcgaagatcgtctccaacaactcagatgacgaagacgaagacattggtgaaagatcctttttgccgcctccaacgcagcctcagtcacctcccataagaattagttcgggcattgacgcaggtaaaaaaataaaatcaagcatcgtcgaggaagatatcgtgtccagatcagcaaccgtggatccagataaaacaaagcagcaacgtctattgtccggaactcctataatgtccaccatgactccaaacagagttactcttaccggtcagagagtggtttctgaacacgcacataaaaacgaattggttttctctgcttcagcttcttcctcttcatttgctaatggtggcacagctgctgtcactgctcaggacattaataggaaaccacccgtaaccactccaagaataacatcaggaatgttgaaaatccccgagccaagaatctcagagattgaaaaagagttaaaagagggaccttccagtccggcctccattttacccgctaaagctgcaaagattccaatgaaaaaaccttacttggaaaatggcgagaactacgaatccgacgatagctcaagtagcgaaaaccaagaaactcctgaaacagaaccacattcaaaggcttccttgcaacgtagtcaaagctccatcgcagataataatggctctccggtgaaaaatagtcctctcggtgatgccatgccacacaatgtgcatttagcagaacttcccaaggcaagcaatacctcgatcaccaaatcttcaaatggcgaatcctggggaaagcaacaagaacatcaaccaccaagaaagagttcactggaaactatagtggaaaagaaatctcaggcggaaccttccggtattgtggaaccgaaaagaatgactaatttcctagatgataatcaggtaagagaaaaagaagatacgaatgataaacttttagaaaaggaaattttgccgacaattccacataatgatcagccaatacttgcatcatctgataagtctaatgggacgttgaaatcactagctgggaaagttagttcaaacaacaacgcttcaaaggaagatggcactatcattaacggcaccattgaggacgatggcaatgataatgatgaagttgatactacggttcgtattgttcctcaagattcagattcctctagtttcccaaagtcagatcttttcaaaatgatcgaaggtgatgatacagatctaccgcaatggtttaagggcaaaaattcgagaacttccggtaattccaaaaattcaaagccttacacaacggttttgaataaagacatagacaattctaagccagatccaagaaatattttgccccagcgaaccccaagaagtgcggctaagagggctgcccaattattggcaggtgccaagaaaaacgaagtcccacagaaaagtactgaagattctagttcggcagcgtccacagacgatgagtcagagagtgggattgaaacagatttctcatcagacgatgattttaaaaggaaaaatatgtcggtgcctaataatgggcccaaagacatttctttacattctttgaaaggcagtgttgttccagtgaaagactcaaagataatcaataaagaagttgatgaagaaagaaacgacaaaagagatagtcaaaaaaagtcagccgtgagtgaatcttcagtaacaaatagcaaaataagtgaacaaatggcgaaaagcttttatccgaattcaaacaagaagcaaaatgaagctacaaaggtggaaactaagccagcaacacaagcatcgtcttttcctgttgttggtgggtctccttctgttgctactaaaggaactacctctttcaatgaagaaggaaatcgtaaaaatgttaaaacgaaggccaagaatgagtctgcgcagattgataggcagcagaaggaaacaacttctagggttgcagatttgaaaagcgcaaacataggaggtgaagacttgaacaagaaagcagaggggtccaaggaaccagaaaaagcatctgccaatatacaggatgctaacgataaaaataactcgaaggaaaaagaagactccaaaagcaaacaggtatctcagaaaaagttaaaaatgacagatcacttaaaagaaggcaatgttcagcttcctaagcccagtgcaaatgataaattgaaggatttgaaggctaaatttactaatagtaaaacactcgtgccacctggaataatttctaatgaaaaaaataattctagtgcaaacgatgatgattctagctcctcaggttcttccacagaagacgagtctagttcatcttcctcgtcttctgatgaggaaacttcaacatccaggaaggctagaagagttgttgtaaatacaccaagagaaccagttagatcttcatctaagattgaagccccctctccatctgttaacaaaaaaatcaatgccacccctgataaaattccagttacacagctaatggacatgtcgtctcctccgtcagttaaatccaagaccacctcaaatccgtctagtatacttcatgaccttccaagaaaagttcgtccttctttgagttcattatctgatcttgtttcaagaggcatcccagatgtaaaggaaaaaacttctaaatcgaatgagaagtcacaaacaaaagccccttcaagtagtgatgatgaatctagctctgattctgactctaactccagttcggactccgtatcggattccagttcagattctaaatctgagtcagattctgatgactcaggggattcatctgatgatggaaaaagttttattagtgcgaaatccgctagtgctgctttaggtaagaagaagaagccaagtggtggatttgcatcattaataaaagatttcaagaaaaaatga

SEQ ID NO: 5988 - DNA, 3570 bp, Artificial Sequence
  Description of Artificial Sequence: Synthetic polynucleotide
atgtacaagttacaagtggtcttggtgcctccgagtcttcaggcgacgatgccaatacagtttggctacggaccaaccatcgccgaatcttctcaattgttgccaaacagaactaatatggcgcaaagcgccggagatgcctctttgcagtatgctaatttaagatctgccaatgtgagtttcacgccaagctatttcaaccagtctaggtttaggaagtttcttttgtttaccaagccgacaaacacgttattgaacttgagtgatgaaatcatcgataagtgtgaaaaaatgtacccgagtttgcaagaagacattgaaattttgagtttgcaagataacagcggttgtgaccttgatccggattttttggtaaaggacgttttcaatgtaaataatatcgtaagagttatattgaagaatgagatagatttggacgattccgcaccagtgtctctttataagagtgtaaaaagatccaagttgaacaacgggtctccccagtctgtgcagccgcaacaacaaatcccgtcctcttctggtgttcttagaattgccaagaagaggccacctacaggaaccacgacaacaacaaccattcgtagtgccactaatggatccatgagggtttctaccccattggctaggcaaatttatcctccaccttcttccaagatcgtctccaacaacagtgatgacgaagacgaagacattggtgaaagatcctttttgccgcctccaacgcagcctcagtctcctcccataagaattagttctggcattgacgcaggtaaaaaaataaaaagtagcatcgtcgaggaagatatcgtgtccagaagtgcaaccgtggatccagataaaacaaagcagcaacgtttattgtccggaactcctataatgtccaccatgactccaaacagagttactcttaccggtcagagagtggtttctgaacacgcacataaaaacgaattggttttctctgcttctgcttcttcctcttcttttgctaatggtggcacagctgctgtcactgctcaggacattaataggaaaccacccgtaaccactccaagaataacatctggaatgttgaaaatccccgagccaagaatctctgagattgaaaaagagttaaaagagggaccttccagtccggcctccattttacccgctaaagctgcaaagattccaatgaaaaaaccttacttggaaaatggcgagaactacgaatccgacgatagcagtagtagcgaaaaccaagaaactcctgaaacagaaccacattctaaggcttccttgcaacgtagtcaaagctccatcgcagataataatggctctccggtgaaaaatagtcctctcggtgatgccatgccacacaatgtgcatttagcagaacttcccaaggcaagcaatacctctatcaccaaatcttccaatggcgaatcctggggaaagcaacaagaacatcaaccaccaagaaagagttctttggaaactatagtggaaaagaaatctcaggcggaaccttccggtattgtggaaccgaaaagaatgactaatttcttggatgataatcaggtaagagaaaaagaagatacgaatgataaacttttagaaaaggaaattttgccgacaattccacataatgatcagccaatacttgcatcttctgataagtctaatgggacgttgaaatctttggctgggaaagttagtagtaacaacaacgcttccaaggaagatggcactatcattaacggcaccattgaggacgatggcaatgataatgatgaagttgatactacggttcgtattgttcctcaagattctgattcctctagtttcccaaagagtgatcttttcaaaatgatcgaaggtgatgatacagatttaccgcaatggtttaagggcaaaaattctagaacttccggtaattccaaaaattctaagccttacacaacggttttgaataaagacatagacaattctaagccagatccaagaaatattttgccccagcgtaccccaagaagtgcggctaagagggctgcccaattattggcaggtgccaagaaaaacgaagtcccacagaaaagtactgaagattctagttctgcagcgtccacagacgatgagagtgagagtgggattgaaacagatttctcttctgacgatgattttaaaaggaaaaatatgtctgtgcctaataatgggcccaaagacatttctttacattctttgaaaggcagtgttgttccagtgaaagactccaagataatcaataaagaagttgatgaagaaagaaacgacaaaagagatagtcaaaaaaagtctgccgtgagtgaatcttctgtaacaaatagcaaaataagtgaacaaatggcgaaaagcttttatccgaatagcaacaagaagcaaaatgaagctacaaaggtggaaactaagccagcaacacaagcatcttcttttcctgttgttggtgggtctccttctgttgctactaaaggaactacctctttcaatgaagaaggaaatcgtaaaaatgttaaaacgaaggccaagaatgagtctgcgcagattgataggcagcagaaggaaacaacttctagggttgcagatttgaaaagcgcaaacataggaggtgaagacttgaacaagaaagcagaggggtccaaggaaccagaaaaagcatctgccaatatacaggatgctaacgataaaaataactccaaggaaaaagaagactccaaaagcaaacaggtatctcagaaaaagttaaaaatgacagatcacttaaaagaaggcaatgttcagcttcctaagcccagtgcaaatgataaattgaaggatttgaaggctaaatttactaatagtaaaacactcgtgccacctggaataatttctaatgaaaaaaataattctagtgcaaacgatgatgattctagctccagtggttcttccacagaagacgagtctagttcttcttcctcttcttctgatgaggaaacttctacatccaggaaggctagaagagttgttgtaaatacaccaagagaaccagttagatcttcttctaagattgaagccccctctccatctgttaacaaaaaaatcaatgccacccctgataaaattccagttacacagttgatggacatgtcttctcctccgtctgttaaatccaagaccacctctaatccgtctagtatacttcatgaccttccaagaaaagttcgtccttctttgagttctttatctgatcttgtttctagaggcatcccagatgtaaaggaaaaaacttctaaatctaatgagaagtctcaaacaaaagccccttctagtagtgatgatgaatctagctctgattctgactctaactccagtagtgactccgtatctgattccagttctgattctaaatctgagtctgattctgatgacagtggggattcttctgatgatggaaaaagttttattagtgcgaaatccgctagtgctgctttaggtaagaagaagaagccaagtggtggatttgcatctttaataaaagatttcaagaaaaaatga

SEQ ID NO: 5989 - DNA, 417 bp, Saccharomyces cerevisiae
atgcttgattatttttttttactagctttctgtgacgtgtattctactgagactttctggtatcattttttcttgaaatcttttattaatgatgcaaatccaccacttggcttcttcttcttacctaaagcagcactagcggatttcgcactaataaaactttttccatcatcagatgaatcccctgagtcatcagaatctgactcagatttagaatctgaactggaatccgatacggagtccgaactggagttagagtcagaatcagagctagattcatcatcactacttgaaggggcttttgtttgtgacttctcattcgatttagaagttttttcctttacatctgggatgcctcttgaaacaagatcagataatgaactcaaagaaggacgaacttttcttggaaggtcatga

SEQ ID NO: 5990 - DNA, 417 bp, Artificial Sequence
  Description of Artificial Sequence: Synthetic polynucleotide
atgcttgattatttttttttattagctttctgtgacgtgtattctactgagactttctggtatcattttttcttgaaatcttttattaatgatgcaaatccaccacttggcttcttcttcttacctaaagcagcattagcggatttcgcattaataaaactttttccatcttctgatgaatcccctgagtcttctgaatctgacagtgatttagaatctgaattggaatccgatacggagtccgaattagagttagagagtgaaagtgagttagattcttcttctttacttgaaggggcttttgtttgtgacttcagtttcgatttagaagttttttcctttacatctgggatgcctcttgaaacaagaagtgataatgaactcaaagaaggaagaacttttcttggaaggtcttga

SEQ ID NO: 5991 - DNA, 3693 bp, Saccharomyces cerevisiae
atgtatatcaaaagggtgataattaagggttttaaaacctacaggaacgaaaccattattgataatttctcgccgcatcagaatgttattattggctccaatggttcaggtaaatcgaatttcttcgctgcgattagatttgttcttagtgacgattactctaatcttaagagggaagaaaggcaagggcttatccaccaaggttctggtggttcagtgatgagtgcctcggtagaaattgtgttccacgatccagatcattctatgatattgccctccggtgtactttcgagaggagatgacgaagtgaccattagaagaacagtagggctgaagaaggatgactatcaattaaatgacagaaacgtgaccaaaggggacatagtcagaatgttggaaaccgctggtttttcaatgaataatccgtataatatagtaccacaaggtaaaatagtcgccttaactaatgccaaggataaggaaagattgcagttattggaagatgttgtaggagctaagtcatttgaagtaaaattgaaagcttcattgaaaaaaatggaggaaacagagcagaaaaagattcaaattaacaaggaaatgggtgaactaaactctaaattgagtgaaatggaacaggaacgtaaggaattagagaaatacaacgagttggaacgcaacagaaagatctaccagttcacattgtatgatcgagaattaaatgaggttatcaatcaaatggaaagactggacggtgattataataacacggtatactcttccgaacaatacatccaggagttggataaaagagaggatatgattgaccaagtctccaaaaagctatcaagtattgaagcttcactgaagatcaaaaatgcgactgatttacaacaggcaaaactacgggaatctgagatttctcagaaattaacaaacgtcaacgtaaaaataaaggatgttcaacagcaaattgagtcaaatgaggagcagagaaatttggatagtgcaactttgaaagagatcaaatctataattgagcaaaggaaacaaaagttgtctaaaattttacctagatatcaagaactcacaaaggaagaagcaatgtacaaacttcaattggcctccttgcaacaaaagcagagagatcttatcttaaagaaaggagaatatgcccgttttaaatcaaaggatgaacgcgatacgtggattcattcagaaattgaagaactgaaatcttcaatacaaaacttaaatgaactggaaagtcaattgcaaatggatcgtacttctttaaggaagcagtactctgcgattgatgaagagattgaagagctaattgattctatcaatggaccagataccaagggtcaattagaagattttgattcggaattaatacacctcaaacagaagctgagtgaaagtttagacactcgtaaggaattgtggagaaaggagcaaaaattacagacagtcttggaaactttattaagtgacgtcaatcaaaatcaaagaaatgttaatgaaaccatgagtagatcattggcaaatggtataataaatgtgaaagaaattacagaaaaactaaaaatatcaccggaatctgtctttgggacattaggtgaactgattaaagtcaatgataagtacaagacatgtgctgaagtaattggaggtaactccctcttccacattgtcgtggataccgaagaaacggccactttgattatgaacgaactatatcgtatgaagggtgggagagtgacgtttattcccttgaacaggttatctttggacagtgatgttaaattcccctcaaacactactacacaaatccagtttactcccttgataaagaagataaaatatgaacccaggtttgagaaggctgtcaaacacgtttttggaaaaactattgttgtcaaagacttaggtcaaggtttaaaattagctaagaaacacaaactcaatgccatcactttagatggtgatagagcagacaaaagaggtgtacttacaggtgggtatcttgaccagcacaaacgaacacgtttggaatcattgaaaaacttaaatgaatcaagaagtcaacacaaaaaaatactggaagaattagatttcgtaagaaatgaactaaatgatattgatactaagattgatcaagtaaacgggaatataagaaaggtttctaatgacagggagtctgtcttaacaaatatcgaggtatatagaacatcgctaaacaccaaaaagaatgaaaaattaattctcgaagaatcattaaacgcaattatactaaaactagaaaagctgaatacaaatcgtacatttgctcaggaaaagctaaatacattcgaaaatgatttgcttcaggagtttgatagcgaactctcaaaagaagaaaaggaaagattagaatctttaacaaaggagattagtgcagcgcacaataagctaaatattacatcagacgccctagaaggtataactacaaccattgactcgttgaatgccgaattggagtccaaacttatcccacaagaaaatgatctagaatccaagatgtcagaagtaggtgacgcatttatttttggtctacaagatgagttgaaagaattacaattggagaaggaaagcgttgaaaagcagcatgaaaacgctgtgttggaactaggtaccgttcaaagagaaattgaaagtctcattgctgaagaaactaataataagaaactgctagaaaaagcaaacaatcaacagcgattactattaaagaagcttgacaatttccaaaaaagtgttgaaaaaacgatgattaagaaaacaactttggttactagaagagaagaattacagcaaaggattagggaaattgggcttctgccagaggatgctttagtaaatgattttagcgacatcacaagtgatcagctattacaaagactgaatgatatgaacacagagatttctggtttgaagaatgtaaacaagagagcttttgaaaacttcaaaaagtttaacgaaagacgcaaagaccttgcggagagagcttcagagctggatgaatctaaagactcaattcaagatctaattgttaagttaaaacaacaaaaggttaacgcggttgattctactttccaaaaggtttctgaaaactttgaagctgtttttgaaagattagttcccagaggtactgctaagttgattattcaccgtaagaatgataacgctaacgaccatgatgaaagtattgatgttgacatggatgcagaatccaatgaaagccaaaacggtaaagatagtgaaattatgtatacaggtgtttcaatttctgtttccttcaattctaaacaaaacgaacaactgcatgttgaacagctctcaggtggtcagaagactgtatgtgccattgctttgattctggcaatccaaatggttgaccctgcttccttctatctgtttgatgaaattgatgctgcactcgacaagcagtatagaactgcagtcgctacacttctaaaagaactgtcaaaaaatgcccagtttatttgtacgacgttcagaacagatatgttgcaagttgcagacaaatttttccgtgttaagtacgagaataagatttccacggttattgaggtcaatagagaagaagcaatcggattcattagaggtagcaataaattcgctgaagtctaa

SEQ ID NO: 5992 - DNA, 3693 bp, Artificial Sequence
  Description of Artificial Sequence: Synthetic polynucleotide
atgtatatcaaaagggtgataattaagggttttaaaacctacaggaacgaaaccattattgataatttcagtccgcatcagaatgttattattggctccaatggttctggtaaatctaatttcttcgctgcgattagatttgttcttagtgacgattactctaatcttaagagggaagaaaggcaagggcttatccaccaaggttctggtggttctgtgatgagtgcctctgtagaaattgtgttccacgatccagatcattctatgatattgccctccggtgtactttctagaggagatgacgaagtgaccattagaagaacagtagggttgaagaaggatgactatcaattaaatgacagaaacgtgaccaaaggggacatagtcagaatgttggaaaccgctggtttttccatgaataatccgtataatatagtaccacaaggtaaaatagtcgccttaactaatgccaaggataaggaaagattgcagttattggaagatgttgtaggagctaagagctttgaagtaaaattgaaagcttctttgaaaaaaatggaggaaacagagcagaaaaagattcaaattaacaaggaaatgggtgaattgaactctaaattgagtgaaatggaacaggaacgtaaggaattagagaaatacaacgagttggaacgcaacagaaagatctaccagttcacattgtatgatagagaattaaatgaggttatcaatcaaatggaaagattagacggtgattataataacacggtatactcttccgaacaatacatccaggagttggataaaagagaggatatgattgaccaagtctccaaaaagttatccagtattgaagcttctttgaagatcaaaaatgcgactgatttacaacaggcaaaattaagagaatctgagatttctcagaaattaacaaacgtcaacgtaaaaataaaggatgttcaacagcaaattgagagcaatgaggagcagagaaatttggatagtgcaactttgaaagagatcaaatctataattgagcaaaggaaacaaaagttgtctaaaattttacctagatatcaagaactcacaaaggaagaagcaatgtacaaacttcaattggcctccttgcaacaaaagcagagagatcttatcttaaagaaaggagaatatgcccgttttaaatccaaggatgaacgcgatacgtggattcattctgaaattgaagaattgaaatcttctatacaaaacttaaatgaattggaaagtcaattgcaaatggatcgtacttctttaaggaagcagtactctgcgattgatgaagagattgaagagttgattgattctatcaatggaccagataccaagggtcaattagaagattttgattctgaattaatacacctcaaacagaagttgagtgaaagtttagacactcgtaaggaattgtggagaaaggagcaaaaattacagacagtcttggaaactttattaagtgacgtcaatcaaaatcaaagaaatgttaatgaaaccatgagtagaagtttggcaaatggtataataaatgtgaaagaaattacagaaaaattgaaaatatctccggaatctgtctttgggacattaggtgaattgattaaagtcaatgataagtacaagacatgtgctgaagtaattggaggtaactccctcttccacattgtcgtggataccgaagaaacggccactttgattatgaacgaattgtatcgtatgaagggtgggagagtgacgtttattcccttgaacaggttatctttggacagtgatgttaaattcccctctaacactactacacaaatccagtttactcccttgataaagaagataaaatatgaacccaggtttgagaaggctgtcaaacacgtttttggaaaaactattgttgtcaaagacttaggtcaaggtttaaaattagctaagaaacacaaactcaatgccatcactttagatggtgatagagcagacaaaagaggtgtacttacaggtgggtatcttgaccagcacaaaagaacacgtttggaatctttgaaaaacttaaatgaatctagaagtcaacacaaaaaaatattggaagaattagatttcgtaagaaatgaattgaatgatattgatactaagattgatcaagtaaacgggaatataagaaaggtttctaatgacagggagtctgtcttaacaaatatcgaggtatatagaacatctttgaacaccaaaaagaatgaaaaattaattctcgaagaatctttaaacgcaattatattgaaattagaaaagttgaatacaaatcgtacatttgctcaggaaaagttgaatacattcgaaaatgatttgcttcaggagtttgatagcgaactctctaaagaagaaaaggaaagattagaatctttaacaaaggagattagtgcagcgcacaataagttgaatattacaagtgacgccttggaaggtataactacaaccattgactctttgaatgccgaattggagtccaaacttatcccacaagaaaatgatttggaatccaagatgtctgaagtaggtgacgcatttatttttggtttacaagatgagttgaaagaattacaattggagaaggaaagcgttgaaaagcagcatgaaaacgctgtgttggaattgggtaccgttcaaagagaaattgaaagtctcattgctgaagaaactaataataagaaattattggaaaaagcaaacaatcaacagagattattattaaagaagcttgacaatttccaaaaaagtgttgaaaaaacgatgattaagaaaacaactttggttactagaagagaagaattacagcaaaggattagggaaattgggcttttaccagaggatgctttagtaaatgattttagcgacatcacaagtgatcagcttttacaaagattgaatgatatgaacacagagatttctggtttgaagaatgtaaacaagagagcttttgaaaacttcaaaaagtttaacgaaagacgcaaagaccttgcggagagagcttctgagttagatgaatctaaagacagtattcaagatttgattgttaagttaaaacaacaaaaggttaacgcggttgattctactttccaaaaggtttctgaaaactttgaagctgtttttgaaagattagttcccagaggtactgctaagttgattattcaccgtaagaatgataacgctaacgaccatgatgaaagtattgatgttgacatggatgcagaatccaatgaaagccaaaacggtaaagatagtgaaattatgtatacaggtgtttctatttctgtttccttcaattctaaacaaaacgaacaattgcatgttgaacagctctctggtggtcagaagactgtatgtgccattgctttgattttggcaatccaaatggttgaccctgcttccttctatttatttgatgaaattgatgctgcactcgacaagcagtatagaactgcagtcgctacacttttgaaagaattatccaaaaatgcccagtttatttgtacgacgttcagaacagatatgttgcaagttgcagacaaatttttccgtgttaagtacgagaataagatttccacggttattgaggtcaatagagaagaagcaatcggattcattagaggtagcaataaattcgctgaagtctga

SEQ ID NO: 5993 - DNA, 1938 bp, Saccharomyces cerevisiae
atgatactgatctcgggatactgtcttttagtgtatagcgttattttgccagtactgatatcggcttctaagttatgtgatttggctgagttacaacgattgaacaagaatttaaaagtagacactgaatccttgccaaaataccaatggatcgctgggcagttggaacaaaactgcatgactgcggatccagcaagtgaaaatatgtcagacgtaattcaactagccaatcaaatatactacaaaattgggctgatccaattatccaacgatcaacatctaagagctattaacacatttgaaaaaatcgtttttaatgaaacttacaaaggttcttttgggaagctggcggaaaagaggctacaagagctgtatgtcgattttgggatgtgggacaaggtgcatcagaaggatgatcagtatgcgaaatatctgtccttgaatgaaaccatcagaaacaaaatatcatccaaagacgtttctgtggaggaagatatttctgagctgctacgcataacgccgtacgatgttaacgtcctctccacgcacatcgatgttctttttcacaaactagctgaagaaattgacgtttcgttagctgctgctatcattttggattacgaaacaatcctcgacaagcatttggctagcttaagcatagatacaagactttcgattcattatgtcatatctgttttacagacctttgtacttaactcagatgcgtcgttcaatataagaaaatgcctttccattgatatggactatgataaatgtaaaaaactaagcctgactatttccaaattgaacaaggtgaatccatcaaaaagacagatcctggatccagcaacatatgcatttgagaacaaaaagtttagaagttgggatagaattattgaattttatttgaaggataagaagccatttattacaccaatgaaaattcttaacaaagatacaaactttaaaaacaactacttctttttagaggaaattatcaaacaattgatagaagacgttcaactgtcgagacctttggcaaaaaatttattcgaagatcccccaataaccgatggttttgtcaaaccaaaatcatactatcataccgattatctagtatacattgattccattctttgtcaggcttctagcatgagtccggacgtcaagagagctaaactggctgcgccgttctgtaaaaagagtttgaggcattcactaacactagaaacatggaaacactatcaggatgctaagtccgagcaaaaacctttacctgagacggtattgagtgatgtatggaattccaatcctcatttgctgatgtatatggtaaactcaatacttaataaaagtaggtctaaacctcattcacagttcaaaaagcaattatatgaccagataaacaaatttttccaagataacggcctctcagagtcgaccaatccatacgtgatgaagaacttccgattattacagaaacaattacaaacctataaagagcataaacatcggaatttcaaccagcaatatttccaacaacaacaacagcagcaacaacaccaacgacatcaagcacccccagcagcgcctaactacgacccaaaaaaggactattataaaattcttggagtatcgcctagtgctagttcgaaagaaataaggaaagcatatttaaatttaaccaaaaaataccacccagacaaaataaaggccaaccataacgacaaacaagaatcaattcacgaaactatgtcacaaatcaatgaagcgtacgaaacattaagtgatgacgataaaaggaaggaatacgatctttccagatcaaacccccgccgcaacacttttcctcaggggcctaggcaaaataacatgttcaaaaatccaggaagtggcttcccattcggaaatggctttaaaatgaattttgggctttga

SEQ ID NO: 5994 - DNA, 1938 bp, Artificial Sequence
  Description of Artificial Sequence: Synthetic polynucleotide
atgatattgatcagtggatactgtcttttagtgtatagcgttattttgccagtattaatatctgcttctaagttatgtgatttggctgagttacaaagattgaacaagaatttaaaagtagacactgaatccttgccaaaataccaatggatcgctgggcagttggaacaaaactgcatgactgcggatccagcaagtgaaaatatgtctgacgtaattcaattggccaatcaaatatactacaaaattgggttgatccaattatccaacgatcaacatttaagagctattaacacatttgaaaaaatcgtttttaatgaaacttacaaaggttcttttgggaagttggcggaaaagaggttacaagagttgtatgtcgattttgggatgtgggacaaggtgcatcagaaggatgatcagtatgcgaaatatttatccttgaatgaaaccatcagaaacaaaatatcttccaaagacgtttctgtggaggaagatatttctgagttacttcgcataacgccgtacgatgttaacgtcctctccacgcacatcgatgttctttttcacaaattggctgaagaaattgacgtttctttagctgctgctatcattttggattacgaaacaatcctcgacaagcatttggctagcttaagcatagatacaagactttctattcattatgtcatatctgttttacagacctttgtacttaacagtgatgcgtctttcaatataagaaaatgcctttccattgatatggactatgataaatgtaaaaaattaagcttaactatttccaaattgaacaaggtgaatccatctaaaagacagatcttagatccagcaacatatgcatttgagaacaaaaagtttagaagttgggatagaattattgaattttatttgaaggataagaagccatttattacaccaatgaaaattcttaacaaagatacaaactttaaaaacaactacttctttttagaggaaattatcaaacaattgatagaagacgttcaattatctagacctttggcaaaaaatttattcgaagatcccccaataaccgatggttttgtcaaaccaaaatcttactatcataccgattatttggtatacattgattccattctttgtcaggcttctagcatgagtccggacgtcaagagagctaaattggctgcgccgttctgtaaaaagagtttgaggcattctttaacattagaaacatggaaacactatcaggatgctaagtccgagcaaaaacctttacctgagacggtattgagtgatgtatggaattccaatcctcatttgttgatgtatatggtaaacagcatacttaataaaagtaggtctaaacctcattctcagttcaaaaagcaattatatgaccagataaacaaatttttccaagataacggcctcagtgagtctaccaatccatacgtgatgaagaacttcagattattacagaaacaattacaaacctataaagagcataaacatagaaatttcaaccagcaatatttccaacaacaacaacagcagcaacaacaccaaagacatcaagcacccccagcagcgcctaactacgacccaaaaaaggactattataaaattcttggagtatctcctagtgctagttctaaagaaataaggaaagcatatttaaatttaaccaaaaaataccacccagacaaaataaaggccaaccataacgacaaacaagaaagtattcacgaaactatgtctcaaatcaatgaagcgtacgaaacattaagtgatgacgataaaaggaaggaatacgatctttccagatctaacccccgccgcaacacttttcctcaggggcctaggcaaaataacatgttcaaaaatccaggaagtggcttcccattcggaaatggctttaaaatgaattttgggctttga

SEQ ID NO: 5995 - DNA, 642 bp, Saccharomyces cerevisiae
atgtcactaccggcacatttgcagcagactttctcaccagaagaaatacagttcattgtggaaaacgagccaataaagatttttcccagaataacaacacgccaaaaaattcgtggcgatgatagaggaactggaaaccacacccgctggcaacttattactacagatgacaaagctttaaataatatggtagccatgcgttctacagaagtggttctttggatcgctctattactgaagcaacaatccaagtgcagtattgtagcaccacagtggttaacgacgaaagagcttgatagaaaaatacaatatgagaaaactcatccggataggtttagtgagttgccgtggaactggcttgtcttggcacgtatacttttcaataaagctaaggatgattttcatgaccccattcacgaattacgtggtaaaatacaagacttaagggaaataaggcagatcaaagtgttaaaaggccttaagtatttgaatgaatctcatttacaattggataatttaagtctattagaaatcaatgagttgaggccgttcattactgaaatcatggataaactgcgagaaattcacacagcatctcttaccgctggtactgaaaatgatgaagaagaattcaatatttaa

SEQ ID NO: 5996 - DNA, 642 bp, Artificial Sequence
  Description of Artificial Sequence: Synthetic polynucleotide
atgtctttaccggcacatttgcagcagactttctctccagaagaaatacagttcattgtggaaaacgagccaataaagatttttcccagaataacaacacgccaaaaaattcgtggcgatgatagaggaactggaaaccacacccgctggcaacttattactacagatgacaaagctttaaataatatggtagccatgcgttctacagaagtggttctttggatcgctttattattgaagcaacaatccaagtgcagtattgtagcaccacagtggttaacgacgaaagagcttgatagaaaaatacaatatgagaaaactcatccggataggtttagtgagttgccgtggaactggcttgtcttggcacgtatacttttcaataaagctaaggatgattttcatgaccccattcacgaattacgtggtaaaatacaagacttaagggaaataaggcagatcaaagtgttaaaaggccttaagtatttgaatgaatctcatttacaattggataatttaagtttgttagaaatcaatgagttgaggccgttcattactgaaatcatggataaacttagagaaattcacacagcatctcttaccgctggtactgaaaatgatgaagaagaattcaatatttga

SEQ ID NO: 5997 - DNA, 1725 bp, Saccharomyces cerevisiae
atgtggaggagaatattcgcgcatgaactcaagtatgatcaacccaatgcatcttcaaaaaacttgatcctttcagttctgaatacaaccgctacaaaacgagaggctaaggattatctctcaaaatatacaaatgatagtgggcagcataatcattgtttgttttttatcagggacctgcataaagtcgcaccagcgattttgtcccagttttcaagtgtcataaagagactaggaatgctaggtttgcgacctatgtttgtaattccgccgtcgccaactcatgtaaatatacaggcagagttacttgacagtatcgttacagaagcagatttaaagccacttcaccttaaggagggtcttactaaatcccgcactgggttatatcattctgttttttcgcaagagagtcgtttctttgatattggaaattccaattttataccaattgtgaaaccttatgtgtataatgaagagactgcttcagaattcatgacaaaggatgttgtaaaatttatggattgcctgtgccaagggaatattccacacattgacaaattcttcattctaaataatgccggaggtataccttcgggagagagaaatgataacgctcatgtattcatcaatctttctcaggaactcgagcatttgtcctcgtcattatctcacaatataagcactctaaccaaacgagagccacgctcccaaaacctgttacacagaatggaggtgtacgttaaaaaagatgagatatcttccttagaatgtgaataccatgatcatttagaaaacctgttattgatggacaaagttttatcaaatctagcggctacagcaacgggactgattacaactgtcaaagctgccgcactatcatcagataggaaaaatcctttagtatataatttattgacagaccgatcgctaatttcttcttctttaccaaggtttaaaaaaaaggacggcgagatagactcaccagccaacatgtttgatgatcacgcatggtatgaattgccttcccaacaggtaaatgcagctccttctaactcagatgcagttttagtgacaactgttctcaaaaagggcgtccatatcaaaacttatgactataagacgctgactcaattcaactcaattgggcttccaaagaagtttcacgtacctgagaaaggagcaaaaccctcgagcaatagtccaaaactagatatcaacaaatttaaatccatcatcgatcagagctttaaaagatctttggatttgcatgactacataaaaaggattaatggaaaaatagctacaattattgtgataggtgattatgaaggcattgcaattcttacctatgaaggctcggaggaaaattcctttgtttatctcgataagttcgccgttctaccacacttgaaaggctcgctgggtatatctgatataatcttcaatttgatgttcaaaaaatttcctaatgagatactttggagaagcagaaaagacaatgtggtgaacaagtggtattttcaacgtagcgttgctgtgctagatttgtcgattgacttagaccccgaacactgtgatgaaaagcaaagccaatttaaactattttactacggtaaccctcaatacgctaagagggcactacgtgacaagaaacgtttaagagaattcatgaggtctgtcagggacatcaagccaagttgggaaaatgaaaaaaatatttcatga

SEQ ID NO: 5998 - DNA, 1725 bp, Artificial Sequence
  Description of Artificial Sequence: Synthetic polynucleotide
atgtggaggagaatattcgcgcatgaactcaagtatgatcaacccaatgcatcttctaaaaacttgatcctttctgttttgaatacaaccgctacaaaaagagaggctaaggattatctctctaaatatacaaatgatagtgggcagcataatcattgtttgttttttatcagggacttgcataaagtcgcaccagcgattttgtcccagttttctagtgtcataaagagattaggaatgttgggtttgagacctatgtttgtaattccgccgtctccaactcatgtaaatatacaggcagagttacttgacagtatcgttacagaagcagatttaaagccacttcaccttaaggagggtcttactaaatcccgcactgggttatatcattctgttttttctcaagagagtcgtttctttgatattggaaattccaattttataccaattgtgaaaccttatgtgtataatgaagagactgcttctgaattcatgacaaaggatgttgtaaaatttatggattgcttgtgccaagggaatattccacacattgacaaattcttcattttgaataatgccggaggtataccttctggagagagaaatgataacgctcatgtattcatcaatctttctcaggaactcgagcatttgtcctcttctttatctcacaatataagcactttgaccaaaagagagccacgctcccaaaacttattacacagaatggaggtgtacgttaaaaaagatgagatatcttccttagaatgtgaataccatgatcatttagaaaacttattattgatggacaaagttttatccaatttggcggctacagcaacgggattgattacaactgtcaaagctgccgcattatcttctgataggaaaaatcctttagtatataatttattgacagacagatccttgatttcttcttctttaccaaggtttaaaaaaaaggacggcgagatagactctccagccaacatgtttgatgatcacgcatggtatgaattgccttcccaacaggtaaatgcagctccttctaacagtgatgcagttttagtgacaactgttctcaaaaagggcgtccatatcaaaacttatgactataagacgttgactcaattcaactctattgggcttccaaagaagtttcacgtacctgagaaaggagcaaaaccctctagcaatagtccaaaattggatatcaacaaatttaaatccatcatcgatcagagctttaaaagatctttggatttgcatgactacataaaaaggattaatggaaaaatagctacaattattgtgataggtgattatgaaggcattgcaattcttacctatgaaggcagtgaggaaaattcctttgtttatctcgataagttcgccgttttgccacacttgaaaggctctttgggtatatctgatataatcttcaatttgatgttcaaaaaatttcctaatgagatactttggagaagcagaaaagacaatgtggtgaacaagtggtattttcaacgtagcgttgctgtgttggatttgtctattgacttagaccccgaacactgtgatgaaaagcaaagccaatttaaattattttactacggtaaccctcaatacgctaagagggcattgcgtgacaagaaacgtttaagagaattcatgaggtctgtcagggacatcaagccaagttgggaaaatgaaaaaaatattagttga

SEQ ID NO: 5999 - DNA, 2667 bp, Saccharomyces cerevisiae
atgcaggcggtagagagaaggccctcgttactctttgacgaatatcaaaattctgttactaagcctaatgagacgaagaataaagaagccagggtcttgtcagagaatgacggtgatgtctccccatctgttttgaaacagaaggaaatatcagtcgatgatatggatatgatttctttgcccacggaatttgacaggcaaatggttttaggttcacctatgtttttcgatcttgaagacgaagaaaacaaaattgatccacttccttcagtttcccatcattatggaaatggagaaagtgacagctttgtctcatcgtacacgccctcaaatctgaaaacgggtgaagaaactaaagatcttttcattaatccgtttgaattggtttctcaaatgagaaaaagatacattgctgcttccaaacaagatggcatttcaaacataaaaaatgacactgaaaagtggtttttatacccaaaaccactgccaaagttttggagatttgaagacgataaacgattccaagatccctctgactctgacttaaatgacgatggagacagtactgggaccggagccgctacaccgcaccgccatggctactattacccaagttactttaccgatcactactactactacacaaaatctggtttgaaaggaaaaggaaatataaaagtaccatacaccggtgaatatttcgatttagaggattacaaaaaacaatacatttaccatttaagtaatcaggaaaatacgcaaaacccactttcaccttattctagtaaggaggagtcactagaggaagaatttttaacagatgtgcctacgtttcaagaatttagggatgattttgcatacataatagagttaatccaatctcataaattcaacgaggtttcacgaaagcgattatcttatttattagataaatttgaattgtttcagtacctaaactctaagaaagaaattttagctaataaaaatgttccctacagagatttttataattctcgtaaggtagatcgagacttgtctttaagtggttgtatttctcaacgtcaattgagtgaatatatatgggagaaaataaatttagaacctgaaaggatagtttatcaagacccggaaacgtcaaggaaactcagtttgagagacatttttcagtttggttgttcttctaatgaccaacccattgcgattgggttgaaattgattgatgatgaattcttggattggtatagaaatatttacctaatagattaccatctaactcctaacaaagtagcaaagttggtcggcaaagaaatgaggttttacctattagccaaagtgtttctggagtttgataatttcattgaaggtgagtacctagcagaaattttcataaaatacgttattcatatcctcgaaaaatcaaagtaccaattggcccaagtatcagttaattttcaattctattccagtggtgaagactggtacaagaaattttctcaatggttgctacgatggaagctagtatcgtataatatccgctggaatatacaaattgccaggatttttcccaaactattcaaggaaaatgtcgtgtcaaatttccaggagtttttggatcttatcttcaatcctttattcactctggaaaaggagcagttaccaatagattcatctgtaaatactgatatcattggtctgcagttttttttatcaaatgtgtgttctatggatctggtcattaaagagtcggatgaatattactggaaagaatttactgatatgaattgtaagccaaaattttggacagcacagggtgacaatccaactgttgcgcattacatgtattatatttataaaagtttagcgaaagttaattttctgcggtcacaaaatcttcaaaatacaatcaccctaagaaattattgttctccactatccagcagaacttcccaatttggagtggatttatattttacagatcaagttgaatcgttagtgtgcaacttactgctttgtaatggtggtctgctacaggtagaaccgctttgggatactgcaacaatgattcaatatttattttatctctttcaaatacccattttagctgcgccattatcatctgtttcattactgaattcgcaaaaatcgacctttttgaagaataaaaacgtgcttctagaacatgattatttgaaagaccaggaaacagccaaaatcaatccttctagagatatcactgtgggcgaacaaagatcatatgagacaaatcctttcatgaaaatgtttaagatgggactaaaaatttctttatcatcaaaatcgattctttacaatagttcatacacgctagaacctctcattgaagaatacagtgtagcagcaagtatttacttgctgaacccaacagatttgtgcgagttgtcgagaacaagtgtgctatctagtggctatgaaggttggtacaaggctcattggattggcgttggagttaaaaaggcgccttactttgaggagaacgtgggtgggatagataattggtacgatacagcgaaagatacctcgataaagcacaacgttccgatgattagaagaagatatagaaaggagacattggatcaagagtggaacttcgttcgggatcactttggagtaattaactccatttggtag

SEQ ID NO: 6000 - DNA, 2667 bp, Artificial Sequence
  Description of Artificial Sequence: Synthetic polynucleotide
atgcaggcggtagagagaaggccctctttactctttgacgaatatcaaaattctgttactaagcctaatgagacgaagaataaagaagccagggtcttgagtgagaatgacggtgatgtctccccatctgttttgaaacagaaggaaatatctgtcgatgatatggatatgatttctttgcccacggaatttgacaggcaaatggttttaggttctcctatgtttttcgatcttgaagacgaagaaaacaaaattgatccacttccttctgtttcccatcattatggaaatggagaaagtgacagctttgtctcttcctacacgccctccaatttgaaaacgggtgaagaaactaaagatcttttcattaatccgtttgaattggtttctcaaatgagaaaaagatacattgctgcttccaaacaagatggcatttccaacataaaaaatgacactgaaaagtggtttttatacccaaaaccattaccaaagttttggagatttgaagacgataaaagattccaagatccctctgactctgacttaaatgacgatggagacagtactgggaccggagccgctacaccgcaccgccatggctactattacccaagttactttaccgatcactactactactacacaaaatctggtttgaaaggaaaaggaaatataaaagtaccatacaccggtgaatatttcgatttagaggattacaaaaaacaatacatttaccatttaagtaatcaggaaaatacgcaaaacccactttctccttattctagtaaggaggagtctttggaggaagaatttttaacagatgtgcctacgtttcaagaatttagggatgattttgcatacataatagagttaatccaatctcataaattcaacgaggtttccagaaagagattatcttatttattagataaatttgaattgtttcagtacttgaactctaagaaagaaattttagctaataaaaatgttccctacagagatttttataattctcgtaaggtagatagagacttgtctttaagtggttgtatttctcaacgtcaattgagtgaatatatatgggagaaaataaatttagaacctgaaaggatagtttatcaagacccggaaacgtctaggaaactcagtttgagagacatttttcagtttggttgttcttctaatgaccaacccattgcgattgggttgaaattgattgatgatgaattcttggattggtatagaaatatttacttgatagattaccatttgactcctaacaaagtagcaaagttggtcggcaaagaaatgaggttttacttattagccaaagtgtttttggagtttgataatttcattgaaggtgagtacttggcagaaattttcataaaatacgttattcatatcctcgaaaaatccaagtaccaattggcccaagtatctgttaattttcaattctattccagtggtgaagactggtacaagaaattttctcaatggttgttaagatggaagttggtatcttataatatccgctggaatatacaaattgccaggatttttcccaaattattcaaggaaaatgtcgtgagtaatttccaggagtttttggatcttatcttcaatcctttattcactttggaaaaggagcagttaccaatagattcttctgtaaatactgatatcattggtttacagttttttttatccaatgtgtgttctatggatttggtcattaaagagtctgatgaatattactggaaagaatttactgatatgaattgtaagccaaaattttggacagcacagggtgacaatccaactgttgcgcattacatgtattatatttataaaagtttagcgaaagttaattttttaagatctcaaaatcttcaaaatacaatcaccttgagaaattattgttctccattgtccagcagaacttcccaatttggagtggatttatattttacagatcaagttgaatctttagtgtgcaacttattactttgtaatggtggtttattgcaggtagaaccgctttgggatactgcaacaatgattcaatatttattttatctctttcaaatacccattttagctgcgccattatcttctgtttctttattgaattctcaaaaatctacctttttgaagaataaaaacgtgcttttagaacatgattatttgaaagaccaggaaacagccaaaatcaatccttctagagatatcactgtgggcgaacaaagatcttatgagacaaatcctttcatgaaaatgtttaagatgggattgaaaatttctttatcttctaaatccattctttacaatagtagttacacgttagaacctctcattgaagaatacagtgtagcagcaagtatttacttgttgaacccaacagatttgtgcgagttgtccagaacaagtgtgttatctagtggctatgaaggttggtacaaggctcattggattggcgttggagttaaaaaggcgccttactttgaggagaacgtgggtgggatagataattggtacgatacagcgaaagataccagtataaagcacaacgttccgatgattagaagaagatatagaaaggagacattggatcaagagtggaacttcgttagagatcactttggagtaattaactccatttggtga

SEQ ID NO: 6001 - DNA, 1785 bp, Saccharomyces cerevisiae
atgacaatggcaacaaccgcaatgaatgttagcgtacctccaccagatgaagaagaacagttactagccaaatttgtattcggtgatacaacagatttacaagaaaatctcgctaaatttaatgccgatttcattttcaatgaacaagaaatggatgttgaagaccaggaggatgagggatctgaatcagataacagtgaagaagatgaagcgcagaacggtgaattagaccatgttaacaacgatcagttattttttgtggacgatggtggtaacgaagatagtcaagataagaatgaagataccatggacgtggatgacgaagatgactcttcaagcgatgattattctgaggactctgaagaagctgcttggatagattcggatgatgaaaaaattaaagtgcctattcttgttaccaataagacaaagaaattaagaacctcctataacgagtccaaaatcaacggtgttcattacatcaacagattgagatctcagtttgaaaagatatatccaaggcccaaatgggtggacgatgaatctgattctgaattagatgacgaagaagacgatgaagaagaaggctctaataatgttattaatggagatattaatgctctaacgaagatcctgtctactacttacaattataaagacactttatcgaattccaaactattaccccctaagaaacttgacattgtgcgtcttaaagatgcaaatgcatcacacccgtctcattccgccatacaatctctttcattccatccttctaagcctctactgttaacgggtgggtatgataagaccttaagaatatatcatattgacgggaaaacgaaccatctagtgacaagtttgcacctggttgggtctccaatacaaacatgtactttctatacttctctatcaaaccaaaatcaacaaaatatattcaccgccggtagaagaagatatatgcattcctgggacttatccttagaaaatttaactcattcacagactgccaaaatcgaaaaattttccagattgtatggacatgagtccactcaaagatcatttgagaatttcaaagttgcacatttgcagaattcacaaacaaattctgtccatggaattgtccttttacagggtaataatggttggattaacattttacattccacttccggactatggttaatgggctgcaagatagaaggtgtgataacggatttctgtatcgattatcaacctatttcacgtggtaagtttaggaccattttaattgctgtaaacgcgtatggtgaagtgtgggaatttgacttgaataagaatggccatgttataagaagatggaaagaccaaggtggcgtgggtataacaaaaatccaagttggtggtgggacaacaactacttgtccggctcttcaaataagtaagataaagcaaaataggtggcttgcggtaggtagtgagagtggatttgttaatctttacgatagaaataatgctatgacctcgtcgacccctacacctgtcgccgccttggaccagctaacaactaccatttctaatctacaattttcccctgatggtcaaatactgtgcatggcatcccgtgcagtcaaggatgctttgagactagttcatctgccttcttgtagcgtgttcagcaactggcctaccagcgggacgcctttgggtaaagttaccagtgtcgcattttcgccatctggtgggctactggccgtgggtaacgaacaaggtaaagtgaggctctggaaattaaaccactactaa

SEQ ID NO: 6002 - DNA, 1785 bp, Artificial Sequence
  Description of Artificial Sequence: Synthetic polynucleotide
atgacaatggcaacaaccgcaatgaatgttagcgtacctccaccagatgaagaagaacagttattagccaaatttgtattcggtgatacaacagatttacaagaaaatctcgctaaatttaatgccgatttcattttcaatgaacaagaaatggatgttgaagaccaggaggatgagggatctgaaagtgataacagtgaagaagatgaagcgcagaacggtgaattagaccatgttaacaacgatcagttattttttgtggacgatggtggtaacgaagatagtcaagataagaatgaagataccatggacgtggatgacgaagatgactcttctagcgatgattattctgaggactctgaagaagctgcttggatagattctgatgatgaaaaaattaaagtgcctattcttgttaccaataagacaaagaaattaagaacctcctataacgagtccaaaatcaacggtgttcattacatcaacagattgagatctcagtttgaaaagatatatccaaggcccaaatgggtggacgatgaatctgattctgaattagatgacgaagaagacgatgaagaagaaggctctaataatgttattaatggagatattaatgctttgacgaagatcctttctactacttacaattataaagacactttatccaattccaaattattaccccctaagaaacttgacattgtgcgtcttaaagatgcaaatgcatctcacccgtctcattccgccatacaatctctttctttccatccttctaagcctttattattaacgggtgggtatgataagaccttaagaatatatcatattgacgggaaaacgaaccatttggtgacaagtttgcacttggttgggtctccaatacaaacatgtactttctatacttctttatctaaccaaaatcaacaaaatatattcaccgccggtagaagaagatatatgcattcctgggacttatccttagaaaatttaactcattctcagactgccaaaatcgaaaaattttccagattgtatggacatgagtccactcaaagatcttttgagaatttcaaagttgcacatttgcagaattctcaaacaaattctgtccatggaattgtccttttacagggtaataatggttggattaacattttacattccacttccggattatggttaatgggctgcaagatagaaggtgtgataacggatttctgtatcgattatcaacctatttctcgtggtaagtttaggaccattttaattgctgtaaacgcgtatggtgaagtgtgggaatttgacttgaataagaatggccatgttataagaagatggaaagaccaaggtggcgtgggtataacaaaaatccaagttggtggtgggacaacaactacttgtccggctcttcaaataagtaagataaagcaaaataggtggcttgcggtaggtagtgagagtggatttgttaatctttacgatagaaataatgctatgacctcttccacccctacacctgtcgccgccttggaccagttgacaactaccatttctaatttacaattttcccctgatggtcaaatattgtgcatggcatcccgtgcagtcaaggatgctttgagattggttcatttaccttcttgtagcgtgttcagcaactggcctaccagcgggacgcctttgggtaaagttaccagtgtcgcattttctccatctggtgggttgttagccgtgggtaacgaacaaggtaaagtgaggctctggaaattaaaccactactga

SEQ ID NO: 6003 - DNA, 900 bp, Saccharomyces cerevisiae
atgaaggttgttaaggaatttagtgtctgtggtggcagattgatcaagttgtcacataactcgaactctaccaagaccagcatgaacgtcaatatctatttgcctaagcactattacgcccaagattttccaagaaataagcgtatcccaactgtgttttacctttctggcttgacgtgcacgccagacaacgcctctgagaaggctttttggcagtttcaagctgacaagtacggatttgcaatagtctttccggatacgtccccacgtggtgacgaagtagccaatgatcctgagggctcctgggattttggacagggcgccggattctatctaaatgccacccaagaaccatacgcccaacattaccagatgtacgactacattcacaaagaactcccacaaacattagattctcattttaacaagaacggtgacgtaaagctggacttcttggacaatgttgccatcacaggccattcgatggggggatatggtgcaatttgtgggtatttgaagggctattccggaaagagatacaaatcttgttctgccttcgcccctatcgtgaacccttccaacgttccctggggtcaaaaagcgtttaaaggttatctgggcgaagaaaaagcccagtgggaagcgtacgacccatgtttattaatcaagaatattagacatgtgggcgacgacagaattttgatccatgtaggagactccgatccctttttggaagaacacttgaaaccggaattactacttgaggcggtgaaagccacttcatggcaggactacgtggaaataaaaaaagttcacggctttgatcactcctattactttgtcagcactttcgttccagaacatgctgaatttcatgcgcgaaacttgggtttgatttga

SEQ ID NO: 6004 - DNA, 900 bp, Artificial Sequence
  Description of Artificial Sequence: Synthetic polynucleotide
atgaaggttgttaaggaatttagtgtctgtggtggcagattgatcaagttgtctcataactccaactctaccaagaccagcatgaacgtcaatatctatttgcctaagcactattacgcccaagattttccaagaaataagcgtatcccaactgtgttttacctttctggcttgacgtgcacgccagacaacgcctctgagaaggctttttggcagtttcaagctgacaagtacggatttgcaatagtctttccggatacgtccccacgtggtgacgaagtagccaatgatcctgagggctcctgggattttggacagggcgccggattctatttgaatgccacccaagaaccatacgcccaacattaccagatgtacgactacattcacaaagaactcccacaaacattagattctcattttaacaagaacggtgacgtaaagttggacttcttggacaatgttgccatcacaggccattctatggggggatatggtgcaatttgtgggtatttgaagggctattccggaaagagatacaaatcttgttctgccttcgcccctatcgtgaacccttccaacgttccctggggtcaaaaagcgtttaaaggttatttgggcgaagaaaaagcccagtgggaagcgtacgacccatgtttattaatcaagaatattagacatgtgggcgacgacagaattttgatccatgtaggagactccgatccctttttggaagaacacttgaaaccggaattattacttgaggcggtgaaagccacttcttggcaggactacgtggaaataaaaaaagttcacggctttgatcactcctattactttgtcagcactttcgttccagaacatgctgaatttcatgcgagaaacttgggtttgatttga

SEQ ID NO: 6005 - DNA, 759 bp, Saccharomyces cerevisiae
atgggcttttatgaaggcgatgacaatgatgccaacaccaaggcatttaatgacaaatatatcaaagatcaaaagttcgcaacggcacccttctggaacctctttccaaagttaagggatattgatgaatacgataatccactcctaccactgcccttcaatttcaacttcagagatcttggagatagtgcacttgccatggcgtccggaatccctacggtgaagcagtttgacaagtgcgaagaacttaagggccagtctgcatggaccacccaagggatttggaaatgtcttgtcccaagtaaggctatcccccctctaccacaattggacttcctcttacctctggaggagatcaaatctgacaagtcgcactctcatgggttgttcttcaatgatttcaacctctttttgaagtggaggtcgcacatgaatagactacaaaaacaaagaatcaagactaggagcactgccgtagagcctctggctagaactccagaagacctcatgttgaattgggacgacttgcatctgggcaacgatgctgaatatgcttctgcagatggatccaagaaaattgttggaagggcacagtccattagtaccacgaaggattccaatgatgcaaaacccagcaccgtcaaaactgaaaaaatctactttgacgatggcacggtagacattactaccaccactacctccaagggttccagtccccaggtgaagcataaagtggtgagtgttgacgaagacaattag

SEQ ID NO: 6006 - DNA, 759 bp, Artificial Sequence
  Description of Artificial Sequence: Synthetic polynucleotide
atgggcttttatgaaggcgatgacaatgatgccaacaccaaggcatttaatgacaaatatatcaaagatcaaaagttcgcaacggcacccttctggaacctctttccaaagttaagggatattgatgaatacgataatccactcttaccattgcccttcaatttcaacttcagagatcttggagatagtgcacttgccatggcgtccggaatccctacggtgaagcagtttgacaagtgcgaagaacttaagggccagtctgcatggaccacccaagggatttggaaatgtcttgtcccaagtaaggctatcccccctttaccacaattggacttcctcttacctttagaggagatcaaatctgacaagtctcactctcatgggttgttcttcaatgatttcaacctctttttgaagtggaggtctcacatgaatagattacaaaaacaaagaatcaagactaggagcactgccgtagagcctttggctagaactccagaagacctcatgttgaattgggacgacttgcatttaggcaacgatgctgaatatgcttctgcagatggatccaagaaaattgttggaagggcacagtccattagtaccacgaaggattccaatgatgcaaaacccagcaccgtcaaaactgaaaaaatctactttgacgatggcacggtagacattactaccaccactacctccaagggttccagtccccaggtgaagcataaagtggtgagtgttgacgaagacaattga

SEQ ID NO: 6007 - DNA, 504 bp, Saccharomyces cerevisiae
atgaacaacgagactagtggtaaagaaacggcgtctgcacctctgtgttcgcccaagttacctgtagaaaaagtgcagagaatagccaagaatgatccagaatatatggacacttcggatgacgcattcgtagccacagcgtttgctacagaattcttcgtccaggtgctgacacatgagtccctacataggcaacagcagcagcaacaacaacaggtaccgccgctcccagatgaactcacgctgtcgtacgatgacatctctgccgcaattgtgcactcttctgacggccatctgcagtttttgaatgatgtgataccaacaacaaagaatttgaggcttctagtggaagaaaaccgagttagatatactacaagtgtcatgccccctaatgaagtttactccgcctatgtggtgaacgatacggctccgaagcccaacattgtcgagattgatcttgataatgacgaagacgacgacgaagacgttactgatcaagaataa

SEQ ID NO: 6008 - DNA, 504 bp, Artificial Sequence
  Description of Artificial Sequence: Synthetic polynucleotide
atgaacaacgagactagtggtaaagaaacggcgtctgcacctctttgttctcccaagttacctgtagaaaaagtgcagagaatagccaagaatgatccagaatatatggacacttctgatgacgcattcgtagccacagcgtttgctacagaattcttcgtccaggtgttaacacatgagtccttgcataggcaacagcagcagcaacaacaacaggtaccgccgctcccagatgaactcacgttatcttacgatgacatctctgccgcaattgtgcactcttctgacggccatttacagtttttgaatgatgtgataccaacaacaaagaatttgaggcttttagtggaagaaaacagagttagatatactacaagtgtcatgccccctaatgaagtttactccgcctatgtggtgaacgatacggctccgaagcccaacattgtcgagattgatcttgataatgacgaagacgacgacgaagacgttactgatcaagaatga

SEQ ID NO: 6009 - DNA, 717 bp, Saccharomyces cerevisiae
atgacagtgggtattgctaggaaactctctagggacaaggcgcatagggatgcgctgctaaaaaaccttgcgtgccagttgtttcagcatgaatctatagtgtcaacgcatgccaaatgtaaagaggcttccagggtcgcagagcggatcattacctggacaaagagggcaataacgacaagtaatagtgttgcacaggcggaattaaagtcccaaattcagagccaattgtttttagcaggagacaacagaaagttgatgaagcggttgttcagcgagatcgcaccgcggtacttggaaaggcccggtgggtacacgcgtgtgctgcggttagagcctagggctaacgactcagcgccgcaatccgtcttggaactagtcgactctcccgtgatgtccgaatcgcatacggtgaacaggggcaatttaaagatgtggctgttagtcaagtcagtcatcaacgatgacgccaaccagctacctcataacccactcacattgcagaatcttcacaaagtggccaagtttaaagcagaagcgcagctacatggtgaaattatgctcatcaagcaggtcttactcaaggaaatgtcccttccctatgatgaggcactcgaaaacgaaaggacgcaggcacttttgaaggaggtctactcttcgtcattgccaaagaagacgaagaaaccctcctcctatgtcatggttcccagaccttaa

SEQ ID NO: 6010 - DNA, 717 bp, Artificial Sequence
  Description of Artificial Sequence: Synthetic polynucleotide
atgacagtgggtattgctaggaaactctctagggacaaggcgcatagggatgcgttattgaaaaaccttgcgtgccagttgtttcagcatgaatctatagtgagtacgcatgccaaatgtaaagaggcttccagggtcgcagagagaatcattacctggacaaagagggcaataacgacaagtaatagtgttgcacaggcggaattaaagtcccaaattcagagccaattgtttttagcaggagacaacagaaagttgatgaagagattgttcagcgagatcgcaccgcgctacttggaaaggcccggtgggtacacgcgtgtgttaagattagagcctagggctaacgactctgcgccgcaatccgtcttggaattggtcgactctcccgtgatgtccgaaagtcatacggtgaacaggggcaatttaaagatgtggttgttagtcaagtctgtcatcaacgatgacgccaaccagttgcctcataacccactcacattgcagaatcttcacaaagtggccaagtttaaagcagaagcgcagttacatggtgaaattatgctcatcaagcaggtcttactcaaggaaatgtcccttccctatgatgaggcactcgaaaacgaaaggacgcaggcacttttgaaggaggtctactcttcttctttgccaaagaagacgaagaaaccctcctcctatgtcatggttcccagaccttga

SEQ ID NO: 6011 - DNA, 258 bp, Saccharomyces cerevisiae
atggttttgaatccgtccaagtaccaagacacccgcacgtggaagatgacgcctgccatgatcagggcccgtaaaccctttttcaaaggcaatatgctcggtctcacgctgctgctgggtgtcacgggctctgtttactactacacatatcattttctgcacaaggacaacgactttgcagacgtgcccattccacccatcgatccgcaggagctcgaggctctcaaaaaggagtacgaagccaagaagaaggcatga

SEQ ID NO: 6012 - DNA, 258 bp, Artificial Sequence
  Description of Artificial Sequence: Synthetic polynucleotide
atggttttgaatccgtccaagtaccaagacacccgcacgtggaagatgacgcctgccatgatcagggcccgtaaaccctttttcaaaggcaatatgctcggtctcacgttattattgggtgtcacgggctctgtttactactacacatatcattttttgcacaaggacaacgactttgcagacgtgcccattccacccatcgatccgcaggagctcgaggctctcaaaaaggagtacgaagccaagaagaaggcatga

SEQ ID NO: 6013 - DNA, 2493 bp, Saccharomyces cerevisiae
atgaacttgaagcagttcacgtgcctatcatgcgctcaattactcgctattctgctctttatctttgcttttttccctagaaaaatcgtgctgacaggtatatcaaagcaagatccggatcaagaccgtgatctccagcgcgataggcccttccagaaattggtgtttgtgatcattgatgctctcagatcagactttctttttgattcgcagatttcccacttcaacaacgtgcaccaatggctcaatacgggcgaagcatggggttacacgtcatttgctaatccgcctaccgtgacgctgcctagactcaaaagtattactacgggatctacacctagcttcattgacttgctgctgaatgtagcccaggacatagattccaacgatctttcggagcacgattcctggctgcagcagttcatccaacataataacacgattcgtttcatgggcgatgacacctggctgaaactgttcccacagcaatggtttgacttcgctgacccgacacactcgttctttgtcagtgatttcactcaagtcgataataatgtgacgaggaacttgcccgggaaattatttcaggaatgggcccagtgggacgtggctatcctgcattacttgggtcttgaccatatcgggcataaagatggcccgcattcaaagtttatggctgctaaacatcaagaaatggacagcattctgaagtcaatatatgatgaagtgttggaacatgaagatgacgatgatacactgatttgtgttcttggcgaccatggaatgaacgaactgggcaaccatggtggctcttcagccggcgaaacatcagcaggattgttgtttttgtcacctaagctggcgcaatttgctaggccagaatcgcaagtaaactacacattgcccatcaacgctagtccggactggaatttccagtatttagagactgttcaacaaattgatatcgtccccaccatagcagcactgtttggtatgccaatccccatgaacagtgttgggataataatacctgactttttacaactgttgcccaataagttggcaagtatgaaagaaaattttatgcatttgtggaaattatcagaccatcacggcgaggttgctcttgacgatttcactgccgaagatatttatacaaagatgtacactattcaagaaacgttaaccaagtctgcaacaaattataattatcctcttttgacactggcttttgttggtttcctcataataacaatcatcgccatttatgtattattacgttattctgggcctgatttttggcagttgcgcgtttcttccctgtctgttctgttagtttccattatactaggcgtttccacatttgcaagtagtttcattgaagaggagcaccaactgtggtggtggatagtaactgcattctcggcggtccctctgttcgtataccgattgaatgtgctcataatcgtgcgctggtttataatgatggcatgcgtacgctcaatcaagttttggaataacagtggccagaaattcatttattctaacgttatgtccaatctacttaatcagaatccttcctggaagtggtgcttaaatatgttgacatttctagtgctgataatggcatctgctggttttcaagtactacattttattgtcactactattttggtggggttgtgtttcacgtacaaaatctcgtgggaaatcgtcaatggtaaccaggcagaaataccgctctttatgcatgatttactggctaagatagactttgcaccaactgaaagtaacttgattgtacttgcgcgcgttttcttccaagcttgggctattgttgtcatttcaaggttggtcctgacgaaattgaaagtacttaacaagaactacctcattaaagatatgaaagtttatataacaattcttttgatgttccaaacttcttctcagaacataggtcaatttctcgttttccaaatattagagtcccaaattttttactttttccaaaatattccaaccgcctcattaacatcaacaagtaagatttatttttcgaatttggtgtccttaattttacaaaattttacatttttccaattcggtggcacaaattccatttctactatagaccttggaaacgcataccatggtgtttcctcagactacaacatctacgtagtggggatattaatgtccgttgccaatttcgcgccggcaatatactggtccatgctaccgtggtcaataaactacgcctctattccagcacaagttaagttgcaaacgttcatcagaagtaagttacctgccttcacctatcattgtatatttggaacttgtttgatgacggcatgcgtcgttttgagatttcatctctttatttggtccgttttcagtccaaaattatgttattttcttgggtggaattttgtgatgggattgctgaatggctggttacctgaattggccctcctttgcgctcttgattaa

SEQ ID NO: 6014 - DNA, 2493 bp, Artificial Sequence
  Description of Artificial Sequence: Synthetic polynucleotide
atgaacttgaagcagttcacgtgcttaagttgcgctcaattactcgctattttactctttatctttgcttttttccctagaaaaatcgtgttaacaggtatatccaagcaagatccggatcaagaccgtgatctccagcgcgataggcccttccagaaattggtgtttgtgatcattgatgctctcagaagtgactttctttttgattctcagatttcccacttcaacaacgtgcaccaatggctcaatacgggcgaagcatggggttacacgtcttttgctaatccgcctaccgtgacgttacctagactcaaaagtattactacgggatctacacctagcttcattgacttgttgttgaatgtagcccaggacatagattccaacgatctttctgagcacgattcctggttacagcagttcatccaacataataacacgattcgtttcatgggcgatgacacctggttgaaattattcccacagcaatggtttgacttcgctgacccgacacactctttctttgtcagtgatttcactcaagtcgataataatgtgacgaggaacttgcccgggaaattatttcaggaatgggcccagtgggacgtggctatcttgcattacttgggtcttgaccatatcgggcataaagatggcccgcattctaagtttatggctgctaaacatcaagaaatggacagcattttgaagagtatatatgatgaagtgttggaacatgaagatgacgatgatacattaatttgtgttcttggcgaccatggaatgaacgaattaggcaaccatggtggctcttctgccggcgaaacaagtgcaggattgttgtttttgtctcctaagttggcgcaatttgctaggccagaatctcaagtaaactacacattgcccatcaacgctagtccggactggaatttccagtatttagagactgttcaacaaattgatatcgtccccaccatagcagcattatttggtatgccaatccccatgaacagtgttgggataataatacctgactttttacaattattgcccaataagttggcaagtatgaaagaaaattttatgcatttgtggaaattaagtgaccatcacggcgaggttgctcttgacgatttcactgccgaagatatttatacaaagatgtacactattcaagaaacgttaaccaagtctgcaacaaattataattatcctcttttgacattggcttttgttggtttcctcataataacaatcatcgccatttatgtattattacgttattctgggcctgatttttggcagttgcgcgtttcttccttatctgttttattagtttccattatattgggcgtttccacatttgcaagtagtttcattgaagaggagcaccaattatggtggtggatagtaactgcattctctgcggtccctcttttcgtatacagattgaatgtgctcataatcgtgcgctggtttataatgatggcatgcgtacgcagtatcaagttttggaataacagtggccagaaattcatttattctaacgttatgtccaatttacttaatcagaatccttcctggaagtggtgcttaaatatgttgacatttttagtgttgataatggcatctgctggttttcaagtattacattttattgtcactactattttggtggggttgtgtttcacgtacaaaatcagttgggaaatcgtcaatggtaaccaggcagaaataccgctctttatgcatgatttattagctaagatagactttgcaccaactgaaagtaacttgattgtacttgcgcgcgttttcttccaagcttgggctattgttgtcatttctaggttggtcttgacgaaattgaaagtacttaacaagaactacctcattaaagatatgaaagtttatataacaattcttttgatgttccaaacttcttctcagaacataggtcaatttctcgttttccaaatattagagtcccaaattttttactttttccaaaatattccaaccgcctctttaacatctacaagtaagatttatttttctaatttggtgtccttaattttacaaaattttacatttttccaattcggtggcacaaattccatttctactatagaccttggaaacgcataccatggtgtttccagtgactacaacatctacgtagtggggatattaatgtccgttgccaatttcgcgccggcaatatactggtccatgttaccgtggtccataaactacgcctctattccagcacaagttaagttgcaaacgttcatcagaagtaagttacctgccttcacctatcattgtatatttggaacttgtttgatgacggcatgcgtcgttttgagatttcatctctttatttggtccgttttcagtccaaaattatgttattttcttgggtggaattttgtgatgggattgttgaatggctggttacctgaattggccctcctttgcgctcttgattga

SEQ ID NO: 6015 - DNA, 2142 bp, Saccharomyces cerevisiae
atgtcccaatctagtaggttaagtgcacttcctattttccaagcatcgctttcggcaagccaatctccacgttacatttttagttctcagaatggcacaaggattgttttcattcaagataacataataaggtggtacaatgtactcactgattcactttaccacagtttgaactttagtcgtcatctcgtcttggatgataccttccatgtaatatctagtacgtctggtgacctactctgtcttttcaatgacaacgagatttttgtaatggaagttccttggggctattccaacgttgaagacgtttccattcaagatgcattccaaattttccactattcaattgatgaagaagaagttggtccgaaatcgtccattaagaaagttttgtttcatccaaagagttatcgtgattcttgtatagtggttttgaaagaggatgacactatcacgatgtttgacatccttaattcgcaagaaaagcctatcgttttgaacaaaccgaacaactcctttggtttagatgcacgtgttaacgacatcacagatttagaattcagtaaggacggattgacgttatattgtctaaacaccacagaaggcggtgatatctttgcattttatccatttttaccgtcagtattactgttaaatgagaaagatctcaacttgatcctaaacaaatctttagtaatgtacgagtccctggattctacaacagatgttatagttaaaaggaatgttattaagcagttacagtttgtgtcaaaactgcatgaaaattggaattcaagatttggcaaagtcgacatacaaaaggaatatcgtttagccaaggttcaaggaccattcacgataaacccctttcccggcgagctgtatgactatactgctacaaatattgcaaccatactaattgataatgggcaaaatgaaattgtttgtgtcagttttgatgatgggtctttaatcttactcttcaaagatttggaaatgtcaatgtcgtgggatgttgacaattacgtgtataataattctttggttctaattgaacgagtcaaactacaaagagaaattaagtctctaataacgttacctgaacagttgggaaaactttatgtcatttccgataatattatacaacaagtaaattttatgagctgggcttctacattgagtaaatgtatcaacgaatcggatttgaatccacttgcaggattgaaatttgaaagtaaacttgaggatattgccaccatagaaagaattccaaacctagcgtatatcaactggaatgaccaatctaatttagccttgatgtcgaataaaacattgacttttcaaaatatttcaagcgatatgaaaccgcaaagcaccgcagctgaaacaagtatcagtacagaaaaaagtgacacggtaggagatggttttaaaatgagtttcacacagcccataaatgagattcttattttgaacgataattttcaaaaagcctgtattagtccatgtgaacgaattatcccatcagcagaccgccagatacctttaaaaaacgaagctagtgaaaatcagttggaaattttcacggatatttccaaagaatttttgcaaagaattgttaaagctcaaactttgggtgtttctatccacaatagaattcatgagcaacagttcgaattgacgcgccaactacaatcgacatgcaaaataatttcaaaggatgatgatttaaggagaaaattcgaagcacaaaataagaaatgggatgcacaactaagcagacagtcagaattaatggagagatttagtaaattgagcaagaagctatctcaaatcgccgaatccaataaatttaaagaaaagaaaataagccatggtgagatgaaatggttcaaagagatacgaaaccaaatattgcaattcaacagctttgttcactctcaaaaatcccttcaacaagatttatcgtacttgaagagtgaactaactcgtatcgaggcagaaactatcaaagtcgataaaaagagccaaaacgaatgggatgagctacgcaaaatgcttgaaatagattcaaagataattaaagaatgcaatgaagaattgttacaagtttctcaggaatttactactaaaactcaatga

SEQ ID NO: 6016 - DNA, 2142 bp, Artificial Sequence
  Description of Artificial Sequence: Synthetic polynucleotide
atgtcccaatctagtaggttaagtgcacttcctattttccaagcatctctttctgcaagccaatctccacgttacatttttagttctcagaatggcacaaggattgttttcattcaagataacataataaggtggtacaatgtactcactgattctctttaccacagtttgaactttagtcgtcatctcgtcttggatgataccttccatgtaatatctagtacgtctggtgacttactctgtcttttcaatgacaacgagatttttgtaatggaagttccttggggctattccaacgttgaagacgtttccattcaagatgcattccaaattttccactattctattgatgaagaagaagttggtccgaaatcttccattaagaaagttttgtttcatccaaagagttatcgtgattcttgtatagtggttttgaaagaggatgacactatcacgatgtttgacatccttaattctcaagaaaagcctatcgttttgaacaaaccgaacaactcctttggtttagatgcacgtgttaacgacatcacagatttagaattcagtaaggacggattgacgttatattgtttgaacaccacagaaggcggtgatatctttgcattttatccatttttaccgtctgtattattattaaatgagaaagatctcaacttgatcttgaacaaatctttagtaatgtacgagtccttggattctacaacagatgttatagttaaaaggaatgttattaagcagttacagtttgtgtctaaattgcatgaaaattggaattctagatttggcaaagtcgacatacaaaaggaatatcgtttagccaaggttcaaggaccattcacgataaacccctttcccggcgagttgtatgactatactgctacaaatattgcaaccatattgattgataatgggcaaaatgaaattgtttgtgtcagttttgatgatgggtctttaatcttactcttcaaagatttggaaatgtccatgtcttgggatgttgacaattacgtgtataataattctttggttttgattgaaagagtcaaattacaaagagaaattaagtctttgataacgttacctgaacagttgggaaaactttatgtcatttccgataatattatacaacaagtaaattttatgagctgggcttctacattgagtaaatgtatcaacgaaagtgatttgaatccacttgcaggattgaaatttgaaagtaaacttgaggatattgccaccatagaaagaattccaaacttggcgtatatcaactggaatgaccaatctaatttagccttgatgagtaataaaacattgacttttcaaaatatttctagcgatatgaaaccgcaaagcaccgcagctgaaacaagtatcagtacagaaaaaagtgacacggtaggagatggttttaaaatgagtttcacacagcccataaatgagattcttattttgaacgataattttcaaaaagcctgtattagtccatgtgaaagaattatcccatctgcagaccgccagatacctttaaaaaacgaagctagtgaaaatcagttggaaattttcacggatatttccaaagaatttttgcaaagaattgttaaagctcaaactttgggtgtttctatccacaatagaattcatgagcaacagttcgaattgacgcgccaattacaaagtacatgcaaaataatttccaaggatgatgatttaaggagaaaattcgaagcacaaaataagaaatgggatgcacaattgagcagacagtctgaattaatggagagatttagtaaattgagcaagaagttatctcaaatcgccgaatccaataaatttaaagaaaagaaaataagccatggtgagatgaaatggttcaaagagataagaaaccaaatattgcaattcaacagctttgttcactctcaaaaatcccttcaacaagatttatcttacttgaagagtgaattgactcgtatcgaggcagaaactatcaaagtcgataaaaagagccaaaacgaatgggatgagttacgcaaaatgcttgaaatagattctaagataattaaagaatgcaatgaagaattgttacaagtttctcaggaatttactactaaaactcaatga

SEQ ID NO: 6017 - DNA, 1335 bp, Saccharomyces cerevisiae
atgaaacaacgattcattcgtcaatttacgaacctaatgtctacttcgagaccgaaagttgttgccaacaaatatttcacttctaacactgccaaagatgtttggtcgctaaccaatgaagccgctgcaaaagctgccaataactccaaaaaccaaggccgtgaacttattaatttaggccaaggctttttttcatattcccctcctcaattcgccattaaggaggctcagaaagccctagacattccaatggtcaatcaatattctccaactagaggtcgaccttcattaattaattccttgattaagttgtattctcctatttataacacagaattgaaagcggaaaatgttaccgtaacaacaggtgccaatgaaggtatactttcttgcttgatggggcttttgaacgctggcgacgaggttattgtttttgaacctttctttgaccaatatattccaaatatcgaactttgcggtggtaaagttgtttacgtccccataaatcctccaaaggaattggatcaaaggaatactagaggtgaagaatggaccattgactttgagcagttcgaaaaagcgattacatccaagacaaaagctgtcattatcaatacccctcacaacccaattggtaaagttttcacgcgcgaggaattaaccactttaggtaacatttgcgtcaagcacaacgttgtgattatatctgatgaagtctatgaacacctttacttcactgattctttcactagaattgccacactctctccagaaattgggcaactaaccttaacggtcggttctgccggtaaatcgtttgctgctactggttggagaattggttgggtcttatccttgaacgcagagttgttaagttatgcagctaaggcacatacaagaatttgttttgcatctccatcccctctacaggaagcttgtgcaaactctattaacgacgctttaaaaattgggtattttgaaaaaatgagacaggaatatatcaacaaattcaaaattttcacatcgatctttgatgaattgggactaccatatacagctccagagggtacatattttgtcctcgttgatttctctaaagtgaaaattcccgaggactatccctacccagaggagatcctgaataagggaaaagattttcgcatttctcactggttgatcaatgaattaggtgtggttgccattccaccaactgaattctatatcaaagagcacgaaaaggctgctgagaatttgttaaggtttgcagtttgtaaagatgatgcttatctagaaaatgccgtagagagattaaaactactcaaggactacttataa

SEQ ID NO: 6018 - DNA, 1335 bp, Artificial Sequence
  Description of Artificial Sequence: Synthetic polynucleotide
atgaaacaaagattcattcgtcaatttacgaacttgatgtctacttccagaccgaaagttgttgccaacaaatatttcacttctaacactgccaaagatgtttggtctttaaccaatgaagccgctgcaaaagctgccaataactccaaaaaccaaggccgtgaacttattaatttaggccaaggctttttttcttattcccctcctcaattcgccattaaggaggctcagaaagccttggacattccaatggtcaatcaatattctccaactagaggtagaccttctttaattaattccttgattaagttgtattctcctatttataacacagaattgaaagcggaaaatgttaccgtaacaacaggtgccaatgaaggtatactttcttgcttgatggggcttttgaacgctggcgacgaggttattgtttttgaacctttctttgaccaatatattccaaatatcgaactttgcggtggtaaagttgtttacgtccccataaatcctccaaaggaattggatcaaaggaatactagaggtgaagaatggaccattgactttgagcagttcgaaaaagcgattacatccaagacaaaagctgtcattatcaatacccctcacaacccaattggtaaagttttcacgcgcgaggaattaaccactttaggtaacatttgcgtcaagcacaacgttgtgattatatctgatgaagtctatgaacacctttacttcactgattctttcactagaattgccacactctctccagaaattgggcaattgaccttaacggtcggttctgccggtaaaagttttgctgctactggttggagaattggttgggtcttatccttgaacgcagagttgttaagttatgcagctaaggcacatacaagaatttgttttgcatctccatcccctttgcaggaagcttgtgcaaactctattaacgacgctttaaaaattgggtattttgaaaaaatgagacaggaatatatcaacaaattcaaaattttcacatctatctttgatgaattgggattaccatatacagctccagagggtacatattttgtcctcgttgatttctctaaagtgaaaattcccgaggactatccctacccagaggagatcttgaataagggaaaagattttcgcatttctcactggttgatcaatgaattaggtgtggttgccattccaccaactgaattctatatcaaagagcacgaaaaggctgctgagaatttgttaaggtttgcagtttgtaaagatgatgcttatttggaaaatgccgtagagagattaaaattactcaaggactacttatga

SEQ ID NO: 6019 - DNA, 1227 bp, Saccharomyces cerevisiae
atgagtgacaaatctcatcagatatattgctacttttggctctttggtttgatcaataatgtactttatgtggtaatactttcagcagctgttgatatcgtgggtcctaccttgcctaaatctctagtattgctagcagatatattcccatcactcgccattaaattgtgttccccattctttattgatagaatcaagtacagctatagaatatggtctttgatcacgatgagttgcttaggaatgttcttagtttcttttaaaaacttgtttgtttgtcttttaggaatatctttcgcatctatatcttccggatttggagaagtgacattcctacagctaacacactattacaaacaaatttctttgaatggatggtcgtcaggtactggtggtgcaggaatcattggcggagcatcttatatgttcttaacttcaatctttaaagttccagtgaagctaactttactagtatttagtctccttccatttgcatttttgttttattttaaattagaatccaatgataccaacctgacttaccaaagtcttcaacaaattgacgaagcagaggatgaccagttggtgccctttcctgtcgcctttacacataccaacgcttcgcaatccctgtattctacaagacagcacattttgcaaacggtcaagagacttcgaagattggtttttccatacatggttccattgaccaccgtctacttattcgaatatttaataaaccaagcggtagctccgaccctattatttccgattaatggtgatgaaagaagtaaatcgatgccatttttcttccataaatacagagatatatacgtaacctatggaacgctctaccaattaggtgtctttatatcaagatcctttggacatcttatgagaatgaggagtttatacatcttagcgtttttacaaggtgtgaatttgtgcataacggtactgcaatcatggttttatgtcacacattcgccctgggcggtgatgatattaatattctatgagggttttcttggtggtgcgtcatatgttaacacattcttaaatattctcgaacaagaggatcctgatgaaacagagttcgccatgggtgctgtgtccatcgctgattcctttggcgtttttttggctgcgttacttggtttggggctagaacccaaactttgtaggcatcaaattgccgatgacagaccttggtgtaggatggaataa

SEQ ID NO: 6020 - DNA, 1227 bp, Artificial Sequence
  Description of Artificial Sequence: Synthetic polynucleotide
atgagtgacaaatctcatcagatatattgctacttttggctctttggtttgatcaataatgtactttatgtggtaatactttctgcagctgttgatatcgtgggtcctaccttgcctaaatctttagtattgttggcagatatattcccatctctcgccattaaattgtgttccccattctttattgatagaatcaagtacagctatagaatatggtctttgatcacgatgagttgcttaggaatgttcttagtttcttttaaaaacttgtttgtttgtcttttaggaatatctttcgcatctatatcttccggatttggagaagtgacattcttacagttgacacactattacaaacaaatttctttgaatggatggtcttctggtactggtggtgcaggaatcattggcggagcatcttatatgttcttaacttctatctttaaagttccagtgaagttgactttattggtatttagtctccttccatttgcatttttgttttattttaaattagaatccaatgataccaacttgacttaccaaagtcttcaacaaattgacgaagcagaggatgaccagttggtgccctttcctgtcgcctttacacataccaacgcttctcaatccttatattctacaagacagcacattttgcaaacggtcaagagacttagaagattggtttttccatacatggttccattgaccaccgtctacttattcgaatatttaataaaccaagcggtagctccgaccttattatttccgattaatggtgatgaaagaagtaaatctatgccatttttcttccataaatacagagatatatacgtaacctatggaacgctctaccaattaggtgtctttatatctagatcctttggacatcttatgagaatgaggagtttatacatcttagcgtttttacaaggtgtgaatttgtgcataacggtattacaaagttggttttatgtcacacattctccctgggcggtgatgatattaatattctatgagggttttcttggtggtgcgtcttatgttaacacattcttaaatattctcgaacaagaggatcctgatgaaacagagttcgccatgggtgctgtgtccatcgctgattcctttggcgtttttttggctgcgttacttggtttggggttggaacccaaactttgtaggcatcaaattgccgatgacagaccttggtgtaggatggaatga

SEQ ID NO: 6021 - DNA, 1632 bp, Saccharomyces cerevisiae
atgacagcagaagatatactccttcgagaaagaacatctactacgacacaacgccctgtcaatagcgaacaataccttaatgtgcaattagccacagccccagtaaaaaattttcagactacaagcgagattagccggcaaactcttgtagacacatcaaatgatgacgtttattccatcaagaatttgaagggctcgaggaaccccattagccctagtgtttctaacgttggcttccaatccatattccatacagtagatcatcctcgatcgaaggtcagtgtggcctcaaatcattccttgaggagcaatgacaatgcctcagctgcaacatctaaatctggttcttctcagataggggaatctcatagcgttgacacggtggagtgctcgaacaatctatctaaaaagttatcttctgatgcaatatccattactcagaaaagtttacactccacgccctccggcaggtatatgaaaggaaaggcttctggcttttttaataggagaaacagagcacatacgaccatttcatcggatcctgcctcctttttgacagattcaagcaccttacataatagttcacattcatttcgaaacgtgattaagaactttttccaaaataaaagccacaggcacattggtcaagatgctatcgagcctgcaattccaaattccttgagtaaatttctgcattcctcttacggaagacataaatctccgtcacaatttattcatactaatgcggggcaacttgtggactcaggaacttctgtgtactcattgaatgttaatccatctggtgtcaatcccaacacaatcgttgaggatccgctttctggaactgatcctgcctcaccgaatccggtctcaatgttacacgaccttttaagaaatttaccatctctggaagctaactataaacacttcaactcccaagaactgacaaccctaacaaataatatttggaatatattttgtagtaacgtagcagaattattcagaactcaaagaatatggaaactcagggccaaaatagaaaattttaacgaagttttagaattctattgcattttaaaaacagatccaagagtcacacatagcggcatgaatagaattatcagcgatttgaaagaatttttggttagttccctatacaatttagaaaaccaaattgtttttaactattctaatgaagacacaataaataacgcattgaaaagattaggcgttatatggcggatattttatcaagaggtatattatgatttagccgctgtgttattaccgttggatcagagtatcagagaagatggtaattctacggttttaaagtcaggcaatgaaagtcggactcacattaatggtaattattctattgggtttcttttgcttatgtgctttagagattcaatagtcttaccttgttatgaaaacttcgtaaatagtaacgatggtatcagcaaaagttttcaactttacattttcaatcaagaagaagaaagtaatgtcacagaaacagataaattgacattactgcagtgttttggcatattgagtaccattcaaagtaatgatagaaatcaacgaattatcgaagagttattagcaggcattagaatgagtatatag

SEQ ID NO: 6022 - DNA, 1632 bp, Artificial Sequence
  Description of Artificial Sequence: Synthetic polynucleotide
atgacagcagaagatatactccttagagaaagaacatctactacgacacaacgccctgtcaatagcgaacaataccttaatgtgcaattagccacagccccagtaaaaaattttcagactacaagcgagattagcagacaaactcttgtagacacaagtaatgatgacgtttattccatcaagaatttgaagggctccaggaaccccattagccctagtgtttctaacgttggcttccaatccatattccatacagtagatcatcctcgttccaaggtcagtgtggcctctaatcattccttgaggagcaatgacaatgcctctgctgcaacatctaaatctggttcttctcagataggggaatctcatagcgttgacacggtggagtgcagcaacaatttatctaaaaagttatcttctgatgcaatatccattactcagaaaagtttacactccacgccctccggcaggtatatgaaaggaaaggcttctggcttttttaataggagaaacagagcacatacgaccatttcttctgatcctgcctcctttttgacagattctagcaccttacataatagttctcattcttttagaaacgtgattaagaactttttccaaaataaaagccacaggcacattggtcaagatgctatcgagcctgcaattccaaattccttgagtaaatttttacattcctcttacggaagacataaatctccgtctcaatttattcatactaatgcggggcaacttgtggactctggaacttctgtgtactctttgaatgttaatccatctggtgtcaatcccaacacaatcgttgaggatccgctttctggaactgatcctgcctctccgaatccggtctccatgttacacgaccttttaagaaatttaccatctttggaagctaactataaacacttcaactcccaagaattaacaaccttaacaaataatatttggaatatattttgtagtaacgtagcagaattattcagaactcaaagaatatggaaactcagggccaaaatagaaaattttaacgaagttttagaattctattgcattttaaaaacagatccaagagtcacacatagcggcatgaatagaattatcagcgatttgaaagaatttttggttagttccttgtacaatttagaaaaccaaattgtttttaactattctaatgaagacacaataaataacgcattgaaaagattaggcgttatatggagaatattttatcaagaggtatattatgatttagccgctgtgttattaccgttggatcagagtatcagagaagatggtaattctacggttttaaagtctggcaatgaaagtagaactcacattaatggtaattattctattgggtttcttttgcttatgtgctttagagattctatagtcttaccttgttatgaaaacttcgtaaatagtaacgatggtatcagcaaaagttttcaactttacattttcaatcaagaagaagaaagtaatgtcacagaaacagataaattgacattattgcagtgttttggcatattgagtaccattcaaagtaatgatagaaatcaaagaattatcgaagagttattagcaggcattagaatgagtatatga

SEQ ID NO: 6023 - DNA, 2004 bp, Saccharomyces cerevisiae
atgagtttagtaccatatgaagaaggttcgctgattttagatgatcctaattctaaatcagtggtggttgttaatccaacctcaggaactttatcatttttccaacaggacaacagtaataatgactctgaactaaatgaagaccagactgcatctttatcagcactggactttccttcagggattcatcaatacaaaagccctattgcttcctatgtgtgcccgcaatgtggtacggaaattaaccctgatattataaacagaagacaacttcatcgtcgagcctctgctggagtagaatcagaaagcagtaggctcagtattccagagaacactgtgccacttggatttgaatttgccaattcaagcttttcaagaagatattttcagtcattggaaagaaatcatcggcactacgccctacaaaacgatagtaacaataagcagggacagttcagcaaaaacaaatactttattccagatgatttgtttatccccggatactttcgtaaatttttcaaaatattgtctttgctgggaaatggtgcaagaggttctgtttacaaagttgtacacacaattggtaatactgaattaggtgtttttgcactaaaaaaaatacctattggaaatgatatggaatggtttaataagtgcatacgggaagtgaaagcgttgagttcgctaactcacaaaagtgccaatttgattacgtataatcatgtgtggctcgaaatggattcttcggttggatttgtcagatccattgatgggagccaatcggattcacaagaagaagttccttgtattttcattttacaacagtattgcagtggcggcaatttagaagactgtattctaagaaaagtgttcaataggttctcagataccgaatcacctgaagagaggaaaaaaaaatttagaactcgcaagaaaaatcacggtaaatcaggagaagttggcctatctacggaacagctcgtatccattataagggatattgcaagaggtttacacgaactgcacagtattggcctaatacatagggacttgaaaccatccaactgtttattattgactccatttaaaagtgacaatgagaatgacaacgtatacgacagggaacacaattcagatgagtttttcccatcaattgttattggcgatttgggggaaagtcagttggaaggagagtccagattgggtactggttgcacaggaacattagagtttacagcaccagaccttattatccaggggagaccagtttcttcttctacgttgccttcaagatcgagtcacacatacaatgaatacacctttgcttccgatatgtattctctaggaatgatttgctattttattgtcttcggtgaattgccctttgaaccacagttggatatagttgatttgaaggtacgcatcaaaaattttaggttcgacactgaaggtatgattgaaaagcatcaagcgatgaaattgaaaccaatagaccgtagaatatttcacctaatggacgctcttttacaaccaaataatgatgctagacccacagcgaagacagtggaggagacgttagatgaaatgctaataaattccaaacccggcaaaaaattctggaaagaaaatgtggatagcactttgaacttcagtacaatctcggaagtgaatgagaataccaacagttttactgatgattatattgacggagacaacgttactttatcattaccagcaccagaggaaaatttgagcaccgtatcaacccaaaacctccaaaagtattctgctttaaatagaacaatccaggtttgttacaaactagtttctatgatattaacgataatcatatttaagtgtaccaaaacggggtcgtggctctcttatatgtcactgatattgttgggaatggtttttaaatcaccagctgatgaaagaggtaagcatgcaagagcgttggttttactggccttcatcgccgcatgcaaaaaatacatatactaa

SEQ ID NO: 6024 - DNA, 2004 bp, Artificial Sequence
  Description of Artificial Sequence: Synthetic polynucleotide
atgagtttagtaccatatgaagaaggttctttgattttagatgatcctaattctaaatctgtggtggttgttaatccaacctctggaactttatcttttttccaacaggacaacagtaataatgactctgaattgaatgaagaccagactgcatctttaagtgcattggactttccttctgggattcatcaatacaaaagccctattgcttcctatgtgtgcccgcaatgtggtacggaaattaaccctgatattataaacagaagacaacttcatcgtcgtgcctctgctggagtagaaagtgaaagcagtaggctcagtattccagagaacactgtgccacttggatttgaatttgccaatagtagcttttccagaagatattttcagtctttggaaagaaatcataggcactacgccttgcaaaacgatagtaacaataagcagggacagttcagcaaaaacaaatactttattccagatgatttgtttatccccggatactttcgtaaatttttcaaaatattgtctttgttgggaaatggtgcaagaggttctgtttacaaagttgtacacacaattggtaatactgaattaggtgtttttgcattgaaaaaaatacctattggaaatgatatggaatggtttaataagtgcataagagaagtgaaagcgttgagttctttgactcacaaaagtgccaatttgattacgtataatcatgtgtggctcgaaatggattcttctgttggatttgtcagatccattgatgggagccaatctgattctcaagaagaagttccttgtattttcattttacaacagtattgcagtggcggcaatttagaagactgtattttaagaaaagtgttcaataggttcagtgataccgaatctcctgaagagaggaaaaaaaaatttagaactcgcaagaaaaatcacggtaaaagtggagaagttggcttatctacggaacagctcgtatccattataagggatattgcaagaggtttacacgaattgcacagtattggcttgatacatagggacttgaaaccatccaactgtttattattgactccatttaaaagtgacaatgagaatgacaacgtatacgacagggaacacaattctgatgagtttttcccatctattgttattggcgatttgggggaaagtcagttggaaggagagtccagattgggtactggttgcacaggaacattagagtttacagcaccagaccttattatccaggggagaccagtttcttcttctacgttgccttccagaagtagtcacacatacaatgaatacacctttgcttccgatatgtattctttgggaatgatttgctattttattgtcttcggtgaattgccctttgaaccacagttggatatagttgatttgaaggtacgcatcaaaaattttaggttcgacactgaaggtatgattgaaaagcatcaagcgatgaaattgaaaccaatagaccgtagaatatttcacttgatggacgctcttttacaaccaaataatgatgctagacccacagcgaagacagtggaggagacgttagatgaaatgttgataaattccaaacccggcaaaaaattctggaaagaaaatgtggatagcactttgaacttcagtacaatcagtgaagtgaatgagaataccaacagttttactgatgattatattgacggagacaacgttactttatctttaccagcaccagaggaaaatttgagcaccgtatctacccaaaacctccaaaagtattctgctttaaatagaacaatccaggtttgttacaaattggtttctatgatattaacgataatcatatttaagtgtaccaaaacggggtcctggctctcttatatgtctttgatattgttgggaatggtttttaaatctccagctgatgaaagaggtaagcatgcaagagcgttggttttattagccttcatcgccgcatgcaaaaaatacatatactga

SEQ ID NO: 6025 - DNA, 2643 bp, Saccharomyces cerevisiae
atggatgcgttgactcccagggactcccccaagcgcgatgactcgatggccacgagtgcggccactgctgcttctgccaagcctgatgctctgacgataggtaaagaaggcattgtccacgggcacatccataactacaacaacctgacctatatccatggtcaccttcaccacagcgcgcctgtgaacgacagtagtgcttcggcaacacctgcagccgcagctgttgctgatgccgctacttccgcatttgcatctggagctagccatgatatgggtggtgattgccacgtcaatgagaaatgcaaggagtacaccgactgccaacatttcgagttcttgaattatcacaataatccgtcattaacaaaatataatgatactgcaacgtataattctaataatcattcttttgcaaacaatttccattcggtagcttctgatccgacaagtccccaacagaattctaaaagcgacctaccacgtagaaaagattcttggtttaacgacgatctgatactgctgccctcttccaagaaaaataaaccgaacccaccacctggatccgatgattgttattgtacgcccaagattttggaaatatgttgtgacgaaactcatcccaaaagtgaggctaatataaaacaaggtgaatctgatcaaccgacaaagaaagacatatctgagaacggcaatgatgttgcaatattcacagatgtaaagaacgatcacttgatgccaaattttaaccttcatgatcagtactgtaatagtaccaatcacgactctcacaatcacaataatactgtaccagatagcttttctcagctgatgtctcacttatcggagattgattgcgatttgacctgtgacaccccatgcacggctagcacgagcgcgactagtggtcacaagtttgttcaagatcatcaatcatcaaataatgatgacgttttccataaatactgcaaattttgtgaggagagcactgataatcaaccttgttctaagcatatgcatttagagtcaaagccacctcaactaccacccaaatgttcatctttacgaaaacctacaaacactttgcaaggtacaaatcatgcttatcacgaacatatcttaaatactgatatggatttgaagattttggaagatttatgcaatatttcttctttgtatgaagtaccgtttggaaaacacattaaccaccacgaccacaataatgccggtaacggctgcgatggttcgagcacaggaaataatgaaaacggtaaccaaacaatgaatcttctattatcaagcattaatagatgcaaccctaaaaataatcttaatggaagcaataacaatacggctggagcaacttcaactgatcatcaacaccatcaccatagaatacagtttcattctcacaaaccaaatagaaacaatattgtgaacaattcagggattagcgcggcgaacacaacagccgatctaactaacaacgatttaaatgacttaatttcaagagagtatagttatgaaagatttagaaatcaaagtgagcccccttcgctacccaaagtcactcatcagaatcagaaaaatcgtagatcttggcctacaaaagatctagaatctactgatttcagctctttggaagactcattaccttctagcatctctcctcctatacagacaacaagcactataaatttcaactggtgttttaaagaagagaaaaacaatgacttaaaatgcaaatggaaagaatgtcctgagtcttgtagctcactatttgacctacaaagacatcttttgaaggatcatgtctctcaagatttcaaacaccctatggaaccattagcttgtaattgggaggactgtgatttccttggagatgatacatgttccatagtgaaccatattaattgtcaacatggtatcaattttgatattcaatttgccaacccagactcatttttgcctggtagtatatcaaaggaaaaacatcacttactacattgccccaacccacaaacacacgaagtttctaaagcagatggagcacctgatatgacgtctgcaaatgatgtttccaatataccgccaatcaagcagccggaacaggtgatttgccaatgggatggttgcaataagtcattttccagtgctcaggaattaaacgaccatttagaagcagtacatttaacccggggtaagtctgaataccaatgcttgtggcatgactgccatcgtacgttcccccaaagacaaaaattaatccgtcatttaaaagtgcattcgaaatacaaaccttataagtgcaagacatgtaaaaggtgtttttcaagcgaagaaactttagttcagcataccaggacacactctggcgaaaaaccttacaaatgtcacatttgtaataaaaaattcgcgatttcaagttctttgaagattcatataagaacccatactggtgaaaaacctttacaatgcaagatttgtggtaagagattcaacgaatcgtcaaatttgagcaaacatattaagacccatcagaaaaaatacaagtgctctgactgttccaaaagctttgacgatttgggaaaattgaactcacagaaagtgaaatgcgcattggaaagaaaaccatatttataa

SEQ ID NO: 6026 - DNA, 2643 bp, Artificial Sequence
  Description of Artificial Sequence: Synthetic polynucleotide
atggatgcgttgactcccagggactcccccaagcgcgatgactccatggccacgagtgcggccactgctgcttctgccaagcctgatgctttgacgataggtaaagaaggcattgtccacgggcacatccataactacaacaacttgacctatatccatggtcaccttcaccacagcgcgcctgtgaacgacagtagtgcttctgcaacacctgcagccgcagctgttgctgatgccgctacttccgcatttgcatctggagctagccatgatatgggtggtgattgccacgtcaatgagaaatgcaaggagtacaccgactgccaacatttcgagttcttgaattatcacaataatccgtctttaacaaaatataatgatactgcaacgtataattctaataatcattcttttgcaaacaatttccattctgtagcttctgatccgacaagtccccaacagaattctaaaagcgacttaccacgtagaaaagattcttggtttaacgacgatttgatattattgccctcttccaagaaaaataaaccgaacccaccacctggatccgatgattgttattgtacgcccaagattttggaaatatgttgtgacgaaactcatcccaaaagtgaggctaatataaaacaaggtgaatctgatcaaccgacaaagaaagacatatctgagaacggcaatgatgttgcaatattcacagatgtaaagaacgatcacttgatgccaaattttaaccttcatgatcagtactgtaatagtaccaatcacgactctcacaatcacaataatactgtaccagatagcttttctcagttgatgtctcacttatctgagattgattgcgatttgacctgtgacaccccatgcacggctagcacgagcgcgactagtggtcacaagtttgttcaagatcatcaatcttccaataatgatgacgttttccataaatactgcaaattttgtgaggagagcactgataatcaaccttgttctaagcatatgcatttagagtctaagccacctcaattaccacccaaatgttcttctttaagaaaacctacaaacactttgcaaggtacaaatcatgcttatcacgaacatatcttaaatactgatatggatttgaagattttggaagatttatgcaatatttcttctttgtatgaagtaccgtttggaaaacacattaaccaccacgaccacaataatgccggtaacggctgcgatggttccagcacaggaaataatgaaaacggtaaccaaacaatgaatcttttattatccagcattaatagatgcaaccctaaaaataatcttaatggaagcaataacaatacggctggagcaacttctactgatcatcaacaccatcaccatagaatacagtttcattctcacaaaccaaatagaaacaatattgtgaacaatagtgggattagcgcggcgaacacaacagccgatttgactaacaacgatttaaatgacttaatttctagagagtatagttatgaaagatttagaaatcaaagtgagcccccttctttacccaaagtcactcatcagaatcagaaaaatcgtagatcttggcctacaaaagatttggaatctactgatttcagctctttggaagactctttaccttctagcatctctcctcctatacagacaacaagcactataaatttcaactggtgttttaaagaagagaaaaacaatgacttaaaatgcaaatggaaagaatgtcctgagtcttgtagctctttatttgacttgcaaagacatcttttgaaggatcatgtctctcaagatttcaaacaccctatggaaccattagcttgtaattgggaggactgtgatttccttggagatgatacatgttccatagtgaaccatattaattgtcaacatggtatcaattttgatattcaatttgccaacccagactcttttttgcctggtagtatatccaaggaaaaacatcacttattacattgccccaacccacaaacacacgaagtttctaaagcagatggagcacctgatatgacgtctgcaaatgatgtttccaatataccgccaatcaagcagccggaacaggtgatttgccaatgggatggttgcaataagagcttttccagtgctcaggaattaaacgaccatttagaagcagtacatttaaccagaggtaagtctgaataccaatgcttgtggcatgactgccatcgtacgttcccccaaagacaaaaattaatccgtcatttaaaagtgcattctaaatacaaaccttataagtgcaagacatgtaaaaggtgtttttctagcgaagaaactttagttcagcataccaggacacactctggcgaaaaaccttacaaatgtcacatttgtaataaaaaattcgcgatttccagttctttgaagattcatataagaacccatactggtgaaaaacctttacaatgcaagatttgtggtaagagattcaacgaatcttccaatttgagcaaacatattaagacccatcagaaaaaatacaagtgctctgactgttccaaaagctttgacgatttgggaaaattgaactctcagaaagtgaaatgcgcattggaaagaaaaccatatttatga

SEQ ID NO: 6027 - DNA, 738 bp, Saccharomyces cerevisiae
atgacaatggaaaaaaatggaggtaatagcagccgtggtggccaagtaggcggcaagtctgtgtgtgtttactgcgggtcttcatttggcgctaaggcgctatactcagaaagtgcagaagaattaggagcccttttccataagctgggatggaaattggtatacggtggaggcactactggtttgatgggcaagatagcaaggtctacgatgggacctgatttaagcggacaggttcacggtatcattccaaatgcacttgtgtctaaggaaaggacagacgaggataaagaagatgttaataaagcattgttggagtctgtagaaaatcataagggcgccactcctatttctgaagagtatggggaaacaacgattgtaccagatatgcatacgagaaaaagaatgatggcaaatttgagtgacgcgtttgttgctatgcctggtggatacgggacttttgaagaaatcatggaatgtatcacgtggtcgcaactggggattcataataaaccaattatcttgttcaatatcgatgggttctatgacaaattattggagttcctcaaacactctattcaagaacggttcatcagtgtgaagaatggtgaaatcattcaagttgcctccactccgcaggaagttgttgataaaatagagaagtacgtcgttccagagggccgtttcaatttgaattggagcgacgaaggtcacgctcacgaggattgtgctaaataa

SEQ ID NO: 6028 - DNA, 738 bp, Artificial Sequence
  Description of Artificial Sequence: Synthetic polynucleotide
atgacaatggaaaaaaatggaggtaatagcagccgtggtggccaagtaggcggcaagtctgtgtgtgtttactgcgggtcttcttttggcgctaaggcgttgtactctgaaagtgcagaagaattaggagcccttttccataagttgggatggaaattggtatacggtggaggcactactggtttgatgggcaagatagcaaggtctacgatgggacctgatttaagcggacaggttcacggtatcattccaaatgcacttgtgtctaaggaaaggacagacgaggataaagaagatgttaataaagcattgttggagtctgtagaaaatcataagggcgccactcctatttctgaagagtatggggaaacaacgattgtaccagatatgcatacgagaaaaagaatgatggcaaatttgagtgacgcgtttgttgctatgcctggtggatacgggacttttgaagaaatcatggaatgtatcacgtggtctcaattagggattcataataaaccaattatcttgttcaatatcgatgggttctatgacaaattattggagttcctcaaacactctattcaagaaagattcatcagtgtgaagaatggtgaaatcattcaagttgcctccactccgcaggaagttgttgataaaatagagaagtacgtcgttccagagggccgtttcaatttgaattggagcgacgaaggtcacgctcacgaggattgtgctaaatga

SEQ ID NO: 6029 - DNA, 1437 bp, Saccharomyces cerevisiae
atgtcttctgaatcaggaaagcctattgctaagcctattaggaagcctggctataccaatccggctttaaaagcccttggtatacccgccttgaggctgccttctcgaaactggatgatcttttggtctgtgttaacagtatccatcggtggcatagcctatgacaaatacaagcaacgtcagattctgagccatgcaacagacttggtgaagcctttggcagaggagtccatggaggtagacaaagtgccacgaaagatcactgtttttattgcacctcctccaaatgattatctggagagttcgttgaaagtttggagacgatatgttaagcctgtactgtattatgcagggttggactatgaattagttcaagaggataggcaagggattattagaactaatgtagccaacagaatcagagaattgagaaaggaaatattggcatcgacggatgggcagccagttaaagagcctaaccaaacggtagcaaaaccaagtggttcttcaaccagtaaaatttcatcactactaccgttcaataaaatcattcaagatcctgctgaagaagatgactcgtttgatccagaaatcggtaaaaagttcaaggagaacttcgactggagaaacgttataggtatcttctatacaatgccaaaaccgaagcatataataagtgaagacgccctgacaaaggaccctatattatctggtggtgttatttgtttaggtagaggcgcctataaggagtacattgccggtattcacgaaggcttgcttggacccatcgagaagaccgaaaaaacaggatccactgagcctaagatgactggggttgtagaagcaaatcaaatagaatcaaaggtaagtgaatccggtgctacggaactggtggatgccgagaaagagactgctttggaagaggccaaagtacaagatgatctaaaggttgatgaagaaaacagctcagaggattcgcaaaaatttttgaagccatttatttcttcagaccaataccctgacctgcaaatcgcttcggaattacaaactccaaatggcgaattcataagaaaccccaatacaaatatcccgcttctgattaatcagccgttattggtcattccaatacctaacttgataggttttactaccattccaaggagaatacatcgtttttaccagaagcgtttctacgtagaggacgtgtgttcaagtgtagttaactgtgttcgacaaacccgtataagaccgtttgatattgcaaaggatattgatttggcgaaggacgaagaaaaagattggccacagaactgggtcaaacagggtaaagaaaagaacagcgaatggacccaagaattagtatgtgatcctagaatcacgaagcatatgtttgtttacgaaaaaccacccaaggaagagccagaatcagatatttaa

SEQ ID NO: 6030 - DNA, 1437 bp, Artificial Sequence
  Description of Artificial Sequence: Synthetic polynucleotide
atgtcttctgaatctggaaagcctattgctaagcctattaggaagcctggctataccaatccggctttaaaagcccttggtatacccgccttgaggttgccttctagaaactggatgatcttttggtctgtgttaacagtatccatcggtggcatagcctatgacaaatacaagcaacgtcagattttgagccatgcaacagacttggtgaagcctttggcagaggagtccatggaggtagacaaagtgccaagaaagatcactgtttttattgcacctcctccaaatgattatttggagagttctttgaaagtttggagaagatatgttaagcctgtattatattatgcagggttggactatgaattagttcaagaggataggcaagggattattagaactaatgtagccaacagaatcagagaattgagaaaggaaatattggcaagcacggatgggcagccagttaaagagcctaaccaaacggtagcaaaaccaagtggttcttccaccagtaaaatttcttctttattaccgttcaataaaatcattcaagatcctgctgaagaagatgactcttttgatccagaaatcggtaaaaagttcaaggagaacttcgactggagaaacgttataggtatcttctatacaatgccaaaaccgaagcatataataagtgaagacgccttaacaaaggaccctatattatctggtggtgttatttgtttaggtagaggcgcctataaggagtacattgccggtattcacgaaggcttgcttggacccatcgagaagaccgaaaaaacaggatccactgagcctaagatgactggggttgtagaagcaaatcaaatagaatccaaggtaagtgaatccggtgctacggaattagtggatgccgagaaagagactgctttggaagaggccaaagtacaagatgatttgaaggttgatgaagaaaacagctctgaggattctcaaaaatttttgaagccatttatttcttctgaccaataccctgacttgcaaatcgcttctgaattacaaactccaaatggcgaattcataagaaaccccaatacaaatatcccgcttttgattaatcagccgttattggtcattccaatacctaacttgataggttttactaccattccaaggagaatacatcgtttttaccagaagcgtttctacgtagaggacgtgtgtagtagtgtagttaactgtgttcgtcaaacccgtataagaccgtttgatattgcaaaggatattgatttggcgaaggacgaagaaaaagattggccacagaactgggtcaaacagggtaaagaaaagaacagcgaatggacccaagaattagtatgtgatcctagaatcacgaagcatatgtttgtttacgaaaaaccacccaaggaagagccagaaagtgatatttga

SEQ ID NO: 6031 - DNA, 1140 bp, Saccharomyces cerevisiae
atgagtatttttttcaagccgccgattgatattgagatccttttcgataatgaggaatctcgcaaacacgtagacattgcaacaagatcaagtaattccagttacaaatcaatgaaggaaagcttgcccgtctatgaagatggcgaatcccttggtggaattgttactttgagagttcgggatagtaaaaaggtagaccacttgggcataaaagtgtccgttattggatccattgatatgttaaaatctcatgggagcggtaattcatcttctaaaaaagttacctctagcacatcatcttcctcttctaatggttcagtagatgtgcggaagaattcagttgatcaatttttatgccaaagctatgacctctgtcctgctggtgaattacaacattctcaaagtttcccattcctattcagagatttgagtaaaagatacgaatcttataaaggcaaaaatgtggatgtagcttactatgttaaggtaacagttatgaggaagtccacagacatctcgaaaataaaaagattttgggtctatctttataatagtgtaactactgcgccaaataccctttccgcaaatgagacaaaggcaaccactaatgacatcgctggtggtaactatgctgcagataatgcgagtgacaacacgcaaacaaagagcacccagggtgaggcggcagacgttaatcaagttttgccgatatcacattcaaataatgagcccaagcctgttagattggatataggtatagaaaattgccttcacattgagtttgaatatgccaaatcccagtacagcttaaaagaagtcattgtggggcgtatatatttccttttaacgagactaaggataaaacatatggaattaagcttgatcacaagagaatcttccggcctacaaacttctaatgtaatgacagattccactgctatccgatacgaaataatggatgggtcttcagtgaaaggtgaaaccatacccataagattattcttgagcggctatgacctgacgcccaatatgagctgcaactactttaacgtcaagaattatttgagcttggttattatcgatgaagatggcagaagatattttaaacaatcagaaataacattgtacaggacccggtag

SEQ ID NO: 6032 - DNA, 1140 bp, Artificial Sequence
  Description of Artificial Sequence: Synthetic polynucleotide
atgagtatttttttcaagccgccgattgatattgagatccttttcgataatgaggaatctcgcaaacacgtagacattgcaacaagaagtagtaattccagttacaaatctatgaaggaaagcttgcccgtctatgaagatggcgaatcccttggtggaattgttactttgagagttagagatagtaaaaaggtagaccacttgggcataaaagtgtccgttattggatccattgatatgttaaaatctcatgggagcggtaattcttcttctaaaaaagttacctctagcacatcttcttcctcttctaatggttctgtagatgtgagaaagaattctgttgatcaatttttatgccaaagctatgacctctgtcctgctggtgaattacaacattctcaaagtttcccattccttttcagagatttgagtaaaagatacgaatcttataaaggcaaaaatgtggatgtagcttactatgttaaggtaacagttatgaggaagtccacagacatctccaaaataaaaagattttgggtctatctttataatagtgtaactactgcgccaaataccctttccgcaaatgagacaaaggcaaccactaatgacatcgctggtggtaactatgctgcagataatgcgagtgacaacacgcaaacaaagagcacccagggtgaggcggcagacgttaatcaagttttgccgatatctcattctaataatgagcccaagcctgttagattggatataggtatagaaaattgccttcacattgagtttgaatatgccaaatcccagtacagcttaaaagaagtcattgtggggcgtatatatttccttttaacgagattaaggataaaacatatggaattaagcttgatcacaagagaatcttccggcttacaaacttctaatgtaatgacagattccactgctatcagatacgaaataatggatgggtcttctgtgaaaggtgaaaccatacccataagattattcttgagcggctatgacttaacgcccaatatgagctgcaactactttaacgtcaagaattatttgagcttggttattatcgatgaagatggcagaagatattttaaacaaagtgaaataacattgtacaggacccgttga

SEQ ID NO: 6033 - DNA, 120 bp, Saccharomyces cerevisiae
atgcacctaagaagcagatggtggcttgccttactgtattgtaaagatccagtctccagatctgcgaccactccgaaggttgaaacccgagcttcctgtttgctgtctcgcgccttttaa

SEQ ID NO: 6034 - DNA, 120 bp, Artificial Sequence
  Description of Artificial Sequence: Synthetic polynucleotide
atgcacttgagaagcagatggtggcttgccttattatattgtaaagatccagtctccagatctgcgaccactccgaaggttgaaaccagagcttcctgtttgttatctcgcgccttttga

SEQ ID NO: 6035 - DNA, 999 bp, Saccharomyces cerevisiae
atgatcagaattgctattaacggtttcggtagaatcggtagattggtcttgagattggctttgcaaagaaaagacattgaggttgttgctgtcaacgatccatttatctctaacgattatgctgcttacatggtcaagtacgattctactcatggtagatacaagggtactgtttcccatgacgacaagcacatcatcattgatggtgtcaagatcgctacctaccaagaaagagacccagctaacttgccatggggttctctaaagatcgatgtcgctgttgactccactggtgttttcaaggaattggacaccgctcaaaagcacattgacgctggtgccaagaaggttgtcatcactgctccatcttcttctgctccaatgtttgttgttggtgttaaccacactaaatacactccagacaagaagattgtctccaacgcttcttgtaccaccaactgtttggctccattggccaaggttatcaacgatgctttcggtattgaagaaggtttgatgaccactgttcactccatgaccgccactcaaaagactgttgatggtccatcccacaaggactggagaggtggtagaaccgcttccggtaacattatcccatcctctaccggtgctgctaaggctgtcggtaaggtcttgccagaattgcaaggtaagttgaccggtatggctttcagagtcccaaccgtcgatgtttccgttgttgacttgactgtcaagttggaaaaggaagctacttacgaccaaatcaagaaggctgttaaggctgccgctgaaggtccaatgaagggtgttttgggttacaccgaagatgccgttgtctcctctgatttcttgggtgacactcacgcttccatcttcgatgcctccgctggtatccaattgtctccaaagttcgtcaagttgatttcctggtacgataacgaatacggttactccgccagagttgttgacttgatcgaatatgttgccaaggcttaa

SEQ ID NO: 6036 - DNA, 999 bp, Artificial Sequence
  Description of Artificial Sequence: Synthetic polynucleotide
atgatcagaattgctattaacggtttcggtagaatcggtagattggtcttgagattggctttgcaaagaaaagacattgaggttgttgctgtcaacgatccatttatctctaacgattatgctgcttacatggtcaagtacgattctactcatggtagatacaagggtactgtttcccatgacgacaagcacatcatcattgatggtgtcaagatcgctacctaccaagaaagagacccagctaacttgccatggggttctttgaagatcgatgtcgctgttgactccactggtgttttcaaggaattggacaccgctcaaaagcacattgacgctggtgccaagaaggttgtcatcactgctccatcttcttctgctccaatgtttgttgttggtgttaaccacactaaatacactccagacaagaagattgtctccaacgcttcttgtaccaccaactgtttggctccattggccaaggttatcaacgatgctttcggtattgaagaaggtttgatgaccactgttcactccatgaccgccactcaaaagactgttgatggtccatcccacaaggactggagaggtggtagaaccgcttccggtaacattatcccatcctctaccggtgctgctaaggctgtcggtaaggtcttgccagaattgcaaggtaagttgaccggtatggctttcagagtcccaaccgtcgatgtttccgttgttgacttgactgtcaagttggaaaaggaagctacttacgaccaaatcaagaaggctgttaaggctgccgctgaaggtccaatgaagggtgttttgggttacaccgaagatgccgttgtctcctctgatttcttgggtgacactcacgcttccatcttcgatgcctccgctggtatccaattgtctccaaagttcgtcaagttgatttcctggtacgataacgaatacggttactccgccagagttgttgacttgatcgaatatgttgccaaggcttga

SEQ ID NO: 6037 - DNA, 2469 bp, Saccharomyces cerevisiae
atgtgccataattctgttaggagcggaaataaggctggttttttggggatcaagttcggaagtgctcttctctcaattgccacaggtgccattgctatcgcattgctatgcaagttccacgaccacgaagcggtactgatagttattgtatgctcgacattgttatatggaataccgtcactgatatcgtttatcacagagactgtttttgcgcctagcaagtttcatattggatacttttacaacgttcttaattttgcattgccactgatcaccatgggctgcacagtggactattttcataataccttgaggagcccaatatcggtacaaagcgagtctcacagagtctatataacaactctggattctttgttaattttcacacttttcattaatggcatacaattaggattcttcctgaaggatggcaatgcgaacaatttcggcagctcatctaacaatattagtacggatcaatatgacaaagaagcaaatgcggtggaaaatggtagatttgtaccccttaagaactcttcacagaccttaacaccagatttggaattattacacggtagtcccaagagtatgaatggggtagcgtggctgattaatgaactctccacaaattcaaacacaaacgcaaacaaaaccatatcatccgatgaaaattcaaactcttcagttattcgacacaaattaggaccgattagcaccagcaagtgtcctaaaaagccatctcattcgcatttttctaaattgaaaaaatataacagtttctttttgggtcctaaagaaaatcgatacaaaagaaatacacaacaagctactaaggttccgacagaaaagaaaagcaaccaccgaagtagccagtatgtatccagactatcaaccatatctgacatctcgaaaagtttcctgaatttcttagcattaaacgaaaaaaacgggaattcgacttccactgcgagaacaccaagtgaaggaagagtttcaataataattaacgaaggaaataatactttgaaatacaaaactccccatgattcgcatactattgattctccaaacttggagttagaaagagaagctattgggagaattaatagtgccttacttcctgcatgtttgagagtaacagataaaatgatatccccacagcaaagcactcaaaatgaggactcataccaagcaacaccattgataccccaggtggaagttgacgatgatttctatgtaggtgatatcttaatgactaatgaactacaagacattccacaagtcccaaggatatcatctgatatagaagacgatttcgaacaacaatataccaaacacgtggatttgccagcccgtgtcactttagagatgtgggaaaaggatcaggagaaaatacttcaaaaagtaaccacaaaccgggataaaagcaaattactaccccctttcagattcacctctgaaagtgatatggatccaagtacatccaccgaattggaagttgaactgcatgcccaaaacaacttcagctttccctttaaaagtgcaggattacaaattgctacatcagaccaatttaaccaacaggagtttaaaacttcagatactattagcgaactagatgagtatttacatgatcccagcattcaagaagaggatgcaagtcagctgattgaaagcagtttgaaccaaaacaacctatcctcaactactattgacaatggcccaaaggatatgagtagatttagtacaaggcattcaccaaccaaatcgataatttccatgatcagtggatcaggaagtgtcaagcaccaacattcacacagcaccctaagcaacttttttacgggtcattcaagaaacaattctcaaataaatcagctattacagggttcttcttctaatatgatgtccaacacctcaccgcattcatctccaaccaagtcgttgagaatgagatttggaaagaaattgtcattatcaaatatctctgatacaatgtcgccatatgagggtagtacaacagatccgataaactactcgtttggccatggtcacaataaaaaccagagtattgattttagctacgtacgtactttgcaaagcagtcattcacctacaaaatcaacctcgggaaattctcgtcgggattctttaaacaatgatagaacccagagtactgttaatgaaagagcgcttagaactgcaagtacattattctatctccagcacaataacgccacatgtacattgaacggagaggagccagttctggacacaccacaatctatacagtcatcatcaagcggttctgagcaagaatcggcgggatctggttctggctatccagaagtagtgttcagcgagtatgatagagaaaaatggaatgttttgaggaatctaaaagagatagcgcccgaaaaaactatagagagcggacctgttgaagaactagtctctcccagtaaataa

SEQ ID NO: 6038 - DNA, 2469 bp, Artificial Sequence
  Description of Artificial Sequence: Synthetic polynucleotide
atgtgccataattctgttaggagcggaaataaggctggttttttggggatcaagttcggaagtgctcttctctccattgccacaggtgccattgctatcgcattgctttgcaagttccacgaccacgaagcggtattaatagttattgtatgctccacattgttatatggaataccgtccttgatatcctttatcacagagactgtttttgcgcctagcaagtttcatattggatacttttacaacgttcttaattttgcattgccattgatcaccatgggctgcacagtggactattttcataataccttgaggagcccaatatctgtacaaagcgagtctcacagagtctatataacaactttagattctttgttaattttcacacttttcattaatggcatacaattaggattcttcttgaaggatggcaatgcgaacaatttcggcagctcttctaacaatattagtacggatcaatatgacaaagaagcaaatgcggtggaaaatggtagatttgtaccccttaagaactcttctcagaccttaacaccagatttggaattattacacggtagtcccaagagtatgaatggggtagcgtggttgattaatgaactctccacaaatagcaacacaaacgcaaacaaaaccatatcttccgatgaaaatagcaactcttctgttattagacacaaattaggaccgattagcaccagcaagtgtcctaaaaagccatctcattctcatttttctaaattgaaaaaatataacagtttctttttgggtcctaaagaaaatagatacaaaagaaatacacaacaagctactaaggttccgacagaaaagaaaagcaaccacagaagtagccagtatgtatccagattatctaccatatctgacatctccaaaagtttcttgaatttcttagcattaaacgaaaaaaacgggaattctacttccactgcgagaacaccaagtgaaggaagagtttctataataattaacgaaggaaataatactttgaaatacaaaactccccatgattctcatactattgattctccaaacttggagttagaaagagaagctattgggagaattaatagtgccttacttcctgcatgtttgagagtaacagataaaatgatatccccacagcaaagcactcaaaatgaggactcttaccaagcaacaccattgataccccaggtggaagttgacgatgatttctatgtaggtgatatcttaatgactaatgaattacaagacattccacaagtcccaaggatatcttctgatatagaagacgatttcgaacaacaatataccaaacacgtggatttgccagcccgtgtcactttagagatgtgggaaaaggatcaggagaaaatacttcaaaaagtaaccacaaacagagataaaagcaaattattgccccctttcagattcacctctgaaagtgatatggatccaagtacatccaccgaattggaagttgaattacatgcccaaaacaacttcagctttccctttaaaagtgcaggattacaaattgctacaagtgaccaatttaaccaacaggagtttaaaacttctgatactattagcgaattagatgagtatttacatgatcccagcattcaagaagaggatgcaagtcagttgattgaaagcagtttgaaccaaaacaacctttccagcactactattgacaatggcccaaaggatatgagtagatttagtacaaggcattctccaaccaaatctataatttccatgatcagtggatctggaagtgtcaagcaccaacattctcacagcaccttgagcaacttttttacgggtcattccagaaacaattctcaaataaatcagcttttacagggttcttcttctaatatgatgtccaacacctctccgcattcttctccaaccaagtctttgagaatgagatttggaaagaaattgtctttatccaatatctctgatacaatgtctccatatgagggtagtacaacagatccgataaactactcttttggccatggtcacaataaaaaccagagtattgattttagctacgtacgtactttgcaaagcagtcattctcctacaaaatctacctctggaaattctcgtcgtgattctttaaacaatgatagaacccagagtactgttaatgaaagagcgcttagaactgcaagtacattattctatctccagcacaataacgccacatgtacattgaacggagaggagccagttttggacacaccacaatctatacagtcttcttctagcggttctgagcaagaaagtgcgggatctggttctggctatccagaagtagtgttcagcgagtatgatagagaaaaatggaatgttttgaggaatttgaaagagatagcgcccgaaaaaactatagagagcggacctgttgaagaattggtctctcccagtaaatga

SEQ ID NO: 6039 - DNA, 3222 bp, Saccharomyces cerevisiae
atggattctactgatctgttcgatgttttcgaggaaacacctgttgagcttcctacagatagtaatggagaaaaaaatgctgatacaaacgtaggagatactccagatcatacccaggataagaagcatggccttgaagaagaaaaagaagagcatgaggaaaacaacagtgaaaataaaaaaatcaaatccaataagagcaaaacggaagataaaaacaaaaaagttgtagtaccagtgttggcagattcgttcgaacaagaagcctctagagaagtggatgcatcgaaaggactgacaaattcagaaaccttacaagttgagcaagacggtaaagtcagattatcgcatcaggtccgccaccaggttgcactaccaccgaactatgattatacgcctatcgctgagcataagagggtaaatgaggctcgtacatatccattcacattagaccctttccaggacactgcaatctcatgtatagatagaggcgaatctgtgttggtttctgcgcacacatcggctggtaaaacagttgtggctgaatatgccatcgcacaatctttaaaaaataagcaaagagtcatttatacctctccaattaaggctctatcaaaccaaaaatacagagaacttttagcagaatttggagatgtcggtttgatgactggtgatatcacgatcaatccggatgcaggctgtttggtcatgaccactgagattttgagaagtatgttatatagaggcagtgaagttatgagagaagttgcctgggtcatctttgatgaagtgcattacatgagggataaagaaagaggtgttgtgtgggaagaaacgattattttactgccagataaggtccgttacgtgtttttatcggccaccattccaaatgcaatggagtttgctgaatggatatgcaaaattcattctcagccatgtcatattgtctacacaaatttccgtccaactcctttacaacattacctgtttccagcccatggagatggtatttatctggtggttgacgaaaaaagtaccttcagagaggaaaatttccaaaaagcaatggcgtccataagtaaccagataggtgatgatccaaattccactgattcaagaggtaaaaagggtcaaacctataaaggtggctccgctaagggtgacgcaaaaggtgacatttataagatagtgaaaatgatttggaagaaaaagtacaatccagtgattgtattttcgttcagtaaacgtgattgtgaagaattagcattgaagatgtctaaattagattttaattctgatgatgaaaaggaggctttgacgaagatttttaacaatgccattgcactattaccagagacagacagagagctaccccaaattaaacacattttaccattattaagaagaggtatcggtattcatcattccggtttactgcccattttgaaggaagtcattgaaattctgtttcaagagggatttttgaaggtgttgtttgcaacagaaacattttcgattggattaaacatgcctgctaaaactgttgtctttacatcggtcagaaagtgggatggtcaacaattccgctgggtttcaggtggagaatatatacaaatgtctggtcgtgcaggtcgtcgtggtttagatgatcgtggtattgttattatgatgattgatgaaaaaatggaacctcaagttgctaaaggaatggttaagggccaagcagataggctagactcggcttttcacttaggatataatatgattttgaacttaatgagagttgaaggtatctctccggagtttatgttggagcattctttcttccaatttcaaaacgttatttcagtaccagttatggaaaagaaacttgctgaactgaaaaaagactttgatggcatcgaagtcgaagatgaagaaaatgttaaagaataccatgagattgagcaggctatcaaaggttaccgtgaagatgttcgtcaagttgtcacccatccggcaaacgccttaagtttcctacaaccaggcagattagttgaaatctctgtcaatggtaaggataactatggctggggtgctgttgtcgattttgctaaaagaattaacaaacgcaacccaagtgctgtctatacagaccatgaatcctatattgtcaatgtggtcgtcaataccatgtatatagactctccagtcaacttgttgaaacctttcaaccctaccttaccagaagggattcgcccagcggaagaaggtgaaaaaagcatatgtgctgttattcccataactttggattcaatcaagtcgattggtaatttgagactatatatgcccaaagatattagagccagcggtcaaaaagaaactgttgggaagtctttaagggaggttaatcggaggttcccggatggtattcccgtgctggatcctgttaaaaacatgaagatcgaagatgaggactttttaaagctaatgaagaagattgacgttttaaacacaaagttatcctccaatcccttaaccaattccatgagactagaagaactatatggtaaatatagtagaaaacacgatttacatgaagatatgaaacaattgaaacgcaaaatttcagaatcacaagccgtaatccaactggacgatcttcgtcgccgtaaaagagttttgcgccgtttaggattttgtactcctaatgacattattgaactgaaaggtagagttgcatgtgaaatatctagtggtgatgaactgttactaacagaattgatcttcaatggtaatttcaatgagttgaaaccggaacaagcagcagcattattatcatgctttgcattccaagaacgctgtaaagaagcgcctagattgaaaccagagcttgccgaacctttgaaggctatgagagaaattgcagcaaagatcgctaagataatgaaggattctaaaattgaagttgtagaaaaggactacgttgaaagcttcagacatgaactaatggaagttgtttacgaatggtgtagaggagctacttttacgcaaatctgtaaaatgaccgacgtttacgaaggttcgttgatcagaatgttcaagagattagaggaattggtgaaggagctggtagacgtcgccaataccattggtaactcttcacttaaggagaagatggaagctgtcttgaaattaattcatagagatatcgtatctgctggttctttgtatttatag

SEQ ID NO: 6040 - DNA, 3222 bp, Artificial Sequence
  Description of Artificial Sequence: Synthetic polynucleotide
atggattctactgatcttttcgatgttttcgaggaaacacctgttgagcttcctacagatagtaatggagaaaaaaatgctgatacaaacgtaggagatactccagatcatacccaggataagaagcatggccttgaagaagaaaaagaagagcatgaggaaaacaacagtgaaaataaaaaaatcaaatccaataagagcaaaacggaagataaaaacaaaaaagttgtagtaccagtgttggcagattctttcgaacaagaagcctctagagaagtggatgcatccaaaggattaacaaattctgaaaccttacaagttgagcaagacggtaaagtcagattatctcatcaggtccgccaccaggttgcattgccaccgaactatgattatacgcctatcgctgagcataagagggtaaatgaggctcgtacatatccattcacattagaccctttccaggacactgcaatcagttgtatagatagaggcgaatctgtgttggtttctgcgcacacatctgctggtaaaacagttgtggctgaatatgccatcgcacaatctttaaaaaataagcaaagagtcatttatacctctccaattaaggctttatctaaccaaaaatacagagaacttttagcagaatttggagatgtcggtttgatgactggtgatatcacgatcaatccggatgcaggctgtttggtcatgaccactgagattttgagaagtatgttatatagaggcagtgaagttatgagagaagttgcctgggtcatctttgatgaagtgcattacatgagggataaagaaagaggtgttgtgtgggaagaaacgattattttattaccagataaggtccgttacgtgtttttatctgccaccattccaaatgcaatggagtttgctgaatggatatgcaaaattcattctcagccatgtcatattgtctacacaaatttccgtccaactcctttacaacattacttgtttccagcccatggagatggtatttatttggtggttgacgaaaaaagtaccttcagagaggaaaatttccaaaaagcaatggcgtccataagtaaccagataggtgatgatccaaattccactgattccagaggtaaaaagggtcaaacctataaaggtggctccgctaagggtgacgcaaaaggtgacatttataagatagtgaaaatgatttggaagaaaaagtacaatccagtgattgtattttctttcagtaaacgtgattgtgaagaattagcattgaagatgtctaaattagattttaattctgatgatgaaaaggaggctttgacgaagatttttaacaatgccattgcattattaccagagacagacagagagttgccccaaattaaacacattttaccattattaagaagaggtatcggtattcatcattccggtttattgcccattttgaaggaagtcattgaaattttatttcaagagggatttttgaaggtgttgtttgcaacagaaacattttctattggattaaacatgcctgctaaaactgttgtctttacatctgtcagaaagtgggatggtcaacaattccgctgggtttctggtggagaatatatacaaatgtctggtcgtgcaggtcgtcgtggtttagatgatcgtggtattgttattatgatgattgatgaaaaaatggaacctcaagttgctaaaggaatggttaagggccaagcagataggttggactctgcttttcacttaggatataatatgattttgaacttaatgagagttgaaggtatctctccggagtttatgttggagcattctttcttccaatttcaaaacgttattagtgtaccagttatggaaaagaaacttgctgaattgaaaaaagactttgatggcatcgaagtcgaagatgaagaaaatgttaaagaataccatgagattgagcaggctatcaaaggttaccgtgaagatgttcgtcaagttgtcacccatccggcaaacgccttaagtttcttacaaccaggcagattagttgaaatctctgtcaatggtaaggataactatggctggggtgctgttgtcgattttgctaaaagaattaacaaacgcaacccaagtgctgtctatacagaccatgaatcctatattgtcaatgtggtcgtcaataccatgtatatagactctccagtcaacttgttgaaacctttcaaccctaccttaccagaagggattcgcccagcggaagaaggtgaaaaaagcatatgtgctgttattcccataactttggattctatcaagtctattggtaatttgagattatatatgcccaaagatattagagccagcggtcaaaaagaaactgttgggaagtctttaagggaggttaatagaaggttcccggatggtattcccgtgttggatcctgttaaaaacatgaagatcgaagatgaggactttttaaagttgatgaagaagattgacgttttaaacacaaagttatcctccaatcccttaaccaattccatgagattagaagaattgtatggtaaatatagtagaaaacacgatttacatgaagatatgaaacaattgaaacgcaaaatttctgaatctcaagccgtaatccaattggacgatcttcgtcgccgtaaaagagttttgcgccgtttaggattttgtactcctaatgacattattgaattgaaaggtagagttgcatgtgaaatatctagtggtgatgaattattattaacagaattgatcttcaatggtaatttcaatgagttgaaaccggaacaagcagcagcattattaagttgctttgcattccaagaacgctgtaaagaagcgcctagattgaaaccagagcttgccgaacctttgaaggctatgagagaaattgcagcaaagatcgctaagataatgaaggattctaaaattgaagttgtagaaaaggactacgttgaaagcttcagacatgaattgatggaagttgtttacgaatggtgtagaggagctacttttacgcaaatctgtaaaatgaccgacgtttacgaaggttctttgatcagaatgttcaagagattagaggaattggtgaaggagttggtagacgtcgccaataccattggtaactcttctcttaaggagaagatggaagctgtcttgaaattaattcatagagatatcgtatctgctggttctttgtatttatga

SEQ ID NO: 6041 - DNA, 1353 bp, Saccharomyces cerevisiae
atgaaagtagatttaccagaatccagactaccatctttatatagagattttaggccattgaaagatttaaatcccgatgggtacgaagcaaacatcagtacatggagggatttcttcttgcaacaatacatcagcaactccaacagaatcatatttactatagggacaaggactttgcaagaattaactcatgaagtttatggcgtaccgaaaagcattgatatagcaattgacgttcttgttaatgaaggaaatttgatacctatggaattattcaatcttggtggaatgtacactgacaacagtagaaaaggattttggaagtgggttagaagttggaaggagtctacaaacatgtataaaagccggaaggatgaaacaaatttctacttgagagaagacaaatttattatcaaagcaaatttggaaaaagagtatcaaaggtttcatgaattactcaaaagaagtgtttttatggaggcttcatctattacagatttagtattcacaaggaatgaatttgtgaccacagaaagtttgcagtcgttcttttcaacctatgatgaagaaacgaaaaacgtgttcctgcactttatagagaattataagcacataatagtttcaaaagacaatgttatcaaagtcattgccgctgaagtagaagacattactagcaggttctccaaaggcatcacagaaaatgaccttcgaattgctagtgttaaagtgggtattataaacatcaacaaacaaattacaaggctaagaaaagaaattaatgaatctaacattaaactgagaggaccagagtttaatgagctgccgaagagaataaggattgaatataaacaggcgagattactatctgaaaaacatctttctaggttactaaagtttcaaaataacctcgctcaagtaagaactcaaatagacaccagtgctactaatgcggttttaattcaaactttaagtgaatccaacgaagtaattaagtcaattaatggatatattggttctaccgaaaaagtagaagacttactagatgagattaaagagggtcatgaccgtaccgaagaggtcaatgatttattagctcattataataaaggtcaagacgaagaagcagaagaagaaattgaaagagaattagaacaattagaacttgatgaaaagaataataataaggaagaaaataagaaccaggatttgcacgagccaaaagaaagcagtagcgaggatctattaaagagattgaataatctgaagataaatacaaatgaaggacctgtgcaagataatgaaaaccacgataatgagataagaaaaatcatgatggaagaacaaccacgttga

SEQ ID NO: 6042 - DNA, 1353 bp, Artificial Sequence
  Description of Artificial Sequence: Synthetic polynucleotide
atgaaagtagatttaccagaatccagattaccatctttatatagagattttaggccattgaaagatttaaatcccgatgggtacgaagcaaacatcagtacatggagggatttcttcttgcaacaatacatcagcaactccaacagaatcatatttactatagggacaaggactttgcaagaattaactcatgaagtttatggcgtaccgaaaagcattgatatagcaattgacgttcttgttaatgaaggaaatttgatacctatggaattattcaatcttggtggaatgtacactgacaacagtagaaaaggattttggaagtgggttagaagttggaaggagtctacaaacatgtataaaagcagaaaggatgaaacaaatttctacttgagagaagacaaatttattatcaaagcaaatttggaaaaagagtatcaaaggtttcatgaattactcaaaagaagtgtttttatggaggcttcttctattacagatttagtattcacaaggaatgaatttgtgaccacagaaagtttgcagtctttcttttccacctatgatgaagaaacgaaaaacgtgttcttgcactttatagagaattataagcacataatagtttccaaagacaatgttatcaaagtcattgccgctgaagtagaagacattactagcaggttctccaaaggcatcacagaaaatgaccttagaattgctagtgttaaagtgggtattataaacatcaacaaacaaattacaaggttaagaaaagaaattaatgaatctaacattaaattgagaggaccagagtttaatgagttaccgaagagaataaggattgaatataaacaggcgagattattatctgaaaaacatctttctaggttattgaagtttcaaaataacctcgctcaagtaagaactcaaatagacaccagtgctactaatgcggttttaattcaaactttaagtgaatccaacgaagtaattaagtctattaatggatatattggttctaccgaaaaagtagaagacttattagatgagattaaagagggtcatgaccgtaccgaagaggtcaatgatttattagctcattataataaaggtcaagacgaagaagcagaagaagaaattgaaagagaattagaacaattagaacttgatgaaaagaataataataaggaagaaaataagaaccaggatttgcacgagccaaaagaaagcagtagcgaggatttattaaagagattgaataatttgaagataaatacaaatgaaggacctgtgcaagataatgaaaaccacgataatgagataagaaaaatcatgatggaagaacaaccacgttga

SEQ ID NO: 6043 - DNA, 1191 bp, Saccharomyces cerevisiae
atgtacgagatgtcaggtatagacagcctctttcatgatcgagttgttcatgattactctcatactagtgagcaggttatcgtcgtttacattagttcagcagccggggacaattcttggcttcatcagtggttcaaaccaggaaatcttagtgacgaggagcgcgaaaacatactgtgggtaaggttagtaaatggtactaaagagtgcttgcttttcaagagcattttcccctcctcatcggcgccaagcattaacatattacagaacggtctactcgaatgttctatccaaggtaatagcctttctcgtgagcaggatccttgggaaacctttatcaatgggttacaatcagtctttaagggtcaagtaacaaagaggaagttattttccaagagcaatgaagaatatcaaagagtcaaaagaatgattcagaacgacaagttggagaggaagtatgtttttcaaaatactaatgacccgcaaagaaagccacagaagtggaagcagttgacagttactgataatgttagttacaagagtcaaaaggggtttctcgcccagaactactgtactctacaattgaaactgcccaatggttacacaatctctaatactttccctcctcaaacaaaattacacaaagtaaggatgtggttagactataattgctacgatgatggaacaccttaccttttccacagaaatataccaagagtgactcttacgcgaaatgacgaactcaaaagtttgcaagagttggatctgttgcccagatcgactctcatcttagaaccgctggaagccaataacaaaacattcgactacatggaacaatcttctcttctacacaaggtttactcaggtttgacatctttttgggcgaaagaaccggaagtagatgcttcctcctcccgtcttggttaccagaggttgggcacaaatgtgtcaaacagcgccaactactctttacaaaaattatctagcttagacatggtgtcggacgggggaggaggaggtggtggtgattcaatgactccttcagcatatactaccccaaggatgtatccttctaatggtacttctcaattgcgacaaaacgtgtctgaactaaacttgtcttccaataattctgcatctaataccaaagttcgtacattaggttactctaataataacggcaacaattaa

SEQ ID NO: 6044 - DNA, 1191 bp, Artificial Sequence
  Description of Artificial Sequence: Synthetic polynucleotide
atgtacgagatgagtggtatagacagcctctttcatgatagagttgttcatgattactctcatactagtgagcaggttatcgtcgtttacattagttctgcagccggggacaattcttggcttcatcagtggttcaaaccaggaaatcttagtgacgaggagcgcgaaaacatattatgggtaaggttagtaaatggtactaaagagtgcttgcttttcaagagcattttcccctcctcttctgcgccaagcattaacatattacagaacggtttactcgaatgttctatccaaggtaatagcctttctcgtgagcaggatccttgggaaacctttatcaatgggttacaatctgtctttaagggtcaagtaacaaagaggaagttattttccaagagcaatgaagaatatcaaagagtcaaaagaatgattcagaacgacaagttggagaggaagtatgtttttcaaaatactaatgacccgcaaagaaagccacagaagtggaagcagttgacagttactgataatgttagttacaagagtcaaaaggggtttctcgcccagaactactgtactttacaattgaaattgcccaatggttacacaatctctaatactttccctcctcaaacaaaattacacaaagtaaggatgtggttagactataattgctacgatgatggaacaccttaccttttccacagaaatataccaagagtgactcttacgagaaatgacgaactcaaaagtttgcaagagttggatttattgcccagatctactctcatcttagaaccgttggaagccaataacaaaacattcgactacatggaacaatcttctcttttacacaaggtttactctggtttgacatctttttgggcgaaagaaccggaagtagatgcttcctcctcccgtcttggttaccagaggttgggcacaaatgtgtctaacagcgccaactactctttacaaaaattatctagcttagacatggtgagcgacgggggaggaggaggtggtggtgattctatgactccttctgcatatactaccccaaggatgtatccttctaatggtacttctcaattgagacaaaacgtgtctgaattgaacttgtcttccaataattctgcatctaataccaaagttcgtacattaggttactctaataataacggcaacaattga

SEQ ID NO: 6045 - DNA, 135 bp, Saccharomyces cerevisiae
atgaagataaaaatttccatcgaaattagtctttcgctcctatctgaacattacaaaagaaacgaaaactgtattagtaatatgcttgtaattggagaagggccgaggggcgagaccattgtggagcgattttaa

SEQ ID NO: 6046 - DNA, 135 bp, Artificial Sequence
  Description of Artificial Sequence: Synthetic polynucleotide
atgaagataaaaatttccatcgaaattagtctttctctcttatctgaacattacaaaagaaacgaaaactgtattagtaatatgcttgtaattggagaagggccgaggggcgagaccattgtggagagattttga

SEQ ID NO: 6047 - DNA, 2529 bp, Saccharomyces cerevisiae
atgataaatgagagcgtttccaagagagaaggattccacgagtctataagcagagagacgagtgcaagcaacgctttaggactatacaataaatttaacgatgagcgaaatcccaggtatcgaacgatgattgctgagctgcacgagttttttcaccttactttagctgaaactataactgaaactgacgtgaaagaattggagtgtaataaagaaaaggccgctaaatttagaaagctaatgcctaagatgttgaacaattgccgtgaattaacgcaaaggaaatcatacattccttacaactcagaatttaatgggaatgacgaaaagcaaaagaagtttcagctgctacatcaacaccaaattgtgctgagttttcaagaattttgtgatgaattggcaaagttaataattgacgcgcacgtccttagctttttgaccagatgcgactattcttatgaaattatacccaaaaattggacctctttttacaagctatttcagtacgtaatgggtgccgttggtcctattatatcgtatgtgccggtaaattatcccatgataagaaaagaactaggatttgagaccttaacgatatttcagtattatgattccaaacttttcgaatgtatgaagtcacattttggaagggaattttccacccttgtaagcgctactattcatcactatattcatatgtttccaataacgaatacaatgttagagaaggaagttcctatgctccgtataatgtctaactgcaattttagtatagagggcttgagccccaaagatttttatatgaaaactctcagacaatattactgtgaggaatcaaatttaaggccgaggctggaaactttcaagaattttaaggtactattgacgaggaatgcattattagcatctttattttcccctgaatgggtcagcgatgcaaatgacctatttataagccatctactgttgaacaagaagtctattagcgaatacatagaaattgggaaggacacttatgatgaagaaaaagagagatatttcaaaactgagacacactttagcttattgatgtttagaaatgcttttgaagcaaaaaatatgctgtcaaaattcaaggaattctgtgatgatgccgtttcagaaaagttaaaggcagcatatggatccaatcatgatactgaaaggctatttgatgaggtagttcagctagctaatgtagatcacctcaaaatatactccgattccatcgagtaccatttatgtaatttacttggaagtaccagcaaagccatagaacagtatgtcaaatattttgagtcacatttattcatcatcgtcagaaagataaaaacaactaaaaaagacctacccagagatatgaaaataaagtatctcaacgaaaatcttcctatattgagactgaagttcgttaaccttcccacatttcctaattttttcgaaagatcaattttcagaaagacgatcttacaaagtgatcaaaattcctcatttattaaggatatattacctgtttacaaagacagcctcatggaacttttcaaacaaagaatcataacaaatgtctcacaagaggatgaaatgcgataccgagatcaatatcaaccctatttatcgcaattctttcagccggtagaggttatggcagatctgagaatcaaatatgcatcgttcttgtcgttttatgagaatatcgaggctgctgtgaagttcgggaagacatacaatgaaaacaacagcaagtcatttttcccacttatctttgatagagaaagaattcccaaagtttttcagcaatccaacgaagtaaagaaaaattttgtcctacctcaagagatggatgatacgtggaaccaatttctccgtaattatcacgagcagaataaagtggaagattcagatgcttccaaaaaagagctatatccgatgtggaacttgcaccactgcgaagtggagtcgccttatatcatacaggatggaactaacctaatatttgaattgacccttttccaaacatgtgtgctgactttattcaacgaaagcgatcatttgaccttgcaagttatatcagagcaaacgaaactggcgtacaaagacttagcgctagtcttaaaatccttctgcaattataaaattctgacaagagatattgacaacacatacagtatcaacgagagcttcaaacctgatatgaaaaaagtgaaaaatgggaaactacgtgtggttctaccgagaaccgcgtctctccaaagtagcaacacaggcggtgaaagaaccagttctgcacaccacgaaggaagtaattcccaatggacccaagaattactaaaggcatgcataactagatccgttaagagcgagaggaatgggctagactacgaccatttatttgaaacggtaaagcagcagataaaaggctttagtgttggtgagttcaaagacgccttggccaagttgttacgagacaaattcataactagggacgaatcaacagcaacttacaagtactaa

SEQ ID NO: 6048 - DNA, 2529 bp, Artificial Sequence
  Description of Artificial Sequence: Synthetic polynucleotide
atgataaatgagagcgtttccaagagagaaggattccacgagtctataagcagagagacgagtgcaagcaacgctttaggattatacaataaatttaacgatgagagaaatcccaggtatagaacgatgattgctgagttgcacgagttttttcaccttactttagctgaaactataactgaaactgacgtgaaagaattggagtgtaataaagaaaaggccgctaaatttagaaagttgatgcctaagatgttgaacaattgccgtgaattaacgcaaaggaaatcttacattccttacaactctgaatttaatgggaatgacgaaaagcaaaagaagtttcagttgttgcatcaacaccaaattgtgttgagttttcaagaattttgtgatgaattggcaaagttaataattgacgcgcacgtccttagctttttgaccagatgcgactattcttatgaaattatacccaaaaattggacctctttttacaagttatttcagtacgtaatgggtgccgttggtcctattatatcttatgtgccggtaaattatcccatgataagaaaagaattaggatttgagaccttaacgatatttcagtattatgattccaaacttttcgaatgtatgaagagtcattttggaagggaattttccacccttgtaagcgctactattcatcactatattcatatgtttccaataacgaatacaatgttagagaaggaagttcctatgctccgtataatgtctaactgcaattttagtatagagggcttgagccccaaagatttttatatgaaaactctcagacaatattactgtgaggaaagtaatttaaggccgaggttagaaactttcaagaattttaaggtacttttgacgaggaatgcattattagcatctttattttcccctgaatgggtcagcgatgcaaatgacttatttataagccatttattattgaacaagaagtctattagcgaatacatagaaattgggaaggacacttatgatgaagaaaaagagagatatttcaaaactgagacacactttagcttattgatgtttagaaatgcttttgaagcaaaaaatatgctttctaaattcaaggaattctgtgatgatgccgtttctgaaaagttaaaggcagcatatggatccaatcatgatactgaaaggttatttgatgaggtagttcagttagctaatgtagatcacctcaaaatatactccgattccatcgagtaccatttatgtaatttacttggaagtaccagcaaagccatagaacagtatgtcaaatattttgagtctcatttattcatcatcgtcagaaagataaaaacaactaaaaaagacttgcccagagatatgaaaataaagtatctcaacgaaaatcttcctatattgagattaaagttcgttaaccttcccacatttcctaattttttcgaaagatctattttcagaaagacgatcttacaaagtgatcaaaattcctcttttattaaggatatattacctgtttacaaagacagcctcatggaacttttcaaacaaagaatcataacaaatgtctctcaagaggatgaaatgagatacagagatcaatatcaaccctatttatctcaattctttcagccggtagaggttatggcagatttgagaatcaaatatgcatctttcttgagtttttatgagaatatcgaggctgctgtgaagttcgggaagacatacaatgaaaacaacagcaagagctttttcccacttatctttgatagagaaagaattcccaaagtttttcagcaatccaacgaagtaaagaaaaattttgtcttacctcaagagatggatgatacgtggaaccaatttctccgtaattatcacgagcagaataaagtggaagattctgatgcttccaaaaaagagttgtatccgatgtggaacttgcaccactgcgaagtggagtctccttatatcatacaggatggaactaacttgatatttgaattgacccttttccaaacatgtgtgttgactttattcaacgaaagcgatcatttgaccttgcaagttatatctgagcaaacgaaattagcgtacaaagacttagcgttggtcttaaaatccttctgcaattataaaattttaacaagagatattgacaacacatacagtatcaacgagagcttcaaacctgatatgaaaaaagtgaaaaatgggaaattacgtgtggttttaccgagaaccgcgtctctccaaagtagcaacacaggcggtgaaagaaccagttctgcacaccacgaaggaagtaattcccaatggacccaagaattattgaaggcatgcataactagatccgttaagagcgagaggaatgggttggactacgaccatttatttgaaacggtaaagcagcagataaaaggctttagtgttggtgagttcaaagacgccttggccaagttgttaagagacaaattcataactagggacgaatctacagcaacttacaagtactga

SEQ ID NO: 6049 - DNA, 1230 bp, Saccharomyces cerevisiae
atgtctatgatgctaagtaattgggcactctcccctcgatatgtgggacagcgaaacctcatacattgcaccactttatttcacacacttacacgatgggcaaaagacgcagacgataaatatcatgatataaactcaatgtatgaaaacatgtttacaccttcaaatgataacgtttcaattttgcaggatgaaggtaaatctgattatgatacgacgaaggccagctctatggaagaagatatcagtgcttttaataaagacttgtacaatttctataatattggatatgccaaacagatcatgtctgcttcacaattggaaaatatagtaaaggcaaagggcagatttgttatacaaagtttatccaccagtccttattataatttggcccttgaaaactatgttttcaagaatacaccaagagccaaaagaggtcccgataattgcagactgttattttacatcaatgataggtgcgccgttataggcaaaaaccaaaatctgtggcaggaagtagatcttgctaagctgaagagtaagaatttcgaactacttagaagattttctggaggtggcactgtactgcatgatttgggcaatgttaattattcatatttaacatcaagggagaaattcgaaacaaagtttttcaacaaaatgataattaagtggttaaattcattgaatcccgaactaagactagatttgaatgagagaggagatattattcaggacgggtttaaaattagtggcagtgcttataaaattgccggtggcaaagcataccatcatgcaacgatgttgcttaatgcggatttagaacagtttagcggcttattagaaccctcactaccgaacaatatggaatgggagtcaagtggagttcatagtgtaaaatcaaaaatcaaaaatgttggtataattactcctaatcagttcattgcagtggtatccgagcgttttcagaaaacattcaaagttgacggcgaaatacctatatattactgtgacgagtttaaatctataaacgatgagattaaagatgctatgaacaccttacagagcgaacaatggaaatatttctcggggcctaaattttcagtgaagattaaagataaaggcttaacaattaaagtcgaaaagggcatgatttatgattgtgatagaaatgatttaatcggcttggaattcaaaggatttttggagaatattgacagttacacataa

SEQ ID NO: 6050 - DNA, 1230 bp, Artificial Sequence
  Description of Artificial Sequence: Synthetic polynucleotide
atgtctatgatgttaagtaattgggcactctcccctagatatgtgggacagagaaacctcatacattgcaccactttatttcacacacttacaagatgggcaaaagacgcagacgataaatatcatgatataaactccatgtatgaaaacatgtttacaccttccaatgataacgtttctattttgcaggatgaaggtaaatctgattatgatacgacgaaggccagctctatggaagaagatatcagtgcttttaataaagacttgtacaatttctataatattggatatgccaaacagatcatgtctgcttctcaattggaaaatatagtaaaggcaaagggcagatttgttatacaaagtttatccaccagtccttattataatttggcccttgaaaactatgttttcaagaatacaccaagagccaaaagaggtcccgataattgcagattattattttacatcaatgataggtgcgccgttataggcaaaaaccaaaatttatggcaggaagtagatcttgctaagttgaagagtaagaatttcgaattgcttagaagattttctggaggtggcactgtattacatgatttgggcaatgttaattattcttatttaacatccagggagaaattcgaaacaaagtttttcaacaaaatgataattaagtggttaaattctttgaatcccgaattgagattagatttgaatgagagaggagatattattcaggacgggtttaaaattagtggcagtgcttataaaattgccggtggcaaagcataccatcatgcaacgatgttgcttaatgcggatttagaacagtttagcggcttattagaaccctctttaccgaacaatatggaatgggagagcagtggagttcatagtgtaaaatctaaaatcaaaaatgttggtataattactcctaatcagttcattgcagtggtatccgagcgttttcagaaaacattcaaagttgacggcgaaatacctatatattactgtgacgagtttaaatctataaacgatgagattaaagatgctatgaacaccttacagagcgaacaatggaaatatttctctgggcctaaattttctgtgaagattaaagataaaggcttaacaattaaagtcgaaaagggcatgatttatgattgtgatagaaatgatttaatcggcttggaattcaaaggatttttggagaatattgacagttacacatga

SEQ ID NO: 6051 - DNA, 1905 bp, Saccharomyces cerevisiae
atgttatctttgaaaaaaggaataacaaaatcatacatcttgcaaagaactttcacttcttcctctgttgttcgtcaaattggggaagtgaaatctgaatcgaaaccgccggccaaatatcatattatcgaccatgaatatgattgtgtggtggtaggcgctggcggtgcaggtttaagagcagctttcggtttggctgaagctggatacaagactgcttgtttatccaagttgtttccaacaaggtcacatactgtggctgctcagggtggaattaatgctgcgctgggaaatatgcatccagatgattggaaatcgcacatgtacgacactgtcaagggttctgactggctcggagaccaagatgcaatccattacatgacaagagaagcacctaagtctgtcattgaactagaacattacggtatgcccttttcgaggactgaagatggaaggatttaccagagagcatttgggggacaatccaaagattttggtaaaggtggacaggcctataggacttgtgcggtggcagatagaacaggtcacgcaatgcttcatacattgtatggacaagcgctgaaaaataatacacacttctttattgaatactttgcaatggatttgttgacccataatggcgaggttgtgggtgtcattgcctataatcaggaggacggtacaattcacagattcagagcacataagaccgtcatcgcgacaggcggatacggtagagcttacttctcttgcacttctgctcacacttgtacaggtgacggtaatgctatggtttctcgcgctggatttccactagaggatttagaatttgttcaatttcatccgtcaggaatttatgggtctggctgcctaatcactgaaggtgcccgtggtgagggtggatttttattgaattctgaaggagaaaggtttatggaacgctatgctcctactgccaaggacttggcaagcagggatgttgtttccagagcaatcaccatggaaatcagggctggcagaggtgtcgggaaaaacaaggatcatatccttttacaattaagccatctaccacctgaggtactaaaggaaaggctaccgggaatatctgaaacagctgctgtctttgcgggtgtcgatgtcacccaggagccaattcctgtcttgccaactgtccattataatatgggaggcattcccacaaaatggactggtgaagcattgaccattgacgaggaaactggagaggataaggtcatcccaggattgatggcgtgtggtgaagctgcttgcgtatcggttcatggagcgaacagattaggcgctaactcactactggatttagtcgttttcggtcgcgccgttgcaaataccattgctgacacattacagcctggcttgcctcataagccattggcttcaaacatcgggcacgagtcaattgctaatttggataaagtaagaaatgctcgcggctcactgaaaacctctcaaatcaggttgaacatgcaaaggacaatgcaaaaagatgtttctgttttcaggacgcaagacactctagatgaaggtgttagaaatattactgaagtggacaagacatttgaggatgtgcacgtttctgataagtcaatgatctggaattctgatctcgtagaaactctggaattgcaaaatttacttacttgtgccacacaaacggctgtttctgcttccaaaagaaaggagtctcgtggtgctcatgcgagagaggactatgcaaaaagagatgatgtgaattggagaaagcacacattatcatggcaaaaggggacatcaacacctgtaaaaatcaagtacaggaatgtaatcgcacatactttagatgagaatgaatgcgccccagtccctccagctgtcagatcctattaa

SEQ ID NO: 6052 - DNA, 1905 bp, Artificial Sequence
  Description of Artificial Sequence: Synthetic polynucleotide
atgttatctttgaaaaaaggaataacaaaatcttacatcttgcaaagaactttcacttcttcctctgttgttcgtcaaattggggaagtgaaatctgaaagtaaaccgccggccaaatatcatattatcgaccatgaatatgattgtgtggtggtaggcgctggcggtgcaggtttaagagcagctttcggtttggctgaagctggatacaagactgcttgtttatccaagttgtttccaacaaggagccatactgtggctgctcagggtggaattaatgctgcgttgggaaatatgcatccagatgattggaaatctcacatgtacgacactgtcaagggttctgactggctcggagaccaagatgcaatccattacatgacaagagaagcacctaagtctgtcattgaattggaacattacggtatgccctttagcaggactgaagatggaaggatttaccagagagcatttgggggacaatccaaagattttggtaaaggtggacaggcctataggacttgtgcggtggcagatagaacaggtcacgcaatgcttcatacattgtatggacaagcgttgaaaaataatacacacttctttattgaatactttgcaatggatttgttgacccataatggcgaggttgtgggtgtcattgcctataatcaggaggacggtacaattcacagattcagagcacataagaccgtcatcgcgacaggcggatacggtagagcttacttctcttgcacttctgctcacacttgtacaggtgacggtaatgctatggtttctcgcgctggatttccattggaggatttagaatttgttcaatttcatccgtctggaatttatgggtctggctgcttgatcactgaaggtgcccgtggtgagggtggatttttattgaattctgaaggagaaaggtttatggaacgctatgctcctactgccaaggacttggcaagcagggatgttgtttccagagcaatcaccatggaaatcagggctggcagaggtgtcgggaaaaacaaggatcatatccttttacaattaagccatttaccacctgaggtattgaaggaaaggttaccgggaatatctgaaacagctgctgtctttgcgggtgtcgatgtcacccaggagccaattcctgtcttgccaactgtccattataatatgggaggcattcccacaaaatggactggtgaagcattgaccattgacgaggaaactggagaggataaggtcatcccaggattgatggcgtgtggtgaagctgcttgcgtatctgttcatggagcgaacagattaggcgctaactctttattagatttagtcgttttcggtcgcgccgttgcaaataccattgctgacacattacagcctggcttgcctcataagccattggcttctaacatcgggcacgagtctattgctaatttggataaagtaagaaatgctcgcggctctttgaaaacctctcaaatcaggttgaacatgcaaaggacaatgcaaaaagatgtttctgttttcaggacgcaagacactttagatgaaggtgttagaaatattactgaagtggacaagacatttgaggatgtgcacgtttctgataagtctatgatctggaattctgatctcgtagaaactttggaattgcaaaatttacttacttgtgccacacaaacggctgtttctgcttccaaaagaaaggagtctcgtggtgctcatgcgagagaggactatgcaaaaagagatgatgtgaattggagaaagcacacattatcttggcaaaaggggacatctacacctgtaaaaatcaagtacaggaatgtaatcgcacatactttagatgagaatgaatgcgccccagtccctccagctgtcagatcctattga

SEQ ID NO: 6053 - DNA, 1377 bp, Saccharomyces cerevisiae
atgaaggatgtcttacaatgggcgattgaccactacgagacaagagaccaactggtgcagaagggaatttggaaaggtgaactctaccatgactctatctttaaagaaaatagtagaggctggctctggaaagctttgcttctgtgtgatgaaaacaacaactgcttgttaactgataactttaaaggtttggaccttaaccagttcggcttggtgccagtgcctatgctggcagatggcgacaactatgacgaaaatcataatgcaaatgtacctaaaagggtcttgcactcgaacgtttcctcctcagtgggaatcaggaggctgactcccgtcgaggctgttgaaaaacatcccttgtctgatgacaatgacaaaactaaaggttctttgtccaagggaagtgatgaaaagccgttgacactgagggaaactctggaaattatagatttggacctctcaaggataatgcttgacgatatatttcaggaacccaaggttcatgctcaaatgagacaacttttgtacaattacctgcttatacatcaaagcgaacacctacagtataaacaagggttccacgaaatattaagcgtcatttatctgcaattatatcacggtacagatctcgataataccgatttgcaaaacgttctgattatctttaacaagctaatgaaccaaatcgaaccgattttttataacgaagaaaatttgattaactgggataagagagtattcacgaaaatctttaggatttgtttgccagacttgttttcaaaggttttttaccaaccaccaaaaacgggcagcgggaagaaaaaaaacgtagaccatctgattcactccaacctaatctggctcatccgatggacaaggttgttatttttaagagaattacccttaaaatatgtgctaatcgtttgggaccacgtcctgacgttcaattatcccttggatattttcattgcatgcactatcatcacccttttgttatccatttacgatgagcttcacgaactagtgagccaaggtgactatgaacatacgaataataacgatgaatttgttgaattgattttgcatttcaagaaaatttttgaaaaggaagatgccagtaaagatgatgaaaagtttttagacctgtgtaaggtcactggaaatttatgtgaattgtggtatggaaaaaattacgacgatatgagattgatttgcgacacttttataaatgcgaagttcggcataaagactagtgatgttttaagtatggaaacagcaaagttgactattgatcctaatagacaatcactcgaaaacaaactgagggagagggtaaggcaaacaattttgaagaacaaaaagaaaataagccaataa

SEQ ID NO: 6054 - DNA, 1377 bp, Artificial Sequence
  Description of Artificial Sequence: Synthetic polynucleotide
atgaaggatgtcttacaatgggcgattgaccactacgagacaagagaccaattagtgcagaagggaatttggaaaggtgaactctaccatgactctatctttaaagaaaatagtagaggctggctctggaaagctttgcttttatgtgatgaaaacaacaactgcttgttaactgataactttaaaggtttggaccttaaccagttcggcttggtgccagtgcctatgttagcagatggcgacaactatgacgaaaatcataatgcaaatgtacctaaaagggtcttgcactccaacgtttcctcctctgtgggaatcaggaggttaactcccgtcgaggctgttgaaaaacatcccttgtctgatgacaatgacaaaactaaaggttctttgtccaagggaagtgatgaaaagccgttgacattaagggaaactttggaaattatagatttggacctctccaggataatgcttgacgatatatttcaggaacccaaggttcatgctcaaatgagacaacttttgtacaattacttacttatacatcaaagcgaacacttgcagtataaacaagggttccacgaaatattaagcgtcatttatttacaattatatcacggtacagatctcgataataccgatttgcaaaacgttttgattatctttaacaagttgatgaaccaaatcgaaccgattttttataacgaagaaaatttgattaactgggataagagagtattcacgaaaatctttaggatttgtttgccagacttgttttccaaggttttttaccaaccaccaaaaacgggcagcgggaagaaaaaaaacgtagaccatttgattcactccaacttgatctggctcatcagatggacaaggttgttatttttaagagaattacccttaaaatatgtgttaatcgtttgggaccacgtcttgacgttcaattatcccttggatattttcattgcatgcactatcatcacccttttgttatccatttacgatgagcttcacgaattagtgagccaaggtgactatgaacatacgaataataacgatgaatttgttgaattgattttgcatttcaagaaaatttttgaaaaggaagatgccagtaaagatgatgaaaagtttttagacttatgtaaggtcactggaaatttatgtgaattgtggtatggaaaaaattacgacgatatgagattgatttgcgacacttttataaatgcgaagttcggcataaagactagtgatgttttaagtatggaaacagcaaagttgactattgatcctaatagacaatctctcgaaaacaaattgagggagagggtaaggcaaacaattttgaagaacaaaaagaaaataagccaatga

SEQ ID NO: 6055 - DNA, 774 bp, Saccharomyces cerevisiae
atgtttgttgattattccggactggagcgttacacggatataaatgcatcttttggtaagttggtcaacacttactgctgttttcagcgctgtgaagccatcagcgaacaattggagattctgaaaagtctagtaccaaagtgccacgacattgtggcacttactgacgaagactttgctagtggccgtactgccggactgacgcagaaattgtttgctatggcgatgaccctacaccagatcaccgactgtatcgacctcctgcagaaatgcaacaccataatacccatcgagatcgccaacccggctagctttgaaagcggcgccgcgacggcgccgctacgtcaaagctatgctaggctcttggatgactggtcccactacatgggcccatcaacggtaaaacacacaggctgtaccaaccgacccaagtggagatttccctggcaacagtcacggactatcatcatccccatgctgtttattggcgaaactgcaatgagcaccagggacctaaggtctgtgctgcatgattgtgagatcaggcacgcgagcgaaatgccgctgcagctactttggacgtcgtcaccggagttggtgtacgccacaccgcatgttgacgactacgacatttggtcgcgctacgggtctgattacaacatgcagatagaggacgaagacgaagcatcaaaagggcgacagcgcaagtgtgtggtgcagttggaggcactgttgggtgcgctacctactacggacccgttgttccaatggtag

SEQ ID NO: 6056 - DNA, 774 bp, Artificial Sequence
  Description of Artificial Sequence: Synthetic polynucleotide
atgtttgttgattattccggattggagcgttacacggatataaatgcatcttttggtaagttggtcaacacttactgctgttttcagcgctgtgaagccatcagcgaacaattggagattttgaaaagtttagtaccaaagtgccacgacattgtggcacttactgacgaagactttgctagtggccgtactgccggattaacgcagaaattgtttgctatggcgatgaccttacaccagatcaccgactgtatcgacctcttacagaaatgcaacaccataatacccatcgagatcgccaacccggctagctttgaaagcggcgccgcgacggcgccgttacgtcaaagctatgctaggctcttggatgactggtcccactacatgggcccatctacggtaaaacacacaggctgtaccaacaggcccaagtggagatttccctggcaacagtctagaactatcatcatccccatgttatttattggcgaaactgcaatgagcaccagggacttgaggtctgtgttacatgattgtgagatcaggcacgcgagcgaaatgccgttgcagttactttggacgtcttctccggagttggtgtacgccacaccgcatgttgacgactacgacatttggagccgctacgggtctgattacaacatgcagatagaggacgaagacgaagcatccaaagggagacagcgcaagtgtgtggtgcagttggaggcattattgggtgcgttacctactacggacccgttgttccaatggtga

SEQ ID NO: 6057 - DNA, 4197 bp, Saccharomyces cerevisiae
atggactccaaggacacgcaaaagttgcttaaggagcaccgaatcccctgcatcgacgttggatggttggtcaggcccagtgcctccaccagcaagagctccagaccagggaaatccgagtccaaggccaacagtgtggctcctgacatccagatggacactgctcgcccgcccgttttcgaaacgtctgtagactcttccagcagcattctttcttcaaacgataagggacgccgtcactccgtagctgcgagcttgctaatggataatcagcgtgctaacgctgggtctacatccgttcccacaaacattcctccccctaggggtaggtcgaagtcagtggtggagactaacctgtctaacgttgaggctgactccggacatcatcaccaccaccgccaccaccatcacacggaagatgctcctgcacctaagaaggtcggattctttaagagtctgtttggccataggaagaaggatcaggaacaacaggagaaggaacgagaaaggaaagagcgctcaccctctccgactcacgtggaccgtggcgcggccataagaagagaaagaacggctaccatatctgcggaatcaccaccgcctttgcagtacaatgctccaccctcttataacgatactgtggtaccgttaacaagatccaagacggaatcagaagtgtattacgaaaatcatccgcaaagctactaccatggccgtatgcgcacataccactcaccagaagagggtaaagtcgacggaacttcccccgcagacgatcataactatggcggctctcgacctgatcctagattaatggatttcttgcgctactacaaatctaaggattacaaattagccgccttcaaagaagggaactttattaagtcatctgcgtctcccacaaccaagaaaaatagacgcgcttcgttctcattacataacgacaaaccacaacctgccaaatcacttgctcaccagaaatttgacgctaagggaagacccattccgccgcatcccgacgcacccaaattgccttccgccttcaggaagaagcatccaagcaacgcatcgatagtagacacagtggattccaattcggacgtttcctcgtcagcgcagaataataatcagacaccttcttctcataaattcggcgcctttttaaggaaagttacctcttatgggaacaacaacaacaacagcaccaatgcctcctccctttctgcaaacgtcaataatccagacacctcatcgacgtccctatggtcttctagttcaatggagttcgacccttcaaagataaccaccgtccccggcctcgagaatatacggcccttgaaacacgtctcctttgctacgaacacctatttcaacgatcctccacaacaaatatgcagtaaaaaccctcgtaaaggtgaagtggaagtgaagcctaatggatctgttgtcattcataggttgactccgcaagaacgcaaaaaaatcatggaatcgactagtttgggtgttgtcgttggggggaccgggcaattaaaactattaaatcccgaggaagacgacgcaaatgccaagagtaaagaggagatggcccctcaaaagcagaacgaagtggaggcacacgacgaggaggataacaattctcaaaggagaaacatcgttatggccgctgcagaagctgctgcagaggccagagccaaagaggcacctaacgaattgaaacgtatcgtgaccaacaatgaagaagaagtcactgtcagtaagaccgccagccatttgaccatcgataagccaatgatttcaagaaggggtgcttccacatcctctttggcctccatggtgtccagtgataccaacggtacgaacgcagatgatgaaggagaaattcttcccccaccttctttgaagatacctcacgacattgtgtatacccgttgttgtcacttgcgagaaattctgcccataccagccacattgaagcaattgaaaaagggctcgacggaccctatccccatcttacagttacgtaacccaagaccttctatggtggaaatttggtcgttcagcgatttcttgagcattgctcccgttttatgtctttcgttggacggtgtacaattaaccgtgcaaatgcttagaataattttgagttcgctggtttacaaacagcatttccaaaaactttctctaagaaacacccccttggatgaagaaggatggaaagttctgtgttattttgtctccaaggccaagtctctgcactctattgatttgacaatggtcccttccatcaagacaaatgtacaaaagccttctaaatcttctttgaagtcaaaaattctgagaatgcaatgcaacttggaaaatagatccgacatgaactgggaccttttgacagcttctattgccctcatgggcggtttggaggaaattgtcatttccggggccaagatgaattctgcacaattcaaaaacttcatcctcgttgcttgtatagcaaccgagagattgggcctcgcgtataatggattatctaagagccaatgtgatgatttggccaagtggatggttcaatcaaaagtgacaggtctagacgttggttttaacgatttgaatggcaaactttcctctttcaccgatgctgttttaggcaaaatacaaaaagctaacgagaaaaacgtcttcaaatttttatctctaaatgggacaaatttgagagtgaacgaacacgacacttttgagaataacgaggtcttaaaactgataagcgttttatgttatttggaaaatttaaaattcttggatatatcgaacaatcctgccatcttcccccactgtgttccgacgctgattgattttttacctgtttttgttaatcttgtccgtctgcatatcgactacaataatttaagttccacgagtgtagtgatgctggccgaaatattacccatgtgttcaagattgaattatttttccatgttaggaacggaattggatttggcatcgtctaaagctctagcagaggcggtgaggaaaagttcatctttgatgactttggacgtggactatgtgtatatgccagagaacattaaggaaaaaatttcattatatgctttaagaaatattcaaggggagttgaaaagggttaatagtgacgataaagatatcaaagatagccaattttcaagcctacaggaccaactatcacttttattaactgaaaaagcggataattccgaacattacaacaaaatggttgagaatttcatggccaaaatcgcgttggcacgtatcaagattagtaaagtggttcatgatctttttgatttaaaactgaatggacaattaaatttggaaggtaaggaagctttgattagattatgcttcatagaggcaagtttggaaagaggctgtgacctgctgaaacaaagacataacaacactttgaaatcaccagaggccgtctcaaaaagtcggaaagggggaaatcaagcacaacccaattccgaaagctgtcaaagaatgttactaagctcatctatattacaaaattcagatcatattgcgcttatgccattcggtagtgcaatagtcgaaaagtcaagcccagatgcagaagatgccgtcgaattcagagaaggtgacgactccaacgtaaatcacgaagacgtaccagcaaatgatcaacaatttcgagatgaagttgatatcaaaaacaaatactctatcattaaaagagaactagaacacgaaaagcttgtcggtggtggcgatttgccagtggacaaagaaatcttaaatcgtgccgcacaatccttagatagtgaccagataaaggaatttctgttgaagaatgacgtctctactatccttggcgtcattgatgaactgcatagccaagggtaccacttgcatcatattttcaaaaaacagggaaaccaagaagagaccgcgttcagaacaaaggatgaacaacagtcctcccaatccaatgattcaagtgctaatgcgtcccctaccactgatccgatatccacaggctccaatacttctagaacgaacgataatgctcatattcctccgaccgatgcgcctggatttgataaatttatgaacaatgcagaggaaaatgccattgacgctgcttatgatgatgtgctagacaaaatccaggatgcgcggaacagtagtactaaataa

SEQ ID NO: 6058 - DNA, 4197 bp, Artificial Sequence
  Description of Artificial Sequence: Synthetic polynucleotide
atggactccaaggacacgcaaaagttgcttaaggagcacagaatcccctgcatcgacgttggatggttggtcaggcccagtgcctccaccagcaagagctccagaccagggaaatccgagtccaaggccaacagtgtggctcctgacatccagatggacactgctcgcccgcccgttttcgaaacgtctgtagactcttccagcagcattctttcttccaacgataagggacgccgtcactccgtagctgcgagcttgttgatggataatcagcgtgctaacgctgggtctacatccgttcccacaaacattcctccccctaggggtaggtctaagtctgtggtggagactaacttatctaacgttgaggctgactccggacatcatcaccaccaccgccaccaccatcacacggaagatgctcctgcacctaagaaggtcggattctttaagagtttatttggccataggaagaaggatcaggaacaacaggagaaggaaagagaaaggaaagagcgctctccctctccgactcacgtggaccgtggcgcggccataagaagagaaagaacggctaccatatctgcggaatctccaccgcctttgcagtacaatgctccaccctcttataacgatactgtggtaccgttaacaagatccaagacggaaagtgaagtgtattacgaaaatcatccgcaaagctactaccatggccgtatgcgcacataccactctccagaagagggtaaagtcgacggaacttcccccgcagacgatcataactatggcggctctagacctgatcctagattaatggatttcttgcgctactacaaatctaaggattacaaattagccgccttcaaagaagggaactttattaagtcttctgcgtctcccacaaccaagaaaaatagacgcgcttctttctctttacataacgacaaaccacaacctgccaaatctcttgctcaccagaaatttgacgctaagggaagacccattccgccgcatcccgacgcacccaaattgccttccgccttcaggaagaagcatccaagcaacgcatctatagtagacacagtggattccaatagtgacgtttcctcttctgcgcagaataataatcagacaccttcttctcataaattcggcgcctttttaaggaaagttacctcttatgggaacaacaacaacaacagcaccaatgcctcctccctttctgcaaacgtcaataatccagacacctcttctacgtccttatggtcttctagttctatggagttcgacccttctaagataaccaccgtccccggcctcgagaatataaggcccttgaaacacgtctcctttgctacgaacacctatttcaacgatcctccacaacaaatatgcagtaaaaaccctcgtaaaggtgaagtggaagtgaagcctaatggatctgttgtcattcataggttgactccgcaagaacgcaaaaaaatcatggaatctactagtttgggtgttgtcgttggggggaccgggcaattaaaattattaaatcccgaggaagacgacgcaaatgccaagagtaaagaggagatggcccctcaaaagcagaacgaagtggaggcacacgacgaggaggataacaattctcaaaggagaaacatcgttatggccgctgcagaagctgctgcagaggccagagccaaagaggcacctaacgaattgaaacgtatcgtgaccaacaatgaagaagaagtcactgtcagtaagaccgccagccatttgaccatcgataagccaatgatttctagaaggggtgcttccacatcctctttggcctccatggtgtccagtgataccaacggtacgaacgcagatgatgaaggagaaattcttcccccaccttctttgaagatacctcacgacattgtgtatacccgttgttgtcacttgagagaaattttgcccataccagccacattgaagcaattgaaaaagggctctacggaccctatccccatcttacagttacgtaacccaagaccttctatggtggaaatttggagtttcagcgatttcttgagcattgctcccgttttatgtctttctttggacggtgtacaattaaccgtgcaaatgcttagaataattttgagttctttggtttacaaacagcatttccaaaaactttctttgagaaacacccccttggatgaagaaggatggaaagttttatgttattttgtctccaaggccaagtctttacactctattgatttgacaatggtcccttccatcaagacaaatgtacaaaagccttctaaatcttctttgaagagtaaaattttaagaatgcaatgcaacttggaaaatagatccgacatgaactgggaccttttgacagcttctattgccctcatgggcggtttggaggaaattgtcatttccggggccaagatgaattctgcacaattcaaaaacttcatcctcgttgcttgtatagcaaccgagagattgggcctcgcgtataatggattatctaagagccaatgtgatgatttggccaagtggatggttcaaagtaaagtgacaggtttggacgttggttttaacgatttgaatggcaaactttcctctttcaccgatgctgttttaggcaaaatacaaaaagctaacgagaaaaacgtcttcaaatttttatctttgaatgggacaaatttgagagtgaacgaacacgacacttttgagaataacgaggtcttaaaattgataagcgttttatgttatttggaaaatttaaaattcttggatataagcaacaatcctgccatcttcccccactgtgttccgacgttgattgattttttacctgtttttgttaatcttgtccgtttgcatatcgactacaataatttaagttccacgagtgtagtgatgttggccgaaatattacccatgtgttccagattgaattatttttccatgttaggaacggaattggatttggcatcttctaaagctttggcagaggcggtgaggaaaagttcttctttgatgactttggacgtggactatgtgtatatgccagagaacattaaggaaaaaatttctttatatgctttaagaaatattcaaggggagttgaaaagggttaatagtgacgataaagatatcaaagatagccaattttctagcttacaggaccaattatctcttttattaactgaaaaagcggataattccgaacattacaacaaaatggttgagaatttcatggccaaaatcgcgttggcacgtatcaagattagtaaagtggttcatgatctttttgatttaaaattgaatggacaattaaatttggaaggtaaggaagctttgattagattatgcttcatagaggcaagtttggaaagaggctgtgacttattgaaacaaagacataacaacactttgaaatctccagaggccgtctccaaaagtagaaaagggggaaatcaagcacaacccaattccgaaagctgtcaaagaatgttattaagctcttctatattacaaaattctgatcatattgcgcttatgccattcggtagtgcaatagtcgaaaagagcagcccagatgcagaagatgccgtcgaattcagagaaggtgacgactccaacgtaaatcacgaagacgtaccagcaaatgatcaacaatttagagatgaagttgatatcaaaaacaaatactctatcattaaaagagaattggaacacgaaaagcttgtcggtggtggcgatttgccagtggacaaagaaatcttaaatcgtgccgcacaatccttagatagtgaccagataaaggaatttttattgaagaatgacgtctctactatccttggcgtcattgatgaattacatagccaagggtaccacttgcatcatattttcaaaaaacagggaaaccaagaagagaccgcgttcagaacaaaggatgaacaacagtcctcccaatccaatgattctagtgctaatgcgtcccctaccactgatccgatatccacaggctccaatacttctagaacgaacgataatgctcatattcctccgaccgatgcgcctggatttgataaatttatgaacaatgcagaggaaaatgccattgacgctgcttatgatgatgtgcttgacaaaatccaggatgcgagaaacagtagtactaaatga

SEQ ID NO: 6059 - DNA, 2472 bp, Saccharomyces cerevisiae
atgaacttcaatacacctcaacaaaacaaaacgcccttttcgttcgggactgccaacaataactctaacaccaccaatcagaattcctctactggtgcgggcgccttcggaacaggtcaatcaacatttggtttcaacaattctgcgccaaataacacgaacaatgcaaactcttcaatcacacctgcatttggtagcaataacactggtaatactgcattcggtaacagtaaccccacaagtaacgtttttggcagcaacaattctacgactaatacatttggtagtaatagtgcagggacatccctttttggatcttccagtgctcaacaaacgaagagcaatggaactgctggaggaaatacatttggttcttcatccttattcaataacagtactaatagcaatacgacaaaacctgcgttcggcggtttgaattttggcggcggcaataacacaactcctagctcgaccggtaatgctaacacaagtaataacttatttggcgctaccgcaaatgcgaataagccagccttttcctttggtgcaaccactaacgacgataaaaaaacagaaccagacaagcctgctttctcctttaattcaagtgtcggtaataagacagacgctcaagctcccactacaggattttcctttggttcacaactaggtggaaacaaaacggttaacgaggctgcaaagccttccctttcatttggttcaggatcagctggtgctaacccagctggagcttcgcaacccgaacctacaactaatgaaccagcaaaaccagccctctcttttggtactgcaacatccgacaataagacaactaacacaaccccaagtttttcgtttggtgctaaatcggatgaaaataaagctggtgctacttctaagcctgccttctcattcggtgctaagccagaagaaaagaaggatgataattcctcaaaaccagctttctcatttggtgccaaatcaaatgaagacaagcaagatggaacggctaagccagcattttcctttggtgccaagcccgcggagaagaataacaatgaaacctccaagccggcattctcttttggagcaaagtctgatgagaaaaaggatggtgatgcctctaaacctgccttctcttttggcgctaaaccggatgaaaataaagctagtgctacttctaagcctgccttctcattcggcgctaagccagaagaaaagaaggatgataattcctcaaaaccagctttctcatttggtgccaaatcaaatgaagacaagcaagatggaacggctaagccagcattttcctttggtgccaagcccgcggaaaagaataacaatgaaacttccaagccggcattctcttttggagcaaagtccgatgagaaaaaggatggcgatgcctctaaacctgccttctcatttggtgctaaatcggatgaaaaaaaggacagtgattcttcgaagcctgccttctcatttggtactaaatcgaatgaaaaaaaggacagtggttcttcgaagcctgccttctcattcggtgctaaacccgatgaaaagaagaatgatgaagtctccaagcctgccttctcattcggagcaaaggctaacgaaaagaaagaaagtgatgaatcaaaatcagccttttcatttggttctaagcctacaggaaaggaggaaggcgatggggcgaaggctgccatttcctttggtgctaaacccgaagaacagaaatccagtgatacgagcaagccagcgtttacttttggtgctcaaaaagataatgagaagaaaacagaggaatcttctacggggaagtcaaccgcagatgtcaaatcaagtgatagcttgaaattaaattctaaaccagtagaattgaagccagtttctctcgacaataaaacactggacgatttagtaacgaaatggactaaccaactaacagaatcggcctctcattttgaacagtataccaaaaaaattaatagttgggatcaggtactagtgaaaggaggtgaacaaattagtcagttatactcagatgctgtgatggcggaacatagtcaaaacaaaatagatcaatctctacaatatatcgagaggcaacaggatgaattagaaaacttcttagacaattttgaaaccaagacagaggcacttctgtccgatgttgtgtctacaagttcaggtgctgcggccaacaataatgaccaaaaaagacaacaggcctataagacagcccagactttggacgaaaatttaaactcgttgtcatccaatctttcttctctaatagtagaaatcaacaatgttagtaatacattcaacaaaaccactaacatcgatataaacaatgaagacgaaaatattcaactaatcaaaatcttgaattcacatttcgacgctttaaggtcactagacgataactccacctctctggaaaaacaaatcaactcgataaagaaatga

SEQ ID NO: 6060 - DNA, 2472 bp, Artificial Sequence
  Description of Artificial Sequence: Synthetic polynucleotide
atgaacttcaatacacctcaacaaaacaaaacgcccttttctttcgggactgccaacaataactctaacaccaccaatcagaattcctctactggtgcgggcgccttcggaacaggtcaaagtacatttggtttcaacaattctgcgccaaataacacgaacaatgcaaactcttctatcacacctgcatttggtagcaataacactggtaatactgcattcggtaacagtaaccccacaagtaacgtttttggcagcaacaattctacgactaatacatttggtagtaatagtgcagggacatccctttttggatcttccagtgctcaacaaacgaagagcaatggaactgctggaggaaatacatttggttcttcttccttattcaataacagtactaatagcaatacgacaaaacctgcgttcggcggtttgaattttggcggcggcaataacacaactcctagctctaccggtaatgctaacacaagtaataacttatttggcgctaccgcaaatgcgaataagccagccttttcctttggtgcaaccactaacgacgataaaaaaacagaaccagacaagcctgctttctcctttaatagtagtgtcggtaataagacagacgctcaagctcccactacaggattttcctttggttctcaattgggtggaaacaaaacggttaacgaggctgcaaagccttccctttcttttggttctggatctgctggtgctaacccagctggagcttctcaacccgaacctacaactaatgaaccagcaaaaccagccctctcttttggtactgcaacatccgacaataagacaactaacacaaccccaagtttttcttttggtgctaaatctgatgaaaataaagctggtgctacttctaagcctgccttcagtttcggtgctaagccagaagaaaagaaggatgataattcctctaaaccagctttctcctttggtgccaaatctaatgaagacaagcaagatggaacggctaagccagcattttcctttggtgccaagcccgcggagaagaataacaatgaaacctccaagccggcattctcttttggagcaaagtctgatgagaaaaaggatggtgatgcctctaaacctgccttctcttttggcgctaaaccggatgaaaataaagctagtgctacttctaagcctgccttcagtttcggcgctaagccagaagaaaagaaggatgataattcctctaaaccagctttctcctttggtgccaaatctaatgaagacaagcaagatggaacggctaagccagcattttcctttggtgccaagcccgcggaaaagaataacaatgaaacttccaagccggcattctcttttggagcaaagtccgatgagaaaaaggatggcgatgcctctaaacctgccttctcctttggtgctaaatctgatgaaaaaaaggacagtgattcttccaagcctgccttctcctttggtactaaatctaatgaaaaaaaggacagtggttcttccaagcctgccttcagtttcggtgctaaacccgatgaaaagaagaatgatgaagtctccaagcctgccttcagtttcggagcaaaggctaacgaaaagaaagaaagtgatgaaagtaaaagtgccttttcttttggttctaagcctacaggaaaggaggaaggcgatggggcgaaggctgccatttcctttggtgctaaacccgaagaacagaaatccagtgatacgagcaagccagcgtttacttttggtgctcaaaaagataatgagaagaaaacagaggaatcttctacggggaagtctaccgcagatgtcaaatctagtgatagcttgaaattaaattctaaaccagtagaattgaagccagtttctctcgacaataaaacattagacgatttagtaacgaaatggactaaccaattgacagaaagtgcctctcattttgaacagtataccaaaaaaattaatagttgggatcaggtattggtgaaaggaggtgaacaaattagtcagttatactctgatgctgtgatggcggaacatagtcaaaacaaaatagatcaatctttacaatatatcgagaggcaacaggatgaattagaaaacttcttagacaattttgaaaccaagacagaggcacttctttccgatgttgtgtctacaagttctggtgctgcggccaacaataatgaccaaaaaagacaacaggcctataagacagcccagactttggacgaaaatttaaactctttgtcttccaatctttcttctttgatagtagaaatcaacaatgttagtaatacattcaacaaaaccactaacatcgatataaacaatgaagacgaaaatattcaattgatcaaaatcttgaattctcatttcgacgctttaaggtccttggacgataactccacctctttggaaaaacaaatcaacagcataaagaaatga

SEQ ID NO: 6061 - DNA, 5052 bp, Saccharomyces cerevisiae
atgaaatggtctgcaattcctttccaaacattgtatcgctctattgagagtggtgagttcgattttgatctgttcaaagaggtacttcctgacttacaaaatttgaacttaaacacagacaaactaaaaaacaatgctagccgatcacaattagaaaaaggtgaaattgaactatccgatggctctacttttaaggtcaatcaggagtttattttcgaagctatttctttgtccgatgaattaaacttggatgaaattgttgcatgtgaacttatactttctggtgataccaccgctaataatggcaaagtacaatactttttgagaaggcaatatatcctgcaaattgtttcttttatagtcaactgtttccacgaagatactgagttataccaagagcttataaagaatggagctttagtttctaatatcctctcagcctttaagttcattcatactcaattatctgagattaaacaacaaatcaataaggctcagatactagaaaactataatgctttattccaacaaaatatcaagtttaggagagacttcttactgagagaatatgatattctgagtcaaattttatatggtttagtggataaaggagccatcatgaaaaataaggattttatactgtccttacttcatcatgtgtcagaattggattccaatgatttttttataatatattatactcctgcatttttccaccttttcgcatctttaagagttttgcccgatgcagatgtcaaattattacattctcagtttatgaaagacttaaaggacgactccatatataccaaaccggtcaaagtagctcttattttcattttttttgcttacttcattgggtggtgtaaagaagaccctaaaagaagggctgacacgatggatttcaaaactgatgttgatgagccaatgacttctgccgtcgaactaggcgctattgaacaaattttaatatttgccgcagatacatctatcgtggaacaagacaagagtatggaacttttctacgatataaggtccctgttagaaaggcatattccaaggctaattcctaaacagttacttgatgatgaaaaaattttcagtcaaacgacgaattctacctacaacccagcatccgcaactgataatatgagcggacgcggcttatggaatccgtcttatcctgggatgatgtcaaccacgggtaccgctcgactaaatagtatgcccaataacgtcaacgaatattcttacactactatagttttatccgatcagacccaagaatttttcctctcatcctttgatgatgtgcttcaaactattattacagattgtgcctttttgcttacaaagattaaggatgctgaggaagactctttgttgtccggtgaagacttaactttggatgacatctcactaaaggctgacttagaaagattttttctgtcaatatattttttctatgcatcaaggcccgaatattcatgtactttctggtctgataaggaatcaaacgcttatggttttattgagtggtgttcgagatgcaacgacaacttgatgaggtcttgtttctatttgatggtttctagcttgtcctttggtcctgaaaatgccctgaatgtctatcactattttggcgaaaacagctcgatttcatggaaaaacattgcacagtgtctcagtgactacactaagaaaataagcaattttaactcgagcctccataagaggcagcagtttagtgagtcaactcataacgatatcgattcgactgcggtagccttagaagaaggcttaaatgaagaagctgtaatatttctgtcttctttattaactttagttggatcagttacataccaggttgacgaggatgtaaaaagctcgctatcgaaagttttctcagatgtcctattcgaattcaccaagataaatacacctctcgtaggcgctgctttcaaggttataagtaacttggttccaaaacttgaatcttctagaacaaaattttggtcttttctagactctctaattttcaaggattcatcgctgaattattcatccgaatcttatagaaatgcttttacaaacgtgttaacaaaatactctgacgttttggggtttttacaactcttccataatctgatttctattcattctcgtgaaaataatagtgaatacatggtttttggcaaattggcatttccaacaagattaggtcagggatataggaaggtaggtatatggccatattttgactacattttcaacgacattttagcgcacgtggatcaaattgttgatatcagaaataaaagagccgtccagcttcctattttgaaaattatctatacgggcttatgctcttttgattacagtgtaattttaaattctattcctgcagctgcgaatttggatgctttggtggattgcgaaaatttcttcaattacgttcaagaatgcccagctatccccatattcaactatattttcacggaaaagatttacaaaagtatatttaatgtagttgatgttggtgttgatcaattgtccatagagttagaaggtggcaaaaatcaggctgaattgttgcagttagctgtgaaaattatcaataaagtattggattatcaggagacatacgtggaagaattatttccaattgttaagaagcatggcaagacggattatttcttgccaaagaattattctcttcacggattacgttcattttacgatgcaatttttttcaatattccacttgttgcacacttgggtttatacgtcggggtcgatgatcaaattttagccacaaattcactgcgtattttggcgaaactttcagaacgctctaatggctccgttgcgtctttgtctaagagaaataagttgttaacaatattcgattccgtagatgaatcagccagaataaaggatgcatttattacacaattggaaagctcaataaccgacgctggtgtccttgctttgaagttagaactattagatttcttaacatcaaatctttctaattatagtcgaacgatgactatttctcatctgttattaggtttccaggtctcaaacgttatatccctgggacctaacctagcaacatttatatcttccggaacctcattacttgattccctcataagcgtgttggaagcttcattgaacagcattactaaggacaatatcgattatgcacctatgagattggctacagcagcactggaaattattctcaaactatgtcgtaatccgttaacatctggtctactatattcatacctaatcaaagaaaacttttttgagagaataatgatcctcgatccacaagtgacaaggttcacgacatggaacggctctccttttgacaattctacagaggaaaaatgtaagaacttcatcgagagcgaatccgttggtgcatttctgtcattcttagcctacaggaattattggacacaatatttgggtctgttcattcataaaatttcattttcgggcacgaaatcagaggttttaacatatgtgaattacttgatatcaaatacaatgtattcggtaaggttgttttctttcttggatccattaaactatggcaatatctgcgaaccaaaagagacgttatcaattttcaccaatgttcctttaaatttggaacaagtcactcttaacaagtattgctccggcaatatctatgactttcacaaaatggaaaaccttatgcgcctgattaaaagagtccgtgctgaaagcttacattctaattccttcagtctcactgtgtcaaaagaacaatttttgaaggatgcagatgtcgagtgtataaaagcaaaaagccatttcacgaatattatatcaagaaacaaagcattggagttgaacctatctgtgctgcactcttgggtacagttggtgcaaatcattgttactgatggaaaattggaaccatcaacaagatcaaactttattctggaggtttttggtacaattattccgaagattagtgattatattgagtttaatataactttttcagaagaattggtttctctcgccgttttcctatttgatatatataaccgcgatcgtaagttgattaccgacaaaggcacggtagacggcaggctatatcagttgttcaagacatgtattcagggtataaactccccactctcctctgtggcattaaggtccgatttctatatattagcaaaccattatttgagtagagttctaagcgaccaagtagggtccgaaaaggttctgcaggatttgagactaggaagtaaaaaattggtagagatcatatggaacgatgttgtttatggcgagggaactagtagggttacaggtatattactattggattcacttattcaactggctaatagaagtaaagagaattttatattggattcactgatgaaaactacaagactgctcttaataatacgttcgctgaaaaatacagatgctttgttaaattctactacagagcacataaacattgatgatttgttatatgaattgacagcttttaaagccactgtattctttttaatacgtgttgccgaaactagaggtggagctagcgctttaattgaaaataatctattccgaataatcgcggaattgtcatttttaaaagttgatcctgatttgggtctagaccttatgtttgacgaagtctacgttcagaattccaaattcttaaaggttaacgtcaccttggataatccgctactagttgacaaagatgctaatggtgtttccttgtttgagttaatcgttcctatattccaattgatatcagctgttttagtgagcatggggagctcaaacaaagctgttgttcaaacggtaaagggtttactgaatacgtataagaggctagtgatcggaatattcaaaagagatcttttgagggaaaaagaagataagaaaaattcgtcggatcctaataaccaaagtttaaacgaaatggtgaagctaattgtgatgttatgcacattaacaggatatcaaaataacgattaa

SEQ ID NO: 6062 - DNA, 5052 bp, Artificial Sequence
  Description of Artificial Sequence: Synthetic polynucleotide
atgaaatggtctgcaattcctttccaaacattgtatcgctctattgagagtggtgagttcgattttgatcttttcaaagaggtacttcctgacttacaaaatttgaacttaaacacagacaaattgaaaaacaatgctagcagatctcaattagaaaaaggtgaaattgaattatccgatggctctacttttaaggtcaatcaggagtttattttcgaagctatttctttgtccgatgaattaaacttggatgaaattgttgcatgtgaacttatactttctggtgataccaccgctaataatggcaaagtacaatactttttgagaaggcaatatatcttgcaaattgtttcttttatagtcaactgtttccacgaagatactgagttataccaagagcttataaagaatggagctttagtttctaatatcctcagtgcctttaagttcattcatactcaattatctgagattaaacaacaaatcaataaggctcagatattggaaaactataatgctttattccaacaaaatatcaagtttaggagagacttcttattaagagaatatgatattttaagtcaaattttatatggtttagtggataaaggagccatcatgaaaaataaggattttatattatccttacttcatcatgtgtctgaattggattccaatgatttttttataatatattatactcctgcatttttccaccttttcgcatctttaagagttttgcccgatgcagatgtcaaattattacattctcagtttatgaaagacttaaaggacgactccatatataccaaaccggtcaaagtagctcttattttcattttttttgcttacttcattgggtggtgtaaagaagaccctaaaagaagggctgacacgatggatttcaaaactgatgttgatgagccaatgacttctgccgtcgaattaggcgctattgaacaaattttaatatttgccgcagatacatctatcgtggaacaagacaagagtatggaacttttctacgatataaggtccttattagaaaggcatattccaaggttgattcctaaacagttacttgatgatgaaaaaattttcagtcaaacgacgaattctacctacaacccagcatccgcaactgataatatgagcggacgcggcttatggaatccgtcttatcctgggatgatgtctaccacgggtaccgctaggttgaatagtatgcccaataacgtcaacgaatattcttacactactatagttttatccgatcagacccaagaatttttcctctcttcctttgatgatgtgcttcaaactattattacagattgtgcctttttgcttacaaagattaaggatgctgaggaagactctttgttgtccggtgaagacttaactttggatgacatctctttgaaggctgacttagaaagattttttttatctatatattttttctatgcaagcaggcccgaatattcttgtactttctggtctgataaggaatctaacgcttatggttttattgagtggtgttccagatgcaacgacaacttgatgaggtcttgtttctatttgatggtttctagcttgtcctttggtcctgaaaatgccttgaatgtctatcactattttggcgaaaacagctctatttcttggaaaaacattgcacagtgtctcagtgactacactaagaaaataagcaattttaactccagcctccataagaggcagcagtttagtgagtctactcataacgatatcgattctactgcggtagccttagaagaaggcttaaatgaagaagctgtaatatttttatcttctttattaactttagttggatctgttacataccaggttgacgaggatgtaaaaagctctttatccaaagttttcagtgatgtccttttcgaattcaccaagataaatacacctctcgtaggcgctgctttcaaggttataagtaacttggttccaaaacttgaatcttctagaacaaaattttggtcttttttggactctttgattttcaaggattcttctttgaattattcttccgaatcttatagaaatgcttttacaaacgtgttaacaaaatactctgacgttttggggtttttacaactcttccataatttaatttctattcattctcgtgaaaataatagtgaatacatggtttttggcaaattggcatttccaacaagattaggtcagggatataggaaggtaggtatatggccatattttgactacattttcaacgacattttagcgcacgtggatcaaattgttgatatcagaaataaaagagccgtccagcttcctattttgaaaattatctatacgggcttatgctcttttgattacagtgtaattttaaattctattcctgcagctgcgaatttggatgctttggtggattgcgaaaatttcttcaattacgttcaagaatgcccagctatccccatattcaactatattttcacggaaaagatttacaaaagtatatttaatgtagttgatgttggtgttgatcaattgtccatagagttagaaggtggcaaaaatcaggctgaattgttgcagttagctgtgaaaattatcaataaagtattggattatcaggagacatacgtggaagaattatttccaattgttaagaagcatggcaagacggattatttcttgccaaagaattattctcttcacggattacgttctttttacgatgcaatttttttcaatattccacttgttgcacacttgggtttatacgtcggggtcgatgatcaaattttagccacaaattctttacgtattttggcgaaactttctgaacgctctaatggctccgttgcgtctttgtctaagagaaataagttgttaacaatattcgattccgtagatgaaagtgccagaataaaggatgcatttattacacaattggaaagcagtataaccgacgctggtgtccttgctttgaagttagaattattagatttcttaacaagtaatctttctaattatagtaggacgatgactatttctcatcttttattaggtttccaggtctccaacgttatatccttgggacctaacttggcaacatttatatcttccggaaccagtttacttgattccctcataagcgtgttggaagcttctttgaacagcattactaaggacaatatcgattatgcacctatgagattggctacagcagcattggaaattattctcaaattatgtcgtaatccgttaacatctggtttattatattcttacttgatcaaagaaaacttttttgagagaataatgatcctcgatccacaagtgacaaggttcacgacatggaacggctctccttttgacaattctacagaggaaaaatgtaagaacttcatcgagagcgaatccgttggtgcatttttatctttcttagcctacaggaattattggacacaatatttgggtcttttcattcataaaatttccttttctggcacgaaaagtgaggttttaacatatgtgaattacttgatatccaatacaatgtattctgtaaggttgttttctttcttggatccattaaactatggcaatatctgcgaaccaaaagagacgttatccattttcaccaatgttcctttaaatttggaacaagtcactcttaacaagtattgctccggcaatatctatgactttcacaaaatggaaaaccttatgcgcttaattaaaagagtccgtgctgaaagcttacattctaattccttcagtctcactgtgtctaaagaacaatttttgaaggatgcagatgtcgagtgtataaaagcaaaaagccatttcacgaatattatatctagaaacaaagcattggagttgaacttatctgtgttacactcttgggtacagttggtgcaaatcattgttactgatggaaaattggaaccatctacaagatctaactttattttagaggtttttggtacaattattccgaagattagtgattatattgagtttaatataactttttctgaagaattggtttctctcgccgttttcttatttgatatatataaccgcgatcgtaagttgattaccgacaaaggcacggtagacggcaggttatatcagttgttcaagacatgtattcagggtataaactccccactctcctctgtggcattaaggtccgatttctatatattagcaaaccattatttgagtagagttttaagcgaccaagtagggtccgaaaaggttttacaggatttgagattaggaagtaaaaaattggtagagatcatatggaacgatgttgtttatggcgagggaactagtagggttacaggtatattattattggattctcttattcaattggctaatagaagtaaagagaattttatattggattctttgatgaaaactacaagattactcttaataatacgttctttgaaaaatacagatgctttgttaaattctactacagagcacataaacattgatgatttgttatatgaattgacagcttttaaagccactgtattctttttaatacgtgttgccgaaactagaggtggagctagcgctttaattgaaaataatttattcagaataatcgcggaattgagttttttaaaagttgatcctgatttgggtttggaccttatgtttgacgaagtctacgttcagaattccaaattcttaaaggttaacgtcaccttggataatccgttgttggttgacaaagatgctaatggtgtttccttgtttgagttaatcgttcctatattccaattgatatctgctgttttagtgagcatggggagcagtaacaaagctgttgttcaaacggtaaagggtttattgaatacgtataagaggttggtgatcggaatattcaaaagagatcttttgagggaaaaagaagataagaaaaattcttctgatcctaataaccaaagtttaaacgaaatggtgaagttgattgtgatgttatgcacattaacaggatatcaaaataacgattga

SEQ ID NO: 6063 - DNA, 660 bp, Saccharomyces cerevisiae
atgaggttccagcttttcatatatttttatttcaccattgttgtgattgcaggaactaacacaatacaacagttcagcgatgcgggcgataggttaatcacatcattgagaaatctggacaacaatggaacatacgaaacattgacagcagagaaggtgcctattatcgagggacaaattcaaaacattagtgcaaaatatgagcagcatacttttattttgaagggcttagaagcggtgctaaattataaagtgaaaagtttggataataatgagagagagtcgctcgaaatagaatatgaaaaggtggaaaaggcactagatgcggctttgaatgtttcaccatttgaatatatcaaaaagtttaaagaagtctccaggggcaaggtagttaatgctttagaaaacctcagtagagaacagaatcgaattactataaatggtggtagagaagacgaaaaagaaaaagaagcgagggaaaaaaagaaacgactagacagaataaagagaatcctaactgtaagtctgttagaattgggtctagctcaaggagtggccgatttatgtgcagtagcaccttttgcgtgtcttcttggggtgacagttggaagcatcggtttcatattttggttggcactaatatataatgctattcaataa

SEQ ID NO: 6064 - DNA, 660 bp, Artificial Sequence
  Description of Artificial Sequence: Synthetic polynucleotide
atgaggttccagcttttcatatatttttatttcaccattgttgtgattgcaggaactaacacaatacaacagttcagcgatgcgggcgataggttaatcacatctttgagaaatttggacaacaatggaacatacgaaacattgacagcagagaaggtgcctattatcgagggacaaattcaaaacattagtgcaaaatatgagcagcatacttttattttgaagggcttagaagcggtgttgaattataaagtgaaaagtttggataataatgagagagagtctctcgaaatagaatatgaaaaggtggaaaaggcattggatgcggctttgaatgtttctccatttgaatatatcaaaaagtttaaagaagtctccaggggcaaggtagttaatgctttagaaaacctcagtagagaacagaatagaattactataaatggtggtagagaagacgaaaaagaaaaagaagcgagggaaaaaaagaaaagattagacagaataaagagaatcttgactgtaagtttgttagaattgggtttagctcaaggagtggccgatttatgtgcagtagcaccttttgcgtgtcttcttggggtgacagttggaagcatcggtttcatattttggttggcattaatatataatgctattcaatga

SEQ ID NO: 6065 - DNA, 675 bp, Saccharomyces cerevisiae
atgaaagtacaaatgatagaaaggatttttctgatccagttgtgtttgcttaccgttgtattagcaagtagtagagcagtggttgaattcgaaagtaccggaaccaaactggtcaactcattaagggtcttggctgcttactcgcagagttctgtctgtgttgatgaaaaaatatctggaatcgagagacaaatagaggaagttaaagatatgtatggtaaccactcttttattctaaagggtttaaatggtatattgaataacaaggtgaatatgctaacaagggaaatccaaatggaaactgttggcaataacacatttgaaacagaaacagggaagctaactaagggcctaaaccgagcagtaaatatatctccgttcaagtacataaaaaaattcaagaccgtttcaacaaagaaatttgaaagcctcttgaataagtatgatctggttgccaagaagggcggggaattgacagaggaacaaaagaaaaagaaggaggtgctctcacggatcagtagagtagtcgctgcaacaacgatagaggctggtctggcacaaggtgtggttgatttatgtataacagtgacaactagtctatgcttagtctcggccagcattggaggcgtcggatttcttatttggctcaccattatataccaagctctgacttag

SEQ ID NO: 6066 - DNA, 675 bp, Artificial Sequence
  Description of Artificial Sequence: Synthetic polynucleotide
atgaaagtacaaatgatagaaaggatttttttgatccagttgtgtttgcttaccgttgtattagcaagtagtagagcagtggttgaattcgaaagtaccggaaccaaattggtcaactctttaagggtcttggctgcttactctcagagttctgtctgtgttgatgaaaaaatatctggaatcgagagacaaatagaggaagttaaagatatgtatggtaaccactcttttattttgaagggtttaaatggtatattgaataacaaggtgaatatgttaacaagggaaatccaaatggaaactgttggcaataacacatttgaaacagaaacagggaagttgactaagggcttgaacagagcagtaaatatatctccgttcaagtacataaaaaaattcaagaccgtttctacaaagaaatttgaaagcctcttgaataagtatgatttggttgccaagaagggcggggaattgacagaggaacaaaagaaaaagaaggaggtgctctccagaatcagtagagtagtcgctgcaacaacgatagaggctggtttggcacaaggtgtggttgatttatgtataacagtgacaactagtttatgcttagtctctgccagcattggaggcgtcggatttcttatttggctcaccattatataccaagctttgacttga

SEQ ID NO: 6067 - DNA, 1272 bp, Saccharomyces cerevisiae
atgacagacaaaggcaagaacgatttaacaagcaaagctaaggacaaagccagaggcaaccccgagaagccaccatattggtttgaaatcattgtttctgatccacaaaaaagaactggtgacccaggctcttcatctggctacgtgagttatcagatatcaacaaagactaacaacacgtcattttatgataatcgtggcgatccagaatctattatagttgtacatagaagatacagtgacctattgctcctgcatgatattttactcaacaggttccccacctgcatcatcccgccattacctgataagaaagtttttcaatacatagcaggcgataggtttagccaaagatttacacaaaagagatgtcatagtttgcaaaatttcctaagaagggtctctttgcatcccgatctttctcaatcaaaagtcttcaaaacttttttggtgagtaaagattgggaatctcaccgcaaagtcctccaggatagcttgcaaccaaataaagatgaagttactgatgcttttatgaatgccttcaaaacagttcacaagcaaaacgaagaattcactgagataagggagaaaagtgataaactagatcggactgtgacaaagatagataaactttttcataaggttgtgaaaaaaaatgattcgatgtctgaagactatacaaagttgggcagtaatttacaggaattacaagaattggtcacaggcgaaaacgaggaacttgctgcgaagttgaagatttttaatgaaggtgtaacacagctgtcatatggcttgcaagatcttacaaagtatctggattacgaatatattgttgatttgaaggatcttgaacactacattgatagtatgcgacagctgatcaaattgaaagaccagaaacagatagactacgaagaactaagtgattatttaaccaggtcaatcaaagaaaaaaataacttgatttctggatacggaggtagtaatttctttgccaataaattggaagaactagcgggaataaatcaggaggcttcacgtagagaaaaaatcaataaactagaaggcaaaataacgtcattaacaggtgaattagaaaacgctaaaaaggtggcggatggattcgaacaggaatgcttgaaggaaatagaccatttcgaaagtgtaaaaacggctgaaatcaagaaatctctgggctcactagcggaccatcatatcgaattctacgaaaggatacttgaagcatgggaaaaagtagacgatagtctatag

SEQ ID NO: 6068 - DNA, 1272 bp, Artificial Sequence
  Description of Artificial Sequence: Synthetic polynucleotide
atgacagacaaaggcaagaacgatttaacaagcaaagctaaggacaaagccagaggcaaccccgagaagccaccatattggtttgaaatcattgtttctgatccacaaaaaagaactggtgacccaggctcttcttctggctacgtgagttatcagatatctacaaagactaacaacacgtctttttatgataatcgtggcgatccagaatctattatagttgtacatagaagatacagtgacttgttgctcttgcatgatattttactcaacaggttccccacctgcatcatcccgccattacctgataagaaagtttttcaatacatagcaggcgataggtttagccaaagatttacacaaaagagatgtcatagtttgcaaaatttcttaagaagggtctctttgcatcccgatctttctcaaagtaaagtcttcaaaacttttttggtgagtaaagattgggaatctcaccgcaaagtcctccaggatagcttgcaaccaaataaagatgaagttactgatgcttttatgaatgccttcaaaacagttcacaagcaaaacgaagaattcactgagataagggagaaaagtgataaattggatagaactgtgacaaagatagataaactttttcataaggttgtgaaaaaaaatgattctatgtctgaagactatacaaagttgggcagtaatttacaggaattacaagaattggtcacaggcgaaaacgaggaacttgctgcgaagttgaagatttttaatgaaggtgtaacacagttatcttatggcttgcaagatcttacaaagtatttggattacgaatatattgttgatttgaaggatcttgaacactacattgatagtatgaggcagttaatcaaattgaaagaccagaaacagatagactacgaagaattaagtgattatttaaccaggtctatcaaagaaaaaaataacttgatttctggatacggaggtagtaatttctttgccaataaattggaagaattggcgggaataaatcaggaggcttctcgtagagaaaaaatcaataaattagaaggcaaaataacgtctttaacaggtgaattagaaaacgctaaaaaggtggcggatggattcgaacaggaatgcttgaaggaaatagaccatttcgaaagtgtaaaaacggctgaaatcaagaaatctttaggctccttagcggaccatcatatcgaattctacgaaaggatacttgaagcatgggaaaaagtagacgatagtttgtga

SEQ ID NO: 6069 - DNA, 753 bp, Saccharomyces cerevisiae
atgcagcatattaaacatatgaggacagctgtccgtttggctagatacgctcttgaccacgatgagacaccggtagcttgcatctttgtacatacgccaactggccaggtgatggcttatggcatgaacgatacgaacaagtcattaactggagtagcacatgctgagttcatggggatcgatcagatcaaggcgatgttgggctcccgaggagttgttgacgtgttcaaagacattactctatatgttactgtagaaccgtgtataatgtgtgcatctgctctcaagcaattagacattggaaaggtggtgttcggttgtggcaacgagagatttggaggcaacggtactgtcttgtcagtaaatcatgatacgtgtacattagtgcccaagaacaatagtgcggcagggtacgagagtataccggggatcttgaggaaagaagcaataatgctgctgagatacttttatgtaagacaaaatgaaagggcgccaaagccacggtccaagagtgacagagtgttggataaaaacacgtttccgcctatggaatggtcaaagtatcttaatgaagaagcattcattgagacttttggtgatgattacaggacttgttttgcgaataaagttgacttgtccagtaatagcgtcgattgggatttgattgactcccaccaagataatataatccaagaactggaagaacaatgcaaaatgtttaagtttaatgtacataagaaatctaaggtttga

SEQ ID NO: 6070 - DNA, 753 bp, Artificial Sequence
  Description of Artificial Sequence: Synthetic polynucleotide
atgcagcatattaaacatatgaggacagctgtccgtttggctagatacgctcttgaccacgatgagacaccggtagcttgcatctttgtacatacgccaactggccaggtgatggcttatggcatgaacgatacgaacaagtctttaactggagtagcacatgctgagttcatggggatcgatcagatcaaggcgatgttgggctccagaggagttgttgacgtgttcaaagacattactttatatgttactgtagaaccgtgtataatgtgtgcatctgctctcaagcaattagacattggaaaggtggtgttcggttgtggcaacgagagatttggaggcaacggtactgtcttgagtgtaaatcatgatacgtgtacattagtgcccaagaacaatagtgcggcagggtacgagagtataccggggatcttgaggaaagaagcaataatgttattaagatacttttatgtaagacaaaatgaaagggcgccaaagccaagatccaagagtgacagagtgttggataaaaacacgtttccgcctatggaatggtccaagtatcttaatgaagaagcattcattgagacttttggtgatgattacaggacttgttttgcgaataaagttgacttgtccagtaatagcgtcgattgggatttgattgactcccaccaagataatataatccaagaattggaagaacaatgcaaaatgtttaagtttaatgtacataagaaatctaaggtttga

SEQ ID NO: 6071 - DNA, 2049 bp, Saccharomyces cerevisiae
atgtttttcaacagactaagcgctggcaagctgctggtaccactctccgtggtcctgtacgcccttttcgtggtaatattacctttacagaattctttccactcctccaatgttttagttagaggtgccgatgatgtagaaaactacggaactgttatcggtattgacttaggtactacttattcctgtgttgctgtgatgaaaaatggtaagactgaaattcttgctaatgagcaaggtaacagaatcaccccatcttacgtggcattcaccgatgatgaaagattgattggtgatgctgcaaagaaccaagttgctgccaatcctcaaaacaccatcttcgacattaagagattgatcggtttgaaatataacgacagatctgttcagaaggatatcaagcacttgccatttaatgtggttaataaagatgggaagcccgctgtagaagtaagtgtcaaaggagaaaagaaggtttttactccagaagaaatttctggtatgatcttgggtaagatgaaacaaattgccgaagattatttaggcactaaggttacccatgctgtcgttactgttcctgcttatttcaatgacgcgcaaagacaagccaccaaggatgctggtaccatcgctggtttgaacgttttgagaattgttaatgaaccaaccgcagccgccattgcctacggtttggataaatctgataaggaacatcaaattattgtttatgatttgggtggtggtactttcgatgtctctctattgtctattgaaaacggtgttttcgaagtccaagccacttctggtgatactcatttaggtggtgaagattttgactataagatcgttcgtcaattgataaaagctttcaagaagaagcatggtattgatgtgtctgacaacaacaaggccctagctaaattgaagagagaagctgaaaaggctaaacgtgccttgtccagccaaatgtccacccgtattgaaattgactccttcgttgatggtatcgacttaagtgaaaccttgaccagagctaagtttgaggaattaaacctagatctattcaagaagaccttgaagcctgtcgagaaggttttgcaagattctggtttggaaaagaaggatgttgatgatatcgttttggttggtggttctactagaattccaaaggtccaacaattgttagaatcatactttgatggtaagaaggcctccaagggtattaacccagatgaagctgttgcatacggtgcagccgttcaagctggtgtcttatccggtgaagaaggtgtcgaagatattgttttattggatgtcaacgctttgactcttggtattgaaaccactggtggtgtcatgactccattaattaagagaaatactgctattcctacaaagaaatcccaaattttctctactgccgttgacaaccaaccaaccgttatgatcaaggtatacgagggtgaaagagccatgtctaaggacaacaatctattaggtaagtttgaattaaccggcattccaccagcaccaagaggtgtacctcaaattgaagtcacatttgcacttgacgctaatggtattctgaaggtgtctgccacagataagggaactggtaaatccgaatctatcaccatcactaacgataaaggtagattaacccaagaagagattgatagaatggttgaagaggctgaaaaattcgcttctgaagacgcttctatcaaggccaaggttgaatctagaaacaaattagaaaactacgctcactctttgaaaaaccaagttaatggtgacctaggtgaaaaattggaagaagaagacaaggaaaccttattagatgctgctaacgatgttttagaatggttagatgataactttgaaaccgccattgctgaagactttgatgaaaagttcgaatctttgtccaaggtcgcttatccaattacttctaagttgtacggaggtgctgatggttctggtgccgctgattatgacgacgaagatgaagatgacgatggtgattatttcgaacacgacgaattgtag

SEQ ID NO: 6072 - DNA, 2049 bp, Artificial Sequence
  Description of Artificial Sequence: Synthetic polynucleotide
atgtttttcaacagattgagcgctggcaagttattggtaccactctccgtggtcttgtacgcccttttcgtggtaatattacctttacagaattctttccactcctccaatgttttagttagaggtgccgatgatgtagaaaactacggaactgttatcggtattgacttaggtactacttattcctgtgttgctgtgatgaaaaatggtaagactgaaattcttgctaatgagcaaggtaacagaatcaccccatcttacgtggcattcaccgatgatgaaagattgattggtgatgctgcaaagaaccaagttgctgccaatcctcaaaacaccatcttcgacattaagagattgatcggtttgaaatataacgacagatctgttcagaaggatatcaagcacttgccatttaatgtggttaataaagatgggaagcccgctgtagaagtaagtgtcaaaggagaaaagaaggtttttactccagaagaaatttctggtatgatcttgggtaagatgaaacaaattgccgaagattatttaggcactaaggttacccatgctgtcgttactgttcctgcttatttcaatgacgcgcaaagacaagccaccaaggatgctggtaccatcgctggtttgaacgttttgagaattgttaatgaaccaaccgcagccgccattgcctacggtttggataaatctgataaggaacatcaaattattgtttatgatttgggtggtggtactttcgatgtctctttgttgtctattgaaaacggtgttttcgaagtccaagccacttctggtgatactcatttaggtggtgaagattttgactataagatcgttcgtcaattgataaaagctttcaagaagaagcatggtattgatgtgtctgacaacaacaaggccttagctaaattgaagagagaagctgaaaaggctaaacgtgccttgtccagccaaatgtccacccgtattgaaattgactccttcgttgatggtatcgacttaagtgaaaccttgaccagagctaagtttgaggaattaaaccttgatcttttcaagaagaccttgaagcctgtcgagaaggttttgcaagattctggtttggaaaagaaggatgttgatgatatcgttttggttggtggttctactagaattccaaaggtccaacaattgttagaatcttactttgatggtaagaaggcctccaagggtattaacccagatgaagctgttgcatacggtgcagccgttcaagctggtgtcttatccggtgaagaaggtgtcgaagatattgttttattggatgtcaacgctttgactcttggtattgaaaccactggtggtgtcatgactccattaattaagagaaatactgctattcctacaaagaaatcccaaattttctctactgccgttgacaaccaaccaaccgttatgatcaaggtatacgagggtgaaagagccatgtctaaggacaacaatttattaggtaagtttgaattaaccggcattccaccagcaccaagaggtgtacctcaaattgaagtcacatttgcacttgacgctaatggtattttgaaggtgtctgccacagataagggaactggtaaatccgaatctatcaccatcactaacgataaaggtagattaacccaagaagagattgatagaatggttgaagaggctgaaaaattcgcttctgaagacgcttctatcaaggccaaggttgaatctagaaacaaattagaaaactacgctcactctttgaaaaaccaagttaatggtgacttgggtgaaaaattggaagaagaagacaaggaaaccttattagatgctgctaacgatgttttagaatggttagatgataactttgaaaccgccattgctgaagactttgatgaaaagttcgaatctttgtccaaggtcgcttatccaattacttctaagttgtacggaggtgctgatggttctggtgccgctgattatgacgacgaagatgaagatgacgatggtgattatttcgaacacgacgaattgtga

SEQ ID NO: 6073 - DNA, 2313 bp, Saccharomyces cerevisiae
atggccaaaaaaaatagattgaacacaactcaaagaaagactttacgtcaaaaggaagatgagtacatcgaaaacttgaaaaccaaaattgatgagtatgaccctaagataaccaaggccaagtttttcaaagatctccccattagcgatcccacattaaaaggtttaagagaatcatcctttataaaacttactgagatccaagccgattctattcccgtgtccctgcaaggtcatgatgtattggcggccgcaaagacaggttccggtaagacattagcatttttagttccagtaattgaaaagctataccgcgaaaaatggaccgaattcgatgggttaggtgcccttatcatatctccaacaagagagttggctatgcaaatatatgaggttttgacgaaaataggtagtcacacttcattttcagctgggttagttatcggtggtaaagatgttaaattcgaactagaaaggatatcaaggattaacattcttatcggtacacctggtcgtattttacaacatttagatcaagccgtaggtctaaatacttccaatttgcagatgcttgttcttgacgaagctgatagatgtttagacatggggtttaaaaaaactctggatgccatcgtaagcacattgtcaccatctagacaaacacttttattttcagcgactcaatcacaatctgttgcagacttggctaggctttccttgacagattataaaaccgttggtacacatgatgtgatggatgggtcggttaacaaagaagcatctactccagaaactttgcaacaattctacattgaagttcctttggcagataaattggatatccttttcagttttataaaatcacatttaaaatgcaaaatgatcgttttcttatcaagttccaaacaagtgcattttgtctatgagacatttaggaagatgcagcctggtatttctttaatgcatttacacggtagacagaaacaacgtgctaggacagaaactttggacaaattcaatcgtgctcaacaggtgtgtctttttgctaccgatgtcgttgctagaggtattgactttcctgcagtcgattgggttgttcaagtggattgtccagaggacgttgatacatatatccacagagtcggtagatgtgctcgttacggtaaaaagggtaaatctttaatcatgttgactccacaagagcaggaagcgttcctaaaaagacttaacgctagaaagatcgaaccaggcaaacttaatataaaacagtcaaaaaagaaatccattaaaccacaattgcagtcattattattcaaggatccagaactaaaatatctaggacaaaaggcttttatatcgtacgtgagatctatatatgtgcaaaaggacaaacaagttttcaaattcgatgagttaccaacagaagaattcgcttattctcttggtttaccaggggccccaaaaatcaaaatgaagggtatgaagaccattgagcaggccaaagaaagaaagaatgctccaagacagctagctttcttatcaaaagcaaatgaagatggtgaagtaattgaagataagtcgaaacaaccaagaacaaaatatgataaaatgtttgaacgtaaaaatcaaaccatcttaagtgaacactatttgaatataacgaaggctcaagcacaagaagacgaggatgacgatttcatttctgtcaagcgtaaagatcatgaaataaatgaagctgagttaccagctctaactcttccaacttcaaggcgagcacagaagaaagcgctttcaaagaaggcatctctggcctccaagggtaacgctagcaaattaatatttgatgatgaaggcgaagcccatccagtttatgaacttgaagatgaagaagaatttcataagagaggtgatgcggaggtacaaaagacagaatttttaactaaagaatctgcagtaatggcagacattgacaatattgataagcaggtggctaaagaaaaaaaacaagagaagaagagaaaaagactagaagccatgagaagggaaatggaggctgctatggaagaagaaatttctggagatgaagaagaagggaagacagtagcatatttaggaacaggaaacttgagcgatgatatgagcgacggtgatatgcctgactcggaaggccacttgaaaaagaaagctagaactgttgactattcccacggccacaatccatccaattcagttgatgatgacattattgaagtggaagaaccacaaactttggaggatttggaatctttgacagctaaattaatccagggttaa

SEQ ID NO: 6074 - DNA, 2313 bp, Artificial Sequence
  Description of Artificial Sequence: Synthetic polynucleotide
atggccaaaaaaaatagattgaacacaactcaaagaaagactttacgtcaaaaggaagatgagtacatcgaaaacttgaaaaccaaaattgatgagtatgaccctaagataaccaaggccaagtttttcaaagatctccccattagcgatcccacattaaaaggtttaagagaatcttcctttataaaacttactgagatccaagccgattctattcccgtgtccttacaaggtcatgatgtattggcggccgcaaagacaggttccggtaagacattagcatttttagttccagtaattgaaaagttgtaccgcgaaaaatggaccgaattcgatgggttaggtgcccttatcatatctccaacaagagagttggctatgcaaatatatgaggttttgacgaaaataggtagtcacacttctttttctgctgggttagttatcggtggtaaagatgttaaattcgaattggaaaggatatctaggattaacattcttatcggtacacctggtcgtattttacaacatttagatcaagccgtaggtttgaatacttccaatttgcagatgcttgttcttgacgaagctgatagatgtttagacatggggtttaaaaaaactttagatgccatcgtaagcacattgtctccatctagacaaacacttttattttctgcgactcaatctcaatctgttgcagacttggctaggctttccttgacagattataaaaccgttggtacacatgatgtgatggatgggtctgttaacaaagaagcatctactccagaaactttgcaacaattctacattgaagttcctttggcagataaattggatatccttttcagttttataaaatctcatttaaaatgcaaaatgatcgttttcttatccagttccaaacaagtgcattttgtctatgagacatttaggaagatgcagcctggtatttctttaatgcatttacacggtagacagaaacaacgtgctaggacagaaactttggacaaattcaatcgtgctcaacaggtgtgtctttttgctaccgatgtcgttgctagaggtattgactttcctgcagtcgattgggttgttcaagtggattgtccagaggacgttgatacatatatccacagagtcggtagatgtgctcgttacggtaaaaagggtaaatctttaatcatgttgactccacaagagcaggaagcgttcttgaaaagacttaacgctagaaagatcgaaccaggcaaacttaatataaaacagtccaaaaagaaatccattaaaccacaattgcagtctttattattcaaggatccagaattgaaatatttgggacaaaaggcttttatatcttacgtgagatctatatatgtgcaaaaggacaaacaagttttcaaattcgatgagttaccaacagaagaattcgcttattctcttggtttaccaggggccccaaaaatcaaaatgaagggtatgaagaccattgagcaggccaaagaaagaaagaatgctccaagacagttagctttcttatccaaagcaaatgaagatggtgaagtaattgaagataagagtaaacaaccaagaacaaaatatgataaaatgtttgaacgtaaaaatcaaaccatcttaagtgaacactatttgaatataacgaaggctcaagcacaagaagacgaggatgacgatttcatttctgtcaagcgtaaagatcatgaaataaatgaagctgagttaccagctttgactcttccaacttctaggagagcacagaagaaagcgctttccaagaaggcatctttggcctccaagggtaacgctagcaaattaatatttgatgatgaaggcgaagcccatccagtttatgaacttgaagatgaagaagaatttcataagagaggtgatgcggaggtacaaaagacagaatttttaactaaagaatctgcagtaatggcagacattgacaatattgataagcaggtggctaaagaaaaaaaacaagagaagaagagaaaaagattagaagccatgagaagggaaatggaggctgctatggaagaagaaatttctggagatgaagaagaagggaagacagtagcatatttaggaacaggaaacttgagcgatgatatgagcgacggtgatatgcctgactctgaaggccacttgaaaaagaaagctagaactgttgactattcccacggccacaatccatccaattctgttgatgatgacattattgaagtggaagaaccacaaactttggaggatttggaatctttgacagctaaattaatccagggttga

SEQ ID NO: 6075 - DNA, 984 bp, Saccharomyces cerevisiae
atgcatggcattaaaaggaaacagtggaccaaggaattactgagacaaaagagagttcaagacgaaaagaaaatatatgattatagaagcttgactgaaaatgttttgaatatgagagatgaaaaaatttactcaattgaagctctgaagaaaacatcagaacttcttgagaaaaatccggaatttaatgctatttggaattacagaagggatattatagcgagtttggcttctgagttggaaatacctttctgggataaagagttagtttttgtaatgatgctattgaaggattaccccaaagtctattggatatggaatcacagactttgggtcttgaaacattatcctacgagttcccctaaagtgtggcaaactgaacttgctgtcgtgaataagttattggaacaagatgcaagaaattaccacggatggcattaccgcagaatagttgttggtaacatagagagtatcactaataaaagtcttgacaaggaggagtttgaatacacaacaataaagattaacaataacatttcaaattattctgcatggcaccaaagagtacagatcataagcagaatgtttcagaaaggagaggttgggaatcaaaaggagtatattcggactgaaatatcttatatcatcaacgctatgtttaccgacgccgaagaccaatccgtatggttttatatcaagtggttcattaaaaacgacattgtttgtaaaactctggacgaacaagagtaccttaaaatgttgaaagacttgagagaaaacattctgttaataaataatgacgaaattgaattttccgggaagcaaaatatttggtgcttgaaaattttattagttctcgaagatattctggaagaaaaggaagctctaacggaaagaagctcggaacaatatttggtccaattaatagatgcggatccgttaagaaagaatagatacctacatctcctggagcagcataagtga

SEQ ID NO: 6076 - DNA, 984 bp, Artificial Sequence
  Description of Artificial Sequence: Synthetic polynucleotide
atgcatggcattaaaaggaaacagtggaccaaggaattattaagacaaaagagagttcaagacgaaaagaaaatatatgattatagaagcttgactgaaaatgttttgaatatgagagatgaaaaaatttactctattgaagctttgaagaaaacaagtgaacttcttgagaaaaatccggaatttaatgctatttggaattacagaagggatattatagcgagtttggcttctgagttggaaatacctttctgggataaagagttagtttttgtaatgatgcttttgaaggattaccccaaagtctattggatatggaatcacagactttgggtcttgaaacattatcctacgagttcccctaaagtgtggcaaactgaacttgctgtcgtgaataagttattggaacaagatgcaagaaattaccacggatggcattaccgcagaatagttgttggtaacatagagagtatcactaataaaagtcttgacaaggaggagtttgaatacacaacaataaagattaacaataacatttctaattattctgcatggcaccaaagagtacagatcataagcagaatgtttcagaaaggagaggttgggaatcaaaaggagtatattagaactgaaatatcttatatcatcaacgctatgtttaccgacgccgaagaccaatccgtatggttttatatcaagtggttcattaaaaacgacattgtttgtaaaactttggacgaacaagagtaccttaaaatgttgaaagacttgagagaaaacattttattaataaataatgacgaaattgaattttccgggaagcaaaatatttggtgcttgaaaattttattagttctcgaagatattttggaagaaaaggaagctttgacggaaagaagctctgaacaatatttggtccaattaatagatgcggatccgttaagaaagaatagatacttgcatctcttggagcagcataagtga

SEQ ID NO: 6077 - DNA, 591 bp, Saccharomyces cerevisiae
atgtcacaatcaatatcactaaagggttcaacaaggacagttacagaatttttcgagtacagcattaattccattttgtaccaaagaggcgtatacccagcagaagatttcgtaacggtgaaaaagtacgatcttacgttactaaagacacatgatgatgaactgaaagattacattcggaaaattcttctacaagttcacaggtggcttcttggtggaaaatgcaatcaattagtattatgtattgtagacaaggatgagggagaggtggtggaaagatggtccttcaatgtgcaacacatttctggcaatagcaacgggcaggatgatgttgtagatttaaatacaacacaatcacaaatcagagctttaatcaggcaaatcacctcaagcgttacctttctgcccgaactaacaaaagaaggtgggtacacattcacagtacttgcatatacagacgcggatgctaaagttccgttagaatgggccgactccaatagtaaagagatacctgatggtgaagtagttcaattcaaaacattctctaccaacgatcataaagttggtgcgcaggtcagctataaatattaa

SEQ ID NO: 6078 - DNA, 591 bp, Artificial Sequence
  Description of Artificial Sequence: Synthetic polynucleotide
atgtctcaaagtatatctttgaagggttctacaaggacagttacagaatttttcgagtacagcattaattccattttgtaccaaagaggcgtatacccagcagaagatttcgtaacggtgaaaaagtacgatcttacgttattgaagacacatgatgatgaattgaaagattacattagaaaaattcttttacaagttcacaggtggcttcttggtggaaaatgcaatcaattagtattatgtattgtagacaaggatgagggagaggtggtggaaagatggtccttcaatgtgcaacacatttctggcaatagcaacgggcaggatgatgttgtagatttaaatacaacacaatctcaaatcagagctttaatcaggcaaatcaccagtagcgttacctttttgcccgaattaacaaaagaaggtgggtacacattcacagtacttgcatatacagacgcggatgctaaagttccgttagaatgggccgactccaatagtaaagagatacctgatggtgaagtagttcaattcaaaacattctctaccaacgatcataaagttggtgcgcaggtcagctataaatattga

SEQ ID NO: 6079 - DNA, 2469 bp, Saccharomyces cerevisiae
atgctggaaggtacggtagattatgacccgctggaagatattaccaatatacttttttcaaaagaatccctgaacaacatagatgaactgatcagtattaccagaagctacaaaaagcaattgcaagaggatattctcaaagaagagaatgaattgaaggaacaccctaaaaattccgctgaaatagaggcttctctgaggaaagttttccaagatttcaaagaaactcaagatgtctcagcctccaccgagttgacgatatcgaatctgacagaaggtatctcgtacctggacattgccaagaaaaacctcacccactctttgactcttttccaaaatttaaagatattgacagacagttacatacaatgcaatgaattactctcacagggctcattcaaaaaaatggtgtccccttataagataatgtgttcgcttgctgaaaacacattcatctcttacaaatcattggacgagataaactatttgttgagctccatttcaagactgaaaggagacactttgtccaaaattaaacaaaactacaatgcgctcttttccggcggcaatatctcagagcatgatacagcactcactatggaattgcgcgaaggtgcctgcgagctactcgactgcgatacaagtacgagagcccagatgatagattggtgtttggacaaacttctcttcgaaatgaaagagatatttagggtcgacgatgaagccggatccctagaaaatttatcgagaagatacatttacttcaaaaaaattcttaataacttcaattcaaagttcgcagactatttcttaaaagactgggaaatggcagtcagattgaccaccactttttatcacattacacacaaggaccttcagacacttctgaaaagggaattcaaagacaagaacccttccattgatctattcatgacagcattacaatcgacgctagatttcgaaaaatacatcgacgtacgattttcaaaaaaaattaaggaaccaaaactaagttcctgcttcgaaccttatttgactttatgggtgtctcaccaaaaccaaatgatggaaaagaaatttctttcttatatgagtgagccgaagtacccatctaatgaaacagaatctctcgtgttaccctcgagtgcagaccttttcaggacatatcgttccgtactgactcagaccttagagctcattgataataatgccaatgatagcatattgacttcattggcaaattttttcagtagatggcttcaaacttactcacaaaaaattcttcttcctttactgctgcccgacaatattgaagtccaggataagctagaagctgccaagtataccgttttattgatcaatactgcagattattgtgccacgactatagatcaattggaggataaattatctgaattcagcggtaatcgtgaaaagctggcaaacagttttacgaaaacgaaaaatatatacgacgatttactagcaaaaggaacttcttttctattaaaccgtgtcatacccttagatctaaattttgtatggagagagtttatcaacaatgattggtcaaatgctgcgatagaagattatagcaggtacatggtaaccctcaaatccgtacttaaaatgcccgcattaacagatgcctctattaaacaacagcaagagcaaccttcgactttggcatttattttgtcgcaattcaatagagatgtttataagtggaatttcttggataaggtgattgatatcatcactacaaattttgtaagcaataccatccgccttctgcagcccgttccacccttttccctggcgggcagcaaaaggaaatttgaaaccagaactgttgtcaacattggcgagcagcttctccttgatttagaattgctgaaggagatttttcacactttaccagaaagtgtaagtaacgattctgacttgcgagaaaatacctcttataagagggtgaaaagacatgcagacaataatatagaccagctgctgaagtttattaaacttctaatggctcctctggattccgctgatgactattacgagacctactccaaattgaccaataataaccctgattcagcggtatggtcttttgtcctcgctttaaagggcattccatgggacctggcattatggaaaaagctatggagtgcctacaacttagaaacagacgacactgacgagggcagcaggccagacagtaatcgcgatcttttcatattcaagtgggacaaggtacttttgggtcaatttgaaaacaacttggcaaggatgcaagatccgaattggtcaaaatttgtgaggcaagatctgaaaatatcaccacctgttatgaagaggatagtatccacccctcaaatacaacaacaaaaagaagaacaaaaaaagcaaagtttgagtgtcaaagacttcgtttctcactcaaggttctttaacagaggcacttga

SEQ ID NO: 6080 - DNA, 2469 bp, Artificial Sequence
  Description of Artificial Sequence: Synthetic polynucleotide
atgttggaaggtacggtagattatgacccgttggaagatattaccaatatacttttttccaaagaatccttgaacaacatagatgaattgatcagtattaccagaagctacaaaaagcaattgcaagaggatattctcaaagaagagaatgaattgaaggaacaccctaaaaattccgctgaaatagaggcttctttgaggaaagttttccaagatttcaaagaaactcaagatgtctctgcctccaccgagttgacgatatccaatttgacagaaggtatctcctacttggacattgccaagaaaaacctcacccactctttgactcttttccaaaatttaaagatattgacagacagttacatacaatgcaatgaattactctctcagggcagtttcaaaaaaatggtgtccccttataagataatgtgttctcttgctgaaaacacattcatctcttacaaatctttggacgagataaactatttgttgagctccatttctagattgaaaggagacactttgtccaaaattaaacaaaactacaatgcgctcttttccggcggcaatatctctgagcatgatacagcactcactatggaattgcgcgaaggtgcctgcgagttactcgactgcgatacaagtacgagagcccagatgatagattggtgtttggacaaacttctcttcgaaatgaaagagatatttagggtcgacgatgaagccggatccttagaaaatttatctagaagatacatttacttcaaaaaaattcttaataacttcaattctaagttcgcagactatttcttaaaagactgggaaatggcagtcagattgaccaccactttttatcacattacacacaaggaccttcagacacttttgaaaagggaattcaaagacaagaacccttccattgatcttttcatgacagcattacaatctacgttagatttcgaaaaatacatcgacgtaagattttccaaaaaaattaaggaaccaaaattaagttcctgcttcgaaccttatttgactttatgggtgtctcaccaaaaccaaatgatggaaaagaaatttctttcttatatgagtgagccgaagtacccatctaatgaaacagaatctctcgtgttacccagtagtgcagaccttttcaggacatatcgttccgtattgactcagaccttagagctcattgataataatgccaatgatagcatattgacttctttggcaaattttttcagtagatggcttcaaacttactctcaaaaaattcttcttcctttattattgcccgacaatattgaagtccaggataagttggaagctgccaagtataccgttttattgatcaatactgcagattattgtgccacgactatagatcaattggaggataaattatctgaattcagcggtaatcgtgaaaagttagcaaacagttttacgaaaacgaaaaatatatacgacgatttattggcaaaaggaacttcttttttattaaaccgtgtcatacccttagatttgaattttgtatggagagagtttatcaacaatgattggtctaatgctgcgatagaagattatagcaggtacatggtaaccctcaaatccgtacttaaaatgcccgcattaacagatgcctctattaaacaacagcaagagcaaccttccactttggcatttattttgtctcaattcaatagagatgtttataagtggaatttcttggataaggtgattgatatcatcactacaaattttgtaagcaataccatccgccttttacagcccgttccacccttttccttagcgggcagcaaaaggaaatttgaaaccagaactgttgtcaacattggcgagcagcttctccttgatttagaattgttgaaggagatttttcacactttaccagaaagtgtaagtaacgattctgacttgagagaaaatacctcttataagagggtgaaaagacatgcagacaataatatagaccagttattgaagtttattaaacttttgatggctcctttggattccgctgatgactattacgagacctactccaaattgaccaataataaccctgattctgcggtatggtcttttgtcctcgctttaaagggcattccatgggacttggcattatggaaaaagttatggagtgcctacaacttagaaacagacgacactgacgagggcagcaggccagacagtaatcgcgatcttttcatattcaagtgggacaaggtacttttgggtcaatttgaaaacaacttggcaaggatgcaagatccgaattggtccaaatttgtgaggcaagatttgaaaatatctccacctgttatgaagaggatagtatccacccctcaaatacaacaacaaaaagaagaacaaaaaaagcaaagtttgagtgtcaaagacttcgtttctcactctaggttctttaacagaggcacttga

SEQ ID NO: 6081 - DNA, 336 bp, Saccharomyces cerevisiae
atggccctgtggggtagaagtgcctacagacaaaaaaccgttacgtcccgcctcaccaagcatcgacacacaagccctctcaacctccttaatttctttatctttttttcccttcacctctgtgctctttttttagccacagctgtgcattacgcttgctttgcttgttttgttctctttcgccatgccatattactacttttctacttactggcacgaggccgcgcaagccagatccaagcacgccagaaagtgcggtgtactggtgcaaccttttatcgatttctcatcatatcgctatcgcaacgggcatgggcgacgaaaaagccaatctaa

SEQ ID NO: 6082 - DNA, 336 bp, Artificial Sequence
  Description of Artificial Sequence: Synthetic polynucleotide
atggccttatggggtagaagtgcctacagacaaaaaaccgttacgtcccgcctcaccaagcataggcacacaagccctctcaacctccttaatttctttatctttttttcccttcacctctgtgctctttttttagccacagctgtgcattacgcttgctttgcttgttttgttctctttcgccatgccatattattacttttctacttattggcaagaggccgcgcaagccagatccaagcacgccagaaagtgaggtgtactggtgcaaccttttataggtttctcatcatatctttatctcaaagagcatgggcgacgaaaaagccaatctga

SEQ ID NO: 6083 - DNA, 417 bp, Saccharomyces cerevisiae
atgatggtaacgcgcaaacactaccgctatatatacctacaaaactctcattctctcatttcctgcttcgttcatttcgagtttccaagggtatggtacggtgctatctgcccgtgcttcccctcctttgctttgctaagaaaaattttcttttgtcagcagcaacaacacgctacgctctgcgctgtgctacgaagtggtctctgtggcaacggggacattgtacccatgcccgctcgcagggaggtctgggtgtggggcgtgtgcgacctcgttgccatggcgatcgcgcgtgggtgtggtctttccccaaacggttgcccgttgctccggatttcgcatagttgtcgcgtaaacaaaaaacacgagagagggcggacggcgctgaatagtggaagatcgcgcgatgtcaagtaa

SEQ ID NO: 6084 - DNA, 417 bp, Artificial Sequence
  Description of Artificial Sequence: Synthetic polynucleotide
atgatggtaacgcgcaaacactaccgctatatatacttacaaaactctcattctctcatttcctgcttcgttcatttcgagtttccaagggtatggtacggtgctatctgcccgtgcttcccctcctttgctttgttaagaaaaattttcttttgtcagcagcaacaacacgctacgctctgcgctgtgttgagaagtggtctctgtggcaacggggacattgtacccatgcccgctcgcagggaggtctgggtgtggggcgtgtgcgacctcgttgccatggcgatcgcgcgtgggtgtggtctttccccaaacggttgcccgttgctcagaatttctcatagttgtcgcgtaaacaaaaaacacgagagagggagaacggcgttgaatagtggaagatctcgcgatgtcaagtga

SEQ ID NO: 6085 - DNA, 1200 bp, Saccharomyces cerevisiae
atgcctaaagagaccccttccaaagctgctgccgatgcattgtccgacttggaaatcaaagattccaagtccaaccttaacaaggaattggagacattgagagaggaaaacagagtaaagtcagacatgcttaaggagaaattgagcaaggacgctgaaaatcacaaggcttacttgaaatctcatcaagttcaccgtcacaaacttaaggaaatggaaaaggaggaacctttgttgaatgaagacaaggagagaactgttcttttccctatcaagtaccatgaaatctggcaagcctacaagcgtgccgaagcttctttctggaccgctgaagaaattgatttgtctaaggatatccatgactggaacaacagaatgaacgaaaacgagagatttttcatttccagagttcttgcctttttcgccgcttctgacggtattgttaatgaaaacttggttgaaaacttctccaccgaagtccaaattccagaggcaaagagtttctacggtttccaaatcatgattgaaaatattcactctgaaacttactccttgttgatcgatacttacatcaaggaccctaaagaaagtgaattcttgttcaatgccattcacaccatcccagaaatcggtgagaaggccgaatgggctttaagatggattcaagacgctgacgccttgtttggtgaaagactagttgcctttgcctccattgaaggtgtctttttctccggttcctttgcctccattttctggttgaaaaagagaggtatgatgcccggtttaaccttttccaacgaattgatctgtagagacgaaggtttgcacaccgactttgcatgcttgttgttcgcccatttgaagaacaaaccagacccagccattgttgaaaaaattgtcaccgaggctgtggaaattgaacaaagatacttcttggacgccttaccagttgctttgctaggtatgaacgctgacttaatgaaccaatacgttgagttcgtcgccgacagactgttggttgctttcggtaacaagaaatactacaaggtcgaaaaccccttcgatttcatggaaaacatctccttggccggtaagaccaacttcttcgaaaagagagtttctgactaccaaaaggctggtgttatgtccaagtcgactaagcaagaagccggtgctttcaccttcaacgaagacttttaa

SEQ ID NO: 6086 - DNA, 1200 bp, Artificial Sequence
  Description of Artificial Sequence: Synthetic polynucleotide
atgcctaaagagaccccttccaaagctgctgccgatgcattgtccgacttggaaatcaaagattccaagtccaaccttaacaaggaattggagacattgagagaggaaaacagagtaaagagtgacatgcttaaggagaaattgagcaaggacgctgaaaatcacaaggcttacttgaaatctcatcaagttcaccgtcacaaacttaaggaaatggaaaaggaggaacctttgttgaatgaagacaaggagagaactgttcttttccctatcaagtaccatgaaatctggcaagcctacaagcgtgccgaagcttctttctggaccgctgaagaaattgatttgtctaaggatatccatgactggaacaacagaatgaacgaaaacgagagatttttcatttccagagttcttgcctttttcgccgcttctgacggtattgttaatgaaaacttggttgaaaacttctccaccgaagtccaaattccagaggcaaagagtttctacggtttccaaatcatgattgaaaatattcactctgaaacttactccttgttgatcgatacttacatcaaggaccctaaagaaagtgaattcttgttcaatgccattcacaccatcccagaaatcggtgagaaggccgaatgggctttaagatggattcaagacgctgacgccttgtttggtgaaagattggttgcctttgcctccattgaaggtgtctttttctccggttcctttgcctccattttctggttgaaaaagagaggtatgatgcccggtttaaccttttccaacgaattgatctgtagagacgaaggtttgcacaccgactttgcatgcttgttgttcgcccatttgaagaacaaaccagacccagccattgttgaaaaaattgtcaccgaggctgtggaaattgaacaaagatacttcttggacgccttaccagttgctttgttgggtatgaacgctgacttaatgaaccaatacgttgagttcgtcgccgacagattattggttgctttcggtaacaagaaatactacaaggtcgaaaaccccttcgatttcatggaaaacatctccttggccggtaagaccaacttcttcgaaaagagagtttctgactaccaaaaggctggtgttatgtccaagtctactaagcaagaagccggtgctttcaccttcaacgaagacttttga

SEQ ID NO: 6087 - DNA, 1545 bp, Saccharomyces cerevisiae
atgtctactttcataagaggtcccatctgcggtacagacaactgcccctcacggctttggcgtatcattgatgggagaagaacctgccaatatggtcacgttatggaaggtgacgtggaatttaacgacgatgaagatgatctcaacggcctcggtgcaggtgttatcacaagacgtctgaatcttaccaccaatgccactggtagttttcaatctagtcaacttaccaactcgcaactgctgcaacaacagcaaaggcaatctcataaaaaatttaaaaaacttatcggtcatgaggccaaattactatttctcaaatccttccagttcatcttgaaaaggcaaatccgctggctcataactgaaatgcggtttccgaaagagttcgaacatgtcgccaagataatttggctcaagatattaaagacgattaacgaccaaccgcaagaagaactaaaacttcaattacatatgacttcgacaatttcgatcctctaccttgcatccactcatttgtccctaccagtttatacctgtgactacatcaaatggatatgcaccgccaaaatgccgtatttccaggcaagtgaaatactaccgaaatcgtggaggatccagctgccaaattattatgtttccatactagagggctcaatttcaccttttaatgggcaactgtacaacaaaatcgcattgacgtgtggtatgatccacttcaaagaattcttcaactctgaaatttcgtgtcagggcttattactgaaactagtgatgcaatgcgctcttcctccagaattttatttttataccaaacaagttatcgaatttgaagaaacagacattcggaacctgacactgtgggaaagaacggacgaacgtcacacagggcgagtaagtaatcatgccgaactcagggtcctctcttattttatgctcacaataaattggatgctttcttttgatagagaccgacaatacccactaaaatggatcctttccctcacggaatcattgactcagcgcacaaccacaagtgaatctatcggcagaaatatcgttaaagtggtttacccagacaaaccgacttctagtgattatttccagtggtctgaggaggagaccctagagtttttgaagtggatggaaaagcaatttttgcccacacaaacaaaatctttgcataatgagaatggttcgatggagatgacaattgatcaaaaaattgctagaaggaaactgtacaagattttccccttggatcgagaggccaatcatgatggcgaatttaatgactcaacgcatcagttaacttttattgaagatctgcaagaaagatacgctaaacaaacccccttttttgaaagcaacaaaatacgtgattctctcaattatcaagaggctaatccaccggccagaaaggaggctatcggtagacttctaacccatatagcatcacagcttttagtggattttgccatttctaaagagcaactgaaagactgcatttcaaggatcaaaaatgcctgtctgcataggatgaattga

SEQ ID NO: 6088 - DNA, 1545 bp, Artificial Sequence
  Description of Artificial Sequence: Synthetic polynucleotide
atgtctactttcataagaggtcccatctgcggtacagacaactgccccagtagactttggcgtatcattgatgggagaagaacctgccaatatggtcacgttatggaaggtgacgtggaatttaacgacgatgaagatgatctcaacggcctcggtgcaggtgttatcacaagacgtttgaatcttaccaccaatgccactggtagttttcaatctagtcaacttaccaactctcaattattacaacaacagcaaaggcaatctcataaaaaatttaaaaaacttatcggtcatgaggccaaattactttttctcaaatccttccagttcatcttgaaaaggcaaatccgctggctcataactgaaatgagatttccgaaagagttcgaacatgtcgccaagataatttggctcaagatattaaagacgattaacgaccaaccgcaagaagaattgaaacttcaattacatatgacttctacaatttccatcctctaccttgcatccactcatttgtccttgccagtttatacctgtgactacatcaaatggatatgcaccgccaaaatgccgtatttccaggcaagtgaaatattaccgaaaagttggaggatccagttaccaaattattatgtttccatattggagggctccatttctccttttaatgggcaattgtacaacaaaatcgcattgacgtgtggtatgatccacttcaaagaattcttcaactctgaaattagttgtcagggcttattattgaaattagtgatgcaatgcgctcttcctccagaattttatttttataccaaacaagttatcgaatttgaagaaacagacattagaaacttaacattatgggaaagaacggacgaacgtcacacagggagagtaagtaatcatgccgaactcagggtcctctcttattttatgctcacaataaattggatgctttcttttgatagagacagacaatacccattgaaatggatcctttccctcacggaatctttgactcagcgcacaaccacaagtgaatctatcggcagaaatatcgttaaagtggtttacccagacaaaccgacttctagtgattatttccagtggtctgaggaggagaccttagagtttttgaagtggatggaaaagcaatttttgcccacacaaacaaaatctttgcataatgagaatggttctatggagatgacaattgatcaaaaaattgctagaaggaaactttacaagattttccccttggatagagaggccaatcatgatggcgaatttaatgacagtacgcatcagttaacttttattgaagatttgcaagaaagatacgctaaacaaacccccttttttgaaagcaacaaaatacgtgattctctcaattatcaagaggctaatccaccggccagaaaggaggctatcggtagacttttaacccatatagcatcccagcttttagtggattttgccatttctaaagagcaattgaaagactgcatttctaggatcaaaaatgcctgtttgcataggatgaattga

SEQ ID NO: 6089 - DNA, 585 bp, Saccharomyces cerevisiae
atgattcatgcagttctaatattcaataagaaatgccaaccaagattagtgaaattctacacgccggtcgaccttccaaagcaaaaactgctattagagcaagtatatgaattgatttctcaaaggaatagcgattttcaaagttcttttttagtcacgccaccatcgcttctgttaagcaatgaaaataataatgatgaggtaaacaatgaagatattcaaatcatctataaaaactacgctacactatatttcactttcatcgtggatgatcaagaatcagaactggccatattagatctgatccaaacttttgtggaatcattggaccgttgttttactgaagtcaatgaacttgatttgatttttaactggcaaactttggaaagtgtattagaagaaatcgtgcaggggggcatggtcattgaaacaaatgtgaacagaatagttgcttctgttgacgaactcaacaaagctgccgagtccacagatagtaaaattggaagactaacgtccactggatttggaagcgcactacaagcgtttgctcaaggcggatttgcacaatgggcaacggggcaataa

SEQ ID NO: 6090 - DNA, 585 bp, Artificial Sequence
  Description of Artificial Sequence: Synthetic polynucleotide
atgattcatgcagttttgatattcaataagaaatgccaaccaagattagtgaaattctacacgccggtcgaccttccaaagcaaaaattattattagagcaagtatatgaattgatttctcaaaggaatagcgattttcaaagttcttttttagtcacgccaccaagtcttttattaagcaatgaaaataataatgatgaggtaaacaatgaagatattcaaatcatctataaaaactacgctacattatatttcactttcatcgtggatgatcaagaaagtgaattggccatattagatttgatccaaacttttgtggaatctttggaccgttgttttactgaagtcaatgaacttgatttgatttttaactggcaaactttggaaagtgtattagaagaaatcgtgcaggggggcatggtcattgaaacaaatgtgaacagaatagttgcttctgttgacgaactcaacaaagctgccgagtccacagatagtaaaattggaagattgacgtccactggatttggaagcgcattacaagcgtttgctcaaggcggatttgcacaatgggcaacggggcaatga

SEQ ID NO: 6091 - DNA, 1044 bp, Saccharomyces cerevisiae
atgaagatattctccacactcttatcgcaaaaacctaaaggcaaactggtaattcgaccatcaaccactatacatagtagtgatcccttttcaaaatttatagtgacgaagaataccgagcctctttctcttggtgaccttcgaaaaagcgattcaggaaattcagctgtgtgcttaaatgctgaaaatactatattaagtacgctaactgatttacaaaaagaagaagaaagaaactgggatccagtgaaatttgttgctggtaaacttcgaggtgtaatttcacccatccaagcctatgtgacgattggaaaaaaattttcccctaactcattggtatacactagtagattctttcaacttcattacttccctgaagaccattttatgtcttgttttagaaaaagtaaaccagcaataacggtaaaatccaataagaagttttatttaaatgggaaggttttcaacaaggacaaagaatatttcaatgaaactaggatatcaaaagctaatgaagtcgaactaagcaaaattcaaacagcgatgacacggcttacaaatagacatagaaacagtattccctctgaatttgcgtacttgagacgagatttaaaattaaaggtgaaaacaacgtttatcaaggagtggtgtaaactaaatggtgataaggccattcgagagtacgttaatcttaacagatctccaaatattaatcctgctagcatgaagggcaagccaaagaaaagttttttagataaccttggtagaagtactgtgggaaccgcaaaggacggctattatttatacattgttagcatatttcctgataaagatatgttaggagaatttaatgacgaggtcaatagaagcgttcaaaaggttgccaatttggattgggatgggttcttgaccccaaaaaaaggcacgaaaggcaaaaattgggtagaatcgttcaatgacagtataaacgttcaaacaattaacaagatactcgagatcaacaagtttccatttgaattaagaagagaacaaacagaaggctga

SEQ ID NO: 6092 - DNA, 1044 bp, Artificial Sequence
  Description of Artificial Sequence: Synthetic polynucleotide
atgaagatattctccacactcttatctcaaaaacctaaaggcaaattagtaattagaccatctaccactatacatagtagtgatcccttttccaaatttatagtgacgaagaataccgagcctctttctcttggtgaccttagaaaaagcgattctggaaattctgctgtgtgcttaaatgctgaaaatactatattaagtacgttgactgatttacaaaaagaagaagaaagaaactgggatccagtgaaatttgttgctggtaaacttcgtggtgtaatttctcccatccaagcctatgtgacgattggaaaaaaattttcccctaactctttggtatacactagtagattctttcaacttcattacttccctgaagaccattttatgtcttgttttagaaaaagtaaaccagcaataacggtaaaatccaataagaagttttatttaaatgggaaggttttcaacaaggacaaagaatatttcaatgaaactaggatatccaaagctaatgaagtcgaattgagcaaaattcaaacagcgatgacaagacttacaaatagacatagaaacagtattccctctgaatttgcgtacttgagaagagatttaaaattaaaggtgaaaacaacgtttatcaaggagtggtgtaaattgaatggtgataaggccattagagagtacgttaatcttaacagatctccaaatattaatcctgctagcatgaagggcaagccaaagaaaagttttttagataaccttggtagaagtactgtgggaaccgcaaaggacggctattatttatacattgttagcatatttcctgataaagatatgttaggagaatttaatgacgaggtcaatagaagcgttcaaaaggttgccaatttggattgggatgggttcttgaccccaaaaaaaggcacgaaaggcaaaaattgggtagaatctttcaatgacagtataaacgttcaaacaattaacaagatactcgagatcaacaagtttccatttgaattaagaagagaacaaacagaaggctga

SEQ ID NO: 6093 - DNA, 3474 bp, Saccharomyces cerevisiae
atgagtgaacccgaagtgcccttcaaggtggtggctcagttcccatacaagtccgattacgaggacgatttaaattttgaaaaagatcaagagattattgttacgtctgttgaagacgccgaatggtactttggtgaataccaggattcaaatggcgacgttattgagggtatcttcccgaaaagttttgttgctgttcagggatctgaagttggaaaggaagccgaatcatctccgaataccggttccactgagcaacgtacaatccagccggaagtagaacaaaaggacctaccagagcccatttcccctgaaacgaagaaagaaactctgtccgggccagtgccagttccagccgctacagtgccagttccagccgctacagtgccagttccagccgctacagcagtatcagcacaggtccagcatgatagtagtagtggtaatggcgaaagaaaagttcccatggattctccaaaattgaaggctcgcttatctatgtttaatcaagatataacggagcaagttcctttaccaaaatcaactcacttggatttagaaaacatacctgtgaaaaaaacaattgtggcagatgctcctaaatactatgtcccccctggaattccaacaaatgatacgtccaatcttgaaaggaaaaagtccctaaaggaaaacgaaaaaaagattgttcccgaaccaattaatcgtgcacaggtggaaagtggaagaatagaaactgagaatgaccaattaaagaaggatttgccccagatgagccttaaagaaagaattgctcttttacaggagcaacaaagattacaggctgcaagagaagaagaactcttgagaaaaaaggctaagctcgaacaagaacatgaacgtagtgcggttaacaagaatgagccctatacggaaactgaagaagcagaagaaaatgaaaaaactgaaccgaaacctgaatttacgcctgaaactgagcacaacgaggaaccgcaaatggaattattggcacataaagagattactaaaacctcacgcgaagcagatgaaggcacgaatgacatagagaaagaacaatttttagatgagtacacaaaggaaaatcagaaagttgaggagtcacaagcagacgaggcaagaggagaaaatgttgctgaggaaagcgaaataggttacggccatgaagacagagagggagataatgatgaggaaaaagaagaggaagatagtgaagagaatcgtagggccgcattgagagaaagaatggctaaactatctggcgctagtagattcggtgctcctgttggttttaaccccttcggtatggcttctggagttggaaataaaccatcagaagagccgaaaaagaaacagcataaggagaaggaggaggaggaacctgaacagctccaagaactacctcgtgccatacctgttatgccatttgttgacccaagttctaacccattttttaggaaatcaaatctaagtgagaagaatcaacccactgaaacaaagacgctagatcctcatgcaaccacagagcatgaacagaagcaagaacatggtacacacgcctatcacaatttagctgctgttgataatgcacatcccgaatactctgaccatgattctgatgaagatactgacgaccacgagtttgaggatgcaaacgatgggttgagaaagcattcgatggtggagcaagcttttcagataggtaataatgagtcagagaatgttaattccggagaaaaaatttaccctcaagaaccaccaatctcccaccgtactgcagaagtatcacatgatattgaaaattcatcacaaaacacaactggaaatgttttgcctgtctcttccccacaaacaagagttgctcgcaacgggtcgataaattctttgactaaatccatttcaggggaaaatcggcggaaatccataaacgagtatcatgatacagtttccactaattcatctgcattaacagaaaccgctcaagatatttcgatggcagctccagcagctccagttctaagtaaggtgtcacatcctgaggacaaggtgccacctcacccagtgccttctgcaccctctgcacctccagtaccctctgcaccttcagtaccctctgcacctccagtacctccagcacctccagcactctctgcaccttcagtacccccagtacccccagtacctccagtatcttcagcacctccagcactctcagcaccttcaatacctccagtacctccaacacctccagcacctccagcacctccagcgcctcttgcgctgcctaaacacaatgaagtagaagaacatgtcaagtcatctgctccccttccacctgtatccgaggaatatcatcctatgccaaatactgctccgccacttccacgtgcaccaccagtaccaccggctacttttgaatttgactctgaaccaacagccactcattcacatacagctccttctcctccaccacatcaaaatgtcacggcctctacaccttcaatgatgagtacgcaacaacgtgtgccaacctcagtactatctggggcagaaaaagaatcacgaaccctaccgccccatgtgccttcattgacgaatcgtcctgtggattcattccatgagtcagatactacaccgaaggtggcctctataagaaggtcaacgacgcatgatgtaggcgagatttccaacaacgtcaagatagagtttaatgcacaagaaagatggtggattaataaaagcgcacctcctgctataagcaatctgaagttgaactttttgatggagatcgatgatcatttcatttccaaaagattacatcaaaaatgggtggtaagggatttttacttcttgtttgaaaactattcgcaactaagattctccttgacctttaatagtacaagcccagagaaaacggtaacgactcttcaagaacgctttccatcgccagtcgaaacacaatcagcacgtattcttgatgaatacgctcaaaggtttaatgcgaaagttgtagagaaatctcattcattgataaattcacatattggggctaagaatttcgtgtcacaaattgtatccgaattcaaagacgaagttatacaacccataggagcaagaacgtttggcgcaactatattgagttataaacctgaagaaggaatcgaacagttgatgaagagcttacagaagattaaaccaggtgacattcttgtaattagaaaggccaaatttgaagctcataaaaagatcggaaaaaacgaaattatcaacgttggaatggactccgccgctccgtattcgagtgttgttactgattatgattttacaaagaataagtttagagttatcgaaaatcacgagggaaagattattcaaaacagctacaagctaagccatatgaaaagtgggaagttaaaggttttcagaattgttgcgagaggatacgtaggttggtaa

SEQ ID NO: 6094 - DNA, 3474 bp, Artificial Sequence
  Description of Artificial Sequence: Synthetic polynucleotide
atgagtgaacccgaagtgcccttcaaggtggtggctcagttcccatacaagtccgattacgaggacgatttaaattttgaaaaagatcaagagattattgttacgtctgttgaagacgccgaatggtactttggtgaataccaggattctaatggcgacgttattgagggtatcttcccgaaaagttttgttgctgttcagggatctgaagttggaaaggaagccgaaagctctccgaataccggttccactgagcaacgtacaatccagccggaagtagaacaaaaggacttaccagagcccatttcccctgaaacgaagaaagaaactttatccgggccagtgccagttccagccgctacagtgccagttccagccgctacagtgccagttccagccgctacagcagtatctgcacaggtccagcatgatagtagtagtggtaatggcgaaagaaaagttcccatggattctccaaaattgaaggctcgcttatctatgtttaatcaagatataacggagcaagttcctttaccaaaatctactcacttggatttagaaaacatacctgtgaaaaaaacaattgtggcagatgctcctaaatactatgtcccccctggaattccaacaaatgatacgtccaatcttgaaaggaaaaagtccttgaaggaaaacgaaaaaaagattgttcccgaaccaattaatcgtgcacaggtggaaagtggaagaatagaaactgagaatgaccaattaaagaaggatttgccccagatgagccttaaagaaagaattgctcttttacaggagcaacaaagattacaggctgcaagagaagaagaactcttgagaaaaaaggctaagctcgaacaagaacatgaacgtagtgcggttaacaagaatgagccctatacggaaactgaagaagcagaagaaaatgaaaaaactgaaccgaaacctgaatttacgcctgaaactgagcacaacgaggaaccgcaaatggaattattggcacataaagagattactaaaaccagtcgcgaagcagatgaaggcacgaatgacatagagaaagaacaatttttagatgagtacacaaaggaaaatcagaaagttgaggagtctcaagcagacgaggcaagaggagaaaatgttgctgaggaaagcgaaataggttacggccatgaagacagagagggagataatgatgaggaaaaagaagaggaagatagtgaagagaatcgtagggccgcattgagagaaagaatggctaaattatctggcgctagtagattcggtgctcctgttggttttaaccccttcggtatggcttctggagttggaaataaaccatctgaagagccgaaaaagaaacagcataaggagaaggaggaggaggaacctgaacagctccaagaattacctcgtgccatacctgttatgccatttgttgacccaagttctaacccattttttaggaaatctaatttgagtgagaagaatcaacccactgaaacaaagacgttagatcctcatgcaaccacagagcatgaacagaagcaagaacatggtacacacgcctatcacaatttagctgctgttgataatgcacatcccgaatactctgaccatgattctgatgaagatactgacgaccacgagtttgaggatgcaaacgatgggttgagaaagcattctatggtggagcaagcttttcagataggtaataatgagagtgagaatgttaattccggagaaaaaatttaccctcaagaaccaccaatctcccaccgtactgcagaagtatctcatgatattgaaaattcttctcaaaacacaactggaaatgttttgcctgtctcttccccacaaacaagagttgctcgcaacgggtccataaattctttgactaaatccatttctggggaaaatagaagaaaatccataaacgagtatcatgatacagtttccactaattcttctgcattaacagaaaccgctcaagatatttccatggcagctccagcagctccagttttgagtaaggtgtctcatcctgaggacaaggtgccacctcacccagtgccttctgcaccctctgcacctccagtaccctctgcaccttctgtaccctctgcacctccagtacctccagcacctccagcactctctgcaccttctgtacccccagtacccccagtacctccagtatcttctgcacctccagcactctctgcaccttccatacctccagtacctccaacacctccagcacctccagcacctccagcgcctcttgcgttacctaaacacaatgaagtagaagaacatgtcaagtcttctgctccccttccacctgtatccgaggaatatcatcctatgccaaatactgctccgccacttccacgtgcaccaccagtaccaccggctacttttgaatttgactctgaaccaacagccactcattctcatacagctccttctcctccaccacatcaaaatgtcacggcctctacaccttctatgatgagtacgcaacaacgtgtgccaacctctgtattatctggggcagaaaaagaatctcgtaccttaccgccccatgtgccttctttgacgaatcgtcctgtggattctttccatgagtctgatactacaccgaaggtggcctctataagaaggtctacgacgcatgatgtaggcgagatttccaacaacgtcaagatagagtttaatgcacaagaaagatggtggattaataaaagcgcacctcctgctataagcaatttgaagttgaactttttgatggagatcgatgatcatttcatttccaaaagattacatcaaaaatgggtggtaagggatttttacttcttgtttgaaaactattctcaattgagattctccttgacctttaatagtacaagcccagagaaaacggtaacgactcttcaagaacgctttccatctccagtcgaaacacaaagtgcacgtattcttgatgaatacgctcaaaggtttaatgcgaaagttgtagagaaatctcattctttgataaattctcatattggggctaagaatttcgtgagtcaaattgtatccgaattcaaagacgaagttatacaacccataggagcaagaacgtttggcgcaactatattgagttataaacctgaagaaggaatcgaacagttgatgaagagcttacagaagattaaaccaggtgacattcttgtaattagaaaggccaaatttgaagctcataaaaagatcggaaaaaacgaaattatcaacgttggaatggactccgccgctccgtattctagtgttgttactgattatgattttacaaagaataagtttagagttatcgaaaatcacgagggaaagattattcaaaacagctacaagttgagccatatgaaaagtgggaagttaaaggttttcagaattgttgcgagaggatacgtaggttggtga

SEQ ID NO: 6095 - DNA, 2049 bp, Saccharomyces cerevisiae
atgaataactcaaatgagcataggcgggaagaggcaggagcggctaatgaacaaatgccttacaataaggctgtaaagtccgcgtatgcagatgtcctcaaggacaaaatgaatagggaacaggagattagcctacgagccatcaaaaaagggatatacaccgatggcggtgaaactgacaactatgatatggataaagagaatgattccgcgtacgaaatgttcaaaaaaaatcttgattttccgttagaccaacataatgatgacgacgatgatgatccgtacattgaggataatggacaagagaccgacggatatagcgacgaggactatacagatgaggcagacaagagttttatagaagacagcgattccgacagctacgatttggaaagtaattctgactttgaagagaacttggaaagttcaggtgaagctaagaagttgaagtggcggacgtacattttctatggaggccttttcttcgttttttatttttttggatcttttttgatgacaaccgtgaaaaataatgatttagaaagccattcatccggcgctacatcctctccaggcaaatcattcagcaacctacaaaaacaggtgaatcatttatatagtgagttgagtaagcgggacgaaaagcacagttcagaattggataaaacagtaaaaatcattgtctctcaatttgaaaagaatattaaaagacttttaccctcaaatttggttaattttgaaaatgacattaactcgctgacaaaacaggttgagacaatttcaacttccatgagtgagttacagaggcgaaatcacaaatttacggtcgagaatgttactcaatggcaagatcaactggtaaaacagttggatacacacctccctcaagaaatacccgttgtaattaataattcttcgtcgcttttaataatccctgaattgcacaattatttgagtgctttgatttcagacgttattgagtctccaggcattggtactgctggaagcgctgaaagtcgttgggagtatgatttgaatcgctatgtaaaggaaattctttcgaatgagttgcaatatatcgataaggattatttcatccaagaaatgaacagaaggttgcaatctaacaaacaggagatttgggaagagatcacaaataggttagagacacagcagcagcagcagcagcagcaggttcaacaggattattctaacgtgccacagcagtattcgagcatattaatgaaaagattaattcaccaaatttacaattccaatcaacaccaatgggaggacgatttagattttgctacttatgttcaaggtactaaactattgaaccatttaacttcaccaacctggagacagggcagtggggtacagccgatagaattactgaccgactccaaacaaagctcctcaacttactggcaatgtgagaacgaacctgggtgttcatgggccataaggtttaaaactcctttgtatctaaccaaaatttcgtacatgcatggccgttttactaataacctacatataatgaactcagcaccaagactgatctcattatatgtaaaactgtcacagactaaagagatcaaagcattgcagacattggcaaatcaatacggtttcgggcagcatcacaagagagaccgaaattacatcaagatcgcaaaatttgagtacaggttgacagattctagaatacgccaacaaatgtatctgcccccatggttcattcagttaaaaccactcgtacgctcaattgtctttcaagtggacgagaactacgggaacaaaaagttcatatctctgaggaaatttatcatcaacggagtgacaccgcaggatttgcaaataattgaaaataacgagttccctgttttactgggtgacaccccagaatatggtgtcactcagaacaccgacgaaggcaagaggaaagttctcctatcaaagcctccttacgcgtcttcatctactagtaccaagtttcatcccgcttctaacgtcccatcatttggccaagatgagctagatcaataa

SEQ ID NO: 6096 - DNA, 2049 bp, Artificial Sequence
  Description of Artificial Sequence: Synthetic polynucleotide
atgaataacagtaatgagcataggagagaagaggcaggagcggctaatgaacaaatgccttacaataaggctgtaaagtccgcgtatgcagatgtcctcaaggacaaaatgaatagggaacaggagattagcttaagagccatcaaaaaagggatatacaccgatggcggtgaaactgacaactatgatatggataaagagaatgattccgcgtacgaaatgttcaaaaaaaatcttgattttccgttagaccaacataatgatgacgacgatgatgatccgtacattgaggataatggacaagagaccgacggatatagcgacgaggactatacagatgaggcagacaagagttttatagaagacagcgattccgacagctacgatttggaaagtaattctgactttgaagagaacttggaaagttctggtgaagctaagaagttgaagtggagaacgtacattttctatggaggccttttcttcgttttttatttttttggatcttttttgatgacaaccgtgaaaaataatgatttagaaagccattcttccggcgctacatcctctccaggcaaatctttcagcaacttacaaaaacaggtgaatcatttatatagtgagttgagtaagagagacgaaaagcacagttctgaattggataaaacagtaaaaatcattgtctctcaatttgaaaagaatattaaaagacttttaccctccaatttggttaattttgaaaatgacattaactctttaacaaaacaggttgagacaatttctacttccatgagtgagttacagaggagaaatcacaaatttacggtcgagaatgttactcaatggcaagatcaattggtaaaacagttggatacacacctccctcaagaaatacccgttgtaattaataattcttcttctcttttaataatccctgaattgcacaattatttgagtgctttgatttctgacgttattgagtctccaggcattggtactgctggaagcgctgaaagtcgttgggagtatgatttgaatcgctatgtaaaggaaattctttctaatgagttgcaatatatcgataaggattatttcatccaagaaatgaacagaaggttgcaatctaacaaacaggagatttgggaagagatcacaaataggttagagacacagcagcagcagcagcagcagcaggttcaacaggattattctaacgtgccacagcagtattctagcatattaatgaaaagattaattcaccaaatttacaattccaatcaacaccaatgggaggacgatttagattttgctacttatgttcaaggtactaaacttttgaaccatttaacttctccaacctggagacagggcagtggggtacagccgatagaattattaaccgactccaaacaaagctccagcacttactggcaatgtgagaacgaacctgggtgttcttgggccataaggtttaaaactcctttgtatttgaccaaaatttcttacatgcatggccgttttactaataacttacatataatgaactctgcaccaagattgatctctttatatgtaaaattatctcagactaaagagatcaaagcattgcagacattggcaaatcaatacggtttcgggcagcatcacaagagagacagaaattacatcaagatcgcaaaatttgagtacaggttgacagattctagaatacgccaacaaatgtatttacccccatggttcattcagttaaaaccactcgtacgctccattgtctttcaagtggacgagaactacgggaacaaaaagttcatatctttgaggaaatttatcatcaacggagtgacaccgcaggatttgcaaataattgaaaataacgagttccctgttttattgggtgacaccccagaatatggtgtcactcagaacaccgacgaaggcaagaggaaagttctcttgtccaagcctccttacgcgtcttcttctactagtaccaagtttcatcccgcttctaacgtcccatcttttggccaagatgagttagatcaatga

SEQ ID NO: 6097 - DNA, 1686 bp, Saccharomyces cerevisiae
atgggcattttggactcgctgaaaaaacctgttaatatcaagagttcgctccccaaattctcccgcagtgctaccagcatcaatttaagtagccacccagtaagttcacggtccttcctcgaattaccaccagagcttttcagcatcactaaacctatatttaagcttctgcaagcacacgcaaataagatttacttccaatcttccgacgctgaggctgtatggaatgttaaggattcttctggacatgtttttgaagcagagtcaatttctttgctcggctctcatataattatcacaaattcctctgtacaagtcgcagacgtggccatcatagattccccttccaacataaaccaatgtgaaatttcaagcgttggagagttcctgcaattcaataatggccaactatctatcacatgtaacgattttggtttactggagaagttcaaaaggttgtgtatgatttctatttttgagttcatttctatatataaggccttgacaggcacagtgatttcctcttatgggctgagaatgtctgatatgcatatcattttgaactcgccgttcaattttaaggattggtgtgaagtttatcttgatggtcaaggttgggtgaaagtgtggtgtcatattgataaagtgtctaaaaccaataattctaaaagtagtagtgacaatgatgctaaaggaaagtatcaaatacggttttatagagatgacaaatccacatctagcaagaactgcgttttttttattcctgacaatgagtacgttcaagatattttcttttataacatcaatgcggcagaaccttctaaaaatatgaacgacttttttcaagggttgcaaatgataaagctcgttggtaatgtacgcttttgcagtgatacggactttaatgatgtggtggatagtggatccatctatagtagtgcaaacaacggcagtggtgacagcagctcgacagcattgaataatgaaagtcctaacactacaccaaaaagtagaactttcttttcacctaaagggcacagaagaaatagctcccatgtaagttcgttaacttctagatcaacaaaaaagcctataactaacttcactacacgtacaaatgggcttttgattaggccattgccccatcatggcgtacatcacctggaagcaatgatcaggttcattattcctttgatggattgtgcaagactttatgggcgtccagttcaattcaagacagaaagaaccgatataaattcgttaatgtttggattacctaaattgccctcagtggattattttgctgaagaggagattgcccatttgatgacccaggaatttaatcctttgaaagaaaaagatactgacgatactatggctttaactatgtcaagattttctagctacctgcaagaaagaatgacaaaagtctccaagagaaacacagaactcaacttcaggacctttagtgatgtaatgggcatgtataatactacgagggatcactctaaacttaattgcatgagtgacaaggataattctgtgaaggaattttcattgagtgataaaagcaatgttagttctgaaacgactaatatgatgaatcaattgcaagtaaacgcccatgaatacaaaagttctatgtgcgaacgtcctatcgtcgcaagtacttcgcccattgcatag

SEQ ID NO: 6098 - DNA, 1686 bp, Artificial Sequence
  Description of Artificial Sequence: Synthetic polynucleotide
atgggcattttggactctttgaaaaaacctgttaatatcaagagtagcctccccaaattctcccgcagtgctaccagcatcaatttaagtagccacccagtaagttctagatccttcctcgaattaccaccagagcttttcagcatcactaaacctatatttaagcttttacaagcacacgcaaataagatttacttccaatcttccgacgctgaggctgtatggaatgttaaggattcttctggacatgtttttgaagcagagtctatttctttgctcggctctcatataattatcacaaattcctctgtacaagtcgcagacgtggccatcatagattccccttccaacataaaccaatgtgaaatttctagcgttggagagttcttacaattcaataatggccaattatctatcacatgtaacgattttggtttattggagaagttcaaaaggttgtgtatgatttctatttttgagttcatttctatatataaggccttgacaggcacagtgatttcctcttatgggttgagaatgtctgatatgcatatcattttgaactctccgttcaattttaaggattggtgtgaagtttatcttgatggtcaaggttgggtgaaagtgtggtgtcatattgataaagtgtctaaaaccaataattctaaaagtagtagtgacaatgatgctaaaggaaagtatcaaataagattttatagagatgacaaatccacatctagcaagaactgcgttttttttattcctgacaatgagtacgttcaagatattttcttttataacatcaatgcggcagaaccttctaaaaatatgaacgacttttttcaagggttgcaaatgataaagctcgttggtaatgtacgcttttgcagtgatacggactttaatgatgtggtggatagtggatccatctatagtagtgcaaacaacggcagtggtgacagcagctctacagcattgaataatgaaagtcctaacactacaccaaaaagtagaactttcttttctcctaaagggcacagaagaaatagctcccatgtaagttctttaacttctagatctacaaaaaagcctataactaacttcactacacgtacaaatgggcttttgattaggccattgccccatcatggcgtacatcacttggaagcaatgatcaggttcattattcctttgatggattgtgcaagactttatgggcgtccagttcaattcaagacagaaagaaccgatataaattctttaatgtttggattacctaaattgccctctgtggattattttgctgaagaggagattgcccatttgatgacccaggaatttaatcctttgaaagaaaaagatactgacgatactatggctttaactatgagtagattttctagctacttacaagaaagaatgacaaaagtctccaagagaaacacagaactcaacttcaggacctttagtgatgtaatgggcatgtataatactacgagggatcactctaaacttaattgcatgagtgacaaggataattctgtgaaggaattttctttgagtgataaaagcaatgttagttctgaaacgactaatatgatgaatcaattgcaagtaaacgcccatgaatacaaaagttctatgtgcgaacgtcctatcgtcgcaagtacttctcccattgcatga

SEQ ID NO: 6099 - DNA, 1605 bp, Saccharomyces cerevisiae
atgcaagctccagtggtatttatgaatgcttctcaagagagaactaccggtcgtcaggcccaaatctccaatatcactgctgcaaaggcagttgccgatgtcattcgaacttgcttaggtccaaaagctatgttaaagatgttattggatcctatgggcggtcttgtgttgactaacgatggccacgctattttaagggaaattgatgttgcacatccagcagctaaatcaatgttggagttatcccgtactcaagacgaagaggttggtgacgggactacaacagttattattctagctggtgagattttagctcagtgtgcaccttatttgattgaaaaaaatattcaccctgttattattatccaagccttgaagaaagcactgactgatgcactagaagttatcaaacaagtaagtaaacctgtcgatgtggaaaatgatgccgctatgaaaaaattgattcaagcctctatcggtactaaatatgtcatacattggtcagagaaaatgtgtgaattagctctagacgctgttaagactgtccgtaaagacctgggacaaactgtggaaggtgaacctaattttgaaatcgatatcaaaagatatgtccgtgtggagaagattcctgggggggatgttctagattctcgcgtcttaaagggtgtcttattgaacaaggatgttgttcatccaaagatgtcccgtcacatagagaatccacgtgttgttcttttggattgtccactagaatataagaagggtgaatctcaaaccaacatagaaattgaaaaggaggaagattggaataggattttacaaatcgaggaagaacaagttcagctaatgtgtgaacaaattttagccgttaggccaacactagtcatcactgaaaaaggtgtttcagatctagcacagcattatttactaaagggtggatgtagtgttttaagaagagtgaagaaatcagacaataatagaattgctcgtgtaactggtgcaaccattgtcaatcgtgtagaggacttgaaggaaagtgatgtcggtacaaactgtggattattcaaagtagaaatgattggggacgaatatttctcatttttggataactgcaaggaaccaaaagcttgtaccataatgttacgtggtggttccaaagatatattaaacgaaatagatcgtaacctacaagatgctatggctgttgctcgtaatgtgatgttgagtccttccttgtccccaggtggtggtgccaccgagatggcagtttctgtcaaattagcagaaaaggcaaagcaattagaagggatccagcaatggccataccaagctgtagctgatgctatggagtgtattccacgtactttgatacaaaatgcaggtggtgatcctattagactcctatcccaactaagagccaaacacgcacagggaaattttacaacaggtattgatggtgacaaggggaaaattgtagatatggttagttacggtatttgggaacctgaagtcatcaagcagcaaagtgtcaaaaccgctattgaaagtgcatgtttactattaagggttgatgatattgttagtggtgtaagaaaacaagaataa

SEQ ID NO: 6100 - DNA, 1605 bp, Artificial Sequence
  Description of Artificial Sequence: Synthetic polynucleotide
atgcaagctccagtggtatttatgaatgcttctcaagagagaactaccggtcgtcaggcccaaatctccaatatcactgctgcaaaggcagttgccgatgtcattagaacttgcttaggtccaaaagctatgttaaagatgttattggatcctatgggcggtcttgtgttgactaacgatggccacgctattttaagggaaattgatgttgcacatccagcagctaaatctatgttggagttatcccgtactcaagacgaagaggttggtgacgggactacaacagttattattttggctggtgagattttagctcagtgtgcaccttatttgattgaaaaaaatattcaccctgttattattatccaagccttgaagaaagcattgactgatgcattggaagttatcaaacaagtaagtaaacctgtcgatgtggaaaatgatgccgctatgaaaaaattgattcaagcctctatcggtactaaatatgtcatacattggtctgagaaaatgtgtgaattagctttggacgctgttaagactgtccgtaaagacttgggacaaactgtggaaggtgaacctaattttgaaatcgatatcaaaagatatgtccgtgtggagaagattcctgggggggatgttttggattctcgcgtcttaaagggtgtcttattgaacaaggatgttgttcatccaaagatgtcccgtcacatagagaatccacgtgttgttcttttggattgtccattggaatataagaagggtgaatctcaaaccaacatagaaattgaaaaggaggaagattggaataggattttacaaatcgaggaagaacaagttcagttgatgtgtgaacaaattttagccgttaggccaacattggtcatcactgaaaaaggtgtttctgatttggcacagcattatttattgaagggtggatgtagtgttttaagaagagtgaagaaaagtgacaataatagaattgctcgtgtaactggtgcaaccattgtcaatcgtgtagaggacttgaaggaaagtgatgtcggtacaaactgtggattattcaaagtagaaatgattggggacgaatatttctcctttttggataactgcaaggaaccaaaagcttgtaccataatgttacgtggtggttccaaagatatattaaacgaaatagatcgtaacttacaagatgctatggctgttgctcgtaatgtgatgttgagtccttccttgtccccaggtggtggtgccaccgagatggcagtttctgtcaaattagcagaaaaggcaaagcaattagaagggatccagcaatggccataccaagctgtagctgatgctatggagtgtattccacgtactttgatacaaaatgcaggtggtgatcctattagactcttatcccaattgagagccaaacacgcacagggaaattttacaacaggtattgatggtgacaaggggaaaattgtagatatggttagttacggtatttgggaacctgaagtcatcaagcagcaaagtgtcaaaaccgctattgaaagtgcatgtttattattaagggttgatgatattgttagtggtgtaagaaaacaagaatga

SEQ ID NO: 6101 - DNA, 1548 bp, Saccharomyces cerevisiae
atgaaagcgtacgcaaagaaacgtatctcttacatgccatcgtcaccatcacaaaatgttattaactttgaagaaatcgaaactcaaaaagaaaacattcttcccctgaaggaaggcagatcagcagcggcactctcgaaagcgatacatcaaccactggtggaaataaaccaagttaaatcaagcttcgaacaaagactgatagatgagctccctgcattaagcgacccaattactttgtatcttgaatacataaagtggctgaacaacgcctatccacaaggcggtaattccaaacaatctggaatgctcacccttttggagcgatgtttatctcacttaaaggatttggagagatatcgcaatgatgttaggtttcttaaaatatggttttggtacatagaactttttaccagaaattcattcatggaaagcagagacattttcatgtatatgttaagaaatggaattggttccgagttagcgtcattttatgaagaatttacgaatctattaattcagaaagaaaaatttcaatatgccgtgaaaattctacagctaggaatcaaaaataaggctaggcctaataaggttttagaagaccggttaaaccatctcctgagagaactgggggagaacaatattcagctaggaaatgaaatatcgatggactcattagagtctacagtacttgggaaaaccagatctgaatttgtcaatagactagagcttgcaaatcaaaatggcacatcaagtgacgtcaatttaacaaaaaacaacgtatttgtagatggagaagagtctgatgtagaactattcgaaactccgaatagaggtgtttatagagatggctgggaaaattttgacttaaaggcagaaaggaacaaagaaaacaaccttcgaatatcattgctagaagcaaataccaatttgggtgagcttaaacaacatgagatgttatcgcaaaaaaagagaccatatgatgaaaaactaccgatctttagagattctataggtagaagtgaccctgtttatcaaatgattaatacaaaggaccagaaaccagaaaaaattgactgtaattttaaactgatttattgtgaagatgaggaatctaaaggtggtagactagaattttcgctagaagaagtcttggcaatttctagaaacgtttataaaagggttaggacaaataggaaacatccaagagaagcaaatttagggcaagaagaaagcgcaaatcaaaaagaagctgaagcacaatcgaaaagaccaaaaataagtagaaaagccttagtctccaagtcgttgaccccctcaaaccagggaagaatgttttctggcgaagagtacataaactgccctatgacgccaaagggacgaagcactgagacgtctgatatcatctcagctgtcaagccgcggcagttaaccccaattttagaaatgagagaatcaaattctttttctcaaagcaaaaattctgagatcatttcagatgatgacaagtcgagttcgtctttcatatcgtacccaccacagcgttga

SEQ ID NO: 6102 - DNA, 1548 bp, Artificial Sequence
  Description of Artificial Sequence: Synthetic polynucleotide
atgaaagcgtacgcaaagaaacgtatctcttacatgccatcttctccatctcaaaatgttattaactttgaagaaatcgaaactcaaaaagaaaacattcttcccttgaaggaaggcagaagtgcagcggcactctctaaagcgatacatcaaccattggtggaaataaaccaagttaaaagtagcttcgaacaaagattaatagatgagctccctgcattaagcgacccaattactttgtatcttgaatacataaagtggttgaacaacgcctatccacaaggcggtaattccaaacaatctggaatgctcacccttttggagagatgtttatctcacttaaaggatttggagagatatcgcaatgatgttaggtttcttaaaatatggttttggtacatagaactttttaccagaaattctttcatggaaagcagagacattttcatgtatatgttaagaaatggaattggttccgagttagcgtctttttatgaagaatttacgaatttattaattcagaaagaaaaatttcaatatgccgtgaaaattttacagttaggaatcaaaaataaggctaggcctaataaggttttagaagacagattaaaccatctcttgagagaattgggggagaacaatattcagttaggaaatgaaatatccatggactctttagagtctacagtacttgggaaaaccagatctgaatttgtcaatagattggagcttgcaaatcaaaatggcacatctagtgacgtcaatttaacaaaaaacaacgtatttgtagatggagaagagtctgatgtagaattattcgaaactccgaatagaggtgtttatagagatggctgggaaaattttgacttaaaggcagaaaggaacaaagaaaacaaccttagaatatctttgttggaagcaaataccaatttgggtgagcttaaacaacatgagatgttatctcaaaaaaagagaccatatgatgaaaaattaccgatctttagagattctataggtagaagtgaccctgtttatcaaatgattaatacaaaggaccagaaaccagaaaaaattgactgtaattttaaattgatttattgtgaagatgaggaatctaaaggtggtagattagaattttctttggaagaagtcttggcaatttctagaaacgtttataaaagggttaggacaaataggaaacatccaagagaagcaaatttagggcaagaagaaagcgcaaatcaaaaagaagctgaagcacaaagtaaaagaccaaaaataagtagaaaagccttagtctccaagtctttgaccccctctaaccagggaagaatgttttctggcgaagagtacataaactgccctatgacgccaaagggaagaagcactgagacgtctgatatcatctctgctgtcaagccgagacagttaaccccaattttagaaatgagagaaagtaattctttttctcaaagcaaaaattctgagatcatttctgatgatgacaagagtagttcttctttcatatcttacccaccacagcgttga

SEQ ID NO: 6103 - DNA, 2166 bp, Saccharomyces cerevisiae
atgaagtttggtgagcacttgagcaagtctcttattagacagtacagctactattatattagttatgatgatctgaagactgagctagaagataacttatctaagaataacggtcagtggacgcaagaattggaaacagattttttagaatctttggagatcgagttagacaaggtttacacattttgcaaagttaagcatagtgaagtttttagacgtgtaaaagaggttcaagaacaagtgcaacatactgttcgtttgttagactccaataatcctcctactcagctagattttgagattctagaagaagaactaagtgatatcattgccgatgttcatgatctagcaaagttttcgagactaaactacactggtttccaaaagattatcaagaaacacgataagaagacaggttttatcttgaaaccagttttccaagttagattagactctaaaccatttttcaaggaaaactatgacgaactagtcgttaaaatttcccaactatatgatattgccagaacttcaggtcgcccaatcaagggagactcatctgctggtgggaagcaacaaaatttcgttagacagacaacaaagtattgggttcaccctgataacattacagaattgaagctgatcatcttgaagcatttaccagtgttagtcttcaacactaataaggaattcgaaagagaagattccgctattacttcgatctattttgataatgaaaatctagacctttattatggcagattaagaaaagatgaaggtgcagaagcccacagattgagatggtatgggggtatgtctacagacacgatctttgtagaaagaaagacccatagagaggattggactggtgagaaatctgtcaaggcaagatttgcgctaaaggaacgtcatgttaatgacttcttaaagggtaaatatactgttgatcaagtatttgccaagatgcgtaaagaaggcaagaagccaatgaacgaaattgaaaacttggaggcgttagcatccgaaattcaatacgtcatgttaaagaaaaagttgagacctgtagtgagatcattctacaatagaactgcttttcaattacctggtgatgcaagagttcgtatctcccttgatacagagttaactatggtgagagaagacaactttgatggtgtggatagaactcataagaattggaggagaactgatattggtgtcgattggccattcaagcagctagatgacaaggatatttgccgtttcccatatgcagtcctggaagttaaattgcaaactcaactaggtcaagaacctccagagtgggtacgtgaattagtcgggtctcacttagttgagccagtcccaaaattctccaagtttattcatggtgtggctaccttactaaatgataaagtggattcaatcccattttggttacctcaaatggatgttgatatcaggaaacctccactaccaacaaatattgaaataacaagacccggtagatccgataacgaagataacgacttcgatgaggatgatgaggatgacgctgctttggttgctgccatgacaaacgcacccggtaattctcttgatatagaagaatctgttggttacggggctacttcggcccccacctccaacactaatcatgttgttgagagtgctaatgctgcttattatcaaagaaagatcaggaatgccgaaaatcctatctccaagaaatactatgaaatcgtggcattttttgaccactattttaacggtgatcaaatatctaaaatcccaaaaggtactacttttgatactcaaattcgtgccccaccgggaaagacgatatgtgtgccagttcgtgtggaaccaaaagtttactttgccactgaaagaacctacctgtcttggttgtccatctcgatattgttgggcggtgtctccactactttattaacatatggttcaccaacagccatgattggctccattgggttctttattacttccttggctgtgttgatacgtactgttatggtttatgccaagagagtggtaaacattagactaaagagagcagtagattatgaggataagatcgggcccggcatggtttctgtgtttctaattctctctattttattttcctttttctgcaacctagttgctaaatga

SEQ ID NO: 6104 - DNA, 2166 bp, Artificial Sequence
  Description of Artificial Sequence: Synthetic polynucleotide
atgaagtttggtgagcacttgagcaagtctcttattagacagtacagctactattatattagttatgatgatttgaagactgagttagaagataacttatctaagaataacggtcagtggacgcaagaattggaaacagattttttagaatctttggagatcgagttagacaaggtttacacattttgcaaagttaagcatagtgaagtttttagacgtgtaaaagaggttcaagaacaagtgcaacatactgttcgtttgttagactccaataatcctcctactcagttagattttgagattttggaagaagaattaagtgatatcattgccgatgttcatgatttggcaaagttttccagattgaactacactggtttccaaaagattatcaagaaacacgataagaagacaggttttatcttgaaaccagttttccaagttagattagactctaaaccatttttcaaggaaaactatgacgaattggtcgttaaaatttcccaattatatgatattgccagaacttctggtcgcccaatcaagggagactcttctgctggtgggaagcaacaaaatttcgttagacagacaacaaagtattgggttcaccctgataacattacagaattgaagttaatcatcttgaagcatttaccagtgttagtcttcaacactaataaggaattcgaaagagaagattccgctattacttctatctattttgataatgaaaatttggacctttattatggcagattaagaaaagatgaaggtgcagaagcccacagattgagatggtatgggggtatgtctacagacacgatctttgtagaaagaaagacccatagagaggattggactggtgagaaatctgtcaaggcaagatttgcgttaaaggaacgtcatgttaatgacttcttaaagggtaaatatactgttgatcaagtatttgccaagatgcgtaaagaaggcaagaagccaatgaacgaaattgaaaacttggaggcgttagcatccgaaattcaatacgtcatgttaaagaaaaagttgagacctgtagtgagatctttctacaatagaactgcttttcaattacctggtgatgcaagagttcgtatctcccttgatacagagttaactatggtgagagaagacaactttgatggtgtggatagaactcataagaattggaggagaactgatattggtgtcgattggccattcaagcagttagatgacaaggatatttgccgtttcccatatgcagtcttggaagttaaattgcaaactcaattgggtcaagaacctccagagtgggtacgtgaattagtcgggtctcacttagttgagccagtcccaaaattctccaagtttattcatggtgtggctaccttattgaatgataaagtggattctatcccattttggttacctcaaatggatgttgatatcaggaaacctccattaccaacaaatattgaaataacaagacccggtagatccgataacgaagataacgacttcgatgaggatgatgaggatgacgctgctttggttgctgccatgacaaacgcacccggtaattctcttgatatagaagaatctgttggttacggggctacttctgcccccacctccaacactaatcatgttgttgagagtgctaatgctgcttattatcaaagaaagatcaggaatgccgaaaatcctatctccaagaaatactatgaaatcgtggcattttttgaccactattttaacggtgatcaaatatctaaaatcccaaaaggtactacttttgatactcaaattcgtgccccaccgggaaagacgatatgtgtgccagttcgtgtggaaccaaaagtttactttgccactgaaagaacctacttgtcttggttgtccatctccatattgttgggcggtgtctccactactttattaacatatggttctccaacagccatgattggctccattgggttctttattacttccttggctgtgttgatacgtactgttatggtttatgccaagagagtggtaaacattagattaaagagagcagtagattatgaggataagatcgggcccggcatggtttctgtgtttttgattctctctattttattttcctttttctgcaacttggttgctaaatga

SEQ ID NO: 6105 - DNA, 486 bp, Saccharomyces cerevisiae
atgaaagttcttgaggaaaggaatgcatttttaagtgactatgaagtcttgaagttcctaacagatctagaaaaaaaacatctttgggaccaaaaaagtttggctgcgctgaagaaaagtcgctcgaaaggtaagcagaataggccctacaatcatcctgaattgcaaggtattactcgcaatgtggttaactatctcagtataaacaaaaactttatcaaccaggaagatgaaggcgaggaacgagaaagcagtggtgcaaaagatgctgaaaaatcgggtataagcaaaatgagcgatgaaagctttgctgagttgatgactaaactgaattcttttaaattattcaaggctgaaaaactgcagattgtcaatcaacttcctgccaatatggtccacctttactccatagtggaggagtgtgatgcaagatttgacgaaaaaacaattgaggaaatgctagagatcatctctggctacgcatga

SEQ ID NO: 6106 - DNA, 486 bp, Artificial Sequence
  Description of Artificial Sequence: Synthetic polynucleotide
atgaaagttcttgaggaaaggaatgcatttttaagtgactatgaagtcttgaagttcttaacagatttggaaaaaaaacatctttgggaccaaaaaagtttggctgcgttaaagaaaagtcgctctaaaggtaagcagaataggccctacaatcatcctgaattgcaaggtattactcgcaatgtggttaactatctcagtataaacaaaaactttatcaaccaggaagatgaaggcgaggaaagagaaagcagtggtgcaaaagatgctgaaaaatctggtataagcaaaatgagcgatgaaagctttgctgagttgatgactaaattgaattcttttaaattattcaaggctgaaaaattacagattgtcaatcaacttcctgccaatatggtccacctttactccatagtggaggagtgtgatgcaagatttgacgaaaaaacaattgaggaaatgttagagatcatctctggctacgcatga

SEQ ID NO: 6107 - DNA, 2001 bp, Saccharomyces cerevisiae
atgggaaagactaaaacaagaggcagaagacaccaagacaaacagagaaaggacgaatttgaacccagttcaaattctgcgaaggagcacatccagcaagaagagtctacttacaatgacgaagccgaaattaaagagactcagccacaaatgttttttggtgtgctagatagagaagaactggagtatttcaagcaagccgaatcgactttgcaattagacgccttcgaagcacctgaggaaaagtttcaattcgtcacgagcattattgaggaagcaaaaggtaaagaactgaaattggttacttcccaaataacttcgaaattgatggaacgagttattcttgaatgtgatgagactcagttaaaagacattttccaatctttcaatggcgttttcttcgggttgtcatgtcataaatatgcttcccatgttttagagactttatttgttagaagtgccgccttggtagaaagagaacttttaacaccaagttttgataacaatgaaaaagaagggccttatgtgactatggaaaatatgtttctctttatgttgaatgaactgaaaccgcacttgaaaactatgatgaaccatcagtatgcatcacatgttttgagattgctaatattaattttgtcttccaagacattgcctaattcaactaaagcgaactctactttacgttccaaaaagtcaaaaattgcaagaaaaatgattgacattaaagataatgacgatttcaataaagtttaccaaacaccggaatctttcaaatctgaacttcgtgacataataactactttatacaaaggatttactaatggtgccgagtcgcgttctgatatttcgcaatctactatcaccaaatttagagagtacagtgtggataaagtggcttcccctgtaattcagctcattattcaagtcgaaggtatttttgacagggaccgttcattttggagattggtcttcaatacagcagatgagaaggatcctaaggaggaatcattcctggaatatttactgtcagatcctgtcggttctcatttcttagaaaatgtgattggctctgccaggctaaaatatgttgaaagactttatcgtttatatatgaaagaccgtattgtgaaactagcaaaaagggatactacaggtgcctttgtagtgcgtgcattgctggaacatttgaaggagaaggacgtaaaacagatattggatgcagtagttcctgaattaagcatgcttttaaactcaaatatggattttggtactgctattatcaacgcaagcaataaacaaggtggttacttaagggatgatgtcattgctcaattaatacaaaaatattatccagaaaagtctgatgcaaagaatattttggaaagttgcctgttgttgagtgcatcgactttgggcaataccagagatgactggccaacagcagaagaaagaagacgatcagttttcttggaacaattaattgactacgacgacaagtttttgaatattaccattgacagcatgttggctctgcctgaggaaaggttgatacaaatgtgttaccatggagtattttcgcatgttgttgagcacgtactacaaactactagggtggacataattaagagaaaaatgctattgaacatactgtctaaagagtctgtaaatttggcatgcaatgtatatggctctcatataatggacaaattgtgggaatttacggcaaaattaacattatataaggagcgtattgctagagcattagttttagaaactgagaaggtgaagaatagtatttatggcaggcaagtgtggaagaattggaaactggaattatatgttagaaaaatgtgggattggaaaaaactaattaaggagcaagaatttgaaatatttccaaattctaaaccgctacagccaaagccagaaaagcactcaagagaaagaaataattcgaaggaaggaagcgccttcaaaaagcaaaagcactatagataa

SEQ ID NO: 6108 - DNA, 2001 bp, Artificial Sequence
  Description of Artificial Sequence: Synthetic polynucleotide
atgggaaagactaaaacaagaggcagaagacaccaagacaaacagagaaaggacgaatttgaacccagtagtaattctgcgaaggagcacatccagcaagaagagtctacttacaatgacgaagccgaaattaaagagactcagccacaaatgttttttggtgtgttggatagagaagaattagagtatttcaagcaagccgaatctactttgcaattagacgccttcgaagcacctgaggaaaagtttcaattcgtcacgagcattattgaggaagcaaaaggtaaagaattgaaattggttacttcccaaataacttctaaattgatggaaagagttattcttgaatgtgatgagactcagttaaaagacattttccaatctttcaatggcgttttcttcgggttgagttgtcataaatatgcttcccatgttttagagactttatttgttagaagtgccgccttggtagaaagagaacttttaacaccaagttttgataacaatgaaaaagaagggccttatgtgactatggaaaatatgtttctctttatgttgaatgaattgaaaccgcacttgaaaactatgatgaaccatcagtatgcatctcatgttttgagattgttaatattaattttgtcttccaagacattgcctaattctactaaagcgaactctactttacgttccaaaaagagtaaaattgcaagaaaaatgattgacattaaagataatgacgatttcaataaagtttaccaaacaccggaatctttcaaatctgaacttcgtgacataataactactttatacaaaggatttactaatggtgccgagtctcgttctgatatttctcaatctactatcaccaaatttagagagtacagtgtggataaagtggcttcccctgtaattcagctcattattcaagtcgaaggtatttttgacagggaccgttctttttggagattggtcttcaatacagcagatgagaaggatcctaaggaggaatctttcttggaatatttattaagtgatcctgtcggttctcatttcttagaaaatgtgattggctctgccaggttgaaatatgttgaaagactttatcgtttatatatgaaagaccgtattgtgaaattggcaaaaagggatactacaggtgcctttgtagtgcgtgcattgttggaacatttgaaggagaaggacgtaaaacagatattggatgcagtagttcctgaattaagcatgcttttaaacagtaatatggattttggtactgctattatcaacgcaagcaataaacaaggtggttacttaagggatgatgtcattgctcaattaatacaaaaatattatccagaaaagtctgatgcaaagaatattttggaaagttgcttgttgttgagtgcatctactttgggcaataccagagatgactggccaacagcagaagaaagaagaagatctgttttcttggaacaattaattgactacgacgacaagtttttgaatattaccattgacagcatgttggctttacctgaggaaaggttgatacaaatgtgttaccatggagtattttctcatgttgttgagcacgtattacaaactactagggtggacataattaagagaaaaatgcttttgaacatattatctaaagagtctgtaaatttggcatgcaatgtatatggctctcatataatggacaaattgtgggaatttacggcaaaattaacattatataaggagcgtattgctagagcattagttttagaaactgagaaggtgaagaatagtatttatggcaggcaagtgtggaagaattggaaattagaattatatgttagaaaaatgtgggattggaaaaaattgattaaggagcaagaatttgaaatatttccaaattctaaaccgttgcagccaaagccagaaaagcactccagagaaagaaataattctaaggaaggaagcgccttcaaaaagcaaaagcactatagatga

SEQ ID NO: 6109 - DNA, 1707 bp, Saccharomyces cerevisiae
atgtcacttagattgccacaaaatcccaacgcgggattgtttaaacaaggctacaatagttactctaacgccgatggccaaattattaaatcaattgcggccattcgcgaattacatcaaatgtgtttgacttctatgggaccctgtggtagaaacaagatcattgttaaccatctcggtaaaatcattattaccaacgacgcggccaccatgctaagagaactagatattgtccatcctgcagtgaaagtcctcgtaatggcgactgaacaacagaagatcgacatgggagacggtacaaatttagtcatgattttggctggcgaactattaaatgtgtccgaaaaactgatttcaatgggcttgtctgccgttgagattattcaaggttataatatggcaaggaagtttactttgaaagaactagacgaaatggttgttggtgaaattactgacaagaatgataaaaacgaacttttgaaaatgattaaaccagtcatctcctccaaaaagtacggatctgaagacatattgagtgaacttgtttctgaagctgtatctcacgttttaccagttgctcagcaagctggagaaattccttattttaatgttgattctatcagagtagtaaagattatgggtggatcgctttccaattctaccgtcatcaaaggtatggttttcaatcgtgagcctgaaggccatgtaaaatcattatccgaagataaaaagcataaagttgcagttttcacttgtccgcttgacatagccaatactgaaacgaaaggcactgttttattacataatgcacaagaaatgctcgatttttctaagggcgaggaaaagcaaatagatgccatgatgaaagagattgccgacatgggcgtagaatgcattgttgcaggtgctggtgttggtgaattggcgttacattatttgaatagatacggtatactagtcttgaaggtaccaagcaaattcgaattaagaagattatgtcgcgtttgtggggccactccattgcctagattaggtgcgccaactccagaagaattaggtttagtggaaactgttaagacaatggagataggtggtgatagagtaactgtgttcaaacaagagcaaggtgaaatttcaagaacatctactatcattttaagaggtgccacacagaataatttggatgatattgaaagagccattgatgatggtgttgcagccgtcaagggactaatgaagccatcaggcggtaagttgttgcctggtgctggtgctaccgaaattgaattgatttctaggataactaagtatggtgaacgaacacctggattgctacagttagctataaaacagtttgccgtggcttttgaagtggttcctcgtaccctagcggagaccgctggtcttgatgttaatgaggtactaccaaacttatacgctgcacataacgtaactgaacctggtgcagttaagacagatcatttatataaaggtgtggatattgatggcgaatctgatgaaggtgtaaaggacatcagagaggaaaatatttatgacatgcttgcaacgaaaaagtttgctattaacgtcgctacagaagctgcaactactgtgctttccattgaccaaattatcatggcaaagaaggcgggtggtccaagagcacctcaaggcccaaggccaggtaactgggaccaagaagactga

SEQ ID NO: 6110 - DNA, 1707 bp, Artificial Sequence
  Description of Artificial Sequence: Synthetic polynucleotide
atgtctcttagattgccacaaaatcccaacgcgggattgtttaaacaaggctacaatagttactctaacgccgatggccaaattattaaatccattgcggccattcgcgaattacatcaaatgtgtttgacttctatgggaccctgtggtagaaacaagatcattgttaaccatctcggtaaaatcattattaccaacgacgcggccaccatgttgagagaattagatattgtccatcctgcagtgaaagtcctcgtaatggcgactgaacaacagaagatcgacatgggagacggtacaaatttagtcatgattttggctggcgaattattaaatgtgtccgaaaaattgatttccatgggcttgtctgccgttgagattattcaaggttataatatggcaaggaagtttactttgaaagaattagacgaaatggttgttggtgaaattactgacaagaatgataaaaacgaacttttgaaaatgattaaaccagtcatctcctccaaaaagtacggatctgaagacatattgagtgaacttgtttctgaagctgtatctcacgttttaccagttgctcagcaagctggagaaattccttattttaatgttgattctatcagagtagtaaagattatgggtggatctctttccaattctaccgtcatcaaaggtatggttttcaatcgtgagcctgaaggccatgtaaaatctttatccgaagataaaaagcataaagttgcagttttcacttgtccgcttgacatagccaatactgaaacgaaaggcactgttttattacataatgcacaagaaatgctcgatttttctaagggcgaggaaaagcaaatagatgccatgatgaaagagattgccgacatgggcgtagaatgcattgttgcaggtgctggtgttggtgaattggcgttacattatttgaatagatacggtatattggtcttgaaggtaccaagcaaattcgaattaagaagattatgtcgcgtttgtggggccactccattgcctagattaggtgcgccaactccagaagaattaggtttagtggaaactgttaagacaatggagataggtggtgatagagtaactgtgttcaaacaagagcaaggtgaaatttctagaacatctactatcattttaagaggtgccacacagaataatttggatgatattgaaagagccattgatgatggtgttgcagccgtcaagggattaatgaagccaagtggcggtaagttgttgcctggtgctggtgctaccgaaattgaattgatttctaggataactaagtatggtgaaagaacacctggattgttacagttagctataaaacagtttgccgtggcttttgaagtggttcctcgtaccttagcggagaccgctggtcttgatgttaatgaggtattgccaaacttatacgctgcacataacgtaactgaacctggtgcagttaagacagatcatttatataaaggtgtggatattgatggcgaatctgatgaaggtgtaaaggacatcagagaggaaaatatttatgacatgcttgcaacgaaaaagtttgctattaacgtcgctacagaagctgcaactactgtgctttccattgaccaaattatcatggcaaagaaggcgggtggtccaagagcacctcaaggcccaaggccaggtaactgggaccaagaagactga

SEQ ID NO: 6111 - DNA, 315 bp, Saccharomyces cerevisiae
atgtgctccaggggaggttcgaactctcgaccttcagattatgagactgacgctcttcctactgagctactgaagcatacaaaggatgttggggaagaaaaacaaactttacatcaaatatttgcggattccatggttattaaaggatatagcaccgggtatacaggacatactagaagttctccaggggatcttgtaatccacaaaagagaattgatattttcacataatattgtcattattgtttccccaatttatatgatatcattcattattctgttacactatcagtcctggcatttcagcatctattaa

SEQ ID NO: 6112 - DNA, 315 bp, Artificial Sequence
  Description of Artificial Sequence: Synthetic polynucleotide
atgtgctccaggggaggttccaactctagaccttctgattatgagactgacgctcttcctactgagttattgaagcatacaaaggatgttggggaagaaaaacaaactttacatcaaatatttgcggattccatggttattaaaggatatagcaccgggtatacaggacatactagaagttctccaggggatcttgtaatccacaaaagagaattgatattttctcataatattgtcattattgtttccccaatttatatgatatctttcattattttattacactatcagtcctggcatttcagcatctattga

SEQ ID NO: 6113 - DNA, 972 bp, Saccharomyces cerevisiae
atgcctagcacgtttgaatcccagctttttttttcgagaccgtttctgtctaaaaggcaaattcaaagagcccaaaagaatacaatatcggactatcgaaattacaaccagaaaaaacttgccgtgttcaaatttctaagtgacttgtgtgttcagctgaaatttccacggaagactttagaaacagcagtatacttttaccaaagataccacctctttaatcgcttcgagaccgaggtttgctacactgtagcgacaagctgcctgactttgggctgtaaagaagttgagacaattaaaaaaacaaatgatatatgtactttgtcattacgattgaggaatgtggttaaaatcaatacggacattttggaaaattttaaaaaaagggtatttcaaatagaacttcggatattagagtcatgctcattcgattatagagtcaacaattacgttcatattgatgaatatgttataaaaattggtagggagctatcctttgattataagttgtgcaatctggcttgggtaattgcttatgatgctttgaagctagaaactattttagtcataccccaacattccattgcattggccattttgaaaatagcatatgaattactagataataagaattggtcaagtaaaaggtattctttatttgaaacagacgagaaatccgtaaatgaagcttattttgatatagtcaatttttacatcaattcattcgatatgtgcgatctacaacgtcatttaccggctgatttgctgccgattggcgttgaaaggtttatggaactgaaaaaaaacgcaggaccagaatctggattgccgcaaataccagatcacctgttgaatgccgatccttatatcactattactagagataataatgtccaagaaagaagatatgtactttcactggagctaattaatggcgagtccagcataaatagttctacaagacatgcatag

SEQ ID NO: 6114 - DNA, 972 bp, Artificial Sequence
  Description of Artificial Sequence: Synthetic polynucleotide
atgcctagcacgtttgaatcccagctttttttttccagaccgtttttatctaaaaggcaaattcaaagagcccaaaagaatacaatatctgactatagaaattacaaccagaaaaaacttgccgtgttcaaatttttgagtgacttgtgtgttcagttgaaatttccaagaaagactttagaaacagcagtatacttttaccaaagataccacctctttaatcgcttcgagaccgaggtttgctacactgtagcgacaagctgcttgactttgggctgtaaagaagttgagacaattaaaaaaacaaatgatatatgtactttgtctttaagattgaggaatgtggttaaaatcaatacggacattttggaaaattttaaaaaaagggtatttcaaatagaacttagaatattagagagttgctctttcgattatagagtcaacaattacgttcatattgatgaatatgttataaaaattggtagggagctttcctttgattataagttgtgcaatttggcttgggtaattgcttatgatgctttgaagttggaaactattttagtcataccccaacattccattgcattggccattttgaaaatagcatatgaattattagataataagaattggtctagtaaaaggtattctttatttgaaacagacgagaaatccgtaaatgaagcttattttgatatagtcaatttttacatcaattctttcgatatgtgcgatttgcaacgtcatttaccggctgatttgttaccgattggcgttgaaaggtttatggaattgaaaaaaaacgcaggaccagaatctggattgccgcaaataccagatcacttattgaatgccgatccttatatcactattactagagataataatgtccaagaaagaagatatgtactttctttggagttgattaatggcgagtccagcataaatagttctacaagacatgcatga

SEQ ID NO: 6115 - DNA, 6081 bp, Saccharomyces cerevisiae
atgtcatcaaaacctgatactggttcggaaatttctggccctcagcgacaggaagaacaagaacaacagatagagcagagctcacctacggaagcaaacgatagaagcattcatgatgaggtaccaaaagtcaagaagcgtcacgaacaaaatagtggtcacaaatcaagaaggaatagcgcatatagttattacagcccacggtcgctttctatgaccaaaagcagggagagtatcactccaaatggtatggatgatgtaagtatttcgaacgtggaacatccaaggccgacagaaccgaaaatcaaaaggggtccatatttactgaagaaaacattgagcagtctttcaatgacgagcgcgaatagtactcatgatgataataaagaccacggttacgctttgaattcatccaagacgcacaactacacatctactcataaccatcatgacggtcatcatgatcatcatcatgttcagttttttcccaataggaagccatcattagcggaaaccctattcaaaaggttttcagggtcaaacagtcacgatggcaataagtcaggaaaggaaagtaaagttgctaacctttccctttcaacggtaaatcctgcacctgctaataggaaaccttctaaagactccactttatctaatcacttggctgataacgtgccaagcactttacgaaggaaagtgtcctcattggtacgtggttcttccgtccatgatataaataatggtattgcagataaacagattagaccaaaggctgttgcgcaatcagaaaatacattacattcatccgatgttcccaatagcaaacgctcgcacagaaaaagctttctgctaggctccacatcttcttcaagcagtagaagaggttcaaatgtcagttcaatgactaacagtgacagtgcaagtatggcgacgtcgggtagtcatgttctccaacataacgtatctaatgtttctccaactactaaaagtaaggacagcgttaacagcgaatccgccgatcacactaataataaatccgagaaagtgactccagaatataatgagaacattccggaaaattctaactctgacaacaaacgcgaagccacaacgcctactatagaaacacccatttcatgtaaaccatcccttttcaggctagatacaaaccttgaggatgttactgatattacaaagacggtgccacccaccgctgtcaattctacactaaattctacacacgggactgagactgcctcacccaaaacggtgatcatgcctgaaggtcctaggaagtcggtgtcaatggctgatctctccgtcgctgccgcagcacctaatggtgaattcacatcaacttccaatgatagatcacaatgggtagcacctcaaagctgggatgtggaaaccaaaaggaaaaaaacaaaacctaaagggagatcgaaatcaagaaggtcaagtatagatgctgatgaacttgatcccatgtcaccggggccaccttcaaaaaaagactctcgtcatcatcacgatcgaaaggataacgaatcaatggtcactgcgggtgacagtaactcaagttttgttgatatatgtaaagaaaacgttccgaatgatagcaagaccgcactcgatactaaatctgtgaaccgcttaaaaagtaatttggctatgagtcccccaagtatacgatatgctccatcaaatttagatggggactacgacacgtcttccacttcctcatctttaccgtcctcatctattagttcagaagatacatcttcctgcagcgattcctcttcgtacactaacgcgtatatggaggccaaccgagagcaggataataaaacaccgatcctgaataaaacgaaatcgtataccaagaaatttacatcctcttcggtaaatatgaattcaccagatggtgcccagagttctggattattactacaagatgagaaggacgatgaggtcgagtgccaactggaacattactataaagatttcagtgatttagatccaaagaggcactatgctattcgtatattcaatactgatgacacttttacgactctctcatgtactccagcgactaccgtcgaagagataatacctgcacttaaaagaaaatttaacattacagcgcaagggaattttcaaatttccctgaaggtgggaaagttgtcaaaaattttgagaccaacttcgaaacctattttaattgaaagaaaacttttacttttgaatggttatcgaaagtcagacccacttcatattatgggtatagaggatttaagttttgtttttaagtttcttttccatcctgtcacaccttctcactttactcctgaacaagaacaaagaataatgagaagcgaatttgttcacgtagatttaaggaatatggatctgactacacctcccatcattttttaccagcatacgtcagaaatagaaagtttagacgtttctaataacgcaaatatattcctacctctggagttcattgaaagctcgattaaattattaagtttgagaatggttaatattagagcatctaaatttccttccaatatcactaaggcgtataaactagtatctttggaattacagagaaacttcataagaaaagtaccgaactcaatcatgaaactgagtaatttaacgatattaaaccttcaatgtaatgagcttgaaagcctaccggctggatttgttgaactgaaaaatctgcaattgctagacttgtcttcaaacaagttcatgcactacccagaagttattaactactgcaccaatcttttacaaatagacctatcatataataaaatccaaagcttaccacagtccactaagtacctagtaaagcttgcgaagatgaacctttctcataacaaactaaattttataggcgacttatcggaaatgacagatttgaggacgctgaacctaagatataacagaatatcatcaattaagacaaatgcgtctaacttgcagaacctttttttaacagataatagaatttcgaactttgaagacactttgccgaaactaagagcccttgaaattcaagagaatccaatcacttctatatccttcaaagatttttatccaaaaaacatgacaagtttgacgttgaacaaggcacagttatcgagtattcctggagaattactcaccaaactatctttcctcgagaaacttgaacttaatcagaataatttgactagactgccacaggagatatccaagttgactaaattagttttcctttcagtggcgagaaacaaactagagtatattccacccgagctatctcaactgaaaagtttgaggacattagatctacattctaacaacataagggactttgttgacggtatggaaaaccttgaactaacatcgctaaatatttcatcgaatgcattcggtaactctagcttagaaaattctttttaccataacatgtcatatgggtcaaagttatctaaaagcctgatgttttttattgctgcagacaatcaatttgatgatgctatgtggcctcttttcaattgctttgtcaatctgaaagtgctaaatctttcttacaacaatttttcagatgtatcgcacatgaaacttgagagcattaccgaattgtacctctccggtaataagctcacgacattgtcgggtgatacagttttgaaatggagctctttaaagactttaatgttgaatagtaaccaaatgttatctctgcctgcagaattatcaaatctctcacagctaagtgtatttgatgttggagcaaatcaattaaagtataatatatcaaactatcattacgattggaactggaggaataataaagaactaaaatatttgaatttttcaggaaatcgaaggtttgaaataaagtcatttataagtcacgatattgatgctgatttgtcagatctgacagtattacctcagttaaaggtactaggtttaatggacgtaactttaaatactaccaaagtaccggatgaaaatgtcaatttccgtttaaggacaactgcatcaataataaatgggatgcgctacggtgttgctgatacattaggtcaaagagactatgtgtcatctcgtgatgttacctttgaaagattccgcggaaatgacgacgaatgcttactatgtcttcatgatagtaaaaaccaaaatgcagattatggccacaatatatcaagaattgttagagatatttacgataaaatactgatcagacaactggaaaggtatggagacgaaacagatgataatataaaaactgcacttcgtttcagttttttgcaactgaataaggagattaacggaatgctaaattctgttgataatggtgccgatgttgccaatctttcatatgcagacttgctaagtggcgcttgctctactgtgatatatatcagagggaagaaactcttcgctgcaaatttaggtgactgtatggctattttatccaaaaacaatggtgactaccaaacgctaaccaaacaacatctcccaacaaagcgggaagaatacgagaggatcagaatatctggcgggtatgtcaacaatggaaaattagatggtgttgtagatgtgtctagagcagtgggtttttttgatttgcttccccacattcatgcttctcccgacatatctgtcgtgacattaacaaaagcagacgagatgcttattgtagcaacgcataagttatgggaatacatggacgtggatacagtttgtgatatcgcgcgtgagaatagtactgatccactccgtgccgcagctgagttgaaggatcatgccatggcttacggctgtacagagaatattacaattttgtgccttgctctttacgagaacattcagcaacaaaatcggttcactttaaataaaaactctttaatgactagaagaagtactttcgaggatactacattaagaagacttcaacctgagatttctccgccaacaggtaacctagcaatggtcttcactgatatcaaaagctcaaccttcttatgggagctattccctaacgcaatgaggaccgcaataaaaactcacaatgacattatgcgtcgtcaactacgaatttacggtggttacgaagtaaagacagaaggagacgcctttatggtggcatttcctacgccaactagtggtctgacatggtgcttaagtgttcaattaaaactcttggatgcacaatggccggaggaaattacctcagttcaagacggctgccaagttacggatagaaatggtaacattatctatcaaggcctatcagttagaatgggtattcattggggctgcccagttccagagcttgatttagtgactcaaagaatggactatttggggccgatggtcaataaggcagcaagggtccagggcgtcgctgacggtggtcagattgcaatgagtagtgatttttactctgaattcaacaagataatgaagtatcatgagcgagtagtgaagggcaaggaatctctcaaggaagtttatggtgaagaaattatcggagaggttcttgaaagagaaattgccatgctggaaagtattggttgggcattttttgactttggcgagcataagctaaagggactcgaaaccaaagaactcgttactattgcgtatcctaagattcttgcttccagacacgaatttgcatctgaagatgagcagtcaaaattaatcaatgaaacgatgttgtttcgtttaagagtcatttcaaacagactggaatctataatgtcagctttaagcggcggatttattgaactagactctcggacggagggaagttatattaaatttaaccctaaagttgaaaatggtattatgcaatcgatttctgagaaggatgcgttgttattttttgatcatgtaattactagaatcgaatccagtgtggcattattacatttacgacaacagaggtgttcaggactggaaatttgcagaaacgataaaacatctgctcgaagcaatattttcaatgttgttgacgaacttttacaaatggttaagaacgcaaaggatttatcaacttga

SEQ ID NO: 6116 - DNA, 6081 bp, Artificial Sequence
  Description of Artificial Sequence: Synthetic polynucleotide
atgtcttctaaacctgatactggttctgaaatttctggccctcagagacaggaagaacaagaacaacagatagagcagagctctcctacggaagcaaacgatagaagcattcatgatgaggtaccaaaagtcaagaagcgtcacgaacaaaatagtggtcacaaatctagaaggaatagcgcatatagttattacagcccaagatctctttctatgaccaaaagcagggagagtatcactccaaatggtatggatgatgtaagtatttccaacgtggaacatccaaggccgacagaaccgaaaatcaaaaggggtccatatttattgaagaaaacattgagcagtctttctatgacgagcgcgaatagtactcatgatgataataaagaccacggttacgctttgaattcttccaagacgcacaactacacatctactcataaccatcatgacggtcatcatgatcatcatcatgttcagttttttcccaataggaagccatctttagcggaaacccttttcaaaaggttttctgggtctaacagtcacgatggcaataagagtggaaaggaaagtaaagttgctaacctttccctttctacggtaaatcctgcacctgctaataggaaaccttctaaagactccactttatctaatcacttggctgataacgtgccaagcactttaagaaggaaagtgtcctctttggtacgtggttcttccgtccatgatataaataatggtattgcagataaacagattagaccaaaggctgttgcgcaaagtgaaaatacattacattcttccgatgttcccaatagcaaacgctcccacagaaaaagctttttattaggctccacatcttcttctagcagtagaagaggtagtaatgtcagttctatgactaacagtgacagtgcaagtatggcgacgtctggtagtcatgttctccaacataacgtatctaatgtttctccaactactaaaagtaaggacagcgttaacagcgaatccgccgatcacactaataataaatccgagaaagtgactccagaatataatgagaacattccggaaaattctaactctgacaacaaacgcgaagccacaacgcctactatagaaacacccattagttgtaaaccatcccttttcaggttagatacaaaccttgaggatgttactgatattacaaagacggtgccacccaccgctgtcaattctacattaaattctacacacgggactgagactgcctctcccaaaacggtgatcatgcctgaaggtcctaggaagtctgtgtccatggctgatctctccgtcgctgccgcagcacctaatggtgaattcacatctacttccaatgatagatctcaatgggtagcacctcaaagctgggatgtggaaaccaaaaggaaaaaaacaaaacctaaagggagaagtaaatctagaaggtctagtatagatgctgatgaacttgatcccatgtctccggggccaccttccaaaaaagactctcgtcatcatcacgatagaaaggataacgaaagtatggtcactgcgggtgacagtaacagtagttttgttgatatatgtaaagaaaacgttccgaatgatagcaagaccgcactcgatactaaatctgtgaaccgcttaaaaagtaatttggctatgagtcccccaagtataagatatgctccatccaatttagatggggactacgacacgtcttccacttcctcttctttaccgtcctcttctattagttctgaagatacatcttcctgcagcgattcctcttcctacactaacgcgtatatggaggccaacagagagcaggataataaaacaccgatcttgaataaaacgaaaagttataccaagaaatttacatcctcttctgtaaatatgaattctccagatggtgcccagagttctggattattattacaagatgagaaggacgatgaggtcgagtgccaattggaacattactataaagatttcagtgatttagatccaaagaggcactatgctattcgtatattcaatactgatgacacttttacgactctctcctgtactccagcgactaccgtcgaagagataatacctgcacttaaaagaaaatttaacattacagcgcaagggaattttcaaatttccttgaaggtgggaaagttgagtaaaattttgagaccaacttctaaacctattttaattgaaagaaaacttttacttttgaatggttatagaaagagtgacccacttcatattatgggtatagaggatttaagttttgtttttaagtttcttttccatcctgtcacaccttctcactttactcctgaacaagaacaaagaataatgagaagcgaatttgttcacgtagatttaaggaatatggatttgactacacctcccatcattttttaccagcatacgagtgaaatagaaagtttagacgtttctaataacgcaaatatattcttacctttagagttcattgaaagctctattaaattattaagtttgagaatggttaatattagagcatctaaatttccttccaatatcactaaggcgtataaattagtatctttggaattacagagaaacttcataagaaaagtaccgaactctatcatgaaattaagtaatttaacgatattaaaccttcaatgtaatgagcttgaaagcttaccggctggatttgttgaattgaaaaatttacaattgttggacttgtcttccaacaagttcatgcactacccagaagttattaactactgcaccaatcttttacaaatagacttatcttataataaaatccaaagcttaccacagtccactaagtacttggtaaagcttgcgaagatgaacctttctcataacaaattgaattttataggcgacttatctgaaatgacagatttgaggacgttgaacttgagatataacagaatatcttccattaagacaaatgcgtctaacttgcagaacctttttttaacagataatagaatttccaactttgaagacactttgccgaaattgagagcccttgaaattcaagagaatccaatcacttctatatccttcaaagatttttatccaaaaaacatgacaagtttgacgttgaacaaggcacagttatccagtattcctggagaattactcaccaaattatctttcctcgagaaacttgaacttaatcagaataatttgactagattaccacaggagatatccaagttgactaaattagttttcctttctgtggcgagaaacaaattagagtatattccacccgagctttctcaattgaaaagtttgaggacattagatttgcattctaacaacataagggactttgttgacggtatggaaaaccttgaattaacatctttgaatatttcttccaatgcattcggtaactctagcttagaaaattctttttaccataacatgtcttatgggtccaagttatctaaaagcttgatgttttttattgctgcagacaatcaatttgatgatgctatgtggcctcttttcaattgctttgtcaatttgaaagtgttgaatctttcttacaacaatttttctgatgtaagccacatgaaacttgagagcattaccgaattgtacctctccggtaataagctcacgacattgtctggtgatacagttttgaaatggagctctttaaagactttaatgttgaatagtaaccaaatgttatctttgcctgcagaattatccaatctctctcagttgagtgtatttgatgttggagcaaatcaattaaagtataatataagcaactatcattacgattggaactggaggaataataaagaattgaaatatttgaatttttctggaaatagaaggtttgaaataaagagctttataagtcacgatattgatgctgatttgagtgatttaacagtattacctcagttaaaggtattgggtttaatggacgtaactttaaatactaccaaagtaccggatgaaaatgtcaatttccgtttaaggacaactgcatctataataaatgggatgcgctacggtgttgctgatacattaggtcaaagagactatgtgtcttctcgtgatgttacctttgaaagattccgcggaaatgacgacgaatgcttattatgtcttcatgatagtaaaaaccaaaatgcagattatggccacaatatatctagaattgttagagatatttacgataaaatattgatcagacaattggaaaggtatggagacgaaacagatgataatataaaaactgcacttcgtttcagttttttgcaattgaataaggagattaacggaatgttgaattctgttgataatggtgccgatgttgccaatctttcctatgcagacttgttaagtggcgcttgctctactgtgatatatatcagagggaagaaactcttcgctgcaaatttaggtgactgtatggctattttatccaaaaacaatggtgactaccaaacgttgaccaaacaacatctcccaacaaagagagaagaatacgagaggatcagaatatctggcgggtatgtcaacaatggaaaattagatggtgttgtagatgtgtctagagcagtgggtttttttgatttgcttccccacattcatgcttctcccgacatatctgtcgtgacattaacaaaagcagacgagatgcttattgtagcaacgcataagttatgggaatacatggacgtggatacagtttgtgatatcgcgcgtgagaatagtactgatccactccgtgccgcagctgagttgaaggatcatgccatggcttacggctgtacagagaatattacaattttgtgccttgctctttacgagaacattcagcaacaaaatagattcactttaaataaaaactctttaatgactagaagaagtactttcgaggatactacattaagaagacttcaacctgagatttctccgccaacaggtaacttggcaatggtcttcactgatatcaaaagctctaccttcttatgggagcttttccctaacgcaatgaggaccgcaataaaaactcacaatgacattatgcgtcgtcaattaagaatttacggtggttacgaagtaaagacagaaggagacgcctttatggtggcatttcctacgccaactagtggtttaacatggtgcttaagtgttcaattaaaactcttggatgcacaatggccggaggaaattacctctgttcaagacggctgccaagttacggatagaaatggtaacattatctatcaaggcttaagtgttagaatgggtattcattggggctgcccagttccagagcttgatttagtgactcaaagaatggactatttggggccgatggtcaataaggcagcaagggtccagggcgtcgctgacggtggtcagattgcaatgagtagtgatttttactctgaattcaacaagataatgaagtatcatgagagggtagtgaagggcaaggaatctctcaaggaagtttatggtgaagaaattatcggagaggttcttgaaagagaaattgccatgttggaaagtattggttgggcattttttgactttggcgagcataagttgaagggactcgaaaccaaagaactcgttactattgcgtatcctaagattcttgcttccagacacgaatttgcatctgaagatgagcagtccaaattaatcaatgaaacgatgttgtttcgtttaagagtcatttccaacagattagaatctataatgtctgctttaagcggcggatttattgaattagactctaggacggagggaagttatattaaatttaaccctaaagttgaaaatggtattatgcaatctatttctgagaaggatgcgttgttattttttgatcatgtaattactagaatcgaatccagtgtggcattattacatttaagacaacagaggtgttctggattagaaatttgcagaaacgataaaacatctgctagaagcaatattttcaatgttgttgacgaacttttacaaatggttaagaacgcaaaggatttatctacttga

SEQ ID NO: 6117 - DNA, 612 bp, Saccharomyces cerevisiae
atggtttcgataagaaggtatttgcgagtgccgaatgagttgaaaccttcccagatcttcaaacaagattctctctctccaagtaagattggacttcaaattgttcttttacagattttttattacaccacagcgatcgttcttttttattgttgggcgaagctagcgggatatgatctcaatatcaaggaatggctgttttcttgggagaatatcgactttacgaacgcatacggtttatcaatctcactgttatggcttctggattcattaatatgtgtttttttcttaactgttatcgttggacggagtaaactcgcatgggattttgctatcactatacatgccatcaattttattgtggtgttcctctatactcggaaatttccttctttttcttggttttttcttcaaattttatcatctttaatactaatatttttggggacatggacaacaagatggagagagcttagagacaccttttttgagggcttggttgatcctaatgaaggagaagttggattggttacgcctagtcagcagcatagtaatcattcagaattggagcaatcaccaatacaactaaaagacttagaaagccaaatatga

SEQ ID NO: 6118 - DNA, 612 bp, Artificial Sequence
  Description of Artificial Sequence: Synthetic polynucleotide
atggtttctataagaaggtatttgagagtgccgaatgagttgaaaccttcccagatcttcaaacaagattctctctctccaagtaagattggacttcaaattgttcttttacagattttttattacaccacagcgatcgttcttttttattgttgggcgaagttggcgggatatgatctcaatatcaaggaatggttattttcttgggagaatatcgactttacgaacgcatacggtttatctatctctttattatggcttttagattctttaatatgtgtttttttcttaactgttatcgttggaagaagtaaactcgcatgggattttgctatcactatacatgccatcaattttattgtggtgttcctctatactagaaaatttccttctttttcttggttttttcttcaaattttatcttctttaatattaatatttttggggacatggacaacaagatggagagagcttagagacaccttttttgagggcttggttgatcctaatgaaggagaagttggattggttacgcctagtcagcagcatagtaatcattctgaattggagcaatctccaatacaattgaaagacttagaaagccaaatatga

SEQ ID NO: 6119 - DNA, 357 bp, Saccharomyces cerevisiae
atgtcgttcagcggaaaaaaatttaggtctagaagacagcagctagtatatgaagcatctttagcggggcgatacaaaaaagcattgagtaagcacccctttcttttttttggtttaccattttgtgcaacaatagtattgggttcgttttggttgtcaagctttacagcgatcaagtacgagcaaggcgatcgtaaagttcaggaaattaatgaagaggatatcttgaaaataaggaagaatcaaagggaatttgatattaaagaagaatattatcgtttacaaggtctttctgaagaggattgggagcctgtgcgcgtcgctaggttaaaggatgaatctgagaatgtctggtaa

SEQ ID NO: 6120 - DNA, 357 bp, Artificial Sequence
  Description of Artificial Sequence: Synthetic polynucleotide
atgagtttcagcggaaaaaaatttaggtctagaagacagcagttggtatatgaagcatctttagcggggcgttacaaaaaagcattgagtaagcacccctttcttttttttggtttaccattttgtgcaacaatagtattgggttctttttggttgagtagctttacagcgatcaagtacgagcaaggcgatcgtaaagttcaggaaattaatgaagaggatatcttgaaaataaggaagaatcaaagggaatttgatattaaagaagaatattatcgtttacaaggtctttctgaagaggattgggagcctgtgcgcgtcgctaggttaaaggatgaatctgagaatgtctggtga

SEQ ID NO: 6121 - DNA, 1431 bp, Saccharomyces cerevisiae
atgaggcaggtttggttctcttggattgtgggattgttcctatgttttttcaacgtgtcttctgctgcccaatacgagccacctgcgacttgggagaatgttgattataagaggacaatagacgtgtcaaacgcttatatttcagaaacaatcgaaataactatcaaaaacatagcaagcgaacctgcgactgaatacttcacagcctttgagagtggcatcttcagtaaagtttcctttttttcagcctattttaccaacgaggcaacttttttaaatagccaattacttgccaattcgactacagcacctggtgacgatggtgaaagtgaaattagatacgggatcattcaatttccaaatgcaatttcccctcaggaagaagtttctttagtgattaagagcttctataataccgtaggtattccttatcctgagcacgttggaatgtcagaagaacaacacctattgtgggaaacgaacagattgccgctttctgcttacgataccaagaaggcctcttttacgctgattggtagctcatcatttgaggagtaccaccccccaaatgacgagagtttactgggaaaagctaatggaaactcttttgagtttgggccttgggaagatattccgagattttcttcaaacgaaaccttagcaattgtttattcccacaatgccccattgaatcaggtagtgaatttgagaagagatatttggctttctcattgggcttccacaatacaatttgaggaatattatgaattaacaaacaaagccgcaaaactgtctaaaggattttcaagattagaattaatgaaacagattcaaactcagaatatgagacaaactcactttgttactgtcttagacatgctcctgcctgagggagctactgatcattatttcactgatttggttggccttgtttccacgtcgcatgcagaacgtgaccatttctttataagaccaagattcccaatctttggaggttggaactacaattttactgtcggttggactaataaattgtccgatttcttgcatgtatcctctggctcagacgagaaattcgttgcttctatcccaattctaaacggcccaccggacactgtatatgataatgttgaattatcggtatttcttccggaaggggccgaaatattcgatattgattctccagtcccttttacaaatgtttctatagaaacccagaaatcatactttgacctaaataaaggtcacgttaaattaactttcagttacagaaatttgattagtcaagttgccaatggccaagtcttgataaagtacgactacccgaaaagctcttttttcaagaagcctctgtctattgcttgctatattttcaccgcactaatgggagtttttgtcttaaaaactttgaacatgaacgtaactaactga

SEQ ID NO: 6122 - DNA, 1431 bp, Artificial Sequence
  Description of Artificial Sequence: Synthetic polynucleotide
atgaggcaggtttggttctcttggattgtgggattgttcttgtgttttttcaacgtgtcttctgctgcccaatacgagccacctgcgacttgggagaatgttgattataagaggacaatagacgtgtctaacgcttatatttctgaaacaatcgaaataactatcaaaaacatagcaagcgaacctgcgactgaatacttcacagcctttgagagtggcatcttcagtaaagtttcctttttttctgcctattttaccaacgaggcaacttttttaaatagccaattacttgccaattctactacagcacctggtgacgatggtgaaagtgaaattagatacgggatcattcaatttccaaatgcaatttcccctcaggaagaagtttctttagtgattaagagcttctataataccgtaggtattccttatcctgagcacgttggaatgtctgaagaacaacacttattgtgggaaacgaacagattgccgctttctgcttacgataccaagaaggcctcttttacgttgattggtagctcttcttttgaggagtaccaccccccaaatgacgagagtttattaggaaaagctaatggaaactcttttgagtttgggccttgggaagatattccgagattttcttccaacgaaaccttagcaattgtttattcccacaatgccccattgaatcaggtagtgaatttgagaagagatatttggctttctcattgggcttccacaatacaatttgaggaatattatgaattaacaaacaaagccgcaaaattatctaaaggattttccagattagaattaatgaaacagattcaaactcagaatatgagacaaactcactttgttactgtcttagacatgctcttacctgagggagctactgatcattatttcactgatttggttggccttgtttccacgagtcatgcagaacgtgaccatttctttataagaccaagattcccaatctttggaggttggaactacaattttactgtcggttggactaataaattgtccgatttcttgcatgtatcctctggctctgacgagaaattcgttgcttctatcccaattttgaacggcccaccggacactgtatatgataatgttgaattaagtgtatttcttccggaaggggccgaaatattcgatattgattctccagtcccttttacaaatgtttctatagaaacccagaaatcttactttgacttgaataaaggtcacgttaaattaactttcagttacagaaatttgattagtcaagttgccaatggccaagtcttgataaagtacgactacccgaaaagctcttttttcaagaagcctttatctattgcttgctatattttcaccgcattaatgggagtttttgtcttaaaaactttgaacatgaacgtaactaactga

SEQ ID NO: 6123 - DNA, 648 bp, Saccharomyces cerevisiae
atgaatggaattcaagtggacatcaatcgtttgaaaaagggcgaagtcagtttaggtacctcaattatggccgtgacatttaaggatggtgtgatactaggtgctgattcacgtaccaccactggtgcgtacatagctaaccgtgtgacagataaattaacgagagtacatgacaaaatttggtgttgtaggtccggttctgcagcagacacgcaggcgattgccgacattgttcagtaccatttggaattatatacttctcaatatggtaccccctccacagagactgctgcctcggtgttcaaagaattatgttacgaaaataaagataaccttactgctggtataattgtggctggttatgatgacaaaaacaaaggggaagtatatactattccattgggtggctccgtccataagctgccttatgcgatagcaggatctggctctactttcatatatgggtattgtgataaaaactttagagaaaatatgtcaaaggaagaaaccgtagatttcataaagcattcgctatcgcaagccattaaatgggacggatcttccggtggtgttataagaatggttgttttgacagctgctggtgtggaacgtttgatattctaccctgatgaatatgaacaactataa

SEQ ID NO: 6124 - DNA, 648 bp, Artificial Sequence
  Description of Artificial Sequence: Synthetic polynucleotide
atgaatggaattcaagtggacatcaatcgtttgaaaaagggcgaagtcagtttaggtacctctattatggccgtgacatttaaggatggtgtgatattaggtgctgattctcgtaccaccactggtgcgtacatagctaaccgtgtgacagataaattaacgagagtacatgacaaaatttggtgttgtaggtccggttctgcagcagacacgcaggcgattgccgacattgttcagtaccatttggaattatatacttctcaatatggtaccccctccacagagactgctgcctctgtgttcaaagaattatgttacgaaaataaagataaccttactgctggtataattgtggctggttatgatgacaaaaacaaaggggaagtatatactattccattgggtggctccgtccataagttaccttatgcgatagcaggatctggctctactttcatatatgggtattgtgataaaaactttagagaaaatatgtccaaggaagaaaccgtagatttcataaagcattctttatctcaagccattaaatgggacggatcttccggtggtgttataagaatggttgttttgacagctgctggtgtggaacgtttgatattctaccctgatgaatatgaacaattatga

SEQ ID NO: 6125 - DNA, 1809 bp, Saccharomyces cerevisiae
atgcctgagcaagaaccattgagtcccaatggccgtaagcgctctgaggttcactatatctcaatcccattgaacagaggttccgcattctcaccagatgattctgtatcacagtttcagtctgacgggttcatgacacgtaggcaatccatattggaccatcctgtgggctcatttaagggagttaattctttaagtcgatttgcgacttcgttgaggagagccaattcgtttcgtaatatcgagctaaatgcggataatgaaagatcctttttcaaagagagtaacgatgaaacctacgatccggatactttagcaccagctttggacggtagaagattatcagtaactttaaataatgctggtcgcccgcgcattactaatttggctaacaacgatagagttagtacagccagcatggctattcacgatgatgattatgggtccatccaaaattcaacaattggggattctgggtcaatattacgccctactgcctccttaacagaaatgatgagtggtggagcggggagaaggtttacaaataatgacatggattcaattgtagtgaagagagtggagggtgtagatggtaaggtagtaactcttcttgctggtcagtcgaccgctccacagaccatattcaactcaatcaatgtactgattggtattgggctcctggcgttacctcttggtttgaaatacgccggctgggttataggacttactatgcttgcaatcttcgccttagcgacattttgtactgctgaacttttgtctaggtgcctagatacagatccaactttgatatcttacgcggacttgggatatgcagcatttggtacaaaagggcgcgcactaatttctgctcttttcacacttgacctactgggtagtggggtgtccttggtgattctcttcggagattctttaaatgctctatttcctcaatactccaccacttttttcaaaatagtttcattttttatcgttacacccccggtttttataccattgagtgttctatctaatatctcgcttctgggaatcctttcaacaaccggaactgtgctagtcatttgctgctgcggactatacaagtcgtcttctccaggttcattagttaatccgatggaaacgagcatgtggccgatagatctaaagcatctctgtttatctataggtttattgagtgcctgctggggaggacatgcggtttttcccaacttaaagacagatatgaggcatccagataaatttaaagactgtttgaaaactacctataagataacatcggttacggacataggtactgcagttattggctttttgatgtttggaaatcttgttaaagatgaaattactaagaacgttttgctgacggagggatatccaaaattcgtttatggtctgatttcagcgcttatgactatcattcctatcgcaaagaccccattgaacgcaagacctatcgtttctgtattggacgttctgatgaatgtgcaacacatagatgaagcggccagcgccataaaaagaagagctgcgaaaggccttcaagtattcaataggatctttattaatgttgtcttcgttttgatagctattaatttccctgaatttgataagattatcgcatttctgggggccggtttgtgttttacaatttgcctaattttgccgtgttggttctatttaagattgtgcaagacaacaatcaaaccatgggagagagtggcttgtcacgtaaccatatgtattagtgtcgtgttgtccacattaggtgttggtgctgcaattatttcataa

SEQ ID NO: 6126 - DNA, 1809 bp, Artificial Sequence
  Description of Artificial Sequence: Synthetic polynucleotide
atgcctgagcaagaaccattgagtcccaatggccgtaagcgctctgaggttcactatatctccatcccattgaacagaggttccgcattctctccagatgattctgtatctcagtttcagtctgacgggttcatgacacgtaggcaatccatattggaccatcctgtgggctcttttaagggagttaattctttaagtagatttgcgacttctttgaggagagccaattcttttcgtaatatcgagttgaatgcggataatgaaagatcctttttcaaagagagtaacgatgaaacctacgatccggatactttagcaccagctttggacggtagaagattaagtgtaactttaaataatgctggtcgcccgcgcattactaatttggctaacaacgatagagttagtacagccagcatggctattcacgatgatgattatgggtccatccaaaattctacaattggggattctgggtccatattacgccctactgcctccttaacagaaatgatgagtggtggagcggggagaaggtttacaaataatgacatggattctattgtagtgaagagagtggagggtgtagatggtaaggtagtaactcttcttgctggtcagtctaccgctccacagaccatattcaactctatcaatgtacttattggtattgggctccttgcgttacctcttggtttgaaatacgccggctgggttataggacttactatgcttgcaatcttcgccttagcgacattttgtactgctgaacttttgtctaggtgcttagatacagatccaactttgatatcttacgcggacttgggatatgcagcatttggtacaaaagggcgcgcattgatttctgctcttttcacacttgacttattgggtagtggggtgtccttggtgattctcttcggagattctttaaatgctttgtttcctcaatactccaccacttttttcaaaatagtttctttttttatcgttacacccccggtttttataccattgagtgttttatctaatatctctcttttgggaatcctttctacaaccggaactgtgttggtcatttgctgctgcggattatacaagtcttcttctccaggttctttagttaatccgatggaaacgagcatgtggccgatagatttgaagcatctctgtttatctataggtttattgagtgcctgctggggaggacatgcggtttttcccaacttaaagacagatatgaggcatccagataaatttaaagactgtttgaaaactacctataagataacatctgttacggacataggtactgcagttattggctttttgatgtttggaaatcttgttaaagatgaaattactaagaacgttttgttgacggagggatatccaaaattcgtttatggtttgattagtgcgcttatgactatcattcctatcgcaaagaccccattgaacgcaagacctatcgtttctgtattggacgttttgatgaatgtgcaacacatagatgaagcggccagcgccataaaaagaagagctgcgaaaggccttcaagtattcaataggatctttattaatgttgtcttcgttttgatagctattaatttccctgaatttgataagattatcgcatttttgggggccggtttgtgttttacaatttgcttgattttgccgtgttggttctatttaagattgtgcaagacaacaatcaaaccatgggagagagtggcttgtcacgtaaccatatgtattagtgtcgtgttgtccacattaggtgttggtgctgcaattatttcttga

SEQ ID NO: 6127 - DNA, 1782 bp, Saccharomyces cerevisiae
atgtcagaactctttggagtattgaaatctaatgctggcagaattattttgaaggacccctccgccacttctaaagatgttaaagcatatatagattcagttatcaatacctgtaagaatgggagtattacaaagaaagcagaactggacgaaatcactgttgatggtttagacgccaatcaagtttggtggcaggtcaaactagttcttgatagtattgatggtgatctaattcaaggaattcaagaactcaaagatgttgtcacgccttctcacaatctctctgatggtagcaccctgaactcatcatccggggaagaaagtgaactagaggaggcagaaagtgtttttaaagaaaagcagatgctctctgctgatgtttctgagattgaggagcagagtaatgatagtctttccgagaacgatgaagaacctagtatggatgacgaaaaaaccagtgcagaggcagctagagaagaatttgcggaggaaaaaagaatttcttctgggcaagatgaaaggcattcttcacccgatccttatggtatcaatgataagtttttcgatctcgaaaagttcaatagggatactttagctgcagaagattctaacgaagcttctgaggggagtgaggatgaagatatagattattttcaagatatgccttcagatgacgaggaggaggaggctatttattatgaagacttttttgacaaacccacaaaagaacctgtgaagaagcactctgacgtaaaagatccaaaagaagatgaagaattggatgaagaagagcatgattctgccatggataaagtgaaattagacttatttgcggatgaggaagatgaaccgaatgctgagggagtgggagaagccagtgacaagaacttatctagtttcgaaaagcaacaaatagagattagaaaacagatagaacaattggaaaacgaagcggttgccgagaagaaatggtctttgaagggtgaagtaaaggcaaaggatcgtcccgaagatgcattgctcactgaggaacttgaattcgacagaactgcaaagcctgttcctgttataacaagtgaggtcacagaatcattagaagatatgattagacgaaggatacaggacagtaactttgacgaccttcaaagaagaaccctgttagacatcacacgtaagtctcaacggcctcaatttgaattgagtgatgttaaatcctcgaagtcgttagcagaaatatatgaggatgactacacacgcgctgaagatgaatctgcattaagtgaagagcttcaaaaggcacattccgaaatatcagaactttatgctaacttggtatataaattggatgtgctttcatcagtgcacttcgttcctaagccagcaagtacttctttggaaattagagttgaaacacccactatatcgatggaggatgctcaacctctctatatgtcgaatgcctcttctttggctcctcaagagatatacaatgtcggtaaagcagaaaaggacggagaaattcgcttgaagaatggtgttgcaatgtctaaggaagaattaaccagagaagataaaaacagattgcgcagggctttgaaaagaaaaagatcgaaagctaatttgccaaatgtaaacaaaagatctaaaaggaatgatgttgttgacactttgtcaaaagccaagaatattactgttatcaatcaaaagggtgaaaagaaagatgtttccggtaaaacgaagaagagcagatcagggccagatagcacaaatataaaactttga

SEQ ID NO: 6128 - DNA, 1782 bp, Artificial Sequence
  Description of Artificial Sequence: Synthetic polynucleotide
atgtctgaactctttggagtattgaaatctaatgctggcagaattattttgaaggacccctccgccacttctaaagatgttaaagcatatatagattctgttatcaatacctgtaagaatgggagtattacaaagaaagcagaattagacgaaatcactgttgatggtttagacgccaatcaagtttggtggcaggtcaaattggttcttgatagtattgatggtgatttgattcaaggaattcaagaactcaaagatgttgtcacgccttctcacaatctctctgatggtagcaccttgaactcttcttccggggaagaaagtgaattagaggaggcagaaagtgtttttaaagaaaagcagatgctctctgctgatgtttctgagattgaggagcagagtaatgatagtctttccgagaacgatgaagaacctagtatggatgacgaaaaaaccagtgcagaggcagctagagaagaatttgcggaggaaaaaagaatttcttctgggcaagatgaaaggcattcttctcccgatccttatggtatcaatgataagtttttcgatctcgaaaagttcaatagggatactttagctgcagaagattctaacgaagcttctgaggggagtgaggatgaagatatagattattttcaagatatgccttctgatgacgaggaggaggaggctatttattatgaagacttttttgacaaacccacaaaagaacctgtgaagaagcactctgacgtaaaagatccaaaagaagatgaagaattggatgaagaagagcatgattctgccatggataaagtgaaattagacttatttgcggatgaggaagatgaaccgaatgctgagggagtgggagaagccagtgacaagaacttatctagtttcgaaaagcaacaaatagagattagaaaacagatagaacaattggaaaacgaagcggttgccgagaagaaatggtctttgaagggtgaagtaaaggcaaaggatcgtcccgaagatgcattgctcactgaggaacttgaattcgacagaactgcaaagcctgttcctgttataacaagtgaggtcacagaatctttagaagatatgattagaagaaggatacaggacagtaactttgacgaccttcaaagaagaaccttattagacatcacacgtaagtctcaaagacctcaatttgaattgagtgatgttaaatcctccaagtctttagcagaaatatatgaggatgactacacacgcgctgaagatgaatctgcattaagtgaagagcttcaaaaggcacattccgaaatatctgaactttatgctaacttggtatataaattggatgtgctttcttctgtgcacttcgttcctaagccagcaagtacttctttggaaattagagttgaaacacccactatatccatggaggatgctcaacctctctatatgagtaatgcctcttctttggctcctcaagagatatacaatgtcggtaaagcagaaaaggacggagaaattcgcttgaagaatggtgttgcaatgtctaaggaagaattaaccagagaagataaaaacagattgcgcagggctttgaaaagaaaaagaagtaaagctaatttgccaaatgtaaacaaaagatctaaaaggaatgatgttgttgacactttgagtaaagccaagaatattactgttatcaatcaaaagggtgaaaagaaagatgtttccggtaaaacgaagaagagcagaagcgggccagatagcacaaatataaaactttga

SEQ ID NO: 6129 - DNA, 1560 bp, Saccharomyces cerevisiae
atgttacgctctcttcattctgcggctacgttatctaacaagaggttttactctctcatatctcattcaaatagaaagaacataatcaaaaagcttctacgtcacccttctttcgatccaattcgtcatcatttgcctgaagatataaccaccattgacccatactctctatcgcagaatgttatcgaaagtttaaacaaattagaggttcctaaaaaggatgcggccatggtacacaatatgatgatagaaaacttaagtgatcttgactacggcgttgcaacaattcactcaaataatttgcgtgatcttgatttaaaaccttcacttcccgccatcaaacaaattattaggaataatccaggaagagtacaaagctcttgggaactttttacacaatacaaggcctcaatggaaaatgttcctgatgaactgatggaagtggtcttagaaaaaattatcaagtttgacaaggcagaaaaggttgatggaaaaaagagtctgacttatcaagacctcgttagatgtctttatttaatcaaccatttttcttcaaattataatttgccttcagagctcgtggaacctatccttatttacatagtggacaacggaattcccaatgttttaggttctgtactcaaatataaaataccgctgagcttttttgataagtatgtcagtgaaatgacacaataccaaatttgtgaactttatgatttttattcgcttgataatatagtagctgatccattagtactacacaagtgtctaactgttctgggcgaaaacgagaaaattcagcaaactgaagaagaaaaagaaattattagcaagttggaggaagaaatagatattgttaaatcacaatgtcatgataattggagcctcgaatttccgaattggagtgtacgcaaaactgcaacttcattcgaagaattatttttagagatccaaaaaagaaacatagacaagaaggatttcgaattagctcacaagctgttaagattaattggcgctttcaaaggtaaagtttctctattttttaaattatacgacgaatatctcttaaaattcaaaaataatgaggacgacttaatgtttgaagcgtttttaacgctctgctgccagggttataaaagcagtaatgaaaaaatgctacaatacgctgaagcttttattaaagaagactttgattccaaactagagagtaaaattcaaagtgtgttaattgttgctaacgcgaaagcaaatattgatctatctctcaaaatttacaattctaatatatctactgctaaacgagagaaagataagtacacagatcttgctgaaagtgacgtattaactgaatcgctcattttagcattcttatccagagatgatgctgattttgccagggtcatctttgatggcgcactaggagaaaagctgatatcagggccgactgctgcaaaaaaaataaaaaatctcttagcccagtatggagaagcgttagaaacaaaaacaagcaaacaagttatgcagactaagatagaacattatatggaaagcatataa

SEQ ID NO: 6130 - DNA, 1560 bp, Artificial Sequence
  Description of Artificial Sequence: Synthetic polynucleotide
atgttacgctctcttcattctgcggctacgttatctaacaagaggttttactctctcatatctcattctaatagaaagaacataatcaaaaagcttttgcgtcacccttctttcgatccaattcgtcatcatttgcctgaagatataaccaccattgacccatactctttatctcagaatgttatcgaaagtttaaacaaattagaggttcctaaaaaggatgcggccatggtacacaatatgatgatagaaaacttaagtgatcttgactacggcgttgcaacaattcactctaataatttgcgtgatcttgatttaaaaccttctcttcccgccatcaaacaaattattaggaataatccaggaagagtacaaagctcttgggaactttttacacaatacaaggcctctatggaaaatgttcctgatgaattgatggaagtggtcttagaaaaaattatcaagtttgacaaggcagaaaaggttgatggaaaaaagagtttgacttatcaagacctcgttagatgtctttatttaatcaaccatttttcttccaattataatttgccttctgagctcgtggaacctatccttatttacatagtggacaacggaattcccaatgttttaggttctgtactcaaatataaaataccgttaagcttttttgataagtatgtcagtgaaatgacacaataccaaatttgtgaactttatgatttttattctcttgataatatagtagctgatccattagtattacacaagtgtttaactgttttaggcgaaaacgagaaaattcagcaaactgaagaagaaaaagaaattattagcaagttggaggaagaaatagatattgttaaatctcaatgtcatgataattggagcctcgaatttccgaattggagtgtacgcaaaactgcaacttctttcgaagaattatttttagagatccaaaaaagaaacatagacaagaaggatttcgaattagctcacaagcttttaagattaattggcgctttcaaaggtaaagtttctttattttttaaattatacgacgaatatctcttaaaattcaaaaataatgaggacgacttaatgtttgaagcgtttttaacgctctgctgccagggttataaaagcagtaatgaaaaaatgttacaatacgctgaagcttttattaaagaagactttgattccaaattagagagtaaaattcaaagtgtgttaattgttgctaacgcgaaagcaaatattgatttatctctcaaaatttacaattctaatatatctactgctaaaagagagaaagataagtacacagatcttgctgaaagtgacgtattaactgaatctctcattttagcattcttatccagagatgatgctgattttgccagggtcatctttgatggcgcattgggagaaaagttaataagcgggccgactgctgcaaaaaaaataaaaaatctcttagcccagtatggagaagcgttagaaacaaaaacaagcaaacaagttatgcagactaagatagaacattatatggaaagcatatga

SEQ ID NO: 6131 - DNA, 1953 bp, Saccharomyces cerevisiae
atgttcacttttctcaaaattattctgtggcttttttccttggcattggcctctgctataaatatcaacgatatcacattttccaatttagaaattactccactgactgcaaataaacaacctgatcaaggttggactgccacttttgattttagtattgcagatgcgtcttccattagggagggcgatgaattcacattatcaatgccacatgtttataggattaagctattaaactcatcgcaaacagctactatttccttagcggatggtactgaggctttcaaatgctatgtttcgcaacaggctgcatacttgtatgaaaatactactttcacatgtactgctcaaaatgacctgtcctcctataatacgattgatggatccataacattttcgctaaattttagtgatggtggttccagctatgaatatgagttagaaaacgctaagtttttcaaatctgggccaatgcttgttaaacttggtaatcaaatgtcagatgtggtgaatttcgatcctgctgcttttacagagaatgtttttcactctgggcgttcaactggttacggttcttttgaaagttatcatttgggtatgtattgtccaaacggatatttcctgggtggtactgagaagattgattacgacagttccaataacaatgtcgatttggattgttcttcagttcaggtttattcatccaatgattttaatgattggtggttcccgcaaagttacaatgataccaatgctgacgtcacttgttttggtagtaatctgtggattacacttgacgaaaaactatatgatggggaaatgttatgggttaatgcattacaatctctacccgctaatgtaaacacaatagatcatgcgttagaatttcaatacacatgccttgataccatagcaaatactacgtacgctacgcaattctcgactactagggaatttattgtttatcagggtcggaacctcggtacagctagcgccaaaagctcttttatctcaaccactactactgatttaacaagtataaacactagtgcgtattccactggatccatttccacagtagaaacaggcaatcgaactacatcagaagtgatcagccatgtggtgactaccagcacaaaactgtctccaactgctactaccagcctgacaattgcacaaaccagtatctattctactgactcaaatatcacagtaggaacagatattcacaccacatcagaagtgattagtgatgtggaaaccattagcagagaaacagcttcgaccgttgtagccgctccaacctcaacaactggatggacaggcgctatgaatacttacatctcgcaatttacatcctcttctttcgcaacaatcaacagcacaccaataatctcttcatcagcagtatttgaaacctcagatgcttcaattgtcaatgtgcacactgaaaatatcacgaatactgctgctgttccatctgaagagcccacttttgtaaatgccacgagaaactccttaaattccttctgcagcagcaaacagccatccagtccctcatcttatacgtcttccccactcgtatcgtccctctccgtaagcaaaacattactaagcaccagttttacgccttctgtgccaacatctaatacatatatcaaaacgaaaaatacgggttactttgagcacacggctttgacaacatcttcagttggccttaattcttttagtgaaacagcagtctcatctcagggaacgaaaattgacacctttttagtgtcatccttgatcgcatatccttcttctgcatcaggaagccaattgtccggtatccaacagaatttcacatcaacttctctcatgatttcaacctatgaaggtaaagcgtctatatttttctcagctgagctcggttcgatcatttttctgcttttgtcgtacctgctattctaa

SEQ ID NO: 6132 - DNA, 1953 bp, Artificial Sequence
  Description of Artificial Sequence: Synthetic polynucleotide
atgttcacttttctcaaaattattttatggcttttttccttggcattggcctctgctataaatatcaacgatatcacattttccaatttagaaattactccattgactgcaaataaacaacctgatcaaggttggactgccacttttgattttagtattgcagatgcgtcttccattagggagggcgatgaattcacattatctatgccacatgtttataggattaagcttttaaactcttctcaaacagctactatttccttagcggatggtactgaggctttcaaatgctatgtttctcaacaggctgcatacttgtatgaaaatactactttcacatgtactgctcaaaatgacttatcctcctataatacgattgatggatccataacattttctttgaattttagtgatggtggttccagctatgaatatgagttagaaaacgctaagtttttcaaatctgggccaatgcttgttaaacttggtaatcaaatgagtgatgtggtgaatttcgatcctgctgcttttacagagaatgtttttcactctgggcgttccactggttacggttcttttgaaagttatcatttgggtatgtattgtccaaacggatatttcttgggtggtactgagaagattgattacgacagttccaataacaatgtcgatttggattgttcttctgttcaggtttattcttccaatgattttaatgattggtggttcccgcaaagttacaatgataccaatgctgacgtcacttgttttggtagtaatttatggattacacttgacgaaaaactttatgatggggaaatgttatgggttaatgcattacaatctttacccgctaatgtaaacacaatagatcatgcgttagaatttcaatacacatgccttgataccatagcaaatactacgtacgctacgcaattctctactactagggaatttattgtttatcagggtagaaacctcggtacagctagcgccaaaagctcttttatctccaccactactactgatttaacaagtataaacactagtgcgtattccactggatccatttccacagtagaaacaggcaatagaactacaagtgaagtgatcagccatgtggtgactaccagcacaaaattatctccaactgctactaccagcttaacaattgcacaaaccagtatctattctactgactctaatatcacagtaggaacagatattcacaccacaagtgaagtgattagtgatgtggaaaccattagcagagaaacagctagcaccgttgtagccgctccaacctctacaactggatggacaggcgctatgaatacttacatctctcaatttacatcctcttctttcgcaacaatcaacagcacaccaataatctcttcttctgcagtatttgaaacctctgatgcttccattgtcaatgtgcacactgaaaatatcacgaatactgctgctgttccatctgaagagcccacttttgtaaatgccacgagaaactccttaaattccttctgcagcagcaaacagccatccagtccctcttcttatacgtcttccccactcgtatcttccctctccgtaagcaaaacattattaagcaccagttttacgccttctgtgccaacatctaatacatatatcaaaacgaaaaatacgggttactttgagcacacggctttgacaacatcttctgttggccttaattcttttagtgaaacagcagtcagctctcagggaacgaaaattgacacctttttagtgtcttccttgatcgcatatccttcttctgcatctggaagccaattgtccggtatccaacagaatttcacatctacttctctcatgatttctacctatgaaggtaaagcgtctatatttttcagtgctgagctcggttctatcatttttttacttttgagttacttgttattctga

SEQ ID NO: 6133 - DNA, 2103 bp, Saccharomyces cerevisiae
atgtccgatcaaaaagtttttgccagatataaagcaaatgaaatcgtcacagatctgcaacattttggagtaaaaaagtttaaatcgaatataacaagaaggaaaaatgctctgagaaaaattatcgccaatttggttctaggaaactatggcgaaatgtccgttctgttttctgagctcttgaaattttggcaaattgaagatgatctagaagtgaaaagaatttgccatgagtatattagggtgatcggcgcattaaaacctcagcaggccagagaggctttgccatttataatggacgatttcaaaagcagagatgaaaagttacaaataatggcactaagaactctggtattagtcccggtgaaagagctatctgatcaggccttcgactgtatcatttcattggtaaatcacaagtctccacctgaacaagtgacgaggacagcaatttacgcactgttggatttagatgaaattgatcatgaaagggtattggggttatcaagcattctacatgacattgtaaaagcacagtcgagctctccagaagtcattgtagctgcattacatactttatattccattcacgaaaaaaacgctaacatggaacccttcaggattcccttggaactcgcttttgacatgctagagcttttacccgaattaaatgagtggaataaggctactgttttggaagttttgacgacttcggttgtgccgcagcattatttggatacccatgaaatgatcgaactagctttaccgtacctgcaacaagtaaacacatacgtagtgttgaactctttaaaattcatcatgtacttgttgaattatgttgacgtcatcaaagaaactctagccgaaaagctatctaactctgtaatagctttgttagataagccgcctgaattacaatttttagtattaagaaacgttattcttcttttattgagtagggagtcatctctactcaggctagacatttcgtattttttcatcgagtacaatgaccccatatacatcaaagacacgaaattagagtgtttatatcttttagctaacaaggaaacattaccaagaattctagaagagttggaacaatatgctacagatattgatattcaaatgtcaaggaaatcagtcagagccattggtaatctggctgttaagctagatgaagactctgtacacgattgtgtcgctgttctactagatttgttagaattcggtgttgattatgtcgtccaggagattatttcggttttcagaaatattttgaggaaatatcccaataattttaaagcaaacgtaacagaactagtcaaacacactgaagttgtacaggaacctgaatcaaaaaacgctatgatctggataataacgcaatattcggatgtaattccaaactacctggagttatttagagttttttcctcaaacatgtttagtgagacgctagaagtgcaattttccattctgaactcagcaataaaattcttcatcagaagtcctacaaaggaaactgaagaactttgtatggatttattaaaaggatgcatcgatcacgaaaataatcctgacttaagagataaaacactgatgtattggagattgctgtcattaacgaaaacgtctcgtatatcaaacgcgataacttttgaatctttaaaatcagtactggacggagagttgccactaatagaaatgaacacgaaattagatcccaccgttttggaggaattggagctaaacattggtacaatagtatcgatttacttaaaacctgtttctcatatctttagattgaataaaaccaaactgctaccacaaagtcctattttgaatccaaacaaagacctcttgccagttgtaggtaactcatttcctccaactggagctaatagggaccgtcaaaattcagaaagccagtcctcgacgaagtccagaaagactgctatgatggatgattatgataagcccgctgaaaaaattaatcagttgaaaggtaagcgtaaatctagttcaaacaacccctcaaaactatcacggaaaccctcaactttattaagaaaactctctatgaaacggcccttttcgtga

SEQ ID NO: 6134 - DNA, 2103 bp, Artificial Sequence
  Description of Artificial Sequence: Synthetic polynucleotide
atgtccgatcaaaaagtttttgccagatataaagcaaatgaaatcgtcacagatttgcaacattttggagtaaaaaagtttaaatctaatataacaagaaggaaaaatgctttgagaaaaattatcgccaatttggttttaggaaactatggcgaaatgtccgttttattttctgagctcttgaaattttggcaaattgaagatgatttggaagtgaaaagaatttgccatgagtatattagggtgatcggcgcattaaaacctcagcaggccagagaggctttgccatttataatggacgatttcaaaagcagagatgaaaagttacaaataatggcattgagaactttggtattagtcccggtgaaagagctttctgatcaggccttcgactgtatcatttctttggtaaatcacaagtctccacctgaacaagtgacgaggacagcaatttacgcattattggatttagatgaaattgatcatgaaagggtattggggttatccagcattttgcatgacattgtaaaagcacagagtagctctccagaagtcattgtagctgcattacatactttatattccattcacgaaaaaaacgctaacatggaacccttcaggattcccttggaactcgcttttgacatgttagagcttttacccgaattaaatgagtggaataaggctactgttttggaagttttgacgacttctgttgtgccgcagcattatttggatacccatgaaatgatcgaattggctttaccgtacttacaacaagtaaacacatacgtagtgttgaactctttaaaattcatcatgtacttgttgaattatgttgacgtcatcaaagaaactttggccgaaaagttatctaactctgtaatagctttgttagataagccgcctgaattacaatttttagtattaagaaacgttattcttcttttattgagtagggagtcttctttactcaggttggacatttcttattttttcatcgagtacaatgaccccatatacatcaaagacacgaaattagagtgtttatatcttttagctaacaaggaaacattaccaagaattttggaagagttggaacaatatgctacagatattgatattcaaatgtctaggaaatctgtcagagccattggtaatttggctgttaagttggatgaagactctgtacacgattgtgtcgctgttttgttggatttgttagaattcggtgttgattatgtcgtccaggagattatttctgttttcagaaatattttgaggaaatatcccaataattttaaagcaaacgtaacagaattggtcaaacacactgaagttgtacaggaacctgaaagtaaaaacgctatgatctggataataacgcaatattctgatgtaattccaaactacttggagttatttagagttttttccagtaacatgtttagtgagacgttagaagtgcaattttccattttgaactctgcaataaaattcttcatcagaagtcctacaaaggaaactgaagaactttgtatggatttattaaaaggatgcatcgatcacgaaaataatcctgacttaagagataaaacattgatgtattggagattgttatctttaacgaaaacgtctcgtataagcaacgcgataacttttgaatctttaaaatctgtattggacggagagttgccattgatagaaatgaacacgaaattagatcccaccgttttggaggaattggagttgaacattggtacaatagtatctatttacttaaaacctgtttctcatatctttagattgaataaaaccaaattattaccacaaagtcctattttgaatccaaacaaagacctcttgccagttgtaggtaactcttttcctccaactggagctaatagggaccgtcaaaattctgaaagccagtcctctacgaagtccagaaagactgctatgatggatgattatgataagcccgctgaaaaaattaatcagttgaaaggtaagcgtaaatctagtagtaacaacccctctaaattatccagaaaaccctccactttattaagaaaactctctatgaaaaggccctttagttga

SEQ ID NO: 6135 - DNA, 282 bp, Saccharomyces cerevisiae
atgcataatactggcaagagatactcagaaactgccaaaaaagtggcagcaggaagagcaagaaaacgtaggcaagcttacgaaaaggaccaactagagaaacaacaactagaagctcaagaagctcagaggtgggaagaaggtgcgagaacccctaaccagaagaagctgattatggaacaaaaaaagacagagaagctaagagccaaaaaggaaagagaccaattactagccgccgaagaggaagctttaggtaagggaggcaggggaaaaagatactga

SEQ ID NO: 6136 - DNA, 282 bp, Artificial Sequence
  Description of Artificial Sequence: Synthetic polynucleotide
atgcataatactggcaagagatactctgaaactgccaaaaaagtggcagcaggaagagcaagaaaacgtaggcaagcttacgaaaaggaccaattggagaaacaacaattggaagctcaagaagctcagaggtgggaagaaggtgcgagaacccctaaccagaagaagttgattatggaacaaaaaaagacagagaagttgagagccaaaaaggaaagagaccaattattagccgccgaagaggaagctttaggtaagggaggcaggggaaaaagatactga

SEQ ID NO: 6137 - DNA, 1464 bp, Saccharomyces cerevisiae
atggacgcattgttaacaaagttcaacgaggatagaagtctccaagatgaaaacttgtcccaaccacgaacgagagtaagaattgttgacgacaatctttacaacaaatcgaatccattccaactatgctataaaaaacgtgactacggttctcagtactaccacatttatcaataccgtctaaagactttcagagaacgcgtcttaaaagaatgtgacaagagatgggatgcgggctttaccttgaatggccaattagttctaaaaaaggacaaagtgttagatattcagggaaaccaaccatgttggtgcgtaggatccatatattgcgagatgaaatataaaccaaacgtactggacgaagtgatcaatgatacatatggtgcaccagatttaactaaaagttatactgataaagagggtggttctgatgaaattatgctcgaagatgaaagtgggagagtgcttctagtgggagattttattcggtctacacccttcatcacgggtgttgttgtaggtatactgggtatggaagctgaagccgggacatttcaagttttagacatatgctaccccactcctttaccacaaaatcctttccctgcaccaattgctacctgccccaccaggggaaaaattgctcttgtttctgggttaaacctcaataatacatcacctgataggctattgagattggagattttgagagaatttttgatggggagaatcaataacaaaattgacgacatttctctaattggtagattactgatatgcggcaactctgttgacttcgacattaaaagcgtgaacaaagacgaattgatgatttctctaactgagttcagtaaatttctacacaacattttgccatctatatctgttgatattatgcccggaaccaatgatccaagtgacaaatctctaccgcaacagcctttccacaaatcattgtttgataagtccctagaatcatacttcaacggttctaacaaagaaattttgaatttagtgaccaacccatatgagtttagctataatggcgtagacgttctagccgtttcaggcaaaaatatcaatgatatttgtaaatacgtaataccatcaaatgataacggagaaagtgaaaacaaggtcgaggagggcgagagtaatgatttcaaagacgatatagagcatcgcctggaccttatggaatgtacaatgaaatggcaaaacatcgcgcccaccgcacctgataccttatggtgttatccgtacactgataaggatccatttgtattggataagtggccccacgtttacattgtggcaaaccagccatattttggaacaagagtagtggaaataggtggtaagaacataaagataatatctgtccctgaattcagttctactgggatgataatattactggatttggaaacgttagaagcagagacggtcaagattgacatttaa

SEQ ID NO: 6138 - DNA, 1464 bp, Artificial Sequence
  Description of Artificial Sequence: Synthetic polynucleotide
atggacgcattgttaacaaagttcaacgaggatagaagtctccaagatgaaaacttgtcccaaccaagaacgagagtaagaattgttgacgacaatctttacaacaaatctaatccattccaattatgctataaaaaacgtgactacggttctcagtactaccacatttatcaataccgtttgaagactttcagagaacgcgtcttaaaagaatgtgacaagagatgggatgcgggctttaccttgaatggccaattagttttgaaaaaggacaaagtgttagatattcagggaaaccaaccatgttggtgcgtaggatccatatattgcgagatgaaatataaaccaaacgtattggacgaagtgatcaatgatacatatggtgcaccagatttaactaaaagttatactgataaagagggtggttctgatgaaattatgctcgaagatgaaagtgggagagtgcttttagtgggagattttattagatctacacccttcatcacgggtgttgttgtaggtatattaggtatggaagctgaagccgggacatttcaagttttagacatatgctaccccactcctttaccacaaaatcctttccctgcaccaattgctacctgccccaccaggggaaaaattgctcttgtttctgggttaaacctcaataatacatctcctgataggttattgagattggagattttgagagaatttttgatggggagaatcaataacaaaattgacgacatttctttgattggtagattattgatatgcggcaactctgttgacttcgacattaaaagcgtgaacaaagacgaattgatgatttctttgactgagttcagtaaatttttgcacaacattttgccatctatatctgttgatattatgcccggaaccaatgatccaagtgacaaatctttaccgcaacagcctttccacaaatctttgtttgataagtccttagaatcttacttcaacggttctaacaaagaaattttgaatttagtgaccaacccatatgagtttagctataatggcgtagacgttttggccgtttctggcaaaaatatcaatgatatttgtaaatacgtaataccatccaatgataacggagaaagtgaaaacaaggtcgaggagggcgagagtaatgatttcaaagacgatatagagcatcgcttggaccttatggaatgtacaatgaaatggcaaaacatcgcgcccaccgcacctgataccttatggtgttatccgtacactgataaggatccatttgtattggataagtggccccacgtttacattgtggcaaaccagccatattttggaacaagagtagtggaaataggtggtaagaacataaagataatatctgtccctgaattcagttctactgggatgataatattattagatttggaaacgttagaagcagagacggtcaagattgacatttga

SEQ ID NO: 6139 - DNA, 915 bp, Saccharomyces cerevisiae
atgtccacttctcattgcagattttatgaaaacaaatacccagaaattgacgatatcgtcatggttaacgtccagcagattgctgaaatgggtgcttatgttaaattgttagaatatgacaacattgaaggtatgattctactaagtgaattgtcccgtagacgtattaggtcaatccaaaaattaattcgtgttggtaaaaatgatgtcgccgttgttcttcgtgtcgacaaagaaaaaggttatattgatttgtccaaacgtcgtgtttcttctgaagatatcattaaatgtgaagaaaaataccaaaaatctaagactgttcattccattttaagatactgtgccgaaaaattccaaatccctttggaagaactatataagaccattgcttggccattaagtcgaaaatttggtcacgcttacgaagctttcaaactatccatcattgacgaaactgtttgggaaggtattgaaccgccatcaaaagatgttttagatgaattaaagaactatatctccaagagattaacaccacaagctgtaaagattagagccgatgttgaagtgtcttgttttagttacgaaggtatcgatgccattaaagacgcattaaaatcagctgaagacatgtccacagaacaaatgcaagttaaagttaaattagtcgccgccccattatatgttttgaccacccaagccttggataagcaaaaaggtattgaacaactggaaagcgctattgaaaaaattacagaggttattacaaaatacggcggtgtttgcaacattaccatgccaccaaaggctgtcactgctactgaagacgctgagttacaagctctattagaaagcaaagaattagataatagatctgactctgaagacgatgaggatgagtcagacgacgagtaa

SEQ ID NO: 6140 - DNA, 915 bp, Artificial Sequence
  Description of Artificial Sequence: Synthetic polynucleotide
atgtccacttctcattgcagattttatgaaaacaaatacccagaaattgacgatatcgtcatggttaacgtccagcagattgctgaaatgggtgcttatgttaaattgttagaatatgacaacattgaaggtatgattttattaagtgaattgtcccgtagacgtattaggtctatccaaaaattaattcgtgttggtaaaaatgatgtcgccgttgttcttcgtgtcgacaaagaaaaaggttatattgatttgtccaaacgtcgtgtttcttctgaagatatcattaaatgtgaagaaaaataccaaaaatctaagactgttcattccattttaagatactgtgccgaaaaattccaaatccctttggaagaattgtataagaccattgcttggccattaagtagaaaatttggtcacgcttacgaagctttcaaactttccatcattgacgaaactgtttgggaaggtattgaaccgccatctaaagatgttttagatgaattaaagaactatatctccaagagattaacaccacaagctgtaaagattagagccgatgttgaagtgtcttgttttagttacgaaggtatcgatgccattaaagacgcattaaaatctgctgaagacatgtccacagaacaaatgcaagttaaagttaaattagtcgccgccccattatatgttttgaccacccaagccttggataagcaaaaaggtattgaacaattggaaagcgctattgaaaaaattacagaggttattacaaaatacggcggtgtttgcaacattaccatgccaccaaaggctgtcactgctactgaagacgctgagttacaagctttattagaaagcaaagaattagataatagatctgactctgaagacgatgaggatgagagtgacgacgagtga

SEQ ID NO: 6141 - DNA, 1017 bp, Saccharomyces cerevisiae
atgtcaatacgtccagcaacacatgcaggctcatggtattccaatagagcccaagaattatctcaacaactgcatacatacttgatcaaaagtacccttaaaggcccaattcacaacgccagaattatcatatgtcctcatgccggttacaggtattgtggacccactatggcctactcgtacgcatcgttggatttgaaccgtaatgttaagagaatatttatcttggggccgtcgcatcacatctatttcaaaaaccaaatattagttagtgcattcagtgagctagagacgcccttgggtaatctgaaagtggatacagacttgtgtaaaacattaatacagaaggagtatcctgagaacggaaagaagctgtttaagccaatggatcatgacactgatatggctgaacattccttagagatgcagctccccatgttggtggaaactttgaaatggagagaaatttctttagatacggtgaaggtatttcctatgatggtttctcataacagcgttgatgttgatcgttgcattggtaatatcttgtcggagtacattaaggatccgaacaatttattcattgtaagcagtgatttctgtcattggggccgcagattccaatatactgggtacgtcggaagcaaggaagagttgaatgatgccattcaagaggaaacagaagtggaaatgttaactgctaggagtaaactttcacatcatcaagttcccatttggcaatccattgaaataatggacagatatgcgatgaaaacgctaagtgatactccaaatggtgaaaggtacgatgcttggaaacaatacttggaaatcaccggaaacaccatatgcggcgaaaagccaattagtgtgatactaagtgctttatcgaaaatccgtgatgccggtccttcaggcatcaaatttcagtggcctaattattcacagagttctcatgtgacaagtattgatgatagtagtgtcagttatgcttcaggttatgttactataggataa

SEQ ID NO: 6142 - DNA, 1017 bp, Artificial Sequence
  Description of Artificial Sequence: Synthetic polynucleotide
atgagtatacgtccagcaacacatgcaggctcctggtattccaatagagcccaagaattatctcaacaattgcatacatacttgatcaaaagtacccttaaaggcccaattcacaacgccagaattatcatatgtcctcatgccggttacaggtattgtggacccactatggcctactcctacgcaagtttggatttgaaccgtaatgttaagagaatatttatcttggggccgtctcatcacatctatttcaaaaaccaaatattagttagtgcattcagtgagttagagacgcccttgggtaatttgaaagtggatacagacttgtgtaaaacattaatacagaaggagtatcctgagaacggaaagaagttatttaagccaatggatcatgacactgatatggctgaacattccttagagatgcagctccccatgttggtggaaactttgaaatggagagaaatttctttagatacggtgaaggtatttcctatgatggtttctcataacagcgttgatgttgatcgttgcattggtaatatcttgagtgagtacattaaggatccgaacaatttattcattgtaagcagtgatttctgtcattggggccgcagattccaatatactgggtacgtcggaagcaaggaagagttgaatgatgccattcaagaggaaacagaagtggaaatgttaactgctaggagtaaactttctcatcatcaagttcccatttggcaatccattgaaataatggacagatatgcgatgaaaacgttgagtgatactccaaatggtgaaaggtacgatgcttggaaacaatacttggaaatcaccggaaacaccatatgcggcgaaaagccaattagtgtgatattgagtgctttatccaaaatccgtgatgccggtccttccggcatcaaatttcagtggcctaattattctcagagttctcatgtgacaagtattgatgatagtagtgtcagttatgcttctggttatgttactataggatga

SEQ ID NO: 6143 - DNA, 999 bp, Saccharomyces cerevisiae
atggttagagttgctattaacggtttcggtagaatcggtagattggttatgagaattgctttgcaaagaaagaacgtcgaagttgttgctttgaacgatcctttcatctctaacgactactccgcttacatgttcaagtacgactctactcacggtagatacgctggtgaagtttcccacgatgacaagcacatcatcgttgatggtcacaagatcgccactttccaagaaagagacccagctaacttgccatgggcttctctaaacattgacatcgccattgactccactggtgttttcaaggaattggacactgctcaaaagcacattgacgctggtgccaagaaggttgtcatcactgctccatcttccaccgccccaatgttcgtcatgggtgttaacgaagaaaaatacacttctgacttgaagattgtttccaacgcttcttgtaccaccaactgtttggctccattggccaaggttatcaacgatgctttcggtattgaagaaggtttgatgaccactgttcactccatgaccgccacccaaaagactgttgacggtccatcccacaaggactggagaggtggtagaaccgcttccggtaacatcatcccatcctctaccggtgctgctaaggctgtcggtaaggtcttgccagaattgcaaggtaagttgaccggtatggctttcagagtcccaaccgtcgatgtttccgttgttgacttgactgtcaagttgaacaaggaaaccacctacgatgaaatcaagaaggttgtcaaggctgccgctgaaggtaagttgaagggtgtcttgggttacactgaagacgctgttgtctcctctgacttcttgggtgactctaactcttccatcttcgatgctgccgctggtatccaattgtctccaaagttcgtcaagttggtttcctggtacgacaacgaatacggttactctaccagagttgtcgacttggttgaacacgttgccaaggcttaa

SEQ ID NO: 6144 - DNA, 999 bp, Artificial Sequence
  Description of Artificial Sequence: Synthetic polynucleotide
atggttagagttgctattaacggtttcggtagaatcggtagattggttatgagaattgctttgcaaagaaagaacgtcgaagttgttgctttgaacgatcctttcatctctaacgactactccgcttacatgttcaagtacgactctactcacggtagatacgctggtgaagtttcccacgatgacaagcacatcatcgttgatggtcacaagatcgccactttccaagaaagagacccagctaacttgccatgggcttctttgaacattgacatcgccattgactccactggtgttttcaaggaattggacactgctcaaaagcacattgacgctggtgccaagaaggttgtcatcactgctccatcttccaccgccccaatgttcgtcatgggtgttaacgaagaaaaatacacttctgacttgaagattgtttccaacgcttcttgtaccaccaactgtttggctccattggccaaggttatcaacgatgctttcggtattgaagaaggtttgatgaccactgttcactccatgaccgccacccaaaagactgttgacggtccatcccacaaggactggagaggtggtagaaccgcttccggtaacatcatcccatcctctaccggtgctgctaaggctgtcggtaaggtcttgccagaattgcaaggtaagttgaccggtatggctttcagagtcccaaccgtcgatgtttccgttgttgacttgactgtcaagttgaacaaggaaaccacctacgatgaaatcaagaaggttgtcaaggctgccgctgaaggtaagttgaagggtgtcttgggttacactgaagacgctgttgtctcctctgacttcttgggtgactctaactcttccatcttcgatgctgccgctggtatccaattgtctccaaagttcgtcaagttggtttcctggtacgacaacgaatacggttactctaccagagttgtcgacttggttgaacacgttgccaaggcttga

SEQ ID NO: 6145 - DNA, 1536 bp, Saccharomyces cerevisiae
atgcctgctcctcacggtggtattctacaagacttgattgctagagatgcgttaaagaagaatgaattgttatctgaagcgcaatcttcggacattttagtatggaacttgactcctagacaactatgtgatattgaattgattctaaatggtgggttttctcctctgactgggtttttgaacgaaaacgattactcctctgttgttacagattcgagattagcagacggcacattgtggaccatccctattacattagatgttgatgaagcatttgctaaccaaattaaaccagacacaagaattgcccttttccaagatgatgaaattcctattgctatacttactgtccaggatgtttacaagccaaacaaaactatcgaagccgaaaaagtcttcagaggtgacccagaacatccagccattagctatttatttaacgttgccggtgattattacgtcggcggttctttagaagcgattcaattacctcaacattatgactatccaggtttgcgtaagacacctgcccaactaagacttgaattccaatcaagacaatgggaccgtgtcgtagctttccaaactcgtaatccaatgcatagagcccacagggagttgactgtgagagccgccagagaagctaatgctaaggtgctgatccatccagttgttggactaaccaaaccaggtgatatagaccatcacactcgtgttcgtgtctaccaggaaattattaagcgttatcctaatggtattgctttcttatccctgttgccattagcaatgagaatgagtggtgatagagaagccgtatggcatgctattattagaaagaattatggtgcctcccacttcattgttggtagagaccatgcgggcccaggtaagaactccaagggtgttgatttctacggtccatacgatgctcaagaattggtcgaatcctacaagcatgaactggacattgaagttgttccattcagaatggtcacttatttgccagacgaagaccgttatgctccaattgatcaaattgacaccacaaagacgagaaccttgaacatttcaggtacagagttgagacgccgtttaagagttggtggtgagattcctgaatggttctcatatcctgaagtggttaaaatcctaagagaatccaacccaccaagaccaaaacaaggtttttcaattgttttaggtaattcattaaccgtttctcgtgagcaattatccattgctttgttgtcaacattcttgcaattcggtggtggcaggtattacaagatctttgaacacaataataagacagagttactatctttgattcaagatttcattggttctggtagtggactaattattccaaatcaatgggaagatgacaaggactctgttgttggcaagcaaaacgtttacttattagatacctcaagctcagccgatattcagctagagtcagcggatgaacctatttcacatattgtacaaaaagttgtcctattcttggaagacaatggcttttttgtattttaa

SEQ ID NO: 6146 - DNA, 1536 bp, Artificial Sequence
  Description of Artificial Sequence: Synthetic polynucleotide
atgcctgctcctcacggtggtattttacaagacttgattgctagagatgcgttaaagaagaatgaattgttatctgaagcgcaatcttctgacattttagtatggaacttgactcctagacaattatgtgatattgaattgattttgaatggtgggttttctcctttaactgggtttttgaacgaaaacgattactcctctgttgttacagattccagattagcagacggcacattgtggaccatccctattacattagatgttgatgaagcatttgctaaccaaattaaaccagacacaagaattgcccttttccaagatgatgaaattcctattgctatacttactgtccaggatgtttacaagccaaacaaaactatcgaagccgaaaaagtcttcagaggtgacccagaacatccagccattagctatttatttaacgttgccggtgattattacgtcggcggttctttagaagcgattcaattacctcaacattatgactatccaggtttgcgtaagacacctgcccaattgagacttgaattccaatctagacaatgggaccgtgtcgtagctttccaaactcgtaatccaatgcatagagcccacagggagttgactgtgagagccgccagagaagctaatgctaaggtgttaatccatccagttgttggattaaccaaaccaggtgatatagaccatcacactcgtgttcgtgtctaccaggaaattattaagcgttatcctaatggtattgctttcttatccttattgccattagcaatgagaatgagtggtgatagagaagccgtatggcatgctattattagaaagaattatggtgcctcccacttcattgttggtagagaccatgcgggcccaggtaagaactccaagggtgttgatttctacggtccatacgatgctcaagaattggtcgaatcctacaagcatgaattagacattgaagttgttccattcagaatggtcacttatttgccagacgaagaccgttatgctccaattgatcaaattgacaccacaaagacgagaaccttgaacatttctggtacagagttgagacgccgtttaagagttggtggtgagattcctgaatggttctcttatcctgaagtggttaaaatcttaagagaatccaacccaccaagaccaaaacaaggtttttctattgttttaggtaattctttaaccgtttctcgtgagcaattatccattgctttgttgagtacattcttgcaattcggtggtggcaggtattacaagatctttgaacacaataataagacagagttattatctttgattcaagatttcattggttctggtagtggattgattattccaaatcaatgggaagatgacaaggactctgttgttggcaagcaaaacgtttacttattagataccagtagcagtgccgatattcagttggagtctgcggatgaacctatttctcatattgtacaaaaagttgtccttttcttggaagacaatggcttttttgtattttga

SEQ ID NO: 6147 - DNA, 285 bp, Saccharomyces cerevisiae
atgtctgagatattacaagatgtacaaaggaaactggtttttccaatagattttcccagccaacggaaaacagaaaaatttcaacagctatcgctcatgatcggagctttggtagcgtgtatattgggatttgcacaacagtccctgaaagttttactgactgcgtatggcattagttgtgtgattactttaatatgtgttttgccagcttacccatggtataataaacaaaaattgaggtgggcacagccaaaaattgaaattaatgtcgaccagtatgactag

SEQ ID NO: 6148 - DNA, 285 bp, Artificial Sequence
  Description of Artificial Sequence: Synthetic polynucleotide
atgtctgagatattacaagatgtacaaaggaaattggtttttccaatagattttcccagccaaagaaaaacagaaaaatttcaacagttatctctcatgatcggagctttggtagcgtgtatattgggatttgcacaacagtccttgaaagttttattaactgcgtatggcattagttgtgtgattactttaatatgtgttttgccagcttacccatggtataataaacaaaaattgaggtgggcacagccaaaaattgaaattaatgtcgaccagtatgactga

SEQ ID NO: 6149 - DNA, 786 bp, Saccharomyces cerevisiae
atgagtgaaacacgagaatctaatgaaagtacagtttcgtctttacaaaccaaacttttgctcaatgacggaatatccgaaaacaacaagaaaaatgttatactgctgaatcaaatagtgccgtttattctgaatacttcacattatatgacggatctaatgtatgtcttgtattatctggctcaaaagcaggaagacgaagtattaaaccattctggcacatttatttcacacaaaaaagaactccttgcactaaagagtgatatttgtgaactaatttacgatttaaggacaggattccgcttattattggatagttgtgagttagatcactttgaaactcctggaaaatgccggcatttgatcgagaaggttctagtcacctccatttatggagtgaacaggtatattttccaggaattaaacagattaaatgtcgattttaaagatgaatttatattacaaatgcaaaattgtttatcaggattcgttaatctctacaaatttttgaacaagatccctatgagtaaacaacagtcacagatgaacgatttacagatgaagatcttagttaatgtgttacagaatgaattgttacccatttggaagtttcagttagatcttttgaattgtaaactatttaacgagctctctaaggataagggcctgattaatatatatagaaaagctacgaacgatagtgttattgatgttagcaagggtgaaccattcatcagatatgttaattggctaaaggaccaaattattggtgaaatgacggtttaa

SEQ ID NO: 6150 - DNA, 786 bp, Artificial Sequence
  Description of Artificial Sequence: Synthetic polynucleotide
atgagtgaaacaagagaatctaatgaaagtacagtttcttctttacaaaccaaacttttgctcaatgacggaatatccgaaaacaacaagaaaaatgttatattattgaatcaaatagtgccgtttattttgaatacttctcattatatgacggatttgatgtatgtcttgtattatttggctcaaaagcaggaagacgaagtattaaaccattctggcacatttatttctcacaaaaaagaactccttgcattgaagagtgatatttgtgaattgatttacgatttaaggacaggattccgcttattattggatagttgtgagttagatcactttgaaactcctggaaaatgcaggcatttgatcgagaaggttttggtcacctccatttatggagtgaacaggtatattttccaggaattaaacagattaaatgtcgattttaaagatgaatttatattacaaatgcaaaattgtttatctggattcgttaatctctacaaatttttgaacaagatccctatgagtaaacaacagtctcagatgaacgatttacagatgaagatcttagttaatgtgttacagaatgaattgttacccatttggaagtttcagttagatcttttgaattgtaaattatttaacgagctctctaaggataagggcttaattaatatatatagaaaagctacgaacgatagtgttattgatgttagcaagggtgaaccattcatcagatatgttaattggttaaaggaccaaattattggtgaaatgacggtttga

SEQ ID NO: 6151 - DNA, 399 bp, Saccharomyces cerevisiae
atggcagcaggtggtgaacttagttatgaagagttgctggatcacattctgaataacaagcctatacctaatattgtggaggtgcccaatgttacgctggatgagggtttagctagtactccttcattgaggccaagacctaggccttgggaaggtcagctgcagcatcaatctcatcaaggatcattagacaaacccaatatatctctggacattgatcaagaaagcctagaaggcatgacctcattaacaaggctgtctgaatgttacgatatacagtctaagttacagattaatgacagtgacaacgataatgatgacaataacaatgataacaataaaggcgatggcaatgatgacgacaataatacagtaacagcaaatccaacagctaggtaa

SEQ ID NO: 6152 - DNA, 399 bp, Artificial Sequence
  Description of Artificial Sequence: Synthetic polynucleotide
atggcagcaggtggtgaacttagttatgaagagttgttggatcacattttgaataacaagcctatacctaatattgtggaggtgcccaatgttacgttagatgagggtttagctagtactccttctttgaggccaagacctaggccttgggaaggtcagttacagcatcaatctcatcaaggatctttagacaaacccaatatatctttggacattgatcaagaaagcttggaaggcatgaccagtttaacaaggttatctgaatgttacgatatacagtctaagttacagattaatgacagtgacaacgataatgatgacaataacaatgataacaataaaggcgatggcaatgatgacgacaataatacagtaacagcaaatccaacagctaggtga

SEQ ID NO: 6153 - DNA, 1212 bp, Saccharomyces cerevisiae
atgactggcgaagaatggggcttgactgtactgtcattcttggtaagagtcggattttttctttttggcatttaccaggacgctaatttcaaagtgaggtacactgatatcgactattttgtgtttcatgatgctgctaaatatgtatacgaaggcaaatcaccttatgcaagggatacatatcgttacacaccgctactaagttggctgctagtgcctaatcattattttggatggtttcatttggggaaggtcatatttgttattttcgatttggttactgggctcattataatgaagcttttgaaccaggccatctccagaaaaagagctttaatattggaaagcatttggctattgaatccgatggttatcaccatcagtacaaggggaaacgctgaaagcgtgctttgctgtttgatcatgttcacgcttttttttctacaaaagagtagatacaccctagctggaatcttatatggtctttctatccatttcaaaatatatccaatcatatattgtatcccaatagcaatttttatatactacaataaaagaaaccagggtccacgaacacaacttacatcgctactcaatatcggtttgagtactctaacaactttgcttggatgtggttgggcaatgtacaagatatacggatacgagtttctggatcaggcatacttgtaccacttatacagaacggatcacagacacaatttttcagtgtggaacatgctattgtatttagattctgcaaataaggaaaatggtgagtccaatctctcaaggtacgcatttgtgcctcaattgctgcttgttttagtaactggatgtcttgaatggtggaatcccacattcgataacctattgagggttttatttgtgcagacgttcgcatttgtgacatataataaagtgtgcacatcgcaatattttgtttggtacctgatctttctaccattttacctctcaagaacgcacattggttggaagaaggggcttttaatggccacgctttgggtaggaacgcagggaatttggttaagccaaggttactatttggaattcgaaggcaagaatgtattctatcctggactatttattgcaagcgtgttatttttcgtcaccaatgtgtggctactgggtcaatttattactgatattaagataccgacgcaacccacagtttccaacaaaaagaacaactga

SEQ ID NO: 6154 - DNA, 1212 bp, Artificial Sequence
  Description of Artificial Sequence: Synthetic polynucleotide
atgactggcgaagaatggggcttgactgtattatctttcttggtaagagtcggattttttctttttggcatttaccaggacgctaatttcaaagtgaggtacactgatatcgactattttgtgtttcatgatgctgctaaatatgtatacgaaggcaaatctccttatgcaagggatacatatcgttacacaccgttgttaagttggttgttggtgcctaatcattattttggatggtttcatttggggaaggtcatatttgttattttcgatttggttactgggctcattataatgaagcttttgaaccaggccatctccagaaaaagagctttaatattggaaagcatttggttattgaatccgatggttatcaccatcagtacaaggggaaacgctgaaagcgtgctttgctgtttgatcatgttcacgcttttttttttgcaaaagagtagatacaccttggctggaatcttatatggtctttctatccatttcaaaatatatccaatcatatattgtatcccaatagcaatttttatatactacaataaaagaaaccagggtccaagaacacaacttacatctttactcaatatcggtttgagtactttgacaactttgcttggatgtggttgggcaatgtacaagatatacggatacgagtttttggatcaggcatacttgtaccacttatacagaacggatcacagacacaatttttctgtgtggaacatgcttttgtatttagattctgcaaataaggaaaatggtgagtccaatctctccaggtacgcatttgtgcctcaattgttacttgttttagtaactggatgtcttgaatggtggaatcccacattcgataaccttttgagggttttatttgtgcagacgttcgcatttgtgacatataataaagtgtgcacatctcaatattttgtttggtacttgatctttttaccattttacctcagcagaacgcacattggttggaagaaggggcttttaatggccacgctttgggtaggaacgcagggaatttggttaagccaaggttactatttggaattcgaaggcaagaatgtattctatcctggattatttattgcaagcgtgttatttttcgtcaccaatgtgtggttgttgggtcaatttattactgatattaagataccgacgcaacccacagtttccaacaaaaagaacaactga

SEQ ID NO: 6155 - DNA, 597 bp, Saccharomyces cerevisiae
atgttaagagaagtcatctattgtggaatttgctcctacccaccagagtactgcgagttttcaggaaaattaaagcgttgtaaagtttggttatctgaaaaccacgcagacctttatgcaaagctatacggtactgacgataatacgcaagaggtggaagccgtgaccaacaaactggctgaatccagtattggcgaagctagagaggaaaagttggaaaaggacttgctgaaaattcaaaaaaaacaggaaaacagggaacaaagagaattagctaagaagctgtcatcgaaagtgatcattaaaagagaagctaggaccaagagaaagtttatcgtcgctatctctgggctggaagttttcgacatcgacatgaaaaagctagccaagacatttgcgtctaggttcgccacagggtgctcagtctcgaaaaatgcagagaaaaaagaagaagttgtcattcaaggtgacgtgatggatgaagtggaaacttacatacattccttgctggaagaaaaaggcctaaaggacgtcaaagtggaaaccatcgatgctaagaagaagaaaaagcctgctgcagaaggagctgccaagtaa

SEQ ID NO: 6156 - DNA, 597 bp, Artificial Sequence
  Description of Artificial Sequence: Synthetic polynucleotide
atgttaagagaagtcatctattgtggaatttgctcctacccaccagagtactgcgagttttctggaaaattaaagcgttgtaaagtttggttatctgaaaaccacgcagacctttatgcaaagttgtacggtactgacgataatacgcaagaggtggaagccgtgaccaacaaattggctgaatccagtattggcgaagctagagaggaaaagttggaaaaggacttgttgaaaattcaaaaaaaacaggaaaacagggaacaaagagaattagctaagaagttatcttctaaagtgatcattaaaagagaagctaggaccaagagaaagtttatcgtcgctatctctgggttggaagttttcgacatcgacatgaaaaagttggccaagacatttgcgtctaggttcgccacagggtgcagcgtctccaaaaatgcagagaaaaaagaagaagttgtcattcaaggtgacgtgatggatgaagtggaaacttacatacattccttgttggaagaaaaaggcttgaaggacgtcaaagtggaaaccatcgatgctaagaagaagaaaaagcctgctgcagaaggagctgccaagtga

SEQ ID NO: 6157 - DNA, 1533 bp, Saccharomyces cerevisiae
atgacttcatctctagatgatatagaaccaacagcatataataatatggaagcggacgaggaatattgcagacgcaacgatatacatgacctttccagcgtggtcggtgatgctgtctcacaaggtgtgccagacatggatggtcaaacaacggattcttcgaaggaccctgagccaaattccgaggataagaaagcgtttcctccttcgagtggctcatttttttctcctaatctacagggtcaaaggaagaaagttcttttaaagtttgttttcacaaattgcttactggccataatttgctttacaatgtttgtgttgttctggggggctctttacgacaccagcaagtatctacacaaagttaagcttctggttgttatccaggaaccccctgtggtaattttggataataacagttccatggtagtgccctccatatcgtatgctttgcctacttttatcaataaaataccatgtgattgggatatttataacagtcctaccttccaggccaagttcgacgtaaatacgccacagcaagtcaatgacaaggttgtcgatttggtttacgacgaaaaatactggtttgccattaatatcaagccaaacgccacggagactctatttgaatcactaatcaacgataccgcaccactattcaattctacgctgtttaatcaggtggtatatgaaactggtagagacccgacaaacctaaaatcaacgattttaccggttgctcagaccattgaagagtactaccatacattctacacactaaattatctgccgccgttattgacaaacataacccaggtatatcgttatgcactaactaacaatgcaaggtatatcgctgcagcaggtaaatataactacgaatactatgaccacagaccattcacagaccgtattctactggcacccacacaaatcggtgttgtttactgtttactgctaacttttttccaatttctattgtacggcccattacacgtagaaatggcaaaagtgctaagaccagccaacggtttaatttaccgtatcgctatgtcatggttcacctttttctttgcgtctttgttcttctgcacaacaaccgccatctttcaagtcgattttaccaagtcctttggtagaggtggcttcgtcgtatattggatgtctacgtggctcttcatgcttgctgcgggaggagctaacgaaaatgcggttatgcttgttattacgttaggaccccagtatctcgggttctggatcctatcatttgtcattctcaatattgcaccttctttcttcccattagcgctaaacaataatgtttatagatatgggtacatgatgcccgttcacaacgtcatcgatatctacagggttattttttttgacgtgacaagacgcaagatgggtcggaattatggtattttagtcgcactcattgccttgaatacggcactgttaccatttgttggcaagtatgctagtagaaaactaaaacagaaggctttagtggcagcaaagcagagttaa

SEQ ID NO: 6158 - DNA, 1533 bp, Artificial Sequence
  Description of Artificial Sequence: Synthetic polynucleotide
atgacttcttctttagatgatatagaaccaacagcatataataatatggaagcggacgaggaatattgcagacgcaacgatatacatgacctttccagcgtggtcggtgatgctgtctctcaaggtgtgccagacatggatggtcaaacaacggattcttccaaggaccctgagccaaattccgaggataagaaagcgtttcctccttctagtggctcttttttttctcctaatttacagggtcaaaggaagaaagttcttttaaagtttgttttcacaaattgcttattagccataatttgctttacaatgtttgtgttgttctggggggctctttacgacaccagcaagtatttgcacaaagttaagcttttggttgttatccaggaaccccctgtggtaattttggataataacagttccatggtagtgccctccatatcttatgctttgcctacttttatcaataaaataccatgtgattgggatatttataacagtcctaccttccaggccaagttcgacgtaaatacgccacagcaagtcaatgacaaggttgtcgatttggtttacgacgaaaaatactggtttgccattaatatcaagccaaacgccacggagactttatttgaatctttgatcaacgataccgcaccattattcaattctacgttgtttaatcaggtggtatatgaaactggtagagacccgacaaacttgaaatctacgattttaccggttgctcagaccattgaagagtactaccatacattctacacattaaattatttaccgccgttattgacaaacataacccaggtatatcgttatgcattgactaacaatgcaaggtatatcgctgcagcaggtaaatataactacgaatactatgaccacagaccattcacagaccgtattttattggcacccacacaaatcggtgttgtttactgtttattattaacttttttccaatttttattgtacggcccattacacgtagaaatggcaaaagtgttgagaccagccaacggtttaatttaccgtatcgctatgtcttggttcacctttttctttgcgtctttgttcttctgcacaacaaccgccatctttcaagtcgattttaccaagtcctttggtagaggtggcttcgtcgtatattggatgtctacgtggctcttcatgcttgctgcgggaggagctaacgaaaatgcggttatgcttgttattacgttaggaccccagtatctcgggttctggatcttatcttttgtcattctcaatattgcaccttctttcttcccattagcgttgaacaataatgtttatagatatgggtacatgatgcccgttcacaacgtcatcgatatctacagggttattttttttgacgtgacaagacgcaagatgggtagaaattatggtattttagtcgcactcattgccttgaatacggcattattaccatttgttggcaagtatgctagtagaaaattgaaacagaaggctttagtggcagcaaagcagagttga

SEQ ID NO: 6159 - DNA, 1758 bp, Saccharomyces cerevisiae
atgggcttgttaacgaaagttgctacatctagacaattctctacaacgagatgcgttgcaaagaagctcaacaagtactcgtatatcatcactgaacctaagggccaaggtgcgtcccaggccatgctttatgccaccggtttcaagaaggaagatttcaagaagcctcaagtcggggttggttcctgttggtggtccggtaacccatgtaacatgcatctattggacttgaataacagatgttctcaatccattgaaaaagcgggtttgaaagctatgcagttcaacaccatcggtgtttcagacggtatctctatgggtactaaaggtatgagatactcgttacaaagtagagaaatcattgcagactcctttgaaaccatcatgatggcacaacactacgatgctaacatcgccatcccatcatgtgacaaaaacatgcccggtgtcatgatggccatgggtagacataacagaccttccatcatggtatatggtggtactatcttgcccggtcatccaacatgtggttcttcgaagatctctaaaaacatcgatatcgtctctgcgttccaatcctacggtgaatatatttccaagcaattcactgaagaagaaagagaagatgttgtggaacatgcatgcccaggtcctggttcttgtggtggtatgtatactgccaacacaatggcttctgccgctgaagtgctaggtttgaccattccaaactcctcttccttcccagccgtttccaaggagaagttagctgagtgtgacaacattggtgaatacatcaagaagacaatggaattgggtattttacctcgtgatatcctcacaaaagaggcttttgaaaacgccattacttatgtcgttgcaaccggtgggtccactaatgctgttttgcatttggtggctgttgctcactctgcgggtgtcaagttgtcaccagatgatttccaaagaatcagtgatactacaccattgatcggtgacttcaaaccttctggtaaatacgtcatggccgatttgattaacgttggtggtacccaatctgtgattaagtatctatatgaaaacaacatgttgcacggtaacacaatgactgttaccggtgacactttggcagaacgtgcaaagaaagcaccaagcctacctgaaggacaagagattattaagccactctcccacccaatcaaggccaacggtcacttgcaaattctgtacggttcattggcaccaggtggagctgtgggtaaaattaccggtaaggaaggtacttacttcaagggtagagcacgtgtgttcgaagaggaaggtgcctttattgaagccttggaaagaggtgaaatcaagaagggtgaaaaaaccgttgttgttatcagatatgaaggtccaagaggtgcaccaggtatgcctgaaatgctaaagccttcctctgctctgatgggttacggtttgggtaaagatgttgcattgttgactgatggtagattctctggtggttctcacgggttcttaatcggccacattgttcccgaagccgctgaaggtggtcctatcgggttggtcagagacggcgatgagattatcattgatgctgataataacaagattgacctattagtctctgataaggaaatggctcaacgtaaacaaagttgggttgcacctccacctcgttacacaagaggtactctatccaagtatgctaagttggtttccaacgcttccaacggttgtgttttagatgcttga

SEQ ID NO: 6160 - DNA, 1758 bp, Artificial Sequence
  Description of Artificial Sequence: Synthetic polynucleotide
atgggcttgttaacgaaagttgctacatctagacaattctctacaacgagatgcgttgcaaagaagctcaacaagtactcctatatcatcactgaacctaagggccaaggtgcgtcccaggccatgctttatgccaccggtttcaagaaggaagatttcaagaagcctcaagtcggggttggttcctgttggtggtccggtaacccatgtaacatgcatcttttggacttgaataacagatgttctcaatccattgaaaaagcgggtttgaaagctatgcagttcaacaccatcggtgtttctgacggtatctctatgggtactaaaggtatgagatactctttacaaagtagagaaatcattgcagactcctttgaaaccatcatgatggcacaacactacgatgctaacatcgccatcccaagttgtgacaaaaacatgcccggtgtcatgatggccatgggtagacataacagaccttccatcatggtatatggtggtactatcttgcccggtcatccaacatgtggttcttccaagatctctaaaaacatcgatatcgtctctgcgttccaatcctacggtgaatatatttccaagcaattcactgaagaagaaagagaagatgttgtggaacatgcatgcccaggtcctggttcttgtggtggtatgtatactgccaacacaatggcttctgccgctgaagtgttgggtttgaccattccaaactcctcttccttcccagccgtttccaaggagaagttagctgagtgtgacaacattggtgaatacatcaagaagacaatggaattgggtattttacctcgtgatatcctcacaaaagaggcttttgaaaacgccattacttatgtcgttgcaaccggtgggtccactaatgctgttttgcatttggtggctgttgctcactctgcgggtgtcaagttgtctccagatgatttccaaagaatcagtgatactacaccattgatcggtgacttcaaaccttctggtaaatacgtcatggccgatttgattaacgttggtggtacccaatctgtgattaagtatttgtatgaaaacaacatgttgcacggtaacacaatgactgttaccggtgacactttggcagaacgtgcaaagaaagcaccaagcttacctgaaggacaagagattattaagccactctcccacccaatcaaggccaacggtcacttgcaaattttatacggttctttggcaccaggtggagctgtgggtaaaattaccggtaaggaaggtacttacttcaagggtagagcacgtgtgttcgaagaggaaggtgcctttattgaagccttggaaagaggtgaaatcaagaagggtgaaaaaaccgttgttgttatcagatatgaaggtccaagaggtgcaccaggtatgcctgaaatgttgaagccttcctctgctttgatgggttacggtttgggtaaagatgttgcattgttgactgatggtagattctctggtggttctcacgggttcttaatcggccacattgttcccgaagccgctgaaggtggtcctatcgggttggtcagagacggcgatgagattatcattgatgctgataataacaagattgacttattagtctctgataaggaaatggctcaacgtaaacaaagttgggttgcacctccacctcgttacacaagaggtactttatccaagtatgctaagttggtttccaacgcttccaacggttgtgttttagatgcttga

SEQ ID NO: 6161 - DNA, 513 bp, Saccharomyces cerevisiae
atgccatctgacgtagcatcgaggaccgggctgccaaccccgtggaccgtcaggtatagtaagtccaagaaaagagagtattttttcaatccagagacgaagcactcgcaatgggaggagcctgagggcaccaacaaggaccagctacacaagcacttaagagaccatccagtgcgtgtaagatgcctgcacattctcatcaagcacaaggattcaagaagacccgcatcgcatagatccgagaacattacgatatccaagcaagacgctacggacgaactgaaaaccttaatcacgaggttggatgacgactctaagacgaactccttcgaggccctggctaaagagagatcagattgctcttcatacaagcgaggcggcgacctcggctggttcgggagaggcgagatgcagcctagctttgaagacgctgccttccagctcaaggtcggcgaggtaagcgatatcgttgaatcaggaagcggtgttcatgtgatcaagcgggtaggttag

SEQ ID NO: 6162 - DNA, 513 bp, Artificial Sequence
  Description of Artificial Sequence: Synthetic polynucleotide
atgccatctgacgtagcaagcaggaccgggttaccaaccccgtggaccgtcaggtatagtaagtccaagaaaagagagtattttttcaatccagagacgaagcactctcaatgggaggagcctgagggcaccaacaaggaccagttgcacaagcacttaagagaccatccagtgcgtgtaagatgccttcacattctcatcaagcacaaggattccagaagacccgcatctcatagatccgagaacattacgatatccaagcaagacgctacggacgaattgaaaaccttaatcacgaggttggatgacgactctaagacgaactccttcgaggccttagctaaagagagaagtgattgctcttcctacaagagaggcggcgacctcggctggttcgggagaggcgagatgcagcctagctttgaagacgctgccttccagctcaaggtcggcgaggtaagcgatatcgttgaatctggaagcggtgttcatgtgatcaagagagtaggttga

SEQ ID NO: 6163 - DNA, 1050 bp, Saccharomyces cerevisiae
atgagtgcttccaaaatggccatgtccaacctagagaaaatattggaactggttcctctttcgcctaccagttttgtcacaaagtatctgcctgccgcgcccgtagggtctaagggcacttttggtggaacgctggtatcacaatcgctgctggcgtcattgcatactgtgccattgaacttcttccccacatcgctacattcgtatttcatcaagggtggtgatccgcggaccaagatcacgtaccatgtgcagaatctgagaaacggtagaaatttcatccataagcaggttagtgcttatcagcacgacaagttgatatttacgtcgatgatcttatttgccgtgcaacggtccaaggagcacgactccttgcagcactgggagacgattccaggcctgcaaggtaagcagccagaccctcatcgttatgaagaggccacttcgcttttccagaaagaagttctggacccacagaaattgagcaggtatgcctcattgtccgacaggttccaagacgcaacctcgatgagcaagtatgtggatgcgtttcaatacggagtcatggagtaccaattccccaaggacatgttctactcggcaagacacaccgacgagctggattatttcgtcaaagtgagacctcccatcactaccgtggagcacgcgggcgacgagtcttctttacacaagcatcatccgtacaggatcccgaagagcattactcctgagaacgacgctcgctacaactacgtggcctttgcgtatctgtccgattcctacctcctactcacgatcccgtacttccacaacctgcctttgtactgccacagtttcagtgtctcgctcgaccacacgatttactttcaccagttgcctcatgtgaacaattggatctatcttaagatttcgaatcccaggtcccactgggacaagcacctcgtacagggcaagtatttcgacacacagtcgggacgcatcatggcaagcgtctctcaggagggctacgttgtctacgggtcagaacgagacattcgagccaagttctga

SEQ ID NO: 6164 - DNA, 1050 bp, Artificial Sequence
  Description of Artificial Sequence: Synthetic polynucleotide
atgagtgcttccaaaatggccatgtccaacttggagaaaatattggaattggttcctctttctcctaccagttttgtcacaaagtatttacctgccgcgcccgtagggtctaagggcacttttggtggaacgttggtatctcaaagtttattggcgtctttgcatactgtgccattgaacttcttccccacatctttgcattcttatttcatcaagggtggtgatccgaggaccaagatcacgtaccatgtgcagaatttaagaaacggtagaaatttcatccataagcaggttagtgcttatcagcacgacaagttgatatttacgtctatgatcttatttgccgtgcaaagatccaaggagcacgactccttgcagcactgggagacgattccaggcttacaaggtaagcagccagaccctcatcgttatgaagaggccacttctcttttccagaaagaagttttggacccacagaaattgagcaggtatgcctctttgtccgacaggttccaagacgcaacctccatgagcaagtatgtggatgcgtttcaatacggagtcatggagtaccaattccccaaggacatgttctacagtgcaagacacaccgacgagttagattatttcgtcaaagtgagacctcccatcactaccgtggagcacgcgggcgacgagtcttctttacacaagcatcatccgtacaggatcccgaagagcattactcctgagaacgacgctcgctacaactacgtggcctttgcgtatttatccgattcctacctcttgctcacgatcccgtacttccacaacttgcctttgtactgccacagtttcagtgtctctctcgaccacacgatttactttcaccagttgcctcatgtgaacaattggatctatcttaagatttctaatcccaggtcccactgggacaagcacctcgtacagggcaagtatttcgacacacagtccggacgcatcatggcaagcgtctctcaggagggctacgttgtctacgggagtgaaagagacattagagccaagttctga

SEQ ID NO: 6165 - DNA, 945 bp, Saccharomyces cerevisiae
atggtcgctagaggtagaacagacgagatatctacagatgtttcagaggctaattctgaacactcgttgatgattacagaaacatcatcaccgttcagatctatattctcccacagtgggaaagtagcgaatgcaggcgctttagaggaatcggacaagcagatactggaatgggcaggtaaactggaattggagagtatggagctgagggaaaactctgacaagctaattaaagttttaaatgaaaattctaagacattatgtaaatcgctaaacaagtttaaccagctactggaacaagatgctgctacgaacggaaacgtgaaaaccttaataaaggatttggcttcccagattgaaaaccaactggacaaagtgtcaacagcaatgttatcgaaaggcgacgagaagaagacaaagtcggattccagctacaggcaggtattagtcgaagaaataagcaggtataattccaagataacgcgacacgtaactaacaagcagcatgagacggaaaagtcgatgaggtgcacccaggagatgctcttcaacgtcggcagccaactggaggacgtgcataaagtgctcctgtctctatccaaagacatgcacagtctacaaacccgccagactgctctagagatggcgtttcgagaaaaggcagatcacgcctacgatcgcccggatgtgtctctgaatggcaccacactcctgcacgatatggacgaagcccacgataagcagcgtaagaagtccgtgccgccaccaagaatgatggtcacaaggtccatgaaacgcagaagatccagctccccaaccctatccaccagccaaaaccacaatagcgaagacaatgatgacgctagccatcggctgaagcgtgcggccaggaccattattccctgggaggaactaagacccgacactctggaatctgagctgtga

SEQ ID NO: 6166 - DNA, 945 bp, Artificial Sequence
  Description of Artificial Sequence: Synthetic polynucleotide
atggtcgctagaggtagaacagacgagatatctacagatgtttctgaggctaattctgaacactctttgatgattacagaaacatcttctccgttcagatctatattctcccacagtgggaaagtagcgaatgcaggcgctttagaggaaagtgacaagcagatattggaatgggcaggtaaattagaattggagagtatggagttgagggaaaactctgacaagttgattaaagttttaaatgaaaattctaagacattatgtaaatctttgaacaagtttaaccagttattggaacaagatgctgctacgaacggaaacgtgaaaaccttaataaaggatttggcttcccagattgaaaaccaattggacaaagtgtctacagcaatgttatccaaaggcgacgagaagaagacaaagagtgattccagctacaggcaggtattagtcgaagaaataagcaggtataattccaagataacgagacacgtaactaacaagcagcatgagacggaaaagtctatgaggtgcacccaggagatgctcttcaacgtcggcagccaattggaggacgtgcataaagtgctcttatctttatccaaagacatgcacagtttacaaacccgccagactgctttggagatggcgtttagagaaaaggcagatcacgcctacgatcgcccggatgtgtctttgaatggcaccacactcttacacgatatggacgaagcccacgataagcagcgtaagaagtccgtgccgccaccaagaatgatggtcacaaggtccatgaaacgcagaagatccagctccccaaccttatccaccagccaaaaccacaatagcgaagacaatgatgacgctagccatcgtttgaagcgtgcggccaggaccattattccctgggaggaattgagacccgacactttggaatctgagttgtga

SEQ ID NO: 6167 - DNA, 330 bp, Saccharomyces cerevisiae
atgtcagccaccttgaaagactacttaaataaaagagttgttataatcaaagttgacggcgaatgcctcatagcaagcctaaacggcttcgacaaaaatactaatctattcataaccaatgttttcaaccgcataagcaaggaattcatctgcaaggcacagttacttcgaggcagcgagattgctcttgttggcctcatagatgcagaaaatgatgacagtctagctcctatagacgaaaagaaggtcccaatgctaaaggacaccaagaataaaatcgaaaatgagcatgtaatatgggaaaaagtgtacgaatcaaagacaaaataa

SEQ ID NO: 6168 - DNA, 330 bp, Artificial Sequence
  Description of Artificial Sequence: Synthetic polynucleotide
atgtctgccaccttgaaagactacttaaataaaagagttgttataatcaaagttgacggcgaatgcctcatagcaagcttgaacggcttcgacaaaaatactaatttattcataaccaatgttttcaaccgcataagcaaggaattcatctgcaaggcacagttacttaggggcagcgagattgctcttgttggcctcatagatgcagaaaatgatgacagtttggctcctatagacgaaaagaaggtcccaatgttgaaggacaccaagaataaaatcgaaaatgagcatgtaatatgggaaaaagtgtacgaatccaagacaaaatga

SEQ ID NO: 6169 - DNA, 735 bp, Saccharomyces cerevisiae
atgtcttcacaagatgttctgatacattcagatgatccgtgccatccagcaaatctcatttgcacgctatgcaagcagttttttcataataattggtgcaccggaactggaggtgggatttcaataaaagatcctaacacgaattattattatctcgccccatctggggtgcagaaggagaagatgatacctgaggatttgtttgtcatggacgctcagacattagagtatttgcgctctcccaagctttacaagccaagcgcatgtactccattgttcttagcgtgctaccaaaagaaaaatgcaggtgctataatacatacacactcccaaaatgctgtgatatgctccttgctatttggcgatgagttcaggattgctaacatcgaacaaatcaaagcaattccaagcggaaaggtggaccctgtgaccaagaaacccatggcgctatcgttttttgatacgctgaagattcccatcattgaaaacatggcgcatgaggacgagttgatcgatgacttgcacaagacttttaaagattatccagacacatgcgccgtaattgtgaggagacatggcatttttgtttggggtccgacaatcgataaggccaaaattttcaacgaagccatcgattatttgatggagctggccataaagatgtaccaaatggggattcctcccgactgtggcattggcgaagagaagaagcatctgaagatggccagtccgtga

SEQ ID NO: 6170 - DNA, 735 bp, Artificial Sequence
  Description of Artificial Sequence: Synthetic polynucleotide
atgtcttctcaagatgttttgatacattctgatgatccgtgccatccagcaaatctcatttgcacgttatgcaagcagttttttcataataattggtgcaccggaactggaggtgggatttctataaaagatcctaacacgaattattattatctcgccccatctggggtgcagaaggagaagatgatacctgaggatttgtttgtcatggacgctcagacattagagtatttgcgctctcccaagctttacaagccaagcgcatgtactccattgttcttagcgtgctaccaaaagaaaaatgcaggtgctataatacatacacactcccaaaatgctgtgatatgctccttgttatttggcgatgagttcaggattgctaacatcgaacaaatcaaagcaattccaagcggaaaggtggaccctgtgaccaagaaacccatggcgttatctttttttgatacgttgaagattcccatcattgaaaacatggcgcatgaggacgagttgatcgatgacttgcacaagacttttaaagattatccagacacatgcgccgtaattgtgaggagacatggcatttttgtttggggtccgacaatcgataaggccaaaattttcaacgaagccatcgattatttgatggagttggccataaagatgtaccaaatggggattcctcccgactgtggcattggcgaagagaagaagcatttgaagatggccagtccgtga

SEQ ID NO: 6171 - DNA, 534 bp, Saccharomyces cerevisiae
atgtttaatactacaccaattaatatcgacaaatggttgaaggagaacgaaggccttttgaaaccaccggtgaataattattgcttacataaagggggattcactgtgatgattgtcggtgggcctaatgaaagaaccggttatcacatcaatccaactcccgaatggttctatcaaaaaaaaggatctatgcttttaaaggttgtggatgagacagacgctgaaccaaagttcattgatatcatcatcaatgaaggcgattcatatttattgccaggaaatgttcctcacagtcctgttcggtttgctgatactgtgggtattgttgtggaacaagataggcctgggggagaaaacgataagataaggtggtactgttctcattgtcgccaagtggtccacgagagtgaactgcaaatgttagacttaggtacccaagtgaaagaagccattttagattttgaaaatgatgtcgaaaagaggacatgtttccattgcaagacgttaaactacgcacgccctcaatctaattaa

SEQ ID NO: 6172 - DNA, 534 bp, Artificial Sequence
  Description of Artificial Sequence: Synthetic polynucleotide
atgtttaatactacaccaattaatatcgacaaatggttgaaggagaacgaaggccttttgaaaccaccggtgaataattattgcttacataaagggggattcactgtgatgattgtcggtgggcctaatgaaagaaccggttatcacatcaatccaactcccgaatggttctatcaaaaaaaaggatctatgcttttaaaggttgtggatgagacagacgctgaaccaaagttcattgatatcatcatcaatgaaggcgattcttatttattgccaggaaatgttcctcacagtcctgttagatttgctgatactgtgggtattgttgtggaacaagataggcctgggggagaaaacgataagataaggtggtactgttctcattgtcgccaagtggtccacgagagtgaattacaaatgttagacttaggtacccaagtgaaagaagccattttagattttgaaaatgatgtcgaaaagaggacatgtttccattgcaagacgttaaactacgcacgccctcaatctaattga

SEQ ID NO: 6173 - DNA, 2238 bp, Saccharomyces cerevisiae
atggaattatttaacaaggaagaagcgagcttcgagactctgttaaaacgattactcgttgtctgtgagtcccatagcaggtaccatggttcgagcttggacccaatggttaaagttggtcatgaaatgagaaaaattagcggttacttgagatgcattttgagaaagcatgctgcaaatcatgatgacatgtctctaacacaatccatagtgaattcttacaagagtttattcaaagatgcgcaaatactcgatttgtatcataatcttttatttggatgtatgcatttgcttctcgatgcgaacatgtcatactttaggatggattcacaaaagctttttgcggtattactattcaaggtttattataagttgagggacattttctatgtcacaaatgaagtacgactaggctccctaatcagtgcgtttgtatacaaatttaaaagttgctatgactttataagctgtaactcactgaaatacggaagcgttcgtgacgttatatcaggcgaagtttccctgattaatcttccgccaatcgattccaataaggttataaatagagcatattacagactagatgtaaagaagttggcgatcaataataaactagttgaaatccttgaattagataatggggagatagctatatttgaggttctttctgaaaaaatgccatacacattacaaaccattgataacttgttccaatcccttgcgttaggaaaccatgacttaatgaatgtcgggaggtcgctgctatttcgaccatttaggtccggcgatcttgatctcatcagacttgatgatagtggagcaaaactaaaggtaccgataaataatagcattgtattgaggttaacttgcaaagatcctattcaatggcaagagtattggaaacatgttattagaaagcttttcgactcaacagctacaaaagaatacaagcgatctggaagtaaaatttctcaacaggtttatgttaggagtaacaaccctgattatacttctcctaaaagaaatgacgatatgcctattagctctgtaaagatatcagatacaatacacaatggtcgcacactgcatagatcaattcctttgccgggaagtctgtcttccttaatagagacctctaatgaataccctgacgaggagtcactgtcaatcatgagtgagagggcaacagttagcgaagattcagatcttgacacctctctgaaagatattgaatccctaagttgtgaaaagctaattgaattggataagagcattcaagtacctctctcgcctaaatatatggacacacctaccttaaaaaacattagaacagcttctcaaactttcagcctggagagtgtctctcccgaactaatagagagtgttgcgtctgaaattgacgattctgagagtataatttctgaagatggaaaggataaacgagataaagatttattcgatccagatatcgatttctataagccaacgctttatcggcgtaaatcttcatctttactaagcatcttctcaaaaaacaaaaagaatctaactatcgatattcccaaaaatcattcaagatcattgtttagtttgccaggcaatcaacaatcagttaccccggtatcagcaaccccccatgacgataacgttgatgaaacgtatgtatcgtttccgttaagcataaacacatctggaggagcagtatatttcgaaaacgattcggtaaaagtttccctttggaacggcaagtcatgggtgcctttgagtaaggacatgctgtgtttgtctttaattttatccggagacaacgagaccttactaattgtatataaagacttcgaaaaggagaagtgtaaattggttgtgaaattggaacccacctggaagtacaatagatcaacggcacaagatgttcaacttcggattccttcctctgatttcaaagctagtgtatttggaacactccacgatctcacgctgtctatacgctgtgcgcaagctgctaagttggtgaatgtgttacaatatcagttacaaagtagccagacatcatccctttcaccctcaaccaccacaggaactttatcaacggtatcttcgtcttcatgcttcagtcgtaatgttactagatcatctactgaaaattcagaattggctaatatgaaagactcatcagaatatataagttcttcacttctgttatcttctgttaaagtaaggcaactgagaaatatgtga

SEQ ID NO: 6174 - DNA, 2238 bp, Artificial Sequence
  Description of Artificial Sequence: Synthetic polynucleotide
atggaattatttaacaaggaagaagcgagcttcgagactttattaaaaagattactcgttgtctgtgagtcccatagcaggtaccatggttccagcttggacccaatggttaaagttggtcatgaaatgagaaaaattagcggttacttgagatgcattttgagaaagcatgctgcaaatcatgatgacatgtctttaacacaatccatagtgaattcttacaagagtttattcaaagatgcgcaaatactcgatttgtatcataatcttttatttggatgtatgcatttgcttctcgatgcgaacatgagttactttaggatggattctcaaaagctttttgcggtattattattcaaggtttattataagttgagggacattttctatgtcacaaatgaagtaagattgggctccttaatcagtgcgtttgtatacaaatttaaaagttgctatgactttataagctgtaactctttgaaatacggaagcgttcgtgacgttatatctggcgaagtttccttgattaatcttccgccaatcgattccaataaggttataaatagagcatattacagattagatgtaaagaagttggcgatcaataataaattggttgaaatccttgaattagataatggggagatagctatatttgaggttctttctgaaaaaatgccatacacattacaaaccattgataacttgttccaatcccttgcgttaggaaaccatgacttaatgaatgtcgggaggtccttactttttaggccatttaggtccggcgatcttgatctcatcagacttgatgatagtggagcaaaattgaaggtaccgataaataatagcattgtattgaggttaacttgcaaagatcctattcaatggcaagagtattggaaacatgttattagaaagcttttcgactctacagctacaaaagaatacaagagatctggaagtaaaatttctcaacaggtttatgttaggagtaacaaccctgattatacttctcctaaaagaaatgacgatatgcctattagctctgtaaagatatctgatacaatacacaatggtcgcacattgcatagatctattcctttgccgggaagtttatcttccttaatagagacctctaatgaataccctgacgaggagtctttatctatcatgagtgagagggcaacagttagcgaagattctgatcttgacacctctttgaaagatattgaatccttgagttgtgaaaagttgattgaattggataagagcattcaagtacctctctcccctaaatatatggacacacctaccttaaaaaacattagaacagcttctcaaactttcagcttagagagtgtctctcccgaattgatagagagtgttgcgtctgaaattgacgattctgagagtataatttctgaagatggaaaggataaaagagataaagatttattcgatccagatatcgatttctataagccaacgctttataggcgtaaatcttcttctttattaagcatcttctccaaaaacaaaaagaatttaactatcgatattcccaaaaatcattccagaagtttgtttagtttgccaggcaatcaacaatctgttaccccggtatctgcaaccccccatgacgataacgttgatgaaacgtatgtatcctttccgttaagcataaacacatctggaggagcagtatatttcgaaaacgattctgtaaaagtttccctttggaacggcaagtcttgggtgcctttgagtaaggacatgctttgtttgtctttaattttatccggagacaacgagaccttattgattgtatataaagacttcgaaaaggagaagtgtaaattggttgtgaaattggaacccacctggaagtacaatagatctacggcacaagatgttcaacttagaattccttcctctgatttcaaagctagtgtatttggaacactccacgatctcacgttgtctatacgctgtgcgcaagctgctaagttggtgaatgtgttacaatatcagttacaaagtagccagacatcttccctttctccctctaccaccacaggaactttatctacggtatcttcttctagttgcttcagtcgtaatgttactagatcttctactgaaaattctgaattggctaatatgaaagactcttctgaatatataagttcttctcttttattatcttctgttaaagtaaggcaattgagaaatatgtga

SEQ ID NO: 6175 - DNA, 4227 bp, Saccharomyces cerevisiae
atgcacgacgtgccaatggaaactgttttggccgtgaacccagctacgatgattgtcaaagagtgcatcaatctttgttctgccatgaacaagcagtccagagataaatcacaaacaagtgtggccgcgttgctgggcggaggtagtgatatattcttgagtcaaagtgattcgtttgttgacagcttccacaatttgcctacttctagctatcatgatcctctgatatctggtttagtacagctgcggctaaaaattaacgacttgaagggtttagattcattaaacgccttggaacttttgaaaccatttttagaaatagtcagcgctagttcagtatcgggttatactacttctctggctctggactcgttgcagaaagtttttacactaaaaatcataaacaaaacatttaatgatattcaaattgccgttagggaaaccgttgttgcgcttacacattgtagatttgaagcttcaaagcaaatttcggacgactctgttttattaaaagttgtaacattactacgcgatattataacctcttcctttggagactatctctccgatactataatctacgatgttttacaaacgacactttccttggcatgtaatacgcagagaagcgaggttttgaggaaaacggctgaagttacaattgcagggataaccgttaaactatttacaaagttgaagttactagatccacctacaaaaacagaaaaatatatcaatgatgaaagttacaccgacaataatttgaaggatgacattataggtacgactacctctgataacgatttgagtagcactgatgatgacagtgctgttgcagacgataataaaaatgagaagccagtccaacaggtcataagggaacaggaaaatgatgaggaaacggctgagaaagccgaaaatgtcgagccaaattacggaataacagttataaaggattatcttggattattgttatcactggttatgccagagaatagaatgaagcacacaacttcggccatgaaattatctctacagttaatcaatgcagccattgaaatatccggtgacaaatttcctctatatccccggttattcagcttaatttctgatccaatatttaaaagtgttttattcattatacaaagttctacccagtattctcttttgcaagcaactttacaattattcacgagtttggttgtgatattgggtgattatttgcctatgcagattgaactgactttaaggagaatattcgaaattctagaggataccacaatcagtggtgacgttagtaagcaaaaaccacctgcaatcagggaattaattattgaacaactttcaatactgtggattcactctcccgctttctttttgcaactttttgtaaatttcgattgtaatttggataggtcggatctttcgattgactttataaaagagctaactaaattttctttaccagcggcggccgttaatacctctaacaacattcctccaatttgcctagaaggtgtactttcgcttattgaaaatatatacaatgatctgcagagatttgatagggcagaattcgtaaaaaatcagaaagaaattgatattttgaaacagagagacagaaagactgaattcatattatgcgttgaaacatttaatgaaaaggcaaagaaaggcattcaaatgttaattgaaaaaggattcattgattcggattctaatagagacattgcttcatttttgtttctcaataacggacgtttaaataagaaaaccatcggtctattactttgtgatccgaaaaaaacttcattgttaaaagaatttatagatctattcgattttaaagggttaagggttgatgaagcgatcagaattttgctgacgaaattcagattaccaggggaatctcaacagattgaaagaatcgttgaagcattttcatcaaaatattctgctgatcaaagcaatgataaagtggagttagaggataaaaaagcaggaaaaaatggctcagagtcaatgacagaagatgacatcattcatgtacagcctgatgcagactctgtgtttgtgttaagttattcgataatcatgttaaataccgattcacataacccgcaggttaaagaccatatgacttttgatgactactctaacaatttacgaggatgctacaatggaaaagattttcctcgttggtatttgcataaaatttacacgtccatcaaagttaaggaaatagtaatgcctgaagaacatcatggaaatgaaaggtggtttgaagatgcctggaataacttaatatcctcaacatctgtgatgacagagatgcaaagagatttcacaaaccctatttctaagttagcgcaaatagacatacttcagtatgagaaagcaattttctcaaatgttagagatattatcctgaagactttattcaaaatattcacagttgcttccagtgatcaaatatcattacgtatcttggacgccattagtaagtgtacatttatcaactattacttttcttttgaccagtcatataatgatactgtacttcatctgggagaaatgacaacattggcacaaagtagcgcaaaagcggtggagctagatgttgacagtattcctttggtcgagatattcgtcgaagacactgggtcgaagatatccgttagtaaccagagtataagacttggacaaaactttaaggctcagttatgtaccgtattgtactttcaaatcattaaagaaataagtgatcctagcattgtttctaccagactatggaaccagattgtgcaactcattttgaaattattcgagaatttattgatggaacctaatttaccattttttacaaactttcattcactcttgaaacttcctgaactaccattgccagatccagatatatcgatccgcaaggcaaagatgagcagaagccttctgtctactttcgcctcttacttgaaaggcgatgaagaaccttcggaagaagacatcgatttttccattaaagcatttgagtgcgttaaggctagccatcctctcagttcagtctttgagaacaatcaactcgtcagtcctaagatgattgaaactcttctctcttcacttgtgattgaaaaaacgagtgaaaattcgccctatttcgaacaagaacttctctttttgttggaaatatccattatattaatatcagaggcttcttatggacaagaatttggagcactaattgctgatcatatgattaatatttcgaatttagatggcctttccaaggaggctattgcaagacttgcctcgtataaaatgtttttggtttcgagatttgataatccacgggacattttaagtgatttaatagaacacgactttttggtaaaaaatgaaatcttcaatactaaatattatgaaagtgaatgggggaagcaagtaataaatgatctgtttacacatctcaatgacgtaaaatacaatgagcgggctctcaaaaatgtaaaattttggaattttttaaggatattaatatcagccaaagaccgccaatttgccgtctacacatttttggaaaaatacattcaaaatggtgatatctttgtagatgatgggaactttatgaacatattaagtctgcttgatgaaatgtcatgtgcaggtgccgttggcacaaaatgggaacaaaattatgaaaattcagtcgaggatgggtgtgaagcacctgaatccaatccataccgttctattattgatctttctagtcgttccattaatataactgcagacctactttcgactgttgggaggagtaattcagcactcaacaagaatgagattatagctgctattcaaggtctcgcccatcaatgcctcaatccctgtgacgaactaggtatgcaagcattgcaagcattagagaacattctgttatctcgagcaagtcaactacgtacggaaaaagttgcggtggataacctactagagacaggattattaccgatttttgagttggatgaaatccaagatgtcaagatgaaacgaattactagcattttatccgttctttctaaaatcttcttgggtcaacttgtggaaggcgtaacaagtaacgaaacttttttgagagtgcttaacgtatttaacaagtatgtagatgatcctacggtggaaaggcagttgcaagagttgattatttctaagagggaaatcgagaaggagtag

SEQ ID NO: 6176 - DNA, 4227 bp, Artificial Sequence
  Description of Artificial Sequence: Synthetic polynucleotide
atgcacgacgtgccaatggaaactgttttggccgtgaacccagctacgatgattgtcaaagagtgcatcaatctttgttctgccatgaacaagcagtccagagataaatctcaaacaagtgtggccgcgttgttgggcggaggtagtgatatattcttgagtcaaagtgattcttttgttgacagcttccacaatttgcctacttctagctatcatgatcctttgatatctggtttagtacagttaaggttgaaaattaacgacttgaagggtttagattctttaaacgccttggaacttttgaaaccatttttagaaatagtcagcgctagttctgtatctggttatactacttctttggctttggactctttgcagaaagtttttacattaaaaatcataaacaaaacatttaatgatattcaaattgccgttagggaaaccgttgttgcgcttacacattgtagatttgaagcttccaagcaaatttctgacgactctgttttattaaaagttgtaacattacttcgcgatattataacctcttcctttggagactatctctccgatactataatctacgatgttttacaaacgacactttccttggcatgtaatacgcagagaagcgaggttttgaggaaaacggctgaagttacaattgcagggataaccgttaaattatttacaaagttgaagttattagatccacctacaaaaacagaaaaatatatcaatgatgaaagttacaccgacaataatttgaaggatgacattataggtacgactacctctgataacgatttgagtagcactgatgatgacagtgctgttgcagacgataataaaaatgagaagccagtccaacaggtcataagggaacaggaaaatgatgaggaaacggctgagaaagccgaaaatgtcgagccaaattacggaataacagttataaaggattatcttggattattgttatctttggttatgccagagaatagaatgaagcacacaacttctgccatgaaattatctttgcagttaatcaatgcagccattgaaatatccggtgacaaatttcctttatatcccagattattcagcttaatttctgatccaatatttaaaagtgttttattcattatacaaagttctacccagtattctcttttgcaagcaactttacaattattcacgagtttggttgtgatattgggtgattatttgcctatgcagattgaattgactttaaggagaatattcgaaattttagaggataccacaatcagtggtgacgttagtaagcaaaaaccacctgcaatcagggaattaattattgaacaactttccatattatggattcactctcccgctttctttttgcaactttttgtaaatttcgattgtaatttggataggtctgatctttctattgactttataaaagagttaactaaattttctttaccagcggcggccgttaatacctctaacaacattcctccaatttgcttagaaggtgtactttctcttattgaaaatatatacaatgatttacagagatttgatagggcagaattcgtaaaaaatcagaaagaaattgatattttgaaacagagagacagaaagactgaattcatattatgcgttgaaacatttaatgaaaaggcaaagaaaggcattcaaatgttaattgaaaaaggattcattgattctgattctaatagagacattgcttcttttttgtttctcaataacggacgtttaaataagaaaaccatcggtttattactttgtgatccgaaaaaaacttctttgttaaaagaatttatagatcttttcgattttaaagggttaagggttgatgaagcgatcagaattttgttgacgaaattcagattaccaggggaatctcaacagattgaaagaatcgttgaagcattttcttctaaatattctgctgatcaaagcaatgataaagtggagttagaggataaaaaagcaggaaaaaatggcagtgagtccatgacagaagatgacatcattcatgtacagcctgatgcagactctgtgtttgtgttaagttattctataatcatgttaaataccgattctcataacccgcaggttaaagaccatatgacttttgatgactactctaacaatttaagaggatgctacaatggaaaagattttcctcgttggtatttgcataaaatttacacgtccatcaaagttaaggaaatagtaatgcctgaagaacatcatggaaatgaaaggtggtttgaagatgcctggaataacttaatatcctctacatctgtgatgacagagatgcaaagagatttcacaaaccctatttctaagttagcgcaaatagacatacttcagtatgagaaagcaattttcagtaatgttagagatattatcttgaagactttattcaaaatattcacagttgcttccagtgatcaaatatctttacgtatcttggacgccattagtaagtgtacatttatcaactattacttttcttttgaccagagttataatgatactgtacttcatttaggagaaatgacaacattggcacaaagtagcgcaaaagcggtggagttagatgttgacagtattcctttggtcgagatattcgtcgaagacactgggtccaagatatccgttagtaaccagagtataagacttggacaaaactttaaggctcagttatgtaccgtattgtactttcaaatcattaaagaaataagtgatcctagcattgtttctaccagattatggaaccagattgtgcaactcattttgaaattattcgagaatttattgatggaacctaatttaccattttttacaaactttcattctctcttgaaacttcctgaattaccattgccagatccagatatatccatccgcaaggcaaagatgagcagaagccttttatctactttcgcctcttacttgaaaggcgatgaagaaccttctgaagaagacatcgatttttccattaaagcatttgagtgcgttaaggctagccatcctctcagttctgtctttgagaacaatcaactcgtcagtcctaagatgattgaaactcttctctcttctcttgtgattgaaaaaacgagtgaaaattctccctatttcgaacaagaacttctctttttgttggaaatatccattatattaatatctgaggcttcttatggacaagaatttggagcattgattgctgatcatatgattaatatttctaatttagatggcctttccaaggaggctattgcaagacttgcctcttataaaatgtttttggtttctagatttgataatccaagagacattttaagtgatttaatagaacacgactttttggtaaaaaatgaaatcttcaatactaaatattatgaaagtgaatgggggaagcaagtaataaatgatttatttacacatctcaatgacgtaaaatacaatgagagagctctcaaaaatgtaaaattttggaattttttaaggatattaatatctgccaaagaccgccaatttgccgtctacacatttttggaaaaatacattcaaaatggtgatatctttgtagatgatgggaactttatgaacatattaagtttacttgatgaaatgtcctgtgcaggtgccgttggcacaaaatgggaacaaaattatgaaaattctgtcgaggatgggtgtgaagcacctgaatccaatccataccgttctattattgatctttctagtcgttccattaatataactgcagacttactttctactgttgggaggagtaattctgcactcaacaagaatgagattatagctgctattcaaggtctcgcccatcaatgcctcaatccctgtgacgaattgggtatgcaagcattgcaagcattagagaacattttattatctagagcaagtcaattgcgtacggaaaaagttgcggtggataacttattggagacaggattattaccgatttttgagttggatgaaatccaagatgtcaagatgaaaagaattactagcattttatccgttctttctaaaatcttcttgggtcaacttgtggaaggcgtaacaagtaacgaaacttttttgagagtgcttaacgtatttaacaagtatgtagatgatcctacggtggaaaggcagttgcaagagttgattatttctaagagggaaatcgagaaggagtga

SEQ ID NO: 6177 - DNA, 1182 bp, Saccharomyces cerevisiae
atgattcaagatccccttgtatatttagacatctccattgataaaaaaccaattggtcgtattgtctgcaaactttttcgtgagaaggctcctaaaacaacagagaatttttataagttatgcgctggtgatgttaagagtcctttgaaggatcaacagtacctgagctataagggaaatggttttcatagagtcgttaagaattttatgatccaggcaggtgacattgtctttgggacacaaaaggattcctcttcatcgtctgttggaaaaggtggatgttcaatttacgctgataaagaggaagtgaaaaccgatgatgaatctttctgttacgggaattttgaagacgaaaacttgggagagtttgtagaaccctttaccttaggtatggccaatttaggttctccaaatacgaacaattcccagtttttcataactacatacgccgcacctcatttgaacggcaagcattctatttttgggcaggtggttcatggaaaatcagtggttcgcactatagaaaactgcagggtagattctgatggagtccctgaatcagacgttagaatcagcgactgtggagtgtgggaaaaaactatgggtgtcccgctttacaacgcttctaatgaccaaattggcggtgacgtatacgaagaatatccagacgatgatacacatttcggtgacgatgattttggtaaggctcttgaggctgctaatataatcaaagaatctgggacgctcttatttaagaaaaaggattactctaatgcctttttcaaatacagaaaatctttaaattatatcaatgaatacatgcctgaacccgacgtagacaaagaaagaaacatccaatttattaacctaaagatgaaaatttacctaaatttatctttggtgctctttaatctggaaagatacgatgatgctatcatgtatgctacgtatttattggagatggataacgttcctaacagagatcaagcaaaggcttattatagaagaggtaacagttacttaaaaaaaaagagactagacgaagctttacaagattatattttttgtaaagagaaaaatcccgatgacgaagttatagaacaaagaatagaatatgtcaataggctcatagaagagaataaggaaaagacaagaaagaatatatcaaagtttttctcctaa

SEQ ID NO: 6178 - DNA, 1182 bp, Artificial Sequence
  Description of Artificial Sequence: Synthetic polynucleotide
atgattcaagatccccttgtatatttagacatctccattgataaaaaaccaattggtcgtattgtctgcaaactttttcgtgagaaggctcctaaaacaacagagaatttttataagttatgcgctggtgatgttaagagtcctttgaaggatcaacagtacttgagctataagggaaatggttttcatagagtcgttaagaattttatgatccaggcaggtgacattgtctttgggacacaaaaggattcctcttcttcttctgttggaaaaggtggatgttctatttacgctgataaagaggaagtgaaaaccgatgatgaatctttctgttacgggaattttgaagacgaaaacttgggagagtttgtagaaccctttaccttaggtatggccaatttaggttctccaaatacgaacaattcccagtttttcataactacatacgccgcacctcatttgaacggcaagcattctatttttgggcaggtggttcatggaaaatctgtggttcgcactatagaaaactgcagggtagattctgatggagtccctgaaagtgacgttagaatcagcgactgtggagtgtgggaaaaaactatgggtgtcccgctttacaacgcttctaatgaccaaattggcggtgacgtatacgaagaatatccagacgatgatacacatttcggtgacgatgattttggtaaggctcttgaggctgctaatataatcaaagaatctgggacgctcttatttaagaaaaaggattactctaatgcctttttcaaatacagaaaatctttaaattatatcaatgaatacatgcctgaacccgacgtagacaaagaaagaaacatccaatttattaacttgaagatgaaaatttacttgaatttatctttggtgctctttaatttggaaagatacgatgatgctatcatgtatgctacgtatttattggagatggataacgttcctaacagagatcaagcaaaggcttattatagaagaggtaacagttacttaaaaaaaaagagattagacgaagctttacaagattatattttttgtaaagagaaaaatcccgatgacgaagttatagaacaaagaatagaatatgtcaataggctcatagaagagaataaggaaaagacaagaaagaatatatccaagtttttctcctga

SEQ ID NO: 6179 - DNA, 4074 bp, Saccharomyces cerevisiae
atgtcattgaactttcttccaggacgccccaatgctacccctcagacagcttgtcaagcaacatggcaaaatcataccatctttgcatattgttcagggaataatttaatcatacttaccaacaaattcactaggttacagaccatatatacacaatcagactgtactgcggtcgatattaacagccagaatggattcattgccctttccttccacaatagggtgctcatctacaagcccattcatcaaattatgcagaatcccaagtggacccaatgttgccagttgttccatgatgacacgccagtaaactgcctaagatggtcttctgataatgagttagccattggatctgattttctttctttttggaaaattaaggataattttggtgtgtatcaacctattttgcagtggaaccaaaaacagcctaaacctgtttataatgtgattatatcacaagattcgcagctgatagtcagtattgggaagtacgactgtaatgctaaactatggaagcgtgtttcaatagtcggagaacaagccatctttaaccttactatgttgcctcatccgaaacctataactgcaatgcggtggaaaaaagagccagaccaggtgagtaaaaacaacactgcctctcatgctctttatacgctgtgtgaagataaagttctgagaatatggtcttgttttgaaatggagaaaaaccatactgtgcaaatatggggtgaagtgcctctttcccccacgcagaagttctgcgtgataatagacaattggatcattaggcaaactctcagtgtgaaagactcggaaatctttgatatatctgactcagacattgttattctgggttcaatgactggggaaatggaagttttggctttgaataatctttcccaagatcctccaaaaccaatgactaaaaagaccatttcccataaaaaagtcaagaaagcaactatgctaaacgatacaagatatttgtacctccccgaaatacaaccctatgacaatgtgaagggcaaactttcttttctcgtccacgatttacaaggtgtaatcagacatttactaatcgacattctgcagcttataaacaataaaaccgaagatctgagtgccgctttagagcacaaatttacgggacataacaaatctgtgcagaagttggtaagaagcagcgacggcgaagctttattaaccacttcgagattctcagaaaatggcgtttggtacccacaaaagttaaaccatggggtttcactgcggttacaaaatacaatacaaacagaatctcccataaaatttgcagttgtacatgagttgggtaaacaggtcatctgtcttctcgaaaatggggctttacaagcctgggaatgtccaacgaatcgtaaggaggacagtgaacagaagcaatcatatttacgtgtggaaacgagactgaaagaggagaaaaaaatccatccaatagttatgttaaatacacctgagccaaagcatagtcatgagcgtcatttcaccgcgttaatattctctgatggttcaatcaaagcttttgaagtctctttaacacgtggtatttttgaagtaaagtctgattcattagatatcgatggtgacgacatatacaagatctccattattgaccctgtacatcaaacttttgtgagtaacaggcctttgatttctttgattactaaaaaaggtcttaccagaacgtataaagccatcgttaattataatgataggcatgtccaatggatcaaggcatgtgaaattaacaccggaataatgaattgtacatgtattagaggatcatctacaggtaagttatgtattgttaattctactggtaaagtaatgtcactatgggacctgaacaggggagttcttgaatacgaagaaacatttcataatcctatcgaggatatagattggacaagcacggaatatggccaaagcattgtctctatcggatttacaggatacgctttactttatactcaattaaggtatgattacacgaacaacacacctagttacctacctattgaaaaaattgatatcacagcacatacagctcataatataggtgactccgtatggatgaaaaatggcacgtttgttgttgcttccggaaatcaattttacatcaaggataaatctctggatttgactgatccatttacgtaccaatcaattggttcaagaaaaattttatcaaatgatattctccatttaagtagtgttttaaatggtccacttccagtttatcatccacaatttttgattcaagccatttatgcgaataagttacaacttgtcaaggagctgttattaagattgtttttagcgttaagaaaattagactttgaatcgcaagatgtatctaatttggattccaatctaggaatggatccattaaagtactttattgctaaagatagagactatccggtcgaatctttccctgatccatacccctgtttcaataagacagtgtctctagcacttactgagcaactaacgaaaacaactttgccttatctaacccgccaccagcagatcacgcttatcacagtcattgaagcagtggatgaagtcaccaaaaatgagaatatagtagattacaacggtgttaggttcttgttgggcgtgaagttatttttatcacataaaaatattcaaaaaagcatattgatgagggatgtgtcttgggcattgcactcagacaataaagaaatattattatcttctattgaccgccacataacctcatggaatcgcgctcgagaatatagaatagcctattggattaaggagcaggacttggtgaagaaattcgaggatattgcaaaatatgaattttccaaagatgataagagggatccaagccgttgtgctattttttatcttgcgttgaagaaaaaacagatactattgagcttgtggaagatggctattggtcatcctgagcagcaaaagatggttagatttatcagtaatgatttcactgtaccgaggtggagaacggcagcactcaaaaatgcttttgttctgctaagtaagcatagatatatggatgcagcagttttctttctcttaactgactctctaaaagattgtgtcaacgttctttgcaagcaagtgcatgatatggatttggcaatcggtgtatgtcgtgtttatgaaggtgataatggacccgtgttgggagagctattgacagcgcaaatgctacctgaaacaataaaggagaatgatagatggaaagcaagtttcatttactggaaattgagaaagcaggaagtggctattaaagctttgctgactgctccgattgatttagaaaacaactcaagcattgttgataaggaagtctgtgttaacagatcattccttgttgaagaccctgctttgctctatctatacaatcacctgagaaacagaaacttgaagtatttcattggatctctaaatgttgaagcaaaaatcgagtgtactctgatcttaagagttactgatattctttgccgaatgggttgcaattacctggcggtttcacttgtgaagaattggaagttcatcgaaagaaattccataccagttcagaagctattaaagagccccaccaaggatagagcatattctgctattggcgccatggcgtctgaaccaatttctactgctaggatgaggcccagtctttttgataagtttggctcgccaagtgcttcagatatagagtcacctaatccaaagttaccaaatagcttattagacgacttcttgcaaccaccaccaaatagcacttcttcaaattccctcgctcaaagttcttcttctgcacctagaagtatactggatgagttcgtctctccttcatattctcagcataaagagaatttaactccaaaagcgccaaacgactctgtgggtgaaacagacaactcagaaaataggaaagataaactctctaaggacatattagatgatctttcatcacaaaagccacagaagccaaaaaaatctgctattaccaagaacttactagatgactttgtatga

SEQ ID NO: 6180 - DNA, 4074 bp, Artificial Sequence
  Description of Artificial Sequence: Synthetic polynucleotide
atgtctttgaactttcttccaggacgccccaatgctacccctcagacagcttgtcaagcaacatggcaaaatcataccatctttgcatattgttctgggaataatttaatcatacttaccaacaaattcactaggttacagaccatatatacacaatctgactgtactgcggtcgatattaacagccagaatggattcattgccctttccttccacaatagggtgctcatctacaagcccattcatcaaattatgcagaatcccaagtggacccaatgttgccagttgttccatgatgacacgccagtaaactgcttgagatggtcttctgataatgagttagccattggatctgattttctttctttttggaaaattaaggataattttggtgtgtatcaacctattttgcagtggaaccaaaaacagcctaaacctgtttataatgtgattatatctcaagattctcagttgatagtcagtattgggaagtacgactgtaatgctaaattatggaagcgtgtttctatagtcggagaacaagccatctttaaccttactatgttgcctcatccgaaacctataactgcaatgagatggaaaaaagagccagaccaggtgagtaaaaacaacactgcctctcatgctctttatacgttgtgtgaagataaagttttgagaatatggtcttgttttgaaatggagaaaaaccatactgtgcaaatatggggtgaagtgcctctttcccccacgcagaagttctgcgtgataatagacaattggatcattaggcaaactctcagtgtgaaagactctgaaatctttgatatatctgacagtgacattgttattttgggttctatgactggggaaatggaagttttggctttgaataatctttcccaagatcctccaaaaccaatgactaaaaagaccatttcccataaaaaagtcaagaaagcaactatgttgaacgatacaagatatttgtacctccccgaaatacaaccctatgacaatgtgaagggcaaactttcttttctcgtccacgatttacaaggtgtaatcagacatttattgatcgacattttacagcttataaacaataaaaccgaagatttgagtgccgctttagagcacaaatttacgggacataacaaatctgtgcagaagttggtaagaagcagcgacggcgaagctttattaaccacttccagattctctgaaaatggcgtttggtacccacaaaagttaaaccatggggtttctttaagattacaaaatacaatacaaacagaatctcccataaaatttgcagttgtacatgagttgggtaaacaggtcatctgtcttctcgaaaatggggctttacaagcctgggaatgtccaacgaatcgtaaggaggacagtgaacagaagcaaagttatttacgtgtggaaacgagattgaaagaggagaaaaaaatccatccaatagttatgttaaatacacctgagccaaagcatagtcatgagcgtcatttcaccgcgttaatattctctgatggttctatcaaagcttttgaagtctctttaacacgtggtatttttgaagtaaagtctgattctttagatatcgatggtgacgacatatacaagatctccattattgaccctgtacatcaaacttttgtgagtaacaggcctttgatttctttgattactaaaaaaggtcttaccagaacgtataaagccatcgttaattataatgataggcatgtccaatggatcaaggcatgtgaaattaacaccggaataatgaattgtacatgtattagaggatcttctacaggtaagttatgtattgttaattctactggtaaagtaatgtctctttgggacttgaacaggggagttcttgaatacgaagaaacatttcataatcctatcgaggatatagattggacaagcacggaatatggccaaagcattgtctctatcggatttacaggatacgctttactttatactcaattaaggtatgattacacgaacaacacacctagttacttacctattgaaaaaattgatatcacagcacatacagctcataatataggtgactccgtatggatgaaaaatggcacgtttgttgttgcttccggaaatcaattttacatcaaggataaatctttagatttgactgatccatttacgtaccaatctattggttccagaaaaattttatccaatgatattctccatttaagtagtgttttaaatggtccacttccagtttatcatccacaatttttgattcaagccatttatgcgaataagttacaacttgtcaaggagttattattaagattgtttttagcgttaagaaaattagactttgaatctcaagatgtatctaatttggattccaatttaggaatggatccattaaagtactttattgctaaagatagagactatccggtcgaatctttccctgatccatacccctgtttcaataagacagtgtctttggcacttactgagcaattaacgaaaacaactttgccttatttgacccgccaccagcagatcacgcttatcacagtcattgaagcagtggatgaagtcaccaaaaatgagaatatagtagattacaacggtgttaggttcttgttgggcgtgaagttatttttatctcataaaaatattcaaaaaagcatattgatgagggatgtgtcttgggcattgcactctgacaataaagaaatattattatcttctattgaccgccacataaccagttggaatcgcgctagagaatatagaatagcctattggattaaggagcaggacttggtgaagaaattcgaggatattgcaaaatatgaattttccaaagatgataagagggatccaagccgttgtgctattttttatcttgcgttgaagaaaaaacagatattattgagcttgtggaagatggctattggtcatcctgagcagcaaaagatggttagatttatcagtaatgatttcactgtaccgaggtggagaacggcagcactcaaaaatgcttttgttttgttaagtaagcatagatatatggatgcagcagttttctttctcttaactgactctttgaaagattgtgtcaacgttctttgcaagcaagtgcatgatatggatttggcaatcggtgtatgtcgtgtttatgaaggtgataatggacccgtgttgggagagttattgacagcgcaaatgttgcctgaaacaataaaggagaatgatagatggaaagcaagtttcatttactggaaattgagaaagcaggaagtggctattaaagctttgttgactgctccgattgatttagaaaacaactccagcattgttgataaggaagtctgtgttaacagatctttccttgttgaagaccctgctttgctctatttgtacaatcacttgagaaacagaaacttgaagtatttcattggatctttgaatgttgaagcaaaaatcgagtgtactttgatcttaagagttactgatattctttgcagaatgggttgcaattacttggcggtttcccttgtgaagaattggaagttcatcgaaagaaattccataccagttcagaagcttttaaagagccccaccaaggatagagcatattctgctattggcgccatggcgtctgaaccaatttctactgctaggatgaggcccagtctttttgataagtttggctctccaagtgcttctgatatagagtctcctaatccaaagttaccaaatagcttattagacgacttcttgcaaccaccaccaaatagcacttcttccaattccctcgctcaaagttcttcttctgcacctagaagtatattggatgagttcgtctctccttcttattctcagcataaagagaatttaactccaaaagcgccaaacgactctgtgggtgaaacagacaactctgaaaataggaaagataaactctctaaggacatattagatgatctttcttctcaaaagccacagaagccaaaaaaatctgctattaccaagaacttattagatgactttgtatga

SEQ ID NO: 6181 - DNA, 327 bp, Saccharomyces cerevisiae
atggtagctagttgtaaagatcagaagaaggctgtcgctatatgtttgcagagatcgccctgtgtcatgatagagagacataaccctcaagaatgtcttgacaatccagagctgaataaggatctgcccgaactttgtattgctcagatgaaagcatttttggattgtaagcgaggaatcgtcgacatgactaagcggttcacaggtaacgcacctctgtcgactggcaagtacgatcaacagtacgaaaacttgtgcaaaggaaagtttgatccgagggaggagatggaaaagctaaaacttctgaacagccagcagaaggactga

SEQ ID NO: 6182 - DNA, 327 bp, Artificial Sequence
  Description of Artificial Sequence: Synthetic polynucleotide
atggtagctagttgtaaagatcagaagaaggctgtcgctatatgtttgcagagatctccctgtgtcatgatagagagacataaccctcaagaatgtcttgacaatccagagttgaataaggatttgcccgaactttgtattgctcagatgaaagcatttttggattgtaagagaggaatcgtcgacatgactaagagattcacaggtaacgcacctttatctactggcaagtacgatcaacagtacgaaaacttgtgcaaaggaaagtttgatccgagggaggagatggaaaagttgaaacttttgaacagccagcagaaggactga

SEQ ID NO: 6183 - DNA, 3258 bp, Saccharomyces cerevisiae
atggaagataaagagcagcaagacaatgcgaaacttgaaaacaatgagtcactaaaagatctgggagttaacgtgctttcccaaagcagtttggaggaaaaaatagctaatgatgtaactaactttagcaacctacaatcgctgcagcaagaagagactcgtctagaacggagtaagaccgctctgcaacgttatgtcaataagaagaatcatctcacaaggaagttgaacaataccactaggatatctgttaagcagaatctccgagaccagatcaagaacttacaatcagacgatattgaacgagttctgaaggacatagacgatatccaatcaaggattaaagagttgaaagagcaggtagatcaaggtgctgaaaataaaggttccaaagaggggctgcagagacccggtgaaactgagaaggagtttttaatcaggactggtaagatcactgcatttggacacaaggctggtttcagcttggacactgcaaacagagagtatgccaagaatgacgaacaaaaagatgaggattttgaaatggcaacagaacaaatggtagaaaatttaacggatgaggatgacaatctcagcgatcaagactatcaaatgagtggtaaagagagtgaagatgacgaagaagaagaaaatgacgataaaattctcaaagaactggaagacctgcggttcagaggccaacctggtgaggcgaaggatgatggggacgagttgtattatcaagaaaggttaaaaaaatgggtgaaacaacgttcttgcggtagtcaaaggtcatcggacttgccagaatggcgaagacctcatccgaatattcccgacgcaaaacttaatagccagttcaaaatacccggtgaaatatactcgctgttatttaattaccaaaagacgtgcgttcagtggctctatgagctttaccagcagaactgtggcggtattattggtgacgaaatgggtctgggaaaaacgattcaagttatcgcatttatcgcagcgttgcatcattcaggtctattaacaggccctgtattaattgtctgtcctgcaactgtgatgaagcaatggtgtaatgagttccagcattggtggcctccattgaggacggtcatattgcactcaatgggttcaggaatggcttctgaccaaaaatttaagatggatgaaaacgatctagagaacttgataatgaattcaaagccaagtgatttttcttacgaggattggaagaactcaacaaggacaaagaaggcattggaatcaagctatcatttagataagttgatagataaagtcgttactgatgggcacattttaattaccacgtacgttgggttaagaatacattcagataagctactaaaagttaaatggcagtatgctgttttagatgagggacataagattagaaacccagattcggagatttcattgacttgcaaaaaactgaagacacataataggatcattctttcaggaacaccgatacagaataatttaaccgagctttggtcgctttttgatttcattttccctggtaaattaggaactctacctgtgtttcaacaacagtttgtcatacctataaatattggtggttatgcaaacgcaacaaacatacaagttcagaccggctacaaatgtgctgttgcattgcgtgacttgatttcaccgtacctgttacgtcgtgtgaaagctgatgttgcaaaagatctgccacaaaagaaagaaatggttctcttttgtaagcttacgaaatatcaaagaagcaaatatttggagtttctgcattcttcagatttaaaccaaatacaaaacggtaagagaaatgttctatttggtatcgacattctaaggaaaatatgtaatcaccccgatttacttgacagagatacaaagagacataatccagattacggtgatcctaaaagatccggaaaaatgcaggttgtcaagcaattattattactgtggcataagcagggctataaagccctactcttcactcaatcgagacaaatgctcgatattctagaggagtttatatcaacgaaagatcccgatttatcacatttgaactacctacgaatggatgggacaactaatatcaaagggagacagtcgttagttgaccggtttaacaatgaatctttcgatgtattcttactaaccacaagagttggggggctaggtgttaatttaaccggtgctaatagaattatcatttttgatccagactggaacccatctactgacatgcaagctcgagaaagggcatggaggattgggcagaaaagagaggtatcaatatataggttgatggtaggaggttcaatagaggagaagatttatcatagacaaatattcaaacaattcttaaccaacaggattttgactgatcctaagcagaaacgatttttcaaaattcacgaactccatgatctgttttcactggggggtgaaaacggttattctacagaagaattgaacgaagaagttcaaaaacataccgaaaatttaaaaaattccaaatcagaggaaagtgacgattttgaacaactggtcaacctatctggcgtatctaaactagaaagcttttataacggtaaggaaaaaaaagagaatagtaaaacagaggatgatagattaatcgaagggttgctaggaggagagagcaatttagaaaccgttatgagtcatgattcggttgtcaattcgcacgcgggcagttcttcttcgaatataattacaaaagaggcttccagagtagcgattgaggcggttaatgcgctaaggaaatcgagaaaaaagatcactaagcaatatgaaattgggacacctacttggacaggtaggtttggtaaagcaggtaaaattagaaagagagatccgttgaaaaataaattaactggatcagctgccattttaggcaatattacaaaatcacaaaaagaggcatccaaggaagctcgccaagaaaattacgacgatggtataaccttcgcaagatccaaggaaatcaattccaataccaaaacgctagaaaatattcgggcatatttacagaaacagaataactttttctcatctagtgttagcatacttaacagcattggcgtcagtctttctgataaagaagacgttattaaggttagagcattattaaaaaccatagcacagtttgataaagagcgtaaagggtgggtgcttgatgaagaatttaggaataacaatgcttcatga

SEQ ID NO: 6184 - DNA, 3258 bp, Artificial Sequence
  Description of Artificial Sequence: Synthetic polynucleotide
atggaagataaagagcagcaagacaatgcgaaacttgaaaacaatgagtctttgaaagatttgggagttaacgtgctttcccaaagcagtttggaggaaaaaatagctaatgatgtaactaactttagcaacttacaaagtttacagcaagaagagactcgtttagaaagaagtaagaccgctttacaacgttatgtcaataagaagaatcatctcacaaggaagttgaacaataccactaggatatctgttaagcagaatctcagagaccagatcaagaacttacaatctgacgatattgaaagagttttgaaggacatagacgatatccaatccaggattaaagagttgaaagagcaggtagatcaaggtgctgaaaataaaggttccaaagaggggttgcagagacccggtgaaactgagaaggagtttttaatcaggactggtaagatcactgcatttggacacaaggctggtttcagcttggacactgcaaacagagagtatgccaagaatgacgaacaaaaagatgaggattttgaaatggcaacagaacaaatggtagaaaatttaacggatgaggatgacaatctcagcgatcaagactatcaaatgagtggtaaagagagtgaagatgacgaagaagaagaaaatgacgataaaattctcaaagaattggaagacttgagattcagaggccaacctggtgaggcgaaggatgatggggacgagttgtattatcaagaaaggttaaaaaaatgggtgaaacaacgttcttgcggtagtcaaaggtccagtgacttgccagaatggagaagacctcatccgaatattcccgacgcaaaacttaatagccagttcaaaatacccggtgaaatatactctttattatttaattaccaaaagacgtgcgttcagtggctctatgagctttaccagcagaactgtggcggtattattggtgacgaaatgggtttgggaaaaacgattcaagttatcgcatttatcgcagcgttgcatcattctggtttattaacaggccctgtattaattgtctgtcctgcaactgtgatgaagcaatggtgtaatgagttccagcattggtggcctccattgaggacggtcatattgcactccatgggttctggaatggcttctgaccaaaaatttaagatggatgaaaacgatttagagaacttgataatgaattctaagccaagtgatttttcttacgaggattggaagaactccacaaggacaaagaaggcattggaaagtagctatcatttagataagttgatagataaagtcgttactgatgggcacattttaattaccacgtacgttgggttaagaatacattctgataagttattgaaagttaaatggcagtatgctgttttagatgagggacataagattagaaacccagattctgagatttctttgacttgcaaaaaattgaagacacataataggatcattctttctggaacaccgatacagaataatttaaccgagctttggagtctttttgatttcattttccctggtaaattaggaactttacctgtgtttcaacaacagtttgtcatacctataaatattggtggttatgcaaacgcaacaaacatacaagttcagaccggctacaaatgtgctgttgcattgcgtgacttgatttctccgtacttattacgtcgtgtgaaagctgatgttgcaaaagatttaccacaaaagaaagaaatggttctcttttgtaagcttacgaaatatcaaagaagcaaatatttggagtttttacattcttctgatttaaaccaaatacaaaacggtaagagaaatgttttatttggtatcgacattttaaggaaaatatgtaatcaccccgatttacttgacagagatacaaagagacataatccagattacggtgatcctaaaagatccggaaaaatgcaggttgtcaagcaattattattattatggcataagcagggctataaagccttactcttcactcaatctagacaaatgctcgatattttagaggagtttatatctacgaaagatcccgatttatctcatttgaactacttaagaatggatgggacaactaatatcaaagggagacagtctttagttgacagatttaacaatgaatctttcgatgtattcttattaaccacaagagttggggggttaggtgttaatttaaccggtgctaatagaattatcatttttgatccagactggaacccatctactgacatgcaagctagagaaagggcatggaggattgggcagaaaagagaggtatctatatataggttgatggtaggaggttccatagaggagaagatttatcatagacaaatattcaaacaattcttaaccaacaggattttgactgatcctaagcagaaaagatttttcaaaattcacgaactccatgatttattttctttagggggtgaaaacggttattctacagaagaattgaacgaagaagttcaaaaacataccgaaaatttaaaaaattccaaaagtgaggaaagtgacgattttgaacaattggtcaacttatctggcgtatctaaattagaaagcttttataacggtaaggaaaaaaaagagaatagtaaaacagaggatgatagattaatcgaagggttgttgggaggagagagcaatttagaaaccgttatgagtcatgattctgttgtcaattctcacgcgggcagttcttcttccaatataattacaaaagaggcttccagagtagcgattgaggcggttaatgcgttaaggaaatctagaaaaaagatcactaagcaatatgaaattgggacacctacttggacaggtaggtttggtaaagcaggtaaaattagaaagagagatccgttgaaaaataaattaactggatctgctgccattttaggcaatattacaaaatctcaaaaagaggcatccaaggaagctcgccaagaaaattacgacgatggtataaccttcgcaagatccaaggaaatcaattccaataccaaaacgttagaaaatattagagcatatttacagaaacagaataactttttcagttctagtgttagcatacttaacagcattggcgtcagtctttctgataaagaagacgttattaaggttagagcattattaaaaaccatagcacagtttgataaagagcgtaaagggtgggtgcttgatgaagaatttaggaataacaatgcttcttga

SEQ ID NO: 6185 - DNA, 2679 bp, Saccharomyces cerevisiae
atggtttctttatttgataagcttaatgcaaaaaaagacggtagagatggatctgtgtcgaaggagttgctatcacattctgtagcccatactaagaacaggttacccaaatcaggaaggcgcacgtcggaacggtccttagccgctagtgtaaaggacggaagttgctcaaatagcaaaagcaataagcggaactcttcggcatccgtgtcaggggaagaagataaatcctgtctaatttcacttaattgcctatgttgtggtgtcccactacggtttccagcctccataacgaaatttcgatgcagcgcatgccaagtaacagttattgtaaaggagccggaaattaacagtaatttggaatctagtacgcatatttcgtgcacattagagggtttgcagatggtagtaaggcggtgccatgatgatttgcagcggcttaagaagactgggattctggataaagaaagaaaggggttgattttccaaccggtaataacgtatttactggacagatttcatgatgttagcattttaaacaggtcgttcttggtacatgatggtggaaagaatataaagatgctgaattatgaagttttacaaagattttacagtatattatcaaatcttcctacaaggaaaccgtattatagtatgctgtgttgctgtaacgatctactgaagagaataacaatcaataaaggggaaaatttgcaaatattacagtatcgttggttgctgattatattaaatatacctacaatacgaacctgccttattagagatcggaagagcaaaaatgtgtttgagacccaacaaataagggcggtgtcttatgagttggccaaacgatgtattggctacttgtctaacctatcaacaaaaacatctcaacaattgattcaatcattacggcgaacgcctacggataatttttcataccaggtagagattttaaatttatacatcaatttccaattttccagattactgtcgaacgaattatcaaatagaaccgcaaaaaataacgtgaagcctgaagatgagatgcgatctcgtcttcgtcggcatcacactactggccatgaattcctgagtactagaccaataagtgcacaatcaaatgataaacagggaagtggtttcacgcatcccgtcaataataagatgaaatttaaattttttcaatatgaggaagactggcatattcactctgcagcaaaattgacgttcatctattatgtagccaatactagaagaaatggccgtggagcgttgtcaattcaaagcttttacaatataacgctagacttcatagattataaacaagatttcgatcattggagaggagtagctcaaaagacaaaaatgaatcaactgattgaagagtggggaaattcgacgacaaaaaaatgtttttcattctgtaagtatccatttatattgtcactcggcatcaaaatctctattatggagtatgaaattcgcagaatcatggaacatgaagctgaacaggcttttttaatttcactggataaaggcaaatccgtagacgtttatttcaaaatcaaagtacggcgtgacgttatttctcatgattcattgagatgtatcaaggaacatcaaggcgatttattaaaatcgctgagaatagagtttgttaatgaacctggaattgatgcgggagggttgagaaaagaatggtttttcttattaacaaaatcgctgtttaatccgatgaatggcttatttatttacataaaagaaagctcacgttcatggtttgccattgaccctccaaattttgacaaatcaaaaggaaaaaactcacaactggaattatattacttgtttggagttgtcatggggttggcgattttcaacagtaccatattagatttacaatttccaaaggcgctttataaaaaactatgctcagagcctctgagttttgaagattactcggaattgtttccggagacaagtaggaacttaataaaaatgctcaattacacagaggataatttcgaagacgtcttttctttaacatttgagactacgtatcgaaataacaactggattttaaatgacagtaaatcgagcaaagagtatgtaacggtagaattatgtgaaaatggcagaaatgtgccaataacccaaagtaacaagcatgagtttgtcatgaaatgggtagaattttatctggaaaagtccattgagccacaatacaataaatttgtttcaggttttaaaagggtcttcgcagaatgcaattctataaaattatttaattctgaagagctggagagattagtgtgtggtgatgaggaacaaactaaatttgatttcaaatcgttaagatccgtgacaaagtatgtaggtggcttctccgatgattccagagcggtttgctggttttgggaaattattgaaagttgggactatccattgcagaagaaattattacaattcgtaacggcatctgatcgtatacctgcaacgggtatctctactatcccattcaaaattagcttgctagggtcgcatgatagtgatgatttgccattggctcatacatgttttaatgaaatatgtttatggaattattcctcgaaaaaaaaactagaactgaaattactttgggcaattaatgaatctgaaggttacgggttccgctaa

SEQ ID NO: 6186 - DNA, 2679 bp, Artificial Sequence
  Description of Artificial Sequence: Synthetic polynucleotide
atggtttctttatttgataagcttaatgcaaaaaaagacggtagagatggatctgtgagcaaggagttgttatctcattctgtagcccatactaagaacaggttacccaaaagtggaaggcgcacgagtgaaagatccttagccgctagtgtaaaggacggaagttgctccaatagcaaaagcaataagagaaactcttctgcatccgtgagcggggaagaagataaatcctgtttaatttctcttaattgcttgtgttgtggtgtcccattaagatttccagcctccataacgaaatttagatgcagcgcatgccaagtaacagttattgtaaaggagccggaaattaacagtaatttggaatctagtacgcatatttcttgcacattagagggtttgcagatggtagtaaggagatgccatgatgatttgcagagacttaagaagactgggattttagataaagaaagaaaggggttgattttccaaccggtaataacgtatttattagacagatttcatgatgttagcattttaaacaggtctttcttggtacatgatggtggaaagaatataaagatgttgaattatgaagttttacaaagattttacagtatattatccaatcttcctacaaggaaaccgtattatagtatgctttgttgctgtaacgatttattgaagagaataacaatcaataaaggggaaaatttgcaaatattacagtatcgttggttgttaattatattaaatatacctacaataagaacctgccttattagagatagaaagagcaaaaatgtgtttgagacccaacaaataagggcggtgtcttatgagttggccaaaagatgtattggctacttgtctaacttatctacaaaaacatctcaacaattgattcaatctttaaggagaacgcctacggataatttttcttaccaggtagagattttaaatttatacatcaatttccaattttccagattattatctaacgaattatccaatagaaccgcaaaaaataacgtgaagcctgaagatgagatgagatctcgtcttcgtcgtcatcacactactggccatgaattcttaagtactagaccaataagtgcacaaagcaatgataaacagggaagtggtttcacgcatcccgtcaataataagatgaaatttaaattttttcaatatgaggaagactggcatattcactctgcagcaaaattgacgttcatctattatgtagccaatactagaagaaatggccgtggagcgttgtctattcaaagcttttacaatataacgcttgacttcatagattataaacaagatttcgatcattggagaggagtagctcaaaagacaaaaatgaatcaattgattgaagagtggggaaattctacgacaaaaaaatgtttttctttctgtaagtatccatttatattgtctctcggcatcaaaatctctattatggagtatgaaattcgcagaatcatggaacatgaagctgaacaggcttttttaatttctttagataaaggcaaatccgtagacgtttatttcaaaatcaaagtaaggcgtgacgttatttctcatgattctttgagatgtatcaaggaacatcaaggcgatttattaaaatctttgagaatagagtttgttaatgaacctggaattgatgcgggagggttgagaaaagaatggtttttcttattaacaaaatctttatttaatccgatgaatggcttatttatttacataaaagaaagcagccgttcttggtttgccattgaccctccaaattttgacaaatctaaaggaaaaaactctcaattggaattatattacttgtttggagttgtcatggggttggcgattttcaacagtaccatattagatttacaatttccaaaggcgctttataaaaaattatgcagtgagcctttgagttttgaagattactctgaattgtttccggagacaagtaggaacttaataaaaatgctcaattacacagaggataatttcgaagacgtcttttctttaacatttgagactacgtatagaaataacaactggattttaaatgacagtaaaagtagcaaagagtatgtaacggtagaattatgtgaaaatggcagaaatgtgccaataacccaaagtaacaagcatgagtttgtcatgaaatgggtagaattttatttggaaaagtccattgagccacaatacaataaatttgtttctggttttaaaagggtcttcgcagaatgcaattctataaaattatttaattctgaagagttagagagattagtgtgtggtgatgaggaacaaactaaatttgatttcaaatctttaagatccgtgacaaagtatgtaggtggcttctccgatgattccagagcggtttgctggttttgggaaattattgaaagttgggactatccattgcagaagaaattattacaattcgtaacggcatctgatcgtatacctgcaacgggtatctctactatcccattcaaaattagcttgttggggtctcatgatagtgatgatttgccattggctcatacatgttttaatgaaatatgtttatggaattattcctctaaaaaaaaattagaattgaaattactttgggcaattaatgaatctgaaggttacgggttccgctga

SEQ ID NO: 6187 - DNA, 3366 bp, Saccharomyces cerevisiae
atgccagcagggaggattcgtatagcgatgactgacaacattatagtaagtgaggttgatggtcccccggatgtagttaaatgttttattagggaagaagatggactcgaaggacagagccgagaattggtggtcataggactagaatatatagatgtgtttgaaggggtagaacaagatgaagcgcgcaagaagttaagacttaggactgtcggatatacaatggcagccttttatttcaaagatcatactgcacctaaccgaagattttatattctgttgaaagccacgggacggttggacttcgtcaaccttgattacaaaatagtgaaatctctggaaacaggaattgatcaggtaagatcagagccaaagttcatgttccaagatccactacgaacagctctggtttttaatttgtcatgcactgaaatttacgagatttctactgaggacattttttgtttggaagaaacagacgttaagctgagttatgtgacatcctcaccgatagtatccatagatgcgtgtatcaatttcaatgatttcttagataaggatgtctttacgttgtcgattctcacacgtgcacacaatgaggttgcatataagttggaagcatgcgtgtgtgtattcgagtctaaaccagccaaaggaacgaagtggcaaagaactaccaatttaacatttgtggaggaagcaacggtctcacaagtacttctcaaatcggtcaccaatattggtcattttgtttttacgccatggaaaacttattttattaaacatgcattgtcatcgaaacagaccattgatggtaaaacggtagacaaaatataccaagggcctggtgcctttgggtctgataacatggaaagaatcgaacttttgcagcctattttagcggataccacattaaatcatttaacatttacatttatgacgagtactgcaattctaataacatgcagaatgaatgcaatccttagcagttttgaagacgatacgtatatctgggaaaaggccttgtttgagaggcttcccatcaatggtggttcctcacatgatcactaccttgcagcgtttttcaatgagaagtgttggatactggtatccccaaagggccatcttacagtatattcagtcagaaatgaagggcatagtaattttgttcatcttggttcttttctttgcaaatcaaccttatattccgatttgatagggaactacaccaagtcacatttatcttgtggatcattacactgtgggcagggatacttgtgcttgaaatttcgatcgtgtggggacattttcgcgtccacttgcatgaagctacttttcaaaagtaaagacagtgttcctcgacaagtttactctacaagaaaaggtatctattgggcagatgtgaataataatgtttacagagatagtgagcgaatagactttgaaataaatggcagtttcattgctactaaagatggaactctattgaaagataacactatcgttactttggtcccaattcaaagagataatgagtgtaattacgcatacgtcacaaaacaaggttatctgaggtggagtttttcaaaggtttattaccggattcaaaacacgggagttgatttgactatagataattgctttttatctgctatatctagcaagggctcttttttgactgtacttgttctgaatgatgaaataacggtatttgatcattgcaaccgtttgaaaagccagaaagtagttttccatagactttctgacttagcgtccattttcctatatgaatacgaaagcacggtctacattttcatgtctgacaccgaaggaaacctttgcgttatgaaattggcaacttttgagatcgtagaagaggttaaaatttgcaagaagaagttacagttctgtgaagtccctaactcagattatttttttatatatacagccgatactataatttttttcaagccaagtaaaataaaaggtagatttaaaatccaagaagtatatgcaccatgtcctataagctgtttgatacctggagaaaaagatggctcagttgttatggttacttctcaaggtcaattttacgacgtacttgttcctggtgatgccggaagggctactctttgttctaagtttgaaaaagttttaaaaacatgtctcaaatttataactttggaatcttcatcaagatatgtgattgtagcggccctgccagtagcaaatccattgcaggacaagtattccgaaatttatgtgtatgatattaaacagttcaaaaacatttccgcattcaatttttctaacctcaacaatgatatcgagagtataaaatatgaaaacgctatgatatcagatattattgccgtacccatgctcaaaagaaccgaaacattaggaaaaagaaagacttctgagctgtataaggaagtgattttcaattcatgtatcttggtgtctctaaatttagactcaatagacggtattgatagtaaaaatatgaataacctattattgttttcatttgatgaggaatcgggttttattgaatttgtttttgggattaacacggggttctcaatcagtgggttacataactattacaatggatgtgttttggtttatggggagtttgtgcaagcttatcaactgaactattcagttcatgataacaagttcagtattgaacaggtttcaaataggttgaatatttctggtattacaataacatcatctatattttttgataaaaggaaggcaaagatggctaggaagcagcaaaatataggtacatgggtttatttggaagaaatgattttacttgatgtacggaaaggtgtgatgaggttcaatgtcatccatacaacagacggtaacatagaaaaggttcaattgcaggtacagcctctgaatttatttgagagggacctcatcaatagcattaccgacaccgggaaaatgtttaccggtgcagccgctataactttcaagaatattaggtatctactaatttcgtacggtgatcaaaagctcacgttatttagtttaaaacttgatggtgaggaagaaatagacgaaagagtgtaccatgttgctgagcaagttacaaccatcaactctgtaagaactactgattccagaatgagcacgtttttaggcgaatctacatttatgcccttattcttagtaagtaccttgtctaacggttgttatgtgatcggaatcctgcatgaagagtcagatatctcattacatatcttatcagaaaagaaagctgtcttcgcaaagcggtcggttcaaaagttcctgggcttcctcgatcctcaaatggatgatcacactgtaatatctgaaatttag

SEQ ID NO: 6188 - DNA, 3366 bp, Artificial Sequence
  Description of Artificial Sequence: Synthetic polynucleotide
atgccagcagggaggattcgtatagcgatgactgacaacattatagtaagtgaggttgatggtcccccggatgtagttaaatgttttattagggaagaagatggactcgaaggacagagcagagaattggtggtcataggattagaatatatagatgtgtttgaaggggtagaacaagatgaagcgcgcaagaagttaagacttaggactgtcggatatacaatggcagccttttatttcaaagatcatactgcacctaacagaagattttatattttattgaaagccacgggaagattggacttcgtcaaccttgattacaaaatagtgaaatctttggaaacaggaattgatcaggtaagaagtgagccaaagttcatgttccaagatccattaagaacagctttggtttttaatttgtcttgcactgaaatttacgagatttctactgaggacattttttgtttggaagaaacagacgttaagttgagttatgtgacatcctctccgatagtatccatagatgcgtgtatcaatttcaatgatttcttagataaggatgtctttacgttgtctattctcacacgtgcacacaatgaggttgcatataagttggaagcatgcgtgtgtgtattcgagtctaaaccagccaaaggaacgaagtggcaaagaactaccaatttaacatttgtggaggaagcaacggtctctcaagtacttctcaaatctgtcaccaatattggtcattttgtttttacgccatggaaaacttattttattaaacatgcattgtcttctaaacagaccattgatggtaaaacggtagacaaaatataccaagggcctggtgcctttgggtctgataacatggaaagaatcgaacttttgcagcctattttagcggataccacattaaatcatttaacatttacatttatgacgagtactgcaattttaataacatgcagaatgaatgcaatccttagcagttttgaagacgatacgtatatctgggaaaaggccttgtttgagaggcttcccatcaatggtggttcctctcatgatcactaccttgcagcgtttttcaatgagaagtgttggatattagtatccccaaagggccatcttacagtatattctgtcagaaatgaagggcatagtaattttgttcatcttggttcttttctttgcaaatctaccttatattccgatttgatagggaactacaccaagagtcatttatcttgtggatctttacactgtgggcagggatacttgtgcttgaaatttagatcttgtggggacattttcgcgtccacttgcatgaagcttcttttcaaaagtaaagacagtgttcctagacaagtttactctacaagaaaaggtatctattgggcagatgtgaataataatgtttacagagatagtgagagaatagactttgaaataaatggcagtttcattgctactaaagatggaactttattgaaagataacactatcgttactttggtcccaattcaaagagataatgagtgtaattacgcatacgtcacaaaacaaggttatttgaggtggagtttttccaaggtttattacagaattcaaaacacgggagttgatttgactatagataattgctttttatctgctatatctagcaagggctcttttttgactgtacttgttttgaatgatgaaataacggtatttgatcattgcaaccgtttgaaaagccagaaagtagttttccatagactttctgacttagcgtccattttcctctatgaatacgaaagcacggtctacattttcatgtctgacaccgaaggaaacctttgcgttatgaaattggcaacttttgagatcgtagaagaggttaaaatttgcaagaagaagttacagttctgtgaagtccctaacagtgattatttttttatatatacagccgatactataatttttttcaagccaagtaaaataaaaggtagatttaaaatccaagaagtatatgcaccatgtcctataagctgtttgatacctggagaaaaagatggctctgttgttatggttacttctcaaggtcaattttacgacgtacttgttcctggtgatgccggaagggctactctttgttctaagtttgaaaaagttttaaaaacatgtctcaaatttataactttggaatcttcttctagatatgtgattgtagcggccttaccagtagcaaatccattgcaggacaagtattccgaaatttatgtgtatgatattaaacagttcaaaaacatttccgcattcaatttttctaacctcaacaatgatatcgagagtataaaatatgaaaacgctatgatatctgatattattgccgtacccatgctcaaaagaaccgaaacattaggaaaaagaaagacttctgagttgtataaggaagtgattttcaattcttgtatcttggtgtctttgaatttagacagtatagacggtattgatagtaaaaatatgaataacttattattgttttcttttgatgaggaaagtggttttattgaatttgtttttgggattaacacggggttctccatcagtgggttacataactattacaatggatgtgttttggtttatggggagtttgtgcaagcttatcaattgaactattctgttcatgataacaagttcagtattgaacaggtttctaataggttgaatatttctggtattacaataacatcttctatattttttgataaaaggaaggcaaagatggctaggaagcagcaaaatataggtacatgggtttatttggaagaaatgattttacttgatgtaagaaaaggtgtgatgaggttcaatgtcatccatacaacagacggtaacatagaaaaggttcaattgcaggtacagcctttaaatttatttgagagggacctcatcaatagcattaccgacaccgggaaaatgtttaccggtgcagccgctataactttcaagaatattaggtatttattgatttcttacggtgatcaaaagctcacgttatttagtttaaaacttgatggtgaggaagaaatagacgaaagagtgtaccatgttgctgagcaagttacaaccatcaactctgtaagaactactgattccagaatgagcacgtttttaggcgaatctacatttatgcccttattcttagtaagtaccttgtctaacggttgttatgtgatcggaatcttgcatgaagagtctgatatctctttacatatcttatctgaaaagaaagctgtcttcgcaaagagatctgttcaaaagttcttgggcttcctcgatcctcaaatggatgatcacactgtaatatctgaaatttga

SEQ ID NO: 6189 - DNA, 2340 bp, Saccharomyces cerevisiae
atgccaacaacttatgtgccaataaatcaaccaattggggatggtgaagatgtcattgacaccaatcgattcaccaatattccagaaacgcaaaattttgaccaatttgttacaattgataagattgctgaggaaaatagaccactgtctgtagactcggacagggagttccttaattcaaaatatcgacattaccgagaggttatatgggaccgtgcaaaaacatttatcacattaagctctacggccatagttattggatgtattgctggtttcctacaagtcttcacggaaactctggttaactggaaaacaggtcattgtcagaggaactggctacttaataaatccttctgttgtaacggcgtggttaatgaggttacctctacaagcaatttactactgaaaagacaagagtttgaatgcgaggcacaagggctttggattgcctggaagggacatgtgtccccttttataattttcatgcttttgtcagtcttatttgctctaattagtacactgttagtcaaatatgttgctcctatggctactggttcaggaatctcagagattaaggtatgggtatcaggttttgaatacaataaggaatttttgggtttcttaacattagtcattaaaagtgttgcccttcctttggctatttcttcgggattaagcgtaggtaaagaagggccctcagttcattatgcaacctgttgtgggtacttactcacaaaatggctactaagagatactttgacgtattcatcgcaatatgagtatatcacagcagctagtggagcaggtgttgcggttgcttttggtgctcctattggtggtgtcctttttggtttggaagagattgcttctgcgaataggtttaactcctctaccttatggaaatcctattatgtcgccctagtcgcaataactactttgaagtacattgatccatttaggaatggcagagttattttattcaatgtaacatatgatagagactggaaggtacaagagattccgatctttatagccttaggaatctttggtggtttatatggaaaatatattagtaagtggaacatcaactttattcactttcgcaaaatgtacctgtcctcatggccagttcaagaagtgctttttttggcgacgcttactgctttgatttcttacttcaatgagttcttgaaattagacatgacagaaagtatgggtatattgtttcatgaatgtgtcaagaacgataacacctcaacttttagtcataggttatgtcagttggatgaaaatacgcacgcttttgagttcttaaaaatttttacttccctatgctttgccactgttatcagggccttgttggtggtggtatcatatggcgccagagttcctgccggaatctttgttccttcaatggcggttggggccacatttggacgggcagtaagtctactggtagagagatttataagtggcccttctgttattactcctggtgcctacgccttcctgggagcagccgctaccttgagcgggataactaacttgactttaactgtggtggtaataatgttcgagctaacaggcgccttcatgtatatcataccccttatgattgtagtggcaataacaaggataattttaagcacgtctggtatttctggcggtattgctgatcaaatgatcatggttaatggattcccatatttggaagacgagcaagacgaggaagaggaggaaaccttagaaaaatacactgcagagcagctcatgtcctccaaattaattactattaatgaaaccatttacctttccgagcttgaatctttgttgtacgactcagcgtctgaatattctgtgcatggttttccaataactaaggatgaggataagtttgagaaggaaaaaagatgtattggctatgttttaaaaaggcacttagccagtaaaatcatgatgcaaagcgtaaatagcaccaaagctcaaacgacactggtatacttcaataagtctaacgaagagttgggacatcgtgaaaactgcatcggatttaaggatattatgaatgaatctccaatctcggtgaagaaggcggtgccagtaacattgttattccgtatgtttaaagagctaggttgtaagactatcatcgtagaggaaagtggaattttaaaggggttggtcactgctaaagatattttgaggttcaaaagaattaagtatcgagaagttcacggtgcgaaatttacatataatgaagcacttgatagaagatgttggtcagttatccatttcataatcaaaaggtttaccactaatcgaaatggtaacgttatatga

SEQ ID NO: 6190 - DNA, 2340 bp, Artificial Sequence
  Description of Artificial Sequence: Synthetic polynucleotide
atgccaacaacttatgtgccaataaatcaaccaattggggatggtgaagatgtcattgacaccaatagattcaccaatattccagaaacgcaaaattttgaccaatttgttacaattgataagattgctgaggaaaatagaccattatctgtagacagtgacagggagttccttaattctaaatatagacattacagagaggttatatgggaccgtgcaaaaacatttatcacattaagctctacggccatagttattggatgtattgctggtttcttacaagtcttcacggaaactttggttaactggaaaacaggtcattgtcagaggaactggttacttaataaatccttctgttgtaacggcgtggttaatgaggttacctctacaagcaatttattattgaaaagacaagagtttgaatgcgaggcacaagggctttggattgcctggaagggacatgtgtccccttttataattttcatgcttttgtctgtcttatttgctttgattagtacattattagtcaaatatgttgctcctatggctactggttctggaatctctgagattaaggtatgggtatctggttttgaatacaataaggaatttttgggtttcttaacattagtcattaaaagtgttgcccttcctttggctatttcttctggattaagcgtaggtaaagaagggccctctgttcattatgcaacctgttgtgggtacttactcacaaaatggttgttaagagatactttgacgtattcttctcaatatgagtatatcacagcagctagtggagcaggtgttgcggttgcttttggtgctcctattggtggtgtcctttttggtttggaagagattgcttctgcgaataggtttaactcctctaccttatggaaatcctattatgtcgccttggtcgcaataactactttgaagtacattgatccatttaggaatggcagagttattttattcaatgtaacatatgatagagactggaaggtacaagagattccgatctttatagccttaggaatctttggtggtttatatggaaaatatattagtaagtggaacatcaactttattcactttcgcaaaatgtacttgtcctcttggccagttcaagaagtgctttttttggcgacgcttactgctttgatttcttacttcaatgagttcttgaaattagacatgacagaaagtatgggtatattgtttcatgaatgtgtcaagaacgataacacctctacttttagtcataggttatgtcagttggatgaaaatacgcacgcttttgagttcttaaaaatttttacttccttatgctttgccactgttatcagggccttgttggtggtggtatcttatggcgccagagttcctgccggaatctttgttccttctatggcggttggggccacatttggaagggcagtaagtttattggtagagagatttataagtggcccttctgttattactcctggtgcctacgccttcttgggagcagccgctaccttgagcgggataactaacttgactttaactgtggtggtaataatgttcgagttgacaggcgccttcatgtatatcataccccttatgattgtagtggcaataacaaggataattttaagcacgtctggtatttctggcggtattgctgatcaaatgatcatggttaatggattcccatatttggaagacgagcaagacgaggaagaggaggaaaccttagaaaaatacactgcagagcagctcatgtcctccaaattaattactattaatgaaaccatttacctttccgagcttgaatctttgttgtacgactctgcgtctgaatattctgtgcatggttttccaataactaaggatgaggataagtttgagaaggaaaaaagatgtattggctatgttttaaaaaggcacttagccagtaaaatcatgatgcaaagcgtaaatagcaccaaagctcaaacgacattggtatacttcaataagtctaacgaagagttgggacatcgtgaaaactgcatcggatttaaggatattatgaatgaatctccaatcagtgtgaagaaggcggtgccagtaacattgttattccgtatgtttaaagagttaggttgtaagactatcatcgtagaggaaagtggaattttaaaggggttggtcactgctaaagatattttgaggttcaaaagaattaagtatagagaagttcacggtgcgaaatttacatataatgaagcacttgatagaagatgttggtctgttatccatttcataatcaaaaggtttaccactaatagaaatggtaacgttatatga

SEQ ID NO: 6191 - DNA, 3525 bp, Saccharomyces cerevisiae
atgggtgatcttacagaagaactatctatcccagacaatgcccaagatttgtcgaaattactacgttcgacgagcacaaaaccccatcaaattgccgagatagtttcaaaatttgataaattagaaacctactttccaaaaaaagaaattttcgtcttagatttactcattgataggctcaacaatggaaatttggatgattttaagaccagtgaacatacttggataattttcacgagattattagatgctattaatgatccaatttcgataaaaaaactactcaaaaaattgaagactgtgcctgtaatgataagaacatttttcctttggcctaaagacaaattacttacacgtagcgtttcgtttataaaagcattttttgcgattaatgactacttgattgtcaatttttctgttgaagagtcttttcaacttttagaacatgccataaatggattaagttcgtgcccgacgactgactttgcgctttcatacttgcaagatgcctgcaatctaactcatgttgacaatattactacaacggataacaaaattgctacttgttactgcaagcatatgctactaccaagtttaagatatttcgcacagaccaaaaattctgcatcttcaaaccaatccttcattcgtctatctcattttatgggaaagttccttttacaaccacgcatagattacatgaaattaaataaaaagtttgtccaagagaatgcgtccgaaattaccgacgatatggcttattattattttgccactttcgtcactttcttatcaaaagacaattttgctcaactagaagtcatctttacaattttaggtgccaagaaacctagtttagaatgcagatttctgaatcttttatcggaatcgaagaaaaccgtatctcaagagttccttgaagcattattgcttgaaatgttagcgtcgactgatgaatctggagtgttatcattaataccaattatccttaaattggatatcgaggttgctattaaacatatttttcggttacttgaattgattcagctcgaaaatttgaacgatcctctcttttcctctcatatttgggatttaataatccaatcacacgctaacgcaagggaattatcagatttttttgccaaaataaatgagtactgttccagaaaaggacccgattcctattttttgataaatcatcctgcatatgtcaagtctataacgaagcaattgttcactttatcttctttacaatggaaaaatctattgcaagctttacttgaccaagtcaatcacgattccaccaacagggttcctttatatttaatacgcatatgcttggagggactatcagagggcgcatcgcgcgcaactctcgatgaggtaaagcctattttatctcaagtatttactttggaatcatttaataacagtcttcaatgggacctaaagtatcatataatggaagtctacgatgatattgtccctgcagaggaactagaaaaaatcgattacgtgttatcttctaatatttttgatactacatcggctgatgttgaagaactgttcttttattgcttcaaattgagagaatatatttcgttcgatctttctgatgcaaaaaaaaaattcatgaggcactttgaaatccttgacgaagaaagaaagtcaaacttatcatactctgttgtgtccaaatttgcaacattagtaaacaacaactttacaagagaacaaatttcttctttaattgattcattactattgaactcgacaaatttatcttcgttattaaaaaatgatgacatttttgaggagacaaatatcacgtacgctttaataaacaagcttgcttcatcataccatcaaaccttcgctctagaagctttgattcaaattcctatccaatgcatcaacaaaaacgttagagtggctctcattaacaatctaacatgcgaatcattttgccttgattccgctactagagaatgcctccttcatttattgtcaagcccgaccttcaagagcaacattgaaacaaatttctacgaattatgtgagaaaacaataatgagccccgaaatggccatttcagagacaggtgatgaaaaaaaggaaatagaagacaaaatatctattttcgaaaaagtttggactaatcatctgtcacaggcaaaggagcctgtgagtgagaagttcttagaatctggttacgatatcgttaaacagtcaatgtcattgtccaatggtgatagcaaactaattatcgccgggtttactatcgcaaaatttttgaaaccagataacaagcatagagatatacaaggtatggcaattagctatgctgttaaaattttggaaaactactctgaaaattttgaatctgaaacaattccccttttcagaatatcaatgtctacattgtacaagattataacgaccggacaaggcgatatttctaagcataaatcgagaattctggatatattttccaaaattatgcttcgatatcattctaaaaaagtgtaccatgcgccagaagaacaggaaatgtttttggttcattcactccttacagaaaacaagttggagtatatttttgcagagtacttaaatattgagcatacagataagtgcgattctgccttggggttctgcttggaagaaagtcttaaacaaggtcctgatgcgtttaaccgcctgctctggaacagtgctaaatcgttttccaccattagccaaccttgtgctgaaaaatttgtgagagtttttatcataatgtcaaaaaggattgcaagagacaataaccttggtcatcacctatttgtgatagctttacttgaagcctacacctattgtgatatagaaaaatttggctacaagtcatacttgctactgttcaatgctatcaaggagttcttagtatcgaaaccatggctattcagccaatactgtattgaaatgctgcttcctttctgtttaaaaactctcgcttttatagtaaaccatgagtcaacggatgaaatcaatgaaggctttattaacatcatcgaagtgatagatcatatgctattagttcacaggtttaaattttccaatcgtcaccatttgtttaactccgttctttgccagatactagaaataatagcaattcatgatggtacattgtgtgcaaattcagcagacgccgtagccagactaataacgaactactgcgagccttataatgtatcaaacgctcaaaatgggcagaaaaataacttaagctcaaagataagtttgataaagcagtccatcagaaaaaatgtacttgtggttctaacgaaatatatacagttgtctattacgacgcagttcagtttaaacataaaaaagagtctgcagcccggtattcatgcgatttttgatatattatctcagaacgagttgaatcaattgaacgctttccttgacacacctgggaaacaatatttcaaagcactttacctccaatacaaaaaggttggtaaatggcgcgaagattaa

SEQ ID NO: 6192 - DNA, 3525 bp, Artificial Sequence
  Description of Artificial Sequence: Synthetic polynucleotide
atgggtgatcttacagaagaattatctatcccagacaatgcccaagatttgagtaaattattacgttctacgagcacaaaaccccatcaaattgccgagatagtttccaaatttgataaattagaaacctactttccaaaaaaagaaattttcgtcttagatttactcattgataggctcaacaatggaaatttggatgattttaagaccagtgaacatacttggataattttcacgagattattagatgctattaatgatccaatttctataaaaaaattactcaaaaaattgaagactgtgcctgtaatgataagaacatttttcctttggcctaaagacaaattacttacacgtagcgtttcttttataaaagcattttttgcgattaatgactacttgattgtcaatttttctgttgaagagtcttttcaacttttagaacatgccataaatggattaagttcctgcccgacgactgactttgcgctttcttacttgcaagatgcctgcaatttaactcatgttgacaatattactacaacggataacaaaattgctacttgttactgcaagcatatgttattaccaagtttaagatatttcgcacagaccaaaaattctgcatcttccaaccaatccttcattcgtttatctcattttatgggaaagttccttttacaaccacgcatagattacatgaaattaaataaaaagtttgtccaagagaatgcgtccgaaattaccgacgatatggcttattattattttgccactttcgtcactttcttatccaaagacaattttgctcaattggaagtcatctttacaattttaggtgccaagaaacctagtttagaatgcagatttttgaatcttttatctgaatccaagaaaaccgtatctcaagagttccttgaagcattattgcttgaaatgttagcgtctactgatgaatctggagtgttatctttaataccaattatccttaaattggatatcgaggttgctattaaacatatttttagattacttgaattgattcagctcgaaaatttgaacgatcctctcttttcctctcatatttgggatttaataatccaatctcacgctaacgcaagggaattaagtgatttttttgccaaaataaatgagtactgttccagaaaaggacccgattcctattttttgataaatcatcctgcatatgtcaagtctataacgaagcaattgttcactttatcttctttacaatggaaaaatttattgcaagctttacttgaccaagtcaatcacgattccaccaacagggttcctttatatttaatacgcatatgcttggagggattatctgagggcgcatctcgcgcaactctcgatgaggtaaagcctattttatctcaagtatttactttggaaagttttaataacagtcttcaatgggacttgaagtatcatataatggaagtctacgatgatattgtccctgcagaggaattggaaaaaatcgattacgtgttatcttctaatatttttgatactacatctgctgatgttgaagaattattcttttattgcttcaaattgagagaatatatttctttcgatctttctgatgcaaaaaaaaaattcatgaggcactttgaaatccttgacgaagaaagaaagtctaacttatcttactctgttgtgtccaaatttgcaacattagtaaacaacaactttacaagagaacaaatttcttctttaattgattctttattattgaactccacaaatttatcttctttattaaaaaatgatgacatttttgaggagacaaatatcacgtacgctttaataaacaagcttgcttcttcctaccatcaaaccttcgctttggaagctttgattcaaattcctatccaatgcatcaacaaaaacgttagagtggctctcattaacaatttgacatgcgaaagtttttgccttgattccgctactagagaatgcctccttcatttattgagtagcccgaccttcaagagcaacattgaaacaaatttctacgaattatgtgagaaaacaataatgagccccgaaatggccatttctgagacaggtgatgaaaaaaaggaaatagaagacaaaatatctattttcgaaaaagtttggactaatcatttatctcaggcaaaggagcctgtgagtgagaagttcttagaatctggttacgatatcgttaaacagtccatgtctttgtccaatggtgatagcaaattgattatcgccgggtttactatcgcaaaatttttgaaaccagataacaagcatagagatatacaaggtatggcaattagctatgctgttaaaattttggaaaactactctgaaaattttgaatctgaaacaattccccttttcagaatatccatgtctacattgtacaagattataacgaccggacaaggcgatatttctaagcataaatctagaattttagatatattttccaaaattatgcttcgttatcattctaaaaaagtgtaccatgcgccagaagaacaggaaatgtttttggttcattctctccttacagaaaacaagttggagtatatttttgcagagtacttaaatattgagcatacagataagtgcgattctgccttggggttctgcttggaagaaagtcttaaacaaggtcctgatgcgtttaaccgcttactctggaacagtgctaaaagtttttccaccattagccaaccttgtgctgaaaaatttgtgagagtttttatcataatgtccaaaaggattgcaagagacaataaccttggtcatcacctttttgtgatagctttacttgaagcctacacctattgtgatatagaaaaatttggctacaagtcctacttgttgttattcaatgctatcaaggagttcttagtatccaaaccatggcttttcagccaatactgtattgaaatgttacttcctttctgtttaaaaactctcgcttttatagtaaaccatgagtctacggatgaaatcaatgaaggctttattaacatcatcgaagtgatagatcatatgcttttagttcacaggtttaaattttccaatcgtcaccatttgtttaactccgttctttgccagatattggaaataatagcaattcatgatggtacattgtgtgcaaattctgcagacgccgtagccagattaataacgaactactgcgagccttataatgtatccaacgctcaaaatgggcagaaaaataacttaagctctaagataagtttgataaagcagtccatcagaaaaaatgtacttgtggttttgacgaaatatatacagttgtctattacgacgcagttcagtttaaacataaaaaagagtttacagcccggtattcatgcgatttttgatatattatctcagaacgagttgaatcaattgaacgctttccttgacacacctgggaaacaatatttcaaagcactttacctccaatacaaaaaggttggtaaatggcgcgaagattga

SEQ ID NO: 6193 - DNA, 2235 bp, Saccharomyces cerevisiae
atgacaatcgatgattcaaatcgattacttatggacgtcgatcaatttgattttttggacgacggaacggcgcaacttagtaataacaagaccgatgaagaagaacaactatataaaagggacccagtcagcggggctatcctggtccctatgactgtaaatgatcaaccgattgaaaaaaatggcgacaagatgcctttaaagttcaagctggggccactttcttaccaaaatatggcattcataactgcaaaagataaatataagctttatcctgttagaattcctagattagataccagcaaagagttttctgcatacgtatcaggtttatttgaaatttaccgtgatttaggtgatgacagagtgtttaatgtaccaacgattggagttgttaattctaatttcgcgaaggagcataatgcaacagtaaatctggccatggaggcgattctgaatgaattggaagtgtttattggtagagtcaaggatcaggatggaagagtgaaccgattttatgagttggaagaatctttaaccgttttaaactgtctgaggacaatgtacttcatattagatggtcaggatgtagaggagaacagatcagagtttattgagtcattgctaaactggattaatagatcagacggtgaaccagatgaagaatatattgaacaagtgttttcagtgaaggattctacagcaggtaaaaaagtgttcgaaacacaatatttctggaagcttttgaatcagcttgttttaagaggcctgctctcccaagctataggttgcattgaaagatcagatcttttaccatatttgagtgatacatgtgccgtttcatttgatgcagtaagtgactccatcgaactcctgaaacaatatccaaaagattcgtccagtacatttagagaatggaaaaatttggtgctaaaattaagtcaagcctttggtagttctgctactgatatttccggtgaattacgggattacattgaagatttcttgttagtaattggtggaaatcaacgaaaaattctgcagtattcaaggacgtggtatgagtccttttgtgggtttttattatactatatcccctcattagaactatcagcagaatatttacaaatgtcactggaagctaacgtcgtagacataacaaatgattgggaacaaccatgcgtcgacatcattagtggtaagatacactcaattttaccggtaatggaatctttagatagttgcacagcagcatttaccgctatgatttgtgaagcaaaaggtttgatagagaatatttttgagggtgaaaaaaatagcgatgattatagtaatgaagacaacgaaatgcttgaagatctattctcttataggaatggtatggcatcttatatgctaaatagcttcgcttttgagttgtgttcactgggtgataaggaactatggcccgttgccattggattgatagccttatctgcaacagggacgagaagtgcaaagaaaatggtgattgcagaattacttccacactacccatttgttacgaatgatgacattgaatggatgctaagtatatgtgtagaatggagactaccagaaatagcgaaggaaatatacaccacgttgggtaatcaaatgttatcggcacacaacataattgaaagtatcgcaaattttagtagggcgggcaaatatgaactggtaaagtcatattcgtggctattatttgaagcttcgtgcatggagggccagaagttggacgaccctgtgttgaatgccattgtgagcaaaaactctcctgcagaggatgacgttataataccacaagacattttagattgtgtagtgacgaattctatgcgtcaaactttagcgccatatgctgttctgtcacaattctatgagctgagggacagagaagattggggccaagcgctgcgcctattgcttttgctgattgaattcccttatttaccaaaacattacttggttttgcttgtggcgaaattcctgtacccaattttccttttagatgataagaagctaatggatgaagattcagtggcgacagtcattgaagttatagaaactaaatgggatgacgctgatgaaaaaagttcaaacttatatgaaaccattattgaagcagataaaagcttacctagtagcatggcaacacttttgaaaaatttaagaaagaaactaaatttcaaattatgtcaagcgttcatgtaa

SEQ ID NO: 6194 - DNA, 2235 bp, Artificial Sequence
  Description of Artificial Sequence: Synthetic polynucleotide
atgacaatcgatgattctaatagattacttatggacgtcgatcaatttgattttttggacgacggaacggcgcaacttagtaataacaagaccgatgaagaagaacaattatataaaagggacccagtcagcggggctatcctcgtccctatgactgtaaatgatcaaccgattgaaaaaaatggcgacaagatgcctttaaagttcaagttagggccactttcttaccaaaatatggcattcataactgcaaaagataaatataagctttatcctgttagaattcctagattagataccagcaaagagttttctgcatacgtatctggtttatttgaaatttaccgtgatttaggtgatgacagagtgtttaatgtaccaacgattggagttgttaattctaatttcgcgaaggagcataatgcaacagtaaatttggccatggaggcgattttgaatgaattggaagtgtttattggtagagtcaaggatcaggatggaagagtgaacagattttatgagttggaagaatctttaaccgttttaaactgtttgaggacaatgtacttcatattagatggtcaggatgtagaggagaacagaagtgagtttattgagtctttgttgaactggattaatagaagtgacggtgaaccagatgaagaatatattgaacaagtgttttctgtgaaggattctacagcaggtaaaaaagtgttcgaaacacaatatttctggaagcttttgaatcagcttgttttaagaggcttgctctcccaagctataggttgcattgaaagaagtgatcttttaccatatttgagtgatacatgtgccgtttcttttgatgcagtaagtgactccatcgaactcttgaaacaatatccaaaagattcttccagtacatttagagaatggaaaaatttggtgttgaaattaagtcaagcctttggtagttctgctactgatatttccggtgaattaagagattacattgaagatttcttgttagtaattggtggaaatcaaagaaaaattttacagtattctaggacgtggtatgagtccttttgtgggtttttattatactatatcccctctttagaattaagtgcagaatatttacaaatgtctttggaagctaacgtcgtagacataacaaatgattgggaacaaccatgcgtcgacatcattagtggtaagatacactctattttaccggtaatggaatctttagatagttgcacagcagcatttaccgctatgatttgtgaagcaaaaggtttgatagagaatatttttgagggtgaaaaaaatagcgatgattatagtaatgaagacaacgaaatgcttgaagatcttttctcttataggaatggtatggcatcttatatgttgaatagcttcgcttttgagttgtgttctttgggtgataaggaattatggcccgttgccattggattgatagccttatctgcaacagggacgagaagtgcaaagaaaatggtgattgcagaattacttccacactacccatttgttacgaatgatgacattgaatggatgttaagtatatgtgtagaatggagattaccagaaatagcgaaggaaatatacaccacgttgggtaatcaaatgttaagtgcacacaacataattgaaagtatcgcaaattttagtagggcgggcaaatatgaattggtaaagagttattcttggttgttatttgaagcttcttgcatggagggccagaagttggacgaccctgtgttgaatgccattgtgagcaaaaactctcctgcagaggatgacgttataataccacaagacattttagattgtgtagtgacgaattctatgcgtcaaactttagcgccatatgctgttttatctcaattctatgagttgagggacagagaagattggggccaagcgttacgcttgttgcttttgttaattgaattcccttatttaccaaaacattacttggttttgcttgtggcgaaattcttgtacccaattttccttttagatgataagaagttgatggatgaagattctgtggcgacagtcattgaagttatagaaactaaatgggatgacgctgatgaaaaaagtagtaacttatatgaaaccattattgaagcagataaaagcttacctagtagcatggcaacacttttgaaaaatttaagaaagaaattgaatttcaaattatgtcaagcgttcatgtga

SEQ ID NO: 6195 - DNA, 1053 bp, Saccharomyces cerevisiae
atggatcaaaaggcgtcatattttatcaatgagaagctcttcactgaggtaaagcccgtcctttttacggatctaattcaccacttgaagatcggcccatccatggccaagaaattaatgtttgactattacaaacagaccaccaatgccaaatacaactgcgtagtgatatgctgctacaaagatcaaactattaaaattattcatgatctttccaacattccacagcaagattcaataattgattgtttcatctatgccttcaatcccatggacagcttcataccatattacgacattatcgatcaaaaggattgtttaaccattaaaaattcatacgaacttaaagtttctgaatcatcgaaaattatagagaggactaagacgttagaagagaaatctaaacctttggtaaggcctacagcaagatcaaagaccacgccagaagaaacaaccggaaggaaatccaaatctaaagacatgggtctcaggtctactgcactgctggctaagatgaaaaaggatagagatgacaaggaaacctctagacaaaatgagttacgtaaaaggaaagaggagaacttgcaaaaaataaataaacagaaccctgaaagagaagctcaaatgaaagagttaaataatctttttgtcgaagatgacttagatacagaggaagtaaatggagggtccaagcccaactcacctaaagaaactgacagcaacgataaggacaaaaacaacgatgatttagaagacttgttggaaacgacagcagaagattcacttatggatgtacctaaaatacagcaaacaaagccttctgaaacagaacattcaaaggaacctaaatctgaagaagagccctcctcttttattgatgaggatggatatattgtgacaaagagacccgcaacttcaacaccaccacgcaagccatcacccgtggtaaaaagggcattgtcgtcttcaaaaaagcaagaaacgccgtcatcgaataaaaggttaaaaaagcaaggaacattggaaagctttttcaaaagaaaggcaaaataa

SEQ ID NO: 6196 - DNA, 1053 bp, Artificial Sequence
  Description of Artificial Sequence: Synthetic polynucleotide
atggatcaaaaggcgtcttattttatcaatgagaagctcttcactgaggtaaagcccgtcctttttacggatttgattcaccacttgaagatcggcccatccatggccaagaaattaatgtttgactattacaaacagaccaccaatgccaaatacaactgcgtagtgatatgctgctacaaagatcaaactattaaaattattcatgatctttccaacattccacagcaagattctataattgattgtttcatctatgccttcaatcccatggacagcttcataccatattacgacattatcgatcaaaaggattgtttaaccattaaaaattcttacgaacttaaagtttctgaaagttctaaaattatagagaggactaagacgttagaagagaaatctaaacctttggtaaggcctacagcaagatccaagaccacgccagaagaaacaaccggaaggaaatccaaatctaaagacatgggtctcaggtctactgcattattagctaagatgaaaaaggatagagatgacaaggaaacctctagacaaaatgagttacgtaaaaggaaagaggagaacttgcaaaaaataaataaacagaaccctgaaagagaagctcaaatgaaagagttaaataatctttttgtcgaagatgacttagatacagaggaagtaaatggagggtccaagcccaactctcctaaagaaactgacagcaacgataaggacaaaaacaacgatgatttagaagacttgttggaaacgacagcagaagattctcttatggatgtacctaaaatacagcaaacaaagccttctgaaacagaacattctaaggaacctaaatctgaagaagagccctcctcttttattgatgaggatggatatattgtgacaaagagacccgcaacttctacaccaccacgcaagccatctcccgtggtaaaaagggcattgtcttcttctaaaaagcaagaaacgccgtcttccaataaaaggttaaaaaagcaaggaacattggaaagctttttcaaaagaaaggcaaaatga

SEQ ID NO: 6197 - DNA, 423 bp, Saccharomyces cerevisiae
atgatggaattcaaagtgtcaccattgacaaagattatttctctgtcaggattcctcgcattgggattccttttggtcatactaagctgcgcattattccataattactacccactattcgatattttgatctttttgcttgccccaataccaaacacaattttcaatgcaggaaataaatatcacacatctgacttcatgtccgattcatcaaacactggccaagatctggctcacttccttacaggaatgctggtgacaagcggtatagcactccctgttgttttctatcattgccaattgattggccatttgagttgtatcatgtgcatgatcggtggtcttatcatatattctagtattgttatttttaaatggtttttcaaaaaagatttcaacgaagatgattccctttttggttaa

SEQ ID NO: 6198 - DNA, 423 bp, Artificial Sequence
  Description of Artificial Sequence: Synthetic polynucleotide
atgatggaattcaaagtgtctccattgacaaagattatttctttatctggattcctcgcattgggattccttttggtcatattaagctgcgcattattccataattactacccattattcgatattttgatctttttgcttgccccaataccaaacacaattttcaatgcaggaaataaatatcacacatctgacttcatgtccgattcttccaacactggccaagatttggctcacttccttacaggaatgttggtgacaagcggtatagcactccctgttgttttctatcattgccaattgattggccatttgagttgtatcatgtgcatgatcggtggtcttatcatatattctagtattgttatttttaaatggtttttcaaaaaagatttcaacgaagatgattccctttttggttga

SEQ ID NO: 6199 - DNA, 1965 bp, Saccharomyces cerevisiae
atgcttgctgctaaaaacatactaaacaggtcaagcttgtctagctctttccgtattgccacacgtttgcagtcaaccaaggttcaaggttccgtcatcggtatcgatttgggtaccaccaactctgcggttgccattatggaaggtaaagttccaaaaattattgaaaacgccgaaggttccagaactactccttctgtagtagctttcactaaagagggagaacgtttggttggtattccagccaagcgtcaagccgtagtgaacccagaaaacaccctatttgctaccaagcgtttgattggtcgtcgtttcgaagacgctgaagtgcaaagagatatcaagcaagttccatacaagatcgtcaagcactccaacggggatgcttgggttgaggccagaggtcaaacttactcaccagcccaaatcggtgggttcgtcttgaacaagatgaaggaaacagctgaggcctacttgggtaagccagttaagaatgctgttgtcactgtcccagcttatttcaacgactctcaaagacaagctactaaagacgcaggccaaattgttggtttgaacgttttacgtgtcgtcaatgaaccaaccgccgctgccttagcttacggtttggaaaaatccgactctaaagttgttgccgttttcgatttgggtggtggtactttcgatatctccatcttagatattgacaacggtgtttttgaagttaagtccactaacggtgacactcatttgggtggtgaagatttcgacatctatttgttgagagagattgtttctcgtttcaagaccgaaactggtattgatttggaaaatgaccgtatggctatccaaagaattagagaagctgctgaaaaggctaagattgagctatcttctaccgtttccactgaaatcaacctgccatttatcactgctgatgcctcaggtccaaagcatatcaacatgaagttctccagggctcaattcgagactttgacagccccactagttaagagaactgtcgacccagtcaagaaggctttgaaagacgccggtttgtctacttcagacatatctgaagtcttattggtcggtggtatgtccagaatgcctaaggttgtcgaaaccgttaaatctttgtttggtaaggacccatctaaggccgtcaacccagatgaagctgttgccattggtgctgctgtgcaaggtgctgtcttgtccggtgaggttactgacgtcttattattagatgttaccccattgtctctaggtatcgaaactttaggtggtgttttcacaagattgattccaagaaacactactattccaacaaagaaatctcaaatcttctccactgccgctgctggtcaaacttctgttgaaatcagagttttccaaggtgaaagagaattggttagagacaacaaattgattggtaacttcactttagccggtatcccacctgctccaaagggtgtcccacaaatcgaagtcacttttgacatcgatgccgatggtattattaacgtttctgctagagacaaagctacaaacaaagattcttctattactgttgccggttcttctggtttgtccgaaaacgaaattgaacaaatggttaacgacgctgaaaaattcaagtctcaagatgaagctagaaaacaagccatcgaaactgccaacaaggctgaccaattggccaacgatactgaaaactccttgaaagaatttgaaggtaaggttgacaaggctgaagcccaaaaggttagggatcaaatcacttccttgaaggagttggttgctagagtacaaggtggcgaagaggttaacgctgaggagttaaagaccaagaccgaagaattgcaaacttcctcgatgaaattgtttgaacaattatacaagaacgactctaacaacaacaacaacaacaacggcaacaatgccgaatctggtgaaactaagcagtaa

SEQ ID NO: 6200 - DNA, 1965 bp, Artificial Sequence
  Description of Artificial Sequence: Synthetic polynucleotide
atgcttgctgctaaaaacatattaaacaggagcagcttgtctagctctttccgtattgccacacgtttgcagtctaccaaggttcaaggttccgtcatcggtatcgatttgggtaccaccaactctgcggttgccattatggaaggtaaagttccaaaaattattgaaaacgccgaaggttccagaactactccttctgtagtagctttcactaaagagggagaacgtttggttggtattccagccaagcgtcaagccgtagtgaacccagaaaacaccttatttgctaccaagcgtttgattggtcgtcgtttcgaagacgctgaagtgcaaagagatatcaagcaagttccatacaagatcgtcaagcactccaacggggatgcttgggttgaggccagaggtcaaacttactctccagcccaaatcggtgggttcgtcttgaacaagatgaaggaaacagctgaggcctacttgggtaagccagttaagaatgctgttgtcactgtcccagcttatttcaacgactctcaaagacaagctactaaagacgcaggccaaattgttggtttgaacgttttacgtgtcgtcaatgaaccaaccgccgctgccttagcttacggtttggaaaaatccgactctaaagttgttgccgttttcgatttgggtggtggtactttcgatatctccatcttagatattgacaacggtgtttttgaagttaagtccactaacggtgacactcatttgggtggtgaagatttcgacatctatttgttgagagagattgtttctcgtttcaagaccgaaactggtattgatttggaaaatgaccgtatggctatccaaagaattagagaagctgctgaaaaggctaagattgagctttcttctaccgtttccactgaaatcaacttaccatttatcactgctgatgcctctggtccaaagcatatcaacatgaagttctccagggctcaattcgagactttgacagccccattagttaagagaactgtcgacccagtcaagaaggctttgaaagacgccggtttgtctacttctgacatatctgaagtcttattggtcggtggtatgtccagaatgcctaaggttgtcgaaaccgttaaatctttgtttggtaaggacccatctaaggccgtcaacccagatgaagctgttgccattggtgctgctgtgcaaggtgctgtcttgtccggtgaggttactgacgtcttattattagatgttaccccattgtctttgggtatcgaaactttaggtggtgttttcacaagattgattccaagaaacactactattccaacaaagaaatctcaaatcttctccactgccgctgctggtcaaacttctgttgaaatcagagttttccaaggtgaaagagaattggttagagacaacaaattgattggtaacttcactttagccggtatcccacctgctccaaagggtgtcccacaaatcgaagtcacttttgacatcgatgccgatggtattattaacgtttctgctagagacaaagctacaaacaaagattcttctattactgttgccggttcttctggtttgtccgaaaacgaaattgaacaaatggttaacgacgctgaaaaattcaagtctcaagatgaagctagaaaacaagccatcgaaactgccaacaaggctgaccaattggccaacgatactgaaaactccttgaaagaatttgaaggtaaggttgacaaggctgaagcccaaaaggttagggatcaaatcacttccttgaaggagttggttgctagagtacaaggtggcgaagaggttaacgctgaggagttaaagaccaagaccgaagaattgcaaacttcctctatgaaattgtttgaacaattatacaagaacgactctaacaacaacaacaacaacaacggcaacaatgccgaatctggtgaaactaagcagtga

SEQ ID NO: 6201 - DNA, 1815 bp, Saccharomyces cerevisiae
atgagtggcacagctaatagtaggaggaaggaggttttgcgcgtgcctgtgatagatttgaatagagtttcagatgaagagcagctgttgccggtggtgagggcaattttgctacagcatgacacctttctgttaaaaaattatgctaacaaggctgttctagatgcactactagcggggctcacgacaaaggacctgcctgacacgagtcaaggttttgatgcgaactttacgggtacattaccgctagaagatgatgtttggctggagcagtacatatttgacactgatcctcaattacgcttcgatcggaagtgcaggaatgagtcactgtgctccatatatagtaggctgttcaaactgggtctgtttttcgcccaactgtgtgtgaaaagtgtggtttctagcgcagaattgcaagactgtatcagcacctctcattatgcgactaagctgacccgttatttcaatgataatggtagtacacacgatggtgcagatgcaggtgctaccgtgctgcccactggcgacgatttccagtacctgtttgaaagggactatgttacttttcttccgacgggcgtgttgaccatcttcccctgtgccaaggctataaggtacaagccatcgactatggcgacgacggacaattcttgggtgagtattgatgaacccgattgtcttctgttccacacggggaccctccttgcgcgctggtctcaaggtatgcacactacctcaccactccagatagatcctcgtgcgaacattgtttcgttgaccatctggcctccacttactacgccaatctcgagtaaaggagagggtacgattgccaatcatttgttggagcaacaaattaaggctttcccaaaagtcgctcagcaatactacccacgggagcttagtattctaagactccaagacgcaatgaagtttgttaaggagttgtttactgtttgcgagactgtattgtctttaaacgctctttccagatccacgggcgtcccaccagagctgcacgttttgttaccccagatatccagcatgatgaaaaggaaaatagtgcaggatgatattttgaagttattgaccatttggtctgatgcatacgtagtggaactgaactctagaggggagctgaccatgaatctacccaaaagagacaatctaacaacgttgaccaataagtctaggactttggcattcgtggaaagggcagagtcgtggtaccaacaagtgatagcttccaaggatgagattatgactgatgtacccgctttcaaaataaataaaagaaggtccagctctaattctaaaacagtcttgagcagtaaagtgcaaacgaagagctctaatgctaatgccttgaataactcaagatatttggcgaatagtaaggaaaatttcatgtacaaagagaagatgcctgattcgcaagcaaaccttatggacagactgcgtgaaagagagagacgttcggccgcattgctttctcaaaggcaaaaacgttaccagcagtttctagcgatgaaaatgactcaggtatttgatattcttttttcgctgaccaggggccagccttatacagagacatatctaagctcgctaatcgtagatagtttacaagatagtaataatcctatcggtacaaaagaagcaagtgaaattttagctgggctacaaggtatcctaccaatggacatatctgttcatcaagtggatggtgggttaaaagtttatagatggaacagtttggataaaaacagattttctaagctgttgcaaatccacaaatcaaaacaacaagattga

SEQ ID NO: 6202 - DNA, 1815 bp, Artificial Sequence
  Description of Artificial Sequence: Synthetic polynucleotide
atgagtggcacagctaatagtaggaggaaggaggttttgcgcgtgcctgtgatagatttgaatagagtttctgatgaagagcagttattgccggtggtgagggcaattttgttacagcatgacacctttttattaaaaaattatgctaacaaggctgttttggatgcattattggcggggctcacgacaaaggacttgcctgacacgagtcaaggttttgatgcgaactttacgggtacattaccgttggaagatgatgtttggttggagcagtacatatttgacactgatcctcaattacgcttcgatagaaagtgcaggaatgagtctttatgctccatatatagtaggttgttcaaattgggtttatttttcgcccaattatgtgtgaaaagtgtggtttctagcgcagaattgcaagactgtatcagcacctctcattatgcgactaagttgacccgttatttcaatgataatggtagtacacacgatggtgcagatgcaggtgctaccgtgttacccactggcgacgatttccagtacttgtttgaaagggactatgttacttttcttccgacgggcgtgttgaccatcttcccctgtgccaaggctataaggtacaagccatctactatggcgacgacggacaattcttgggtgagtattgatgaacccgattgtcttttattccacacggggaccctccttgcgcgctggtctcaaggtatgcacactacctctccactccagatagatcctcgtgcgaacattgtttctttgaccatctggcctccacttactacgccaatctccagtaaaggagagggtacgattgccaatcatttgttggagcaacaaattaaggctttcccaaaagtcgctcagcaatactacccaagagagcttagtattttaagactccaagacgcaatgaagtttgttaaggagttgtttactgtttgcgagactgtattgtctttaaacgctctttccagatccacgggcgtcccaccagagttgcacgttttgttaccccagatatccagcatgatgaaaaggaaaatagtgcaggatgatattttgaagttattgaccatttggtctgatgcatacgtagtggaattgaactctagaggggagttgaccatgaatttgcccaaaagagacaatttgacaacgttgaccaataagtctaggactttggcattcgtggaaagggcagagagttggtaccaacaagtgatagcttccaaggatgagattatgactgatgtacccgctttcaaaataaataaaagaaggtccagctctaattctaaaacagtcttgagcagtaaagtgcaaacgaagagctctaatgctaatgccttgaataactctagatatttggcgaatagtaaggaaaatttcatgtacaaagagaagatgcctgattctcaagcaaaccttatggacagattacgtgaaagagagagacgttctgccgcattgctttctcaaaggcaaaaacgttaccagcagtttttggcgatgaaaatgactcaggtatttgatattcttttttctttaaccaggggccagccttatacagagacatatttgagctctttgatcgtagatagtttacaagatagtaataatcctatcggtacaaaagaagcaagtgaaattttagctgggttgcaaggtatcttgccaatggacatatctgttcatcaagtggatggtgggttaaaagtttatagatggaacagtttggataaaaacagattttctaagttgttgcaaatccacaaatctaaacaacaagattga

SEQ ID NO: 6203 - DNA, 474 bp, Saccharomyces cerevisiae
atgtctgacgaagaacacacctttgaaaatgctgacgctggtgcctccgccacctacccaatgcaatgttctgccttgagaaagaatggtttcgttgtcatcaaaggtagaccatgtaagattgtcgacatgtccacttccaagaccggtaagcacggtcacgccaaggtccatttggttacccttgatatcttcactggtaagaagttggaagatttgtctccatccactcacaacttggaagttccatttgtcaagagaagcgaataccaattgttggatattgatgatggctacttgtccttgatgaccatggacggtgaaaccaaagacgatgtcaaggcaccagaaggtgaattgggtgacagcatgcaagctgctttcgatgaaggtaaggatttgatggtcactatcatttctgccatgggtgaagaagctgccatctccttcaaggaagctccaagatctgattag

SEQ ID NO: 6204 - DNA, 474 bp, Artificial Sequence
  Description of Artificial Sequence: Synthetic polynucleotide
atgtctgacgaagaacacacctttgaaaatgctgacgctggtgcctccgccacctacccaatgcaatgttctgccttgagaaagaatggtttcgttgtcatcaaaggtagaccatgtaagattgtcgacatgtccacttccaagaccggtaagcacggtcacgccaaggtccatttggttacccttgatatcttcactggtaagaagttggaagatttgtctccatccactcacaacttggaagttccatttgtcaagagaagcgaataccaattgttggatattgatgatggctacttgtccttgatgaccatggacggtgaaaccaaagacgatgtcaaggcaccagaaggtgaattgggtgacagcatgcaagctgctttcgatgaaggtaaggatttgatggtcactatcatttctgccatgggtgaagaagctgccatctccttcaaggaagctccaagatctgattga

SEQ ID NO: 6205 - DNA, 330 bp, Saccharomyces cerevisiae
atgactgaattcaaggccggttctgctaagaaaggtgctacacttttcaagactagatgtctacaatgccacaccgtggaaaagggtggcccacataaggttggtccaaacttgcatggtatctttggcagacactctggtcaagctgaagggtattcgtacacagatgccaatatcaagaaaaacgtgttgtgggacgaaaataacatgtcagagtacttgactaacccaaagaaatatattcctggtaccaagatggcctttggtgggttgaagaaggaaaaagacagaaacgacttaattacctacttgaaaaaagcctgtgagtaa

SEQ ID NO: 6206 - DNA, 330 bp, Artificial Sequence
  Description of Artificial Sequence: Synthetic polynucleotide
atgactgaattcaaggccggttctgctaagaaaggtgctacacttttcaagactagatgtttgcaatgccacaccgtggaaaagggtggcccacataaggttggtccaaacttgcatggtatctttggcagacactctggtcaagctgaagggtattcttacacagatgccaatatcaagaaaaacgtgttgtgggacgaaaataacatgtctgagtacttgactaacccaaagaaatatattcctggtaccaagatggcctttggtgggttgaagaaggaaaaagacagaaacgacttaattacctacttgaaaaaagcctgtgagtga

SEQ ID NO: 6207 - DNA, 1593 bp, Saccharomyces cerevisiae
atgaaggagaatgacatgaataatggcgtagataaatgggtaaatgaggaagatggtcgaaatgatcatcataacaacaataataacttgatgaagaaggccatgatgaacaatgagcaaattgatagaactcaggatatcgacaacgccaaagaaatgttgaggaaaatatcaagtgaaagcagctcgcgcagaagctccctgttgaataaagattcatctctcgtgaacggcaatgcaaacagtggcggtggtacgagcattaacggaacaagaggaagttctaagagtagtaatacacactttcagtatgcctccacggcgtatggtgtaagaatgttgagtaaagatatatctaataccaaagtggaactggatgtggaaaatttgatgattgttacgaaactcaacgatgtctcactgtatttcttaacaagagagttggtagaatgggttttggtacattttccacgtgtgactgtttatgtggattccgaattgaaaaacagcaaaaaatttgccgctggcgagttatgtgaagatagtaaatgtagagaatcaaggatcaagtattggacaaaggatttcatcagggaacatgatgttttcttcgatttggtagtgactttgggtggcgacggtactgttctttttgtaagttccatttttcagagacatgtaccacccgttatgtcgttttcattagggtctctaggatttttaacaaattttaagtttgaacatttcagggaggatttacctcggattatgaatcataaaatcaagacaaatttacggttgaggttggagtgcacaatttatcgtagacaccgccctgaagtagacccaaacacggggaagaaaatatgtgtggtggaaaaactaagcacacaccacattttgaacgaagtgaccatcgatcgtggtccaagtccttttctatccatgttagaattgtatggtgacggctcattaatgaccgttgcgcaggcggacggactgattgctgctactccgactgggtccacggcctattctttgagtgcaggtgggtcattggtatgcccaaccgtcaatgcaatcgctttaacacccatttgtccacatgcattgagtttcagacccatcatcttaccagaaagtataaatttaaaagtgaaagtctcgatgaagtcaagggctccagcatgggcggcttttgatgggaaagatagaattgaattgcaaaaaggtgattttataaccatatgcgccagcccatatgcttttccaaccgtggaagcctcgcccgatgagtttattaacagtatcagtcgacaactaaactggaatgtgagggaacaacaaaagtcctttacgcatattttgtcccaaaagaaccaagaaaaatatgcacatgaggcgaacaaagtcagaaatcaagcagaacctttagaggtaataagagataaatactctctggaagcagacgctactaaggaaaacaacaacggaagcgatgatgagagcgacgatgagagtgtaaactgcgaagcttgcaaattaaagccttcgagcgtcccaaaaccttctcaagcaaggttttcagtataa

SEQ ID NO: 6208 - DNA, 1593 bp, Artificial Sequence
  Description of Artificial Sequence: Synthetic polynucleotide
atgaaggagaatgacatgaataatggcgtagataaatgggtaaatgaggaagatggtagaaatgatcatcataacaacaataataacttgatgaagaaggccatgatgaacaatgagcaaattgatagaactcaggatatcgacaacgccaaagaaatgttgaggaaaatatctagtgaaagcagcagccgcagaagctccttattgaataaagattcttctctcgtgaacggcaatgcaaacagtggcggtggtacgagcattaacggaacaagaggaagttctaagagtagtaatacacactttcagtatgcctccacggcgtatggtgtaagaatgttgagtaaagatatatctaataccaaagtggaattagatgtggaaaatttgatgattgttacgaaactcaacgatgtctctttgtatttcttaacaagagagttggtagaatgggttttggtacattttccacgtgtgactgtttatgtggattccgaattgaaaaacagcaaaaaatttgccgctggcgagttatgtgaagatagtaaatgtagagaaagtaggatcaagtattggacaaaggatttcatcagggaacatgatgttttcttcgatttggtagtgactttgggtggcgacggtactgttctttttgtaagttccatttttcagagacatgtaccacccgttatgagtttttctttagggtctttgggatttttaacaaattttaagtttgaacatttcagggaggatttacctagaattatgaatcataaaatcaagacaaatttaagattgaggttggagtgcacaatttatcgtagacaccgccctgaagtagacccaaacacggggaagaaaatatgtgtggtggaaaaattaagcacacaccacattttgaacgaagtgaccatcgatcgtggtccaagtccttttctttccatgttagaattgtatggtgacggctctttaatgaccgttgcgcaggcggacggattgattgctgctactccgactgggtccacggcctattctttgagtgcaggtgggtctttggtatgcccaaccgtcaatgcaatcgctttaacacccatttgtccacatgcattgagtttcagacccatcatcttaccagaaagtataaatttaaaagtgaaagtctccatgaagtccagggctccagcatgggcggcttttgatgggaaagatagaattgaattgcaaaaaggtgattttataaccatatgcgccagcccatatgcttttccaaccgtggaagcctctcccgatgagtttattaacagtatcagtagacaattgaactggaatgtgagggaacaacaaaagtcctttacgcatattttgtcccaaaagaaccaagaaaaatatgcacatgaggcgaacaaagtcagaaatcaagcagaacctttagaggtaataagagataaatactctttggaagcagacgctactaaggaaaacaacaacggaagcgatgatgagagcgacgatgagagtgtaaactgcgaagcttgcaaattaaagccttccagcgtcccaaaaccttctcaagcaaggtttagcgtatga

SEQ ID NO: 6209 - DNA, 708 bp, Saccharomyces cerevisiae
atgagtagaaatgtagataaggccaactcagttctggtacgatttcaagagcagcaagcagagtcggcaggtggatacaaggattattcacgttaccagaggcccaggaacgtgtctaaggtaaaatccataaaagaggccaacgaatggaagcgacaagtaagtaaagagataaaacaaaaaagcacaagaatatatgatccgtctttaaatgaaatgcagattgcggaacttaacgacgaacttaataatcttttcaaagaatggaagagatggcagtggcacattgaccatacacttatggaaaaaaaaaccaagaggaaaaggttagaagacagtcatgtgctgatgaattcaggaaagctgataaatggtaagagatattttggaagagccctggaattgcctgaagtaaaagaatggctcaagcagtctcaaaggcagaatgatgggggttctataaacaccaaatgcataccgaaggatagaaatgatttttattaccatggcaaagtcacagccgccttaaccgaatttgaggctaactggacatccattttgaaagcacattataatgtgcctgtgaatgaagatgaagaagaaatgtcaaggcagacacaagaaatccatgtaccaactctggcagatatggagcattggttagtgcaaagaagaaaaaagaaactaatggatgaacttaacctttag

SEQ ID NO: 6210 - DNA, 708 bp, Artificial Sequence
  Description of Artificial Sequence: Synthetic polynucleotide
atgagtagaaatgtagataaggccaactctgttttggtaagatttcaagagcagcaagcagagtctgcaggtggatacaaggattattctcgttaccagaggcccaggaacgtgtctaaggtaaaatccataaaagaggccaacgaatggaagagacaagtaagtaaagagataaaacaaaaaagcacaagaatatatgatccgtctttaaatgaaatgcagattgcggaacttaacgacgaacttaataatcttttcaaagaatggaagagatggcagtggcacattgaccatacacttatggaaaaaaaaaccaagaggaaaaggttagaagacagtcatgtgttgatgaattctggaaagttaataaatggtaagagatattttggaagagccttggaattgcctgaagtaaaagaatggctcaagcagtctcaaaggcagaatgatgggggttctataaacaccaaatgcataccgaaggatagaaatgatttttattaccatggcaaagtcacagccgccttaaccgaatttgaggctaactggacatccattttgaaagcacattataatgtgcctgtgaatgaagatgaagaagaaatgtctaggcagacacaagaaatccatgtaccaactttggcagatatggagcattggttagtgcaaagaagaaaaaagaaattaatggatgaacttaacctttga

SEQ ID NO: 6211 - DNA, 1506 bp, Saccharomyces cerevisiae
atgattagatctgtgagaagggttttcatttacgtctcaatattcgtattgataatagttttgaaaagaacattaagtggcacagatcaaacgtcaatgaaacaaccagtggtggtcattggctctggtttggcaggcttaaccacaagtaatcgtctcattagtaaatacagaattcctgttgtgcttttggataaggcggcttctattggtgggaattctataaaggcttctagtggtattaatggtgctcacacagacactcaacaaaatttaaaggtaatggacactcccgaattgtttttgaaagatactttgcattcggctaaaggcagaggggttccatcactgatggataagttgactaaggaatccaagagtgctatcaggtggttgcaaacagaattcgatttgaaattagacctccttgcgcaattgggcggtcactctgttccaaggacccatagatcttctggcaaattaccaccaggttttgaaatcgtgcaagcgttatcaaaaaaactaaaggatatctcttccaaagattccaatctcgtgcagattatgctaaacagtgaagtagtggatatcgagcttgataatcaaggtcatgttactggtgtagtatatatggacgagaacggaaaccgtaaaatcatgaagtcacaccatgtcgtgttttgctcaggtggatttggttactctaaggaaatgttgaaagagtactcaccaaatttgattcacttgccaactactaatggcaaacagactacaggtgatggtcaaaaaatcctttcaaagttgggtgccgaattgattgatatggatcaagtgcaggtacaccctaccggcttcattgatccaaatgaccgtgaaaataactggaagtttttggctgcagaggcattgaggggtttaggcggcatcttattgcatcccaccactggaagaaggtttacaaatgaattgagcaccagagatacagtaaccatggaaatacagtctaaatgtccgaaaaatgataatagagcacttttggtaatgagcgacaaagtctacgagaactatacgaataacataaacttttatatgtccaaaaacttaatcaaaaaagtgtcaatcaacgatctgatccgacaatatgacctacaaactacagcttctgaactggtaactgaactgaagagctattccgatgttaatactaaggatacgtttgataggccattgattatcaatgcctttgataaagatatttcgactgaatcaactgtttatgttggggaagttacaccagttgttcatttcacaatgggtggtgtgaaaattaatgagaaatctcaggtaattaagaaaaattcggaaagcgttctatctaatgggatatttgctgctggtgaagtttcgggtggtgttcatggagccaacagattgggtggatctagtttgttagagtgtgttgtctttggaaagacagctgcggataacatagcaaaattgtactga

SEQ ID NO: 6212 - DNA, 1506 bp, Artificial Sequence
  Description of Artificial Sequence: Synthetic polynucleotide
atgattagatctgtgagaagggttttcatttacgtcagtatattcgtattgataatagttttgaaaagaacattaagtggcacagatcaaacgtctatgaaacaaccagtggtggtcattggctctggtttggcaggcttaaccacaagtaatcgtctcattagtaaatacagaattcctgttgtgcttttggataaggcggcttctattggtgggaattctataaaggcttctagtggtattaatggtgctcacacagacactcaacaaaatttaaaggtaatggacactcccgaattgtttttgaaagatactttgcattctgctaaaggcagaggggttccatctttgatggataagttgactaaggaatccaagagtgctatcaggtggttgcaaacagaattcgatttgaaattagacctccttgcgcaattgggcggtcactctgttccaaggacccatagatcttctggcaaattaccaccaggttttgaaatcgtgcaagcgttatccaaaaaattgaaggatatctcttccaaagattccaatctcgtgcagattatgttgaacagtgaagtagtggatatcgagcttgataatcaaggtcatgttactggtgtagtatatatggacgagaacggaaaccgtaaaatcatgaagtctcaccatgtcgtgttttgctctggtggatttggttactctaaggaaatgttgaaagagtactctccaaatttgattcacttgccaactactaatggcaaacagactacaggtgatggtcaaaaaatcctttccaagttgggtgccgaattgattgatatggatcaagtgcaggtacaccctaccggcttcattgatccaaatgaccgtgaaaataactggaagtttttggctgcagaggcattgaggggtttaggcggcatcttattgcatcccaccactggaagaaggtttacaaatgaattgagcaccagagatacagtaaccatggaaatacagtctaaatgtccgaaaaatgataatagagcacttttggtaatgagcgacaaagtctacgagaactatacgaataacataaacttttatatgtccaaaaacttaatcaaaaaagtgtccatcaacgatttgatcagacaatatgacttgcaaactacagcttctgaattggtaactgaattgaagagctattccgatgttaatactaaggatacgtttgataggccattgattatcaatgcctttgataaagatatttctactgaatctactgtttatgttggggaagttacaccagttgttcatttcacaatgggtggtgtgaaaattaatgagaaatctcaggtaattaagaaaaattctgaaagcgttttatctaatgggatatttgctgctggtgaagtttctggtggtgttcatggagccaacagattgggtggatctagtttgttagagtgtgttgtctttggaaagacagctgcggataacatagcaaaattgtactga

SEQ ID NO: 6213 - DNA, 1698 bp, Saccharomyces cerevisiae
atgtatcgcagtagaaaccgaccaaaaagaggtggagaaaatgaagttaagggaccaaattctgccttgactcaatttttaagagaagaagggatcagtgctgaaaatatcaaacaaaaatggtaccagcgacagtcgaagaagcaagaagatgcaacagacgaaaaaaaaggtaaagcggaggatgatagctttactgccgagatatctcgagtagttgaagatgaagaaattgatgaaattggaacaggtagtggtaccgagacagaaagagctcaggtttcctacgatgccaggatgaaattagtccctgctgatagtgatgaagaagaatatgaaactagccacatttctgacacgccagtcagtttaagttcggctaatgaccgggaatcattgactaaaaaaaggcaaaatactgcaaaaattatccaaaatcgtcgcagaaagcgtaaaagagcagctgacctattggatagacgcgtcaacaaagtatccagcttacaaagtctttgtattacgaaaattagtgaaaatatatccaagtggcaaaaagaggctgatgaatcatcaaagttggtatttaacaaattgagagatgtccttggtggcgtatcaaccgctaatttgaataatttggcaaaagcactatcgaagaatagggccctgaatgatcatactctgcaacttttcttgaagacagatctaaaaaggttaactttcagcgattgttctaaaatttcatttgatggttacaaaacgctagccattttttcgccacacctaaccgaattatccctacaaatgtgtgggcagttgaaccatgaatcattgctttacattgctgaaaagcttccgaacttgaaatcactgaatttagatggaccatttctgatcaacgaggacacatgggagaagttctttgtaataatgaaaggtagattagaagagttccacatttctaatacgcaccgcttcaccgacaaatcattatctaatttattgatcaactgcggttctaccttggtatccttagggttatccagactagattctatatcaaattacgctttattaccgcagtacctagtcaacgacgaatttcacagtctctgtattgaatatccattcaatgaagaggatgttaacgatgagatcatcataaatctgctaggtcaaatcgggcgcacgttacgtaaattggttttgaatggctgtattgacttgacagattcaatgataatcaatggtctgactgcattcattcctgagaaatgtccattggaggtattgagcttggaagaatcagatcagatcactacagattcactgtcgtactttttcagcaaagtagaactgaataatttgattgaatgcagctttagaagatgtctacaattgggcgatatggcaattatagagctattgcttaacggagcaagagatagtctgagaagcttaaatctcaattcattaaaagagctaactaaggaggcatttgtggcgttagcctgtcctaatctgacgtatcttgatcttggttttgtacgttgtgttgatgactcggtgattcaaatgttgggtgagcaaaatccgaatttaactgtaattgatgttttcggagacaatttggttactgaaaaggccacaatgaggcctggacttacgttgatagggagacagagtgacagtatataa

SEQ ID NO: 6214 - DNA, 1698 bp, Artificial Sequence
  Description of Artificial Sequence: Synthetic polynucleotide
atgtatcgcagtagaaacagaccaaaaagaggtggagaaaatgaagttaagggaccaaattctgccttgactcaatttttaagagaagaagggatcagtgctgaaaatatcaaacaaaaatggtaccagagacagtccaagaagcaagaagatgcaacagacgaaaaaaaaggtaaagcggaggatgatagctttactgccgagatatctagagtagttgaagatgaagaaattgatgaaattggaacaggtagtggtaccgagacagaaagagctcaggtttcctacgatgccaggatgaaattagtccctgctgatagtgatgaagaagaatatgaaactagccacatttctgacacgccagtcagtttaagttctgctaatgacagagaatctttgactaaaaaaaggcaaaatactgcaaaaattatccaaaatcgtcgcagaaagcgtaaaagagcagctgacttgttggatagacgcgtcaacaaagtatccagcttacaaagtctttgtattacgaaaattagtgaaaatatatccaagtggcaaaaagaggctgatgaatcttccaagttggtatttaacaaattgagagatgtccttggtggcgtatctaccgctaatttgaataatttggcaaaagcattatccaagaatagggccttgaatgatcatactttacaacttttcttgaagacagatttgaaaaggttaactttcagcgattgttctaaaatttcctttgatggttacaaaacgttggccattttttctccacacttgaccgaattatccttacaaatgtgtgggcagttgaaccatgaatctttgctttacattgctgaaaagcttccgaacttgaaatctttgaatttagatggaccatttttgatcaacgaggacacatgggagaagttctttgtaataatgaaaggtagattagaagagttccacatttctaatacgcaccgcttcaccgacaaatctttatctaatttattgatcaactgcggttctaccttggtatccttagggttatccagattagattctatatccaattacgctttattaccgcagtacttagtcaacgacgaatttcacagtctctgtattgaatatccattcaatgaagaggatgttaacgatgagatcatcataaatttattgggtcaaatcgggcgcacgttacgtaaattggttttgaatggctgtattgacttgacagattctatgataatcaatggtttgactgcattcattcctgagaaatgtccattggaggtattgagcttggaagaaagtgatcagatcactacagattctttatcttactttttcagcaaagtagaattgaataatttgattgaatgcagctttagaagatgtttgcaattgggcgatatggcaattatagagttattgcttaacggagcaagagatagtttgagaagcttaaatctcaattctttaaaagagttaactaaggaggcatttgtggcgttagcctgtcctaatttaacgtatcttgatcttggttttgtacgttgtgttgatgactctgtgattcaaatgttgggtgagcaaaatccgaatttaactgtaattgatgttttcggagacaatttggttactgaaaaggccacaatgaggcctggacttacgttgatagggagacagagtgacagtatatga

SEQ ID NO: 6215 - DNA, 1725 bp, Saccharomyces cerevisiae
atgtcaattaggcctctcacgttaaacggtttagatgagccagaaacctcttttgaagaactgaatacaactctacctcgctttcaatcccatgaaacattaactttggaagaaaacgtgccaccattgagtacatcaacttatataccgcctccatcctcggtaggtacttctgacactggcacggtattttccaatagtaccagcgcgttttggtctaataagcaagcagacgatgatcaggacatggaggtagaccaggatgatgaatttctaaatgacttccaggaattccaaaataaaaaggatgattttgacgatgctattaaaacaaattttcatttgagaaatggatgtcgaactggccctttcaaaaacgacattttcgcagaagagtttgatagaaaactgagtttggaagataaaccaaggctaaagcaacctagatcaatgatggaattgaaaccaaaaagaaaactatcaaatagcgtcacttcaagaaacttaaggtctggtaattctgtaagatttaagaaatctatgcctaacttagctttagttaatccagctatcagagaagaagaagaggacgaagaacgagaaagagaagatcaacgagagtttaattacaagattgataacgatacgcaggacacaattttggcgaaattcagttcagatgatgaaggtgactttctgacaggatttgaagaattagagggtgaagcaattgatgaaacgatttcttcgaacgataaagaaagtgccgaccatccgcgtttcttaaagaagtcatcctcatctttgccattaaaaatatcacctgcacaatatgatatagtaaagcatgacgaattattaactccaggtcttcataggcgacaacgagattggaatacccagcaggaactggactcttttaaagaaaaacgatcagtaagacactgttctaatcaaaatgtacaactcaatggtccagctaaaatcaaaacaataaaacagcaaattgatcataatactccaatgaagaaaggttctatgatatataacccgaaaactatgaagtgggaaggaaatgaaaacgtcttaagcaaatttagtgatgtagacacggcaaacaggaaagctttattgataaaaaacaagctacaacgagatgcagattctaagaagcaaaaatattctgatctacagcatgcaagagccacttcgagaaatcaaaaggtcatcgggaacatgattttagatgaacaaaatttaagatgggttagtgtttcagaggaagaagcagacccttttgcaggcattcctgagataaacttaccaccagttggcaaaagtatgaaaaaacgtagctcctcaccatttttgcgttccaaaagccaagttaatacgccatttgtttcaaatgacaatgatggcgtttatcaaagtacggctgctcaagcaagactccgtaaataccattcaatgaggacacttaacggtacaacagaaactccagaaataagctctactttccatttgagttcaagagcattggaaaaattttaccacgaggagaacaggtggtgtaaaaagttagcctcatggtttataccccgagatgagaccattatcagtgttgatgaggaaacaatcatggatgaaagtacggtcaatagcaagagaaaatcctatatgtatgaaatcaggaacatggtaatcaattcgacaaaagattag

SEQ ID NO: 6216 - DNA, 1725 bp, Artificial Sequence
  Description of Artificial Sequence: Synthetic polynucleotide
atgtctattaggcctctcacgttaaacggtttagatgagccagaaacctcttttgaagaattgaatacaactttacctcgctttcaatcccatgaaacattaactttggaagaaaacgtgccaccattgagtacatctacttatataccgcctccatcctctgtaggtacttctgacactggcacggtattttccaatagtaccagcgcgttttggtctaataagcaagcagacgatgatcaggacatggaggtagaccaggatgatgaatttttgaatgacttccaggaattccaaaataaaaaggatgattttgacgatgctattaaaacaaattttcatttgagaaatggatgtagaactggccctttcaaaaacgacattttcgcagaagagtttgatagaaaattaagtttggaagataaaccaaggttaaagcaacctagaagtatgatggaattgaaaccaaaaagaaaattatccaatagcgtcacttccagaaacttaaggtctggtaattctgtaagatttaagaaatctatgcctaacttagctttagttaatccagctatcagagaagaagaagaggacgaagaaagagaaagagaagatcaaagagagtttaattacaagattgataacgatacgcaggacacaattttggcgaaattcagttctgatgatgaaggtgactttttaacaggatttgaagaattagagggtgaagcaattgatgaaacgatttcttccaacgataaagaaagtgccgaccatccgcgtttcttaaagaagtcttcctcttctttgccattaaaaatatctcctgcacaatatgatatagtaaagcatgacgaattattaactccaggtcttcataggagacaaagagattggaatacccagcaggaattagactcttttaaagaaaaaagatctgtaagacactgttctaatcaaaatgtacaactcaatggtccagctaaaatcaaaacaataaaacagcaaattgatcataatactccaatgaagaaaggttctatgatatataacccgaaaactatgaagtgggaaggaaatgaaaacgtcttaagcaaatttagtgatgtagacacggcaaacaggaaagctttattgataaaaaacaagttacaaagagatgcagattctaagaagcaaaaatattctgatttacagcatgcaagagccacttccagaaatcaaaaggtcatcgggaacatgattttagatgaacaaaatttaagatgggttagtgtttctgaggaagaagcagacccttttgcaggcattcctgagataaacttaccaccagttggcaaaagtatgaaaaaacgtagctcctctccatttttgcgttccaaaagccaagttaatacgccatttgtttctaatgacaatgatggcgtttatcaaagtacggctgctcaagcaagactccgtaaataccattctatgaggacacttaacggtacaacagaaactccagaaataagctctactttccatttgagtagtagagcattggaaaaattttaccacgaggagaacaggtggtgtaaaaagttagccagttggtttatacccagagatgagaccattatcagtgttgatgaggaaacaatcatggatgaaagtacggtcaatagcaagagaaaatcctatatgtatgaaatcaggaacatggtaatcaattctacaaaagattga

SEQ ID NO: 6217 - DNA, 1494 bp, Saccharomyces cerevisiae
atgtttaaccatgattggaagtactccattaattctaagactttcgccgatttaaacattgaattatttcgaaaccacaagttcaaaactgttttaaattacataataggtgtagttgggtggaatggattaaaactcgccctttttgtttctgacatttacacatgtatcaaattgctggcattcaactcctggtcaaacaacatcatcaaaccatacttaccctttaaaatatccaaatggttgtttagcggttgtattttagcatcgattgtgctattgatatgggaggctatagcgggaatgaggatttacaaaacgggaaatatctctttgacttatgtcaacaatttttccagaaacctaaattcagtgctcaattattccaagttttgtgtttataatatgatcgaacgaaagggttttcgacagaaaatgacattttttactttttttcaactgaaagattgtattagattaatcttcacggataccccaaggcaagttattaatggtcttacgctgtggtcagttctcgtaacagtaaataaaaacgaggatctaggcgatctggaatcatttaccggtttgatcaacaaaataaagaacattggccagaccaatcatgaagaagcagtgatattgtcgctgatgctattttcctttataatctgggcattatttgtcttcaagtttctgcttgctgtcatttgctcgatttttgtttattataaaataatcaatgatcaggaatatagcgggttgcgtgagtacatttgtgttaccgtcagcgaaaatgttgatgaacttgttgaaagacaaaggaaaaaggaaaatgatgacacgatttataagacaggtcttctcgaatctcagacttttgacgattttaaagaagttgaaaataaaattgaaacatcttttaatgatacgtcatatgcttctaataatgattctatgattgagctaatagagagaagacccgaatacaaaagtcaggatgtatgtgggcccattcccacaatgaagaaaacggaaacaatggaatcgttcgttgacaatggcaatccacaatataccactagattctctgcgattctagattcaccatatatcaacagctatgaaagtaatgatataaagaaagcaaaaatacaaagcagaagcgtaaatactccaaaatatgaggatttgtcttcttctgacattttcaacaaaatacactctgctggacaattaaaatctacaacttctatggagtttcacgggccattagattctatgccaaatacaacaaacaacatccgtaattttaatagcaacagtagtagacctagaccacctcctttacagacaaaaagttcgattaattcaaaagctgactcgaatgataatggaaggatttatacaccaatgaaagcgtacttcagggagcctgatcttccgaggaagggtttgctggaagatgaagatcgtacatataattatacttaa

SEQ ID NO: 6218 - DNA, 1494 bp, Artificial Sequence
  Description of Artificial Sequence: Synthetic polynucleotide
atgtttaaccatgattggaagtactccattaattctaagactttcgccgatttaaacattgaattatttagaaaccacaagttcaaaactgttttaaattacataataggtgtagttgggtggaatggattaaaactcgccctttttgtttctgacatttacacatgtatcaaattgttggcattcaactcctggagcaacaacatcatcaaaccatacttaccctttaaaatatccaaatggttgtttagcggttgtattttagcatctattgtgttattgatatgggaggctatagcgggaatgaggatttacaaaacgggaaatatctctttgacttatgtcaacaatttttccagaaacttgaattctgtgctcaattattccaagttttgtgtttataatatgatcgaaagaaagggttttagacagaaaatgacattttttactttttttcaattgaaagattgtattagattaatcttcacggataccccaaggcaagttattaatggtcttacgttgtggtctgttctcgtaacagtaaataaaaacgaggatttgggcgatttggaaagttttaccggtttgatcaacaaaataaagaacattggccagaccaatcatgaagaagcagtgatattgtctttgatgttattttcctttataatctgggcattatttgtcttcaagtttttacttgctgtcatttgctccatttttgtttattataaaataatcaatgatcaggaatatagcgggttgcgtgagtacatttgtgttaccgtcagcgaaaatgttgatgaacttgttgaaagacaaaggaaaaaggaaaatgatgacacgatttataagacaggtcttctcgaatctcagacttttgacgattttaaagaagttgaaaataaaattgaaacatcttttaatgatacgtcctatgcttctaataatgattctatgattgagttgatagagagaagacccgaatacaaaagtcaggatgtatgtgggcccattcccacaatgaagaaaacggaaacaatggaatctttcgttgacaatggcaatccacaatataccactagattctctgcgattttagattctccatatatcaacagctatgaaagtaatgatataaagaaagcaaaaatacaaagcagaagcgtaaatactccaaaatatgaggatttgtcttcttctgacattttcaacaaaatacactctgctggacaattaaaatctacaacttctatggagtttcacgggccattagattctatgccaaatacaacaaacaacatccgtaattttaatagcaacagtagtagacctagaccacctcctttacagacaaaaagttctattaattctaaagctgactctaatgataatggaaggatttatacaccaatgaaagcgtacttcagggagcctgatcttccgaggaagggtttgttggaagatgaagatcgtacatataattatacttga

SEQ ID NO: 6219 - DNA, 495 bp, Saccharomyces cerevisiae
atggtatctagtgcagttaaatgtggcatatgtcgcggagttgatggtaaatataaatgtcctaaatgtggcgtacgatattgctccttgaaatgctataaagatgctgcaaagcatgttcataaggaaagcgaacaacccagggctggtacagaagctaatgtggaagttgttaataacgataagatcataaacagttcactcgcaatgaataaaacattaaagacgaaggcattcgatgatatatatcaaaatagcgcagaattgcaagagctgttgaaatacaacacggtgaagttccatttggcaaaggtttatagaattttgtccagtactgttaacgatggaagttctggaaaaatgaacagcgatctacaaaaagaactagctgtaaattatttgaatacattacgatatggtggtatacattataatgaagcaattgaggaattttgccagattttattagataaattaaatgcggtgaagaaataa

SEQ ID NO: 6220 - DNA, 495 bp, Artificial Sequence
  Description of Artificial Sequence: Synthetic polynucleotide
atggtatctagtgcagttaaatgtggcatatgtcgcggagttgatggtaaatataaatgtcctaaatgtggcgtaagatattgctccttgaaatgctataaagatgctgcaaagcatgttcataaggaaagcgaacaacccagggctggtacagaagctaatgtggaagttgttaataacgataagatcataaacagtagcctcgcaatgaataaaacattaaagacgaaggcattcgatgatatatatcaaaatagcgcagaattgcaagagttattgaaatacaacacggtgaagttccatttggcaaaggtttatagaattttgtccagtactgttaacgatggaagttctggaaaaatgaacagcgatttgcaaaaagaattggctgtaaattatttgaatacattaagatatggtggtatacattataatgaagcaattgaggaattttgccagattttattagataaattaaatgcggtgaagaaatga

SEQ ID NO: 6221 - DNA, 711 bp, Saccharomyces cerevisiae
atggagcaaatgcattcattggaatcaagtttacctccagagcaacctcctacaaagcaagcgattgagagtcttaatttggaactttctcaagagttcaagctagccgccaatgcggtgacaagactttaccgggtggctaatgagaaaaactctttaaccaaacatcagggctacctcacctgtttggatgatatactatgtgcattggactcaaatgtgactgctgacgagttaagggcttggtgctataaacgaagaaatgatatcctttcaaactcgcaggataaatctttaaatccggtgaaagaaagggaaagaaagcttaataagttcagtgaaaaccaacaccgcgaaaatgaagctcataaggaaccttttgaaaaagacagcgcagtcaagtataatttcagtttcaacgaatcaaatggggacctctcaaatattaatgaaaatatagcacctaaatttagactttctatgccgcctttaagtgtcgaacatcctcctaggaatgctagtcgtataaaatcctggaaagcacgaacaatcaatcacggaagaggggacacgagaaacctaaatgacataacgggacttggacatgagcgtgagcgtgatcgtgaaaatacacattatgaaaaaaaaccgaaattggattctgattcagaagtagacataaggagtttccgccaggatatggacctgtaa

SEQ ID NO: 6222 - DNA, 711 bp, Artificial Sequence
  Description of Artificial Sequence: Synthetic polynucleotide
atggagcaaatgcattctttggaaagtagtttacctccagagcaacctcctacaaagcaagcgattgagagtcttaatttggaactttctcaagagttcaagttggccgccaatgcggtgacaagactttacagagtggctaatgagaaaaactctttaaccaaacatcagggctacctcacctgtttggatgatatattatgtgcattggactctaatgtgactgctgacgagttaagggcttggtgctataaaagaagaaatgatatcctttccaactctcaggataaatctttaaatccggtgaaagaaagggaaagaaagcttaataagttcagtgaaaaccaacaccgcgaaaatgaagctcataaggaaccttttgaaaaagacagcgcagtcaagtataatttcagtttcaacgaaagtaatggggacctctctaatattaatgaaaatatagcacctaaatttagactttctatgccgcctttaagtgtcgaacatcctcctaggaatgctagtcgtataaaatcctggaaagcaagaacaatcaatcacggaagaggggacacgagaaacttgaatgacataacgggacttggacatgagcgtgagcgtgatcgtgaaaatacacattatgaaaaaaaaccgaaattggattctgattctgaagtagacataaggagtttccgccaggatatggacttgtga

SEQ ID NO: 6223 - DNA, 651 bp, Saccharomyces cerevisiae
atgatgggtcgtggcaaattaatactgatagaaggattggataggactggtaaaaccacgcaatgtaatattctttacaaaaaattgcaaccaaactgtaaactattgaagttccccgaaaggtctacccgaatcggaggactcataaacgaatatttgacggatgatagtttccaattatcagatcaggcaattcacctcttgttttcggcaaatagatgggaaatagttgacaagataaagaaagatttactagaaggcaagaacattgtcatggacagatatgtttattctggagtggcatattctgccgctaaggggacaaatggaatggatttggattggtgcttgcaacccgatgtagggttgctgaaaccggatttgacattatttttaagcactcaagatgtcgacaataacgccgaaaaatctggatttggtgacgaaagatacgaaactgttaagtttcaagaaaaagtgaagcaaacttttatgaagctattggataaagagataaggaaaggcgatgagtcaatcacgattgtagacgttactaataagggcattcaggaagttgaagcgcttatttggcaaatcgttgagcctgttttgagtacgcatattgatcatgataaattttcgttcttctag

SEQ ID NO: 6224 - DNA, 651 bp, Artificial Sequence
  Description of Artificial Sequence: Synthetic polynucleotide
atgatgggtcgtggcaaattaatattaatagaaggattggataggactggtaaaaccacgcaatgtaatattctttacaaaaaattgcaaccaaactgtaaacttttgaagttccccgaaaggtctaccaggatcggaggactcataaacgaatatttgacggatgatagtttccaattaagtgatcaggcaattcacctcttgttttctgcaaatagatgggaaatagttgacaagataaagaaagatttattggaaggcaagaacattgtcatggacagatatgtttattctggagtggcatattctgccgctaaggggacaaatggaatggatttggattggtgcttgcaacccgatgtagggttgttgaaaccggatttgacattatttttaagcactcaagatgtcgacaataacgccgaaaaatctggatttggtgacgaaagatacgaaactgttaagtttcaagaaaaagtgaagcaaacttttatgaagttgttggataaagagataaggaaaggcgatgagagtatcacgattgtagacgttactaataagggcattcaggaagttgaagcgcttatttggcaaatcgttgagcctgttttgagtacgcatattgatcatgataaattttctttcttctga

SEQ ID NO: 6225 - DNA, 444 bp, Saccharomyces cerevisiae
atggcagtacagtttatactgtgctttaataagcagggtgtggtgcggttggtgagatggttcgatgtacacagttcggatcctcagcgtagccaggatgccattgcgcagatttatagactcatatcttccagagatcataagcatcagagtaacttcgtagagttttccgattcgacgaaactcatatacaggaggtatgcgggtctgtattttgtcatgggtgtggacttacttgacgatgaacccatatatttgtgccacatccatctgtttgtggaggtgctagatgcatttttcggcaatgtctgtgaactggatatcgtattcaacttttacaaagtctatatgataatggacgagatgtttattggaggggaaatacaagaaatttcaaaggatatgctgttagaaagactaagtattttagatagactagactag

SEQ ID NO: 6226 - DNA, 444 bp, Artificial Sequence
  Description of Artificial Sequence: Synthetic polynucleotide
atggcagtacagtttatattgtgctttaataagcagggtgtggtgagattggtgagatggttcgatgtacacagttctgatcctcagcgtagccaggatgccattgcgcagatttatagactcatatcttccagagatcataagcatcagagtaacttcgtagagttttccgattctacgaaactcatatacaggaggtatgcgggtttatattttgtcatgggtgtggacttacttgacgatgaacccatatatttgtgccacatccatttatttgtggaggtgttggatgcatttttcggcaatgtctgtgaattagatatcgtattcaacttttacaaagtctatatgataatggacgagatgtttattggaggggaaatacaagaaatttccaaggatatgcttttagaaagattaagtattttagatagattagactga

SEQ ID NO: 6227 - DNA, 2457 bp, Saccharomyces cerevisiae
atggcgggaaacggtaaggacaaagaggtagataaaagtccctctgttagtactttgaaactattgggaaaacgcctgtttaattccagcagtcacacggataactcttcgttactgcttagtgccgaacaattgggcaatgggagaagtttaagaaaaaggccaacgtctccgtccattagtggcagtggtagcggtggtaattcaccttcgtcttctgctggggcacggcagagatctgcttctttacatagaagaaaaaacaatgcttctgtaggattttcaaatgggtctgtgtcgtcacacaagtcctctgtcgcattgcaggacttaattaaacataataataacccttacttgaactctccctctgatattctgggcacaggtactggcattgcctcgacaagagatagggatagagcagttttggatagagaaaaggaaaaagaaagggcgagaaacaaagaaagaaatactcatcacgcgggcttaccgcaaaggtctaatagcatggctagtcaccattttcccaacgagaatatagtttataatccatacggcataagcccaaaccatgctaggccagatactgcatttgcagacactctgaatacgaataaggagaacgatttgagtttttacatgcatgatggtaacagcaagatacggatgttgccccttccaattgctaatccgaacgattttttgcccgaagatatgaaacaatatagtgtccatttaacggataatttcgtatttgatacggacaataaacctattggttcgggtgggtctagtgaagttagaaaggttaaatcaagttacaggcaaaaggatgtttacgctctaaaaaaactgaatatgatataccacgagtcacccgagaagttttacaagagatgctccaaagaattcatcatagctaagcatttaagtcataacgttcacatcacgaatactttttatcttctaaaagttcccacgaccacatatacaactcgtggttgggggtttattatggaactaggtgttaaggacctcttccaactgatggaaagaacaggctggaagaacgttcccttcaatgaaaaatattgtcttttcaaacaagtggcccaaggtattaagttttgtcatgacaatggtattgctcaccgtgatttgaagcccgaaaatgttttaatttctaaagaaggtatatgcaaattgacggatttcggtatttctgattggtaccatgtgatacctcatgactacactagtccagtgaaaacatgccaaggtatgattggctctccaccatacactccgccagaggtaatgtacttcgatgccaagaagcactaccccgaaaagttccaaaaaccctataatccgttggccatggattcctatgccctcggaatcatgctgattaccatgattaacaatatcatccccttcatcgattcttgtaacactgatgcgagattcagggaatttgaagtgtcatatgacaacttcatcaatcatcaaaacccacatttcagggacaagggctgccacaagccgggtcctggttccgaatactctttagcaagaaatttcaagaatactgatgccacgcgtatcgcatggagattggctgacccgaaccctgcaactagatatacaatggatgatttatttaatgatccgtttttccaacaaattgaaacatgtgtcgagccaaatgatgatgacttagtaagggttcctgaattaaggaaaagtacttctaccaatgattttagtgaaaattcattagatgcaccccatgatcaagaggtcattcacacgtctaatccattcctaaaaaaggaaacgctcacttctaaaccaagatcgatgttggaaattgcagaatctccttccttgaaacaaaaatccaaggtaaaagatagcgcaaagaccaaaacacacgatgttggggatgaaggggggaatgaaagcaccaaacctaagcagcaagataaaaaggaaaatttgaagaaagatgaggtcaagaacggcgacaaggacaaagtcattgaagaggctaccacgactaatgtggacagcatattggaaaaaccaacaccaacctccacaaaagtagaggacaacttaagcgaagatgattccacaatgaaggaattaaagtcgatgctaaactccacccctactacaccaacacataatggccccactccgctccctgcaaaggctggcactcaattagataagcgtatgagcgacctatcactcaaatcggaaacaccggcttctacaaagaactttagcgcaccgaatgtttcgtcatcaagcaattcactgagaagcctcggaagtccaagcgtgtcatcctcgaaaaagaagaaggtaattcaccaccacttggacattaccaacagcgttacaaacatgtcatccgtgagcgcctttatctcaagatag

SEQ ID NO: 6228 - DNA, 2457 bp, Artificial Sequence
  Description of Artificial Sequence: Synthetic polynucleotide
atggcgggaaacggtaaggacaaagaggtagataaaagtccctctgttagtactttgaaacttttgggaaaacgcttatttaattccagcagtcacacggataactcttctttattacttagtgccgaacaattgggcaatgggagaagtttaagaaaaaggccaacgtctccgtccattagtggcagtggtagcggtggtaattctccttcttcttctgctggggcaagacagagatctgcttctttacatagaagaaaaaacaatgcttctgtaggattttctaatgggtctgtgtcttctcacaagtcctctgtcgcattgcaggacttaattaaacataataataacccttacttgaactctccctctgatattttgggcacaggtactggcattgcctctacaagagatagggatagagcagttttggatagagaaaaggaaaaagaaagggcgagaaacaaagaaagaaatactcatcacgcgggcttaccgcaaaggtctaatagcatggctagtcaccattttcccaacgagaatatagtttataatccatacggcataagcccaaaccatgctaggccagatactgcatttgcagacactttgaatacgaataaggagaacgatttgagtttttacatgcatgatggtaacagcaagataagaatgttgccccttccaattgctaatccgaacgattttttgcccgaagatatgaaacaatatagtgtccatttaacggataatttcgtatttgatacggacaataaacctattggttctggtgggtctagtgaagttagaaaggttaaatctagttacaggcaaaaggatgtttacgctttgaaaaaattgaatatgatataccacgagtctcccgagaagttttacaagagatgctccaaagaattcatcatagctaagcatttaagtcataacgttcacatcacgaatactttttatcttttgaaagttcccacgaccacatatacaactcgtggttgggggtttattatggaattgggtgttaaggacctcttccaattgatggaaagaacaggctggaagaacgttcccttcaatgaaaaatattgtcttttcaaacaagtggcccaaggtattaagttttgtcatgacaatggtattgctcaccgtgatttgaagcccgaaaatgttttaatttctaaagaaggtatatgcaaattgacggatttcggtatttctgattggtaccatgtgatacctcatgactacactagtccagtgaaaacatgccaaggtatgattggctctccaccatacactccgccagaggtaatgtacttcgatgccaagaagcactaccccgaaaagttccaaaaaccctataatccgttggccatggattcctatgccctcggaatcatgttgattaccatgattaacaatatcatccccttcatcgattcttgtaacactgatgcgagattcagggaatttgaagtgtcttatgacaacttcatcaatcatcaaaacccacatttcagggacaagggctgccacaagccgggtcctggttccgaatactctttagcaagaaatttcaagaatactgatgccacgcgtatcgcatggagattggctgacccgaaccctgcaactagatatacaatggatgatttatttaatgatccgtttttccaacaaattgaaacatgtgtcgagccaaatgatgatgacttagtaagggttcctgaattaaggaaaagtacttctaccaatgattttagtgaaaattctttagatgcaccccatgatcaagaggtcattcacacgtctaatccattcttgaaaaaggaaacgctcacttctaaaccaagaagtatgttggaaattgcagaatctccttccttgaaacaaaaatccaaggtaaaagatagcgcaaagaccaaaacacacgatgttggggatgaaggggggaatgaaagcaccaaacctaagcagcaagataaaaaggaaaatttgaagaaagatgaggtcaagaacggcgacaaggacaaagtcattgaagaggctaccacgactaatgtggacagcatattggaaaaaccaacaccaacctccacaaaagtagaggacaacttaagcgaagatgattccacaatgaaggaattaaagtctatgttgaactccacccctactacaccaacacataatggccccactccgctccctgcaaaggctggcactcaattagataagcgtatgagcgacttatctctcaaaagtgaaacaccggcttctacaaagaactttagcgcaccgaatgtttcttcttctagcaattctttgagaagcctcggaagtccaagcgtgtcttcctctaaaaagaagaaggtaattcaccaccacttggacattaccaacagcgttacaaacatgtcttccgtgagcgcctttatctccagatga

SEQ ID NO: 6229 - DNA, 1056 bp, Saccharomyces cerevisiae
atgaactctctggcaaataataataagctttctactgaggatgaggaaatccattcggcaagaaaaagaggctataacgaggagcagaactacagcgaggccaggaaaaagcaaagagatcaaggcttgttgtcacaagagagcaatgacggaaatattgactctgctctgttgagcgaaggggctacgctaaaagggactcaaagtcagtatgaaagcggactgacgtctaacaaagatgagaaaggaagtgatgacgaagatgcgtcagtggctgaggctgctgttgccgctaccgtcaattatacagacttaatccagggccaggaagatagttctgatgcccacacatctaatcaaacgaacgcgaatggtgagcacaaggattcccttaatggggaaagagccataaccccatcaaatgaaggagtcaagccaaacacctccctggagggaatgacgtcttcaccaatggaatctacacagcaatctaaaaacgacatgctcataccattggcagaacacgatcgtgggccagaacaccaacaggatgatgaagacaatgatgacgctgacattgatctcaaaaaggatataagcatgcagccgggtcgtcgtggaagaaaacctactactttggccacaacagacgagtggaaaaagcaaagaaaagactcccataaagaagtcgaaaggcgtcgccgcgaaaacatcaacactgcaatcaacgttttaagcgacctcctgcccgtgagagaatcaagtaaggcagcaatattggcgtgtgccgctgaatacattcaaaaattgaaagaaaccgatgaagcaaacatcgaaaagtggacgttacaaaaattgcttagcgagcaaaacgcatcgcaattagccagtgcaaatgagaaactgcaggaagaactgggaaatgcttacaaagaaatcgagtacatgaaacgcgttttaaggaaggagggaatagaatacgaggatatgcacactcacaagaaacaagagaacgaaagaaaaagcactaggagcgataatccacatgaggcttga

SEQ ID NO: 6230 - DNA, 1056 bp, Artificial Sequence
  Description of Artificial Sequence: Synthetic polynucleotide
atgaactctttggcaaataataataagctttctactgaggatgaggaaatccattctgcaagaaaaagaggctataacgaggagcagaactacagcgaggccaggaaaaagcaaagagatcaaggcttgttgtctcaagagagcaatgacggaaatattgactctgctttattgagcgaaggggctacgttgaaagggactcaaagtcagtatgaaagcggattaacgtctaacaaagatgagaaaggaagtgatgacgaagatgcgtctgtggctgaggctgctgttgccgctaccgtcaattatacagacttaatccagggccaggaagatagttctgatgcccacacatctaatcaaacgaacgcgaatggtgagcacaaggattcccttaatggggaaagagccataaccccatccaatgaaggagtcaagccaaacacctccttggagggaatgacgtcttctccaatggaatctacacagcaatctaaaaacgacatgctcataccattggcagaacacgatcgtgggccagaacaccaacaggatgatgaagacaatgatgacgctgacattgatctcaaaaaggatataagcatgcagccgggtcgtcgtggaagaaaacctactactttggccacaacagacgagtggaaaaagcaaagaaaagactcccataaagaagtcgaaaggcgtcgccgcgaaaacatcaacactgcaatcaacgttttaagcgacctcttgcccgtgagagaaagtagtaaggcagcaatattggcgtgtgccgctgaatacattcaaaaattgaaagaaaccgatgaagcaaacatcgaaaagtggacgttacaaaaattgcttagcgagcaaaacgcatctcaattagccagtgcaaatgagaaattacaggaagaattaggaaatgcttacaaagaaatcgagtacatgaaacgcgttttaaggaaggagggaatagaatacgaggatatgcacactcacaagaaacaagagaacgaaagaaaaagcactaggagcgataatccacatgaggcttga

SEQ ID NO: 6231 - DNA, 2808 bp, Saccharomyces cerevisiae
atgatgttatcactgcgcaggttctccatgtacgttttgagatctctgcggcttcactttaaaaagataatcattactcttctaactatccagttactattcattaccatatttgtattgggcggtcgctcgtcgattattgacggtaactggaagtcattcatggcgctctttttcaaaccgcttgcttacactaacagaaacaacaaccatgcttctttcgatctgagatcaaaagacaacgtagccaaactttacgaaaaaatgaattttgatacttcaggcaaatggatcgacacgtacaccttgaagaataatcttctcactgtgaaaatgggtcctgaaaaagggcaagttcttgattcggtagatgaattgagatattacgataacgacccaaggctggtatggtcagttttactagatcacttattagaatcagattccaatgaatacgcattttcgtggtacgattgggctaattttgactctacaaacaaactcattgcactgagacacacgaacatatcttgccagttcgtttgcgagggtgcctttgataaaaatgtgctagaaatggtagagagtgaagtccaagagcctttattcgtcacaaataggaataaatatgacgaatcgctctggtacaacagggtaagaaaggttgtcgattctaattctgtgcagcaagccatacatgatcactgcatgaataatgacgcgtattccaatggtactcccttcgaattgccttttatcataagcgaaatttctgaaaggttgaggccagaagtgtatgacttacaagccaaaaaccacttgttatattctaactttactccactgtcattaaccgtactggacagcgataaagatgcatacagaatcaatttgaagacaacagactcttccaaatcaaatatagtacagacaaatctactacagaattacattaagaggcacagaaatgaaatggtaaatggcgacctcattttcaaccacacttccatgtttgaaaaatttttacatcatggatccactaaaaaaaggaaacttgacgttgaagcgttggataaaacaatatacgctggagagtatctagaactatcaccatctgatttccaattcaatgcaaaagagaggatcattgaattagagaccaggctcaggtctgaaggcctaccatctcatgatacccactatttacgaagtttaaagacgtccgtaaatacgtcccctgcattacagcaaaagtatttcgcagaggcctctgatattacggacgcgactgccgatggtcatcatagagacaggcgatttttctcaatcggacataatctcctaaatgaccctcaggagtttgaagcaagattgaattctttgatcagaaattttcagaaatttgttaaggctaacggattaatttcctggctatcgcatggtacattgtatggatatctatatgatggtctgaagtttccctgggatgtcgaccatgatttacagatgcccattaaacatttacattacttgagtcaatatttcaaccaatccctaatattagaagatccaagagaaggtaatggaagattcttactagatgtaggaagcgcaattacggtaggagttcatgggaacggcgaaaacaatattgatgctcgtttcatcgatattgactcaggtatatacattgacatcacgggacttagcgttagttccgatgcggctaaacagtacatgtccaaatttgtagaagaagaaagctcgggcgaaagcttttctgcccttattgaagactataagtttgacgaaaacgactattttgacgaggtggatggtagagaaggtttagctaaatataccatacatgaattaatggaatgggttaattctcatccagacgactttacggatgcagaaaagaatttagtcaccaaaacatacaagaaagagcttgcaatttcgagaagcgattatgctgaaaaagacttgtctccgaaacaaaggtatttggtaaatgagaagtataacctttacaattgtagaaaccagcatttttccagtctaaacatcatatcacccttgagaaatacaatgttcagcggtgtgtcagcatttgttcctaataggcccatagcaacattgaataatgagtataaagttccggcaaaatacgggcttttgtcattccaaggtaaggtgtatttaccggaattcagatactggttctcgtttgcagacatgaagaagtttgcaaatttgcagctgaaagaacccaagataacacgactggaaagtcccttaaatgatttaaaattcagcgacataagcctactgataacaaacattttaaaatgtgggtttcactccgtatttgccagcttatttaattcttttgacagtactgtttacagactcaaagagcttgaaatacagtatgatcctagcttgagtgaggaagaaaaaagtagtctattaaaaactctacggcgaggaatgtcaaaaaaaataaaatcaccagaaaaagatccgatcatatatatatacgaaagaaagttatgggaaaacgtggaaaagttgttgaatgcgtcaaacatctacaacattgcttcacaagttgagaaggaaaaaggtaaagagtttgttgaacggtcccagcaagtatatgaaagaaactttgacggcttcagacttcccgatggcggcaacagtaagactgtaaatgatctgaattctaagggcttaaatctctttggtgataataagaaaacttcaaacaatatatttggttcagaccaaaaatattaa

SEQ ID NO: 6232 - DNA, 2808 bp, Artificial Sequence
  Description of Artificial Sequence: Synthetic polynucleotide
atgatgttatctttacgcaggttctccatgtacgttttgagatctttaagacttcactttaaaaagataatcattactcttttgactatccagttattattcattaccatatttgtattgggcggtcgcagctctattattgacggtaactggaagagtttcatggcgctctttttcaaaccgcttgcttacactaacagaaacaacaaccatgcttctttcgatttgagaagtaaagacaacgtagccaaactttacgaaaaaatgaattttgatacttctggcaaatggatcgacacgtacaccttgaagaataatcttctcactgtgaaaatgggtcctgaaaaagggcaagttcttgattctgtagatgaattgagatattacgataacgacccaaggttagtatggtctgttttattagatcacttattagaaagtgattccaatgaatacgcattttcttggtacgattgggctaattttgactctacaaacaaactcattgcattgagacacacgaacatatcttgccagttcgtttgcgagggtgcctttgataaaaatgtgttggaaatggtagagagtgaagtccaagagcctttattcgtcacaaataggaataaatatgacgaatctctctggtacaacagggtaagaaaggttgtcgattctaattctgtgcagcaagccatacatgatcactgcatgaataatgacgcgtattccaatggtactcccttcgaattgccttttatcataagcgaaatttctgaaaggttgaggccagaagtgtatgacttacaagccaaaaaccacttgttatattctaactttactccattatctttaaccgtattggacagcgataaagatgcatacagaatcaatttgaagacaacagactcttccaaatctaatatagtacagacaaatttattgcagaattacattaagaggcacagaaatgaaatggtaaatggcgacctcattttcaaccacacttccatgtttgaaaaatttttacatcatggatccactaaaaaaaggaaacttgacgttgaagcgttggataaaacaatatacgctggagagtatttggaattatctccatctgatttccaattcaatgcaaaagagaggatcattgaattagagaccaggctcaggtctgaaggcttaccatctcatgatacccactatttaagaagtttaaagacgtccgtaaatacgtcccctgcattacagcaaaagtatttcgcagaggcctctgatattacggacgcgactgccgatggtcatcatagagacaggaggtttttctccatcggacataatctcttgaatgaccctcaggagtttgaagcaagattgaattctttgatcagaaattttcagaaatttgttaaggctaacggattaatttcctggttatctcatggtacattgtatggatatttgtatgatggtttgaagtttccctgggatgtcgaccatgatttacagatgcccattaaacatttacattacttgagtcaatatttcaaccaatccttgatattagaagatccaagagaaggtaatggaagattcttattagatgtaggaagcgcaattacggtaggagttcatgggaacggcgaaaacaatattgatgctcgtttcatcgatattgactctggtatatacattgacatcacgggacttagcgttagttccgatgcggctaaacagtacatgtccaaatttgtagaagaagaaagcagtggcgaaagcttttctgcccttattgaagactataagtttgacgaaaacgactattttgacgaggtggatggtagagaaggtttagctaaatataccatacatgaattaatggaatgggttaattctcatccagacgactttacggatgcagaaaagaatttagtcaccaaaacatacaagaaagagcttgcaatttctagaagcgattatgctgaaaaagacttgtctccgaaacaaaggtatttggtaaatgagaagtataacctttacaattgtagaaaccagcatttttccagtttgaacatcatatctcccttgagaaatacaatgttcagcggtgtgagcgcatttgttcctaataggcccatagcaacattgaataatgagtataaagttccggcaaaatacgggcttttgagtttccaaggtaaggtgtatttaccggaattcagatactggttctcctttgcagacatgaagaagtttgcaaatttgcagttgaaagaacccaagataacaagattagaaagtcccttaaatgatttaaaattcagcgacataagcttattgataacaaacattttaaaatgtgggtttcactccgtatttgccagcttatttaattcttttgacagtactgtttacagactcaaagagcttgaaatacagtatgatcctagcttgagtgaggaagaaaaaagtagtttgttaaaaactttgagaagaggaatgtccaaaaaaataaaatctccagaaaaagatccgatcatatatatatacgaaagaaagttatgggaaaacgtggaaaagttgttgaatgcgtccaacatctacaacattgcttctcaagttgagaaggaaaaaggtaaagagtttgttgaaagatcccagcaagtatatgaaagaaactttgacggcttcagacttcccgatggcggcaacagtaagactgtaaatgatttgaattctaagggcttaaatctctttggtgataataagaaaacttctaacaatatatttggttctgaccaaaaatattga

SEQ ID NO: 6233 - DNA, 1374 bp, Saccharomyces cerevisiae
atgctaatagacgcaattcatggtgctaagatgagcacaaaacttttagtatcactaaaggtactagtaattcaactcaatccgcaaattgggcaagtagatcaaacaattaagagaacatggtcaatattggataaagttacgaaaagtgccacctatgtgaaaccagacataatactattccccgaatttgcattgacaggttacagttttcatgccagaaaagatattttaccttatgttactaagaaagatgaagggccctcttttgaactggctaaatcaatatccgagaaatttcaatgctacactataataggatatcctgaagatgatgatgaacagaagctatacaattctgccctggtagtaaatccgcagggggagcagatctttaattacagaaagacttttctctatgatacagaaatgaattgggattgcgaggagaatccagagggatttcagacgtttcccatggatttttcaaagtgtgctaagctttctaatgaggactcttacaacagagatgtgactttgaaagcatcaataggtatttgtatggacttaagtccctacaaattcatggccccctttaatcactttgaattctcttctttttgcgttgacaataatgttgaattgattctatgtccaatggcgtggttaaactctacttctatcacagacaaacagacgttacataacaattcattattagaagccgctaagaacaaaatagctttcgctttaaaggagcaagggttgcctttggcaggatctcaaggaatttaccagcttaaaattggtgattcgcaacgtacgcccagagtgccttctgacgacagtacaagtgaatataaggatatggatgaaccagatatgtcaaacgtaaactactggattctacgattttttccttttttgtactttaaatccagaattaattggtttaaaaattcatctcttatcgaaagcattttgggcaaaactagaatgcccctagatcatgaatattataaagatggaaagcacaaggaggacacaatagacttattggattctgaggaagtgataaaggatacagtactggaaaagacatttttgggaacctcccttggacagccttggaagttccaaggaaagaatgcgattttggtgctagctaacagatgtggtactgaagatggtaccacgatttttgcaggaagttctggcatttataaatttaacggtaaaaaacctaaaggttcacaggatgatgatgagagttcgcttgattctctcaatgaaagcgtagagttgctgggtaatttgggcaagggtctagaaggcgctatattgcgtgaggtccaatttgaagtgtttaggtga

SEQ ID NO: 6234 - DNA, 1374 bp, Artificial Sequence
  Description of Artificial Sequence: Synthetic polynucleotide
atgttgatagacgcaattcatggtgctaagatgagcacaaaacttttagtatctttgaaggtattggtaattcaactcaatccgcaaattgggcaagtagatcaaacaattaagagaacatggtccatattggataaagttacgaaaagtgccacctatgtgaaaccagacataatattattccccgaatttgcattgacaggttacagttttcatgccagaaaagatattttaccttatgttactaagaaagatgaagggccctcttttgaattggctaaatctatatccgagaaatttcaatgctacactataataggatatcctgaagatgatgatgaacagaagttgtacaattctgccttggtagtaaatccgcagggggagcagatctttaattacagaaagacttttctctatgatacagaaatgaattgggattgcgaggagaatccagagggatttcagacgtttcccatggatttttccaagtgtgctaagctttctaatgaggactcttacaacagagatgtgactttgaaagcatctataggtatttgtatggacttaagtccctacaaattcatggccccctttaatcactttgaattctcttctttttgcgttgacaataatgttgaattgattctttgtccaatggcgtggttaaactctacttctatcacagacaaacagacgttacataacaattctttattagaagccgctaagaacaaaatagctttcgctttaaaggagcaagggttgcctttggcaggatctcaaggaatttaccagcttaaaattggtgattctcaacgtacgcccagagtgccttctgacgacagtacaagtgaatataaggatatggatgaaccagatatgtccaacgtaaactactggattttaagattttttccttttttgtactttaaatccagaattaattggtttaaaaattcttctcttatcgaaagcattttgggcaaaactagaatgcccttagatcatgaatattataaagatggaaagcacaaggaggacacaatagacttattggattctgaggaagtgataaaggatacagtattggaaaagacatttttgggaacctcccttggacagccttggaagttccaaggaaagaatgcgattttggtgttggctaacagatgtggtactgaagatggtaccacgatttttgcaggaagttctggcatttataaatttaacggtaaaaaacctaaaggttctcaggatgatgatgagagttctcttgattctctcaatgaaagcgtagagttgttgggtaatttgggcaagggtttggaaggcgctatattgcgtgaggtccaatttgaagtgtttaggtga

SEQ ID NO: 6235 - DNA, 378 bp, Saccharomyces cerevisiae
atgtctgttgtaggatcgttaattttttgcttggactgtggtgatctcctggaaaatcctaatgccgtattaggctctaacgttgaatgcagccaatgtaaagccatatatcccaagtcacaattctccaatttaaaagtcgtcaccacgacggcagacgatgcgtttccatcttctcttagagccaagaaatccgtggttaaaacttctttgaagaagaacgaactgaaagacggcgctactatcaaggaaaagtgtcctcagtgtggaaatgaagagatgaactatcatactttacagttaagatctgcagatgaaggtgctactgtcttctatacatgcacttcctgtggttacaagttccgtaccaacaattga

SEQ ID NO: 6236 - DNA, 378 bp, Artificial Sequence
  Description of Artificial Sequence: Synthetic polynucleotide
atgtctgttgtaggatctttaattttttgcttggactgtggtgatctcttggaaaatcctaatgccgtattaggctctaacgttgaatgcagccaatgtaaagccatatatcccaagtctcaattctccaatttaaaagtcgtcaccacgacggcagacgatgcgtttccatcttctcttagagccaagaaatccgtggttaaaacttctttgaagaagaacgaattgaaagacggcgctactatcaaggaaaagtgtcctcagtgtggaaatgaagagatgaactatcatactttacagttaagatctgcagatgaaggtgctactgtcttctatacatgcacttcctgtggttacaagttccgtaccaacaattga

SEQ ID NO: 6237 - DNA, 1689 bp, Saccharomyces cerevisiae
atggctgctcgtccacaacaacctcctatggaaatgccggatctgtcgaacgccattgtggcacaagacgagatgggtagaccctttattatcgtgaaggatcaaggtaacaagaagagacagcacggattagaggccaagaaatcacatatattggctgctagatcagtagcttctattatcaaaacttcgttgggtccccgtgggttagataagatcttgatttcacctgacggtgaaatcaccatcactaacgatggtgctacaattttgtcccaaatggagctagataatgagattgcaaagttgttagtacaactttccaaatctcaagatgatgaaattggtgatggtactactggtgttgttgttctggcaagtgcgctacttgaccaagcattggagttaattcaaaagggtatacatccaatcaaaatcgctaatggatttgatgaagccgccaaattagccatttccaagttagaagaaacatgtgacgacatttctgcgtcaaacgatgaattgttcagggactttttattgagggccgccaaaacttctttgggctccaaaattgtttccaaggatcatgatagatttgctgaaatggctgtggaagccgtcataaatgtcatggacaaagatcgtaaagacgtggatttcgatttaatcaaaatgcaaggacgggttggcggatctataagcgattcaaaattgattaatggtgtcattttggataaagatttttctcatccacaaatgcctaaatgtgttttaccaaaagagggctctgatggtgttaagttagctatattaacgtgtccatttgaacctcctaaaccaaagaccaagcataaattagacatttcttcagtagaagaataccaaaaattacagacttatgaacaagataagttcaaagaaatgatagacgatgtgaagaaagcgggcgcagatgttgttatatgccaatgggggtttgacgatgaggccaatcatctacttctacagaatgatttacctgccgtaagatgggtaggtggccaagaactagaacacattgccatttccacaaacggtcgcattgttccaagatttcaagacttgtctaaggataaattaggtacatgttccagaatttacgagcaggagtttggtactactaaggatcgtatgctgattatcgagcaaagtaaagaaacaaaaactgtaacatgttttgttcgcggttccaataaaatgatcgtggatgaagctgaacgtgcattgcatgactcactatgtgtggtacgtaacttggttaaagactcacgtgtagtttacggtgggggagcagccgaagtgactatgtccctggctgtctctgaggaagctgataagcaacgtggtattgatcagtatgcattccgtggattcgcccaagcgttagacaccattccaatgactttggctgaaaattctggtcttgatccaatcggaactttgtctacattgaaaagtaaacaactgaaagaaaagatttccaacattggtgtcgattgcttaggttacgggtctaatgacatgaaggaactatttgtcgttgatccatttattggcaaaaagcagcaaattcttttagctactcaattatgtagaatgattttaaagattgataacgtcatcattagtggtaaagatgagtattga

SEQ ID NO: 6238 - DNA, 1689 bp, Artificial Sequence
  Description of Artificial Sequence: Synthetic polynucleotide
atggctgctcgtccacaacaacctcctatggaaatgccggatttatctaacgccattgtggcacaagacgagatgggtagaccctttattatcgtgaaggatcaaggtaacaagaagagacagcacggattagaggccaagaaatctcatatattggctgctagatctgtagcttctattatcaaaacttctttgggtccccgtgggttagataagatcttgatttctcctgacggtgaaatcaccatcactaacgatggtgctacaattttgtcccaaatggagttagataatgagattgcaaagttgttagtacaactttccaaatctcaagatgatgaaattggtgatggtactactggtgttgttgttttagcaagtgcgttacttgaccaagcattggagttaattcaaaagggtatacatccaatcaaaatcgctaatggatttgatgaagccgccaaattagccatttccaagttagaagaaacatgtgacgacatttctgcgtccaacgatgaattgttcagggactttttattgagggccgccaaaacttctttgggctccaaaattgtttccaaggatcatgatagatttgctgaaatggctgtggaagccgtcataaatgtcatggacaaagatcgtaaagacgtggatttcgatttaatcaaaatgcaaggaagagttggcggatctataagcgattctaaattgattaatggtgtcattttggataaagatttttctcatccacaaatgcctaaatgtgttttaccaaaagagggctctgatggtgttaagttagctatattaacgtgtccatttgaacctcctaaaccaaagaccaagcataaattagacatttcttctgtagaagaataccaaaaattacagacttatgaacaagataagttcaaagaaatgatagacgatgtgaagaaagcgggcgcagatgttgttatatgccaatgggggtttgacgatgaggccaatcatttgcttttacagaatgatttacctgccgtaagatgggtaggtggccaagaattggaacacattgccatttccacaaacggtcgcattgttccaagatttcaagacttgtctaaggataaattaggtacatgttccagaatttacgagcaggagtttggtactactaaggatcgtatgttgattatcgagcaaagtaaagaaacaaaaactgtaacatgttttgttcgcggttccaataaaatgatcgtggatgaagctgaacgtgcattgcatgactctttatgtgtggtacgtaacttggttaaagactctcgtgtagtttacggtgggggagcagccgaagtgactatgtccttggctgtctctgaggaagctgataagcaacgtggtattgatcagtatgcattccgtggattcgcccaagcgttagacaccattccaatgactttggctgaaaattctggtcttgatccaatcggaactttgtctacattgaaaagtaaacaattgaaagaaaagatttccaacattggtgtcgattgcttaggttacgggtctaatgacatgaaggaattatttgtcgttgatccatttattggcaaaaagcagcaaattcttttagctactcaattatgtagaatgattttaaagattgataacgtcatcattagtggtaaagatgagtattga

SEQ ID NO: 6239 - DNA, 1350 bp, Saccharomyces cerevisiae
atgtcatacttaaacaatcccgctgttgtcatggacaatggtaccgggctgaccaagctcggtttcgccggtaatgattctccctcctgggtcttccctactgcaatagccacagctgcaccttcaaatacaaagaagtcctcgggcgttggtgcgccctcagcagttagtaatgaagcatcatactttggaaattccacctctgcaaccaatttcaatggtgcaacaggtggtttgctgtctaataatttatccggtaaaagaggtacagaagatttggatttctatattggaaatgaggctttagtagcatcccaaggaccctcttactctttgagctatccaatcagacacggtcaagtggaaaattgggatcacatggaaagattctgggaaaattccatcttcaagtatttaagaacagagcctgaagatcattttttcctattgaccgaaccaccactgaatcctccagaaaacagagagcaagtggcggagattttttttgaatcatttaattgtgctggtctatatattgctgtgcaagcagttttggctctggctgcgtcatggacctcttcaaaagtcacggatagatcattaactggtactgttatagattctggtgatggtgtcacccacgtcatcccagtggcggaaggttacgtcattggctcagcaattaaaaacattccaatagccggtagagacatcacattgttcatccaatccttgctaagagaacgtggtgaagcagacacttccttgagaactgccgaaaagattaagcaagaatactgttacgtctgtccagatattgtaaaggagtttaacaaattcgataaagatccttctaaatttgcccaatttgtggtggaaaaccaagaaaagacaaggagaaaagtcgtagatattggttacgaaagattcttagcacctgaaatcttcttcaatccagaaattgcatcctcagacttcttgactcctttacccacggtagtggatcaaactatccaggcttgccctattgacgtccgtaaaggtttatacaacaatattgtactatcaggtgggtctaccatgttcaaagattttggacgtcgtttacaaagagatctaaagtctatcgtaaataacagaatcgcacaaagtgagctgttaagtggaactaaatcgactggtgtagatgtttccgtgatttctcatcggaagcagagaaacgctgtctggtttggtggctcgctgctggcacaaacagccgaattcaaaggctactgtcacactaagaaagattatgaggaatatggtccggaaattgttagaaatttcagccttttcaacatggtttga

SEQ ID NO: 6240 - DNA, 1350 bp, Artificial Sequence
  Description of Artificial Sequence: Synthetic polynucleotide
atgagttacttaaacaatcccgctgttgtcatggacaatggtaccgggttaaccaagctcggtttcgccggtaatgattctccctcctgggtcttccctactgcaatagccacagctgcaccttccaatacaaagaagtccagtggcgttggtgcgccctctgcagttagtaatgaagcaagctactttggaaattccacctctgcaaccaatttcaatggtgcaacaggtggtttgttatctaataatttatccggtaaaagaggtacagaagatttggatttctatattggaaatgaggctttagtagcatcccaaggaccctcttactctttgagctatccaatcagacacggtcaagtggaaaattgggatcacatggaaagattctgggaaaattccatcttcaagtatttaagaacagagcctgaagatcattttttcttgttgaccgaaccaccattgaatcctccagaaaacagagagcaagtggcggagattttttttgaaagttttaattgtgctggtttatatattgctgtgcaagcagttttggctttggctgcgtcttggacctcttctaaagtcacggatagatctttaactggtactgttatagattctggtgatggtgtcacccacgtcatcccagtggcggaaggttacgtcattggcagtgcaattaaaaacattccaatagccggtagagacatcacattgttcatccaatccttgttaagagaacgtggtgaagcagacacttccttgagaactgccgaaaagattaagcaagaatactgttacgtctgtccagatattgtaaaggagtttaacaaattcgataaagatccttctaaatttgcccaatttgtggtggaaaaccaagaaaagacaaggagaaaagtcgtagatattggttacgaaagattcttagcacctgaaatcttcttcaatccagaaattgcatccagtgacttcttgactcctttacccacggtagtggatcaaactatccaggcttgccctattgacgtccgtaaaggtttatacaacaatattgtattatctggtgggtctaccatgttcaaagattttggacgtcgtttacaaagagatttgaagtctatcgtaaataacagaatcgcacaaagtgagttattaagtggaactaaatctactggtgtagatgtttccgtgatttctcatagaaagcagagaaacgctgtctggtttggtggctctttattggcacaaacagccgaattcaaaggctactgtcacactaagaaagattatgaggaatatggtccggaaattgttagaaatttcagccttttcaacatggtttga

SEQ ID NO: 6241 - DNA, 7413 bp, Saccharomyces cerevisiae
atggaaccgcatgaggagcagatttggaagagtaaacttttgaaagcggctaacaacgatatggacatggatagaaatgtgccgttggcaccgaatctgaatgtgaatatgaacatgaaaatgaatgcgagcaggaacggggatgaattcggtctgacttctagtaggtttgatggagtggtgattggcagtaatggggatgtaaattttaagcccattttggagaaaattttccgcgaattaaccagtgattacaaggaggaacgaaaattggccagtatttcattatttgatctactagtatccttggaacatgaattgtcgatagaagagttccaagcagtttcaaatgacataaacaataagattttggagctggtccatacaaaaaaaacgagcactagggtaggggctgttctatccatagacactttgatttcattctacgcatatactgaaaggttgcctaacgaaacttcacgactggctggttaccttcgagggctaataccttctaatgatgtagaggtcatgagactcgctgcaaagactctgggcaagttagccgttccaggaggtacatatacctctgatttcgtggaatttgagataaagtcttgcttagaatggcttactgcctccacggaaaagaattcattctcgagttcgaagccagaccatgctaaacatgctgcgcttctgattataacagcgttggcagagaattgtccttatttactctaccaatacttgaattccatactagataacatttggagagcactaagagacccacatttggtgatcagaattgatgcgtccattacattggccaaatgtctttccaccctacgaaatagggatcctcagttaactagccagtgggtgcagagattggctacaagttgtgaatacggatttcaagtaaacacattagaatgcatccatgcaagtttgttggtttataaggaaatcttgtttttgaaggatccctttttgaatcaagtgttcgaccaaatgtgtctaaattgcatagcttatgaaaatcataaagcgaaaatgattagagaaaagatttaccagattgttcccctattagcatcgttcaatcctcaattatttgctggcaaatatttgcaccaaattatggacaactatttagagattttaaccaatgctccagcaaataaaataccacatctcaaagatgacaaaccacagattttaatatcgattggtgatattgcatatgaagtcgggcccgatatcgcaccttatgtgaaacaaattcttgattatattgaacatgatttacagacgaaattcaaattcagaaagaaatttgaaaatgaaattttctactgcatcggaagattggcagttcccttgggccccgttctaggtaaattattaaacagaaatatactggacctgatgttcaaatgccctctttccgactatatgcaggaaacgtttcaaattctgactgagagaataccatcactaggccccaaaataaatgacgagttgcttaacctagtctgttcaaccttatctggaacaccatttatccagccagggtcaccaatggagataccatcgttttcgagagaaagagcaagagaatggagaaataaaaacatcctacagaaaactggtgaaagtaacgatgataataatgatataaaaatcattatacaagcttttagaatgttaaaaaatatcaaaagcagattttcgttggtggaattcgtgagaattgttgcactttcttacattgagcatacagatcccagagtaaggaaactagctgcgttgacatcttgtgaaatttacgtcaaggataacatctgcaaacaaacatcactacactctctgaacactgtatctgaagtgttatcaaagcttctagccattacgattgcggaccctttacaagatatccgtttagaagttttaaagaatcttaatccatgtttcgatccccagttggcacaaccagataatttgagactcttgtttactgcactgcacgatgagtcgttcaatattcagtcagtagcaatggagcttgtcggtaggttgtcttccgtaaaccctgcatacgtcatcccatcgataagaaaaatactactggaactgctaacaaaattaaaattctcaacttcttctcgagaaaaggaagaaactgccagtttgttatgtactcttatcaggtcgagtaaagatgttgcgaaaccttatatcgaacctcttttaaatgttcttttaccaaaattccaagatacctcttcaacggttgcatcaactgcactgagaactataggtgagctatctgttgtagggggcgaagatatgaagatatatcttaaggatttgtttcctttaattatcaaaacatttcaggatcaatcaaactctttcaagagagaagctgcacttaaggcccttggtcaacttgcagcctcatctggttacgtgatagatcctttactcgactatcccgaattattgggtatattggtgaatatattgaagacagaaaactctcaaaatattaggagacaaacagtcactttgataggtatactgggagctatcgacccatatcgccaaaaagaacgtgaggttacctctactaccgatatatctacagaacagaacgccccgcctatcgacattgctcttctcatgcagggcatgtctccttcgaatgatgagtattataccactgttgtcattcactgcctgctaaaaatcctaaaagatccatccctatcatcttaccacactgccgtgatccaagcgattatgcatatttttcaaacccttggtctaaaatgtgtttcattcttggaccagatcatcccaactattttggacgtaatgcgtacatgctctcagtcactattagaattttacttccaacagctttgctctttgattattatcgtaaggcaacacataagacctcatgtcgattctatattccaggctatcaaagatttttcttcggttgctaagctacaaataacgcttgtaagtgttattgaagcaatatcaaaggctctggagggtgaattcaaaagattggtccctcttactctgaccttgttccttgtaattttggagaatgacaagtctagtgacaaggtcctctccagaagggtattgagactgttagaatcgtttggtcctaacttagaaggttattcgcatttgattacacccaagatagttcaaatggcagaattcaccagcgggaacctacaaaggtctgcaataattactattggcaaactggccaaggatgttgacctttttgagatgtcctcaagaattgttcactctttacttagggtactaagttcaacaacgagtgacgaactctcaaaagtcattatgaatactttaagtctactgctaatacaaatgggcacatcctttgctatcttcatccctgtcattaatgaagttttaatgaagaaacatattcaacacacaatatatgatgacttgacaaacagaatattaaacaatgatgttttacccacaaaaattcttgaagcaaatacaacggattataagcccgcggaacaaatggaggcagcagatgctggggtcgcaaaattacctataaaccaatcagttttgaaaagtgcatggaattctagccaacaaagaactaaagaagattggcaggaatggagcaaacgtctatccattcaattattaaaagagtcaccctcccatgctctaagagcttgttcaaatcttgcaagcatgtattatccactagccaaagaactttttaataccgcattcgcatgtgtttggaccgaactttatagccaatatcaagaagatttaattgggtcattatgtatagccttatcttctcccttaaatccaccagaaatacatcaaacattgttaaacctggtagaatttatggaacacgatgacaaggcattaccaataccaactcaaagcctgggcgagtatgctgaaagatgtcacgcctatgccaaagcgctacattataaagagattaaatttattaaagagcctgagaactcaactattgaatcattgatcagcattaacaaccagctgaatcaaacggatgctgcaattggtatattaaagcatgcccaacaacatcattcacttcaattaaaggagacatggtttgaaaaattagagcgttgggaagatgcactacatgcttataatgaacgtgaaaaggcaggtgatacttccgtgagcgttacactcggtaagatgagatcccttcatgcccttggcgaatgggaacagttgtcgcaattggcagctagaaagtggaaagtttcgaagctacaaactaagaagctaatagctcccttggcagctggtgctgcgtgggggttgggagagtgggatatgcttgagcaatatatcagcgttatgaaacctaaatctccagataaggaattttttgatgcaattttatacttgcacaagaatgattacgacaatgctagtaagcatatattaaacgccagagatttgcttgtgactgaaatttccgcgttgatcaatgaaagttataatagagcatatagcgttattgttagaactcaaataataacagagtttgaggaaatcatcaagtataaacaattgccacctaattccgagaaaaaacttcactatcaaaatctttggacaaaaagactgctgggctgccaaaaaaatgtcgatttatggcaaagagtgcttagagtaagatcattggtaataaagcccaagcaagacctgcaaatatggataaaatttgcaaatttgtgcagaaaatctggtagaatgaggctagcaaataaggcattgaatatgctactagaaggaggcaacgatcctagtttaccaaatacgttcaaagctcctcccccagttgtttacgcgcaactaaaatatatttgggctacaggagcttataaagaagcattaaaccacttgataggatttacatccaggttagcgcatgatcttggtttggatccgaataatatgatcgcgcaaagtgtcaaactctcaagtgcaagtactgctccgtatgttgaggaatacacaaaattattagctcgatgttttttaaagcaaggtgagtggagaatagcaacacaaccgaactggagaaacacaaatccggatgcaattcttggttcttatctattggctacacatttcgataaaaattggtacaaggcatggcataattgggccttagctaattttgaagtaatatccatggttcaggaagagactaagctcaacggaggtaagaatgatgatgatgatgacacggcagttaataatgataatgtgcggattgacggtagtatcctaggaagtggttctttgactattaatggcaacagatacccgctagagcttattcaaagacatgttgttccagcgatcaagggcttttttcattcaatatctctattagaaacaagttgtttgcaagacacgttgaggttattgactcttttatttaactttggtggtattaaagaagtctcacaagccatgtatgaaggcttcaatttgatgaaaatagagaactggcttgaagtcttaccacagttgatctctcgtatacatcagccagatcctacggtgagtaattcccttttgtcgttgctttctgatttagggaaagctcatccacaagctctcgtgtatcctttaactgtcgcgatcaagtctgaatctgtttcaagacaaaaagcggctctttcaataatagagaaaattaggattcatagtccagtcctggtaaaccaggcagaattagttagtcacgagttgatcagagtagccgttctatggcacgaattatggtatgaaggactggaagatgcgagccgccaatttttcgttgaacataacatagaaaaaatgttttctactttagaacctttacataaacacttaggcaatgagcctcaaacgttaagtgaggtatcgtttcagaaatcatttggtagagatttgaacgatgcctacgaatggttgaataactacaaaaagtcaaaagacatcaataatttgaaccaagcttgggatatttattataacgtcttcagaaaaataacacgtcaaataccacagttacaaaccttagacttacagcatgtttctccccagcttctggctactcatgatctcgaattggctgttcctgggacatatttcccaggaaaacctaccattagaatagcgaagtttgagccattattttctgtgatctcttcgaagcaaaggccaagaaaattctccatcaagggtagcgacggtaaagattataaatacgttttaaagggacatgaagatataagacaagatagccttgttatgcaattatttggtctagttaacactttgttgaagaatgattcagagtgtttcaagagacatttggatatccaacaatacccggctattccattgtcgcctaaatctggtttactaggatgggtaccaaatagtgacacattccacgttttgatcagagaacaccgtgatgccaaaaaaattccgttgaacattgaacattgggttatgttacaaatggcccccgattatgagaatttgactcttttacaaaaaattgaagtattcacgtacgctttagataatacaaaaggccaagacctttataaaatattatggttaaagagtaggtcgtcagagacatggctagaacgtagaacaacttatacgagatctttagcagttatgtccatgactggttatattctgggactaggtgatcgccatccaagcaacctgatgctagatagaatcaccggtaaagttatccacattgatttcggcgattgttttgaagctgccatcttaagagaaaagtatccagaaaaagtgccatttagactaactaggatgttaacatacgcaatggaagttagtggaattgaaggcagtttccgaattacttgtgaaaatgtcatgagagtcttaagagataataaagaatcattaatggcgatcttggaagcttttgcgcttgatcctttgatccattggggatttgatttaccgccacaaaaacttactgagcaaactggaattcctttgccgttgattaatcctagtgaattattaaggaagggggcaattactgtcgaagaagcggcaaatatggaagcagaacaacaaaatgagaccaaaaacgccagagcaatgcttgttttgagacgtattacagataaattaacgggcaatgatatcaagaggttcaatgaattagacgtccctgagcaggttgataaactgatccaacaagccacttctattgaaaggttatgtcaacattatattggatggtgcccattctggtga

SEQ ID NO: 6242 - DNA, 7413 bp, Artificial Sequence
  Description of Artificial Sequence: Synthetic polynucleotide
atggaaccgcatgaggagcagatttggaagagtaaacttttgaaagcggctaacaacgatatggacatggatagaaatgtgccgttggcaccgaatttgaatgtgaatatgaacatgaaaatgaatgcgagcaggaacggggatgaattcggtttgacttctagtaggtttgatggagtggtgattggcagtaatggggatgtaaattttaagcccattttggagaaaattttccgcgaattaaccagtgattacaaggaggaaagaaaattggccagtatttctttatttgatttattggtatccttggaacatgaattgagcatagaagagttccaagcagtttctaatgacataaacaataagattttggagttggtccatacaaaaaaaacgagcactagggtaggggctgttttatccatagacactttgatttctttctacgcatatactgaaaggttgcctaacgaaacttctaggttggctggttaccttagggggttgataccttctaatgatgtagaggtcatgagactcgctgcaaagactttgggcaagttagccgttccaggaggtacatatacctctgatttcgtggaatttgagataaagtcttgcttagaatggcttactgcctccacggaaaagaattctttctctagttccaagccagaccatgctaaacatgctgcgcttttgattataacagcgttggcagagaattgtccttatttactctaccaatacttgaattccatattggataacatttggagagcattgagagacccacatttggtgatcagaattgatgcgtccattacattggccaaatgtctttccaccttgagaaatagggatcctcagttaactagccagtgggtgcagagattggctacaagttgtgaatacggatttcaagtaaacacattagaatgcatccatgcaagtttgttggtttataaggaaatcttgtttttgaaggatccctttttgaatcaagtgttcgaccaaatgtgtttgaattgcatagcttatgaaaatcataaagcgaaaatgattagagaaaagatttaccagattgttcccttattagcatctttcaatcctcaattatttgctggcaaatatttgcaccaaattatggacaactatttagagattttaaccaatgctccagcaaataaaataccacatctcaaagatgacaaaccacagattttaatatctattggtgatattgcatatgaagtcgggcccgatatcgcaccttatgtgaaacaaattcttgattatattgaacatgatttacagacgaaattcaaattcagaaagaaatttgaaaatgaaattttctactgcatcggaagattggcagttcccttgggccccgttttaggtaaattattaaacagaaatatattggacttgatgttcaaatgccctctttccgactatatgcaggaaacgtttcaaattttgactgagagaataccatctttaggccccaaaataaatgacgagttgcttaacttggtctgttctaccttatctggaacaccatttatccagccagggtctccaatggagataccatctttttccagagaaagagcaagagaatggagaaataaaaacatcttacagaaaactggtgaaagtaacgatgataataatgatataaaaatcattatacaagcttttagaatgttaaaaaatatcaaaagcagattttctttggtggaattcgtgagaattgttgcactttcttacattgagcatacagatcccagagtaaggaaattggctgcgttgacatcttgtgaaatttacgtcaaggataacatctgcaaacaaacatctttacactctttgaacactgtatctgaagtgttatccaagcttttagccattacgattgcggaccctttacaagatatccgtttagaagttttaaagaatcttaatccatgtttcgatccccagttggcacaaccagataatttgagactcttgtttactgcattgcacgatgagagtttcaatattcagtctgtagcaatggagcttgtcggtaggttgtcttccgtaaaccctgcatacgtcatcccaagtataagaaaaatattattggaattattaacaaaattaaaattctctacttcttctagagaaaaggaagaaactgccagtttgttatgtactcttatcaggtctagtaaagatgttgcgaaaccttatatcgaacctcttttaaatgttcttttaccaaaattccaagatacctcttctacggttgcatctactgcattgagaactataggtgagctttctgttgtagggggcgaagatatgaagatatatcttaaggatttgtttcctttaattatcaaaacatttcaggatcaaagtaactctttcaagagagaagctgcacttaaggcccttggtcaacttgcagcctcttctggttacgtgatagatcctttactcgactatcccgaattattgggtatattggtgaatatattgaagacagaaaactctcaaaatattaggagacaaacagtcactttgataggtatattaggagctatcgacccatatcgccaaaaagaacgtgaggttacctctactaccgatatatctacagaacagaacgccccgcctatcgacattgctcttctcatgcagggcatgtctccttccaatgatgagtattataccactgttgtcattcactgccttttgaaaatcttgaaagatccatccttatcttcttaccacactgccgtgatccaagcgattatgcatatttttcaaacccttggtttgaaatgtgtttctttcttggaccagatcatcccaactattttggacgtaatgcgtacatgctctcagtccttattagaattttacttccaacagctttgctctttgattattatcgtaaggcaacacataagacctcatgtcgattctatattccaggctatcaaagatttttcttctgttgctaagttacaaataacgcttgtaagtgttattgaagcaatatccaaggctttggagggtgaattcaaaagattggtccctcttactttgaccttgttccttgtaattttggagaatgacaagtctagtgacaaggtcctctccagaagggtattgagattattagaaagttttggtcctaacttagaaggttattctcatttgattacacccaagatagttcaaatggcagaattcaccagcgggaacttacaaaggtctgcaataattactattggcaaattggccaaggatgttgacctttttgagatgtccagcagaattgttcactctttacttagggtattgagttctacaacgagtgacgaactctctaaagtcattatgaatactttaagtttattattgatacaaatgggcacatcctttgctatcttcatccctgtcattaatgaagttttaatgaagaaacatattcaacacacaatatatgatgacttgacaaacagaatattaaacaatgatgttttacccacaaaaattcttgaagcaaatacaacggattataagcccgcggaacaaatggaggcagcagatgctggggtcgcaaaattacctataaaccaatctgttttgaaaagtgcatggaattctagccaacaaagaactaaagaagattggcaggaatggagcaaacgtctttccattcaattattaaaagagtctccctcccatgctttgagagcttgttctaatcttgcaagcatgtattatccattggccaaagaactttttaataccgcattcgcatgtgtttggaccgaactttatagccaatatcaagaagatttaattgggtctttatgtatagccttatcttctcccttaaatccaccagaaatacatcaaacattgttaaacttggtagaatttatggaacacgatgacaaggcattaccaataccaactcaaagcttgggcgagtatgctgaaagatgtcacgcctatgccaaagcgttgcattataaagagattaaatttattaaagagcctgagaactctactattgaatctttgatcagcattaacaaccagttgaatcaaacggatgctgcaattggtatattaaagcatgcccaacaacatcattctcttcaattaaaggagacatggtttgaaaaattagagcgttgggaagatgcattgcatgcttataatgaacgtgaaaaggcaggtgatacttccgtgagcgttacactcggtaagatgagatcccttcatgcccttggcgaatgggaacagttgtctcaattggcagctagaaagtggaaagtttccaagttacaaactaagaagttaatagctcccttggcagctggtgctgcgtgggggttgggagagtgggatatgcttgagcaatatatcagcgttatgaaacctaaatctccagataaggaattttttgatgcaattttatacttgcacaagaatgattacgacaatgctagtaagcatatattaaacgccagagatttgcttgtgactgaaatttccgcgttgatcaatgaaagttataatagagcatatagcgttattgttagaactcaaataataacagagtttgaggaaatcatcaagtataaacaattgccacctaattccgagaaaaaacttcactatcaaaatctttggacaaaaagattattaggctgccaaaaaaatgtcgatttatggcaaagagtgcttagagtaagaagtttggtaataaagcccaagcaagacttgcaaatatggataaaatttgcaaatttgtgcagaaaatctggtagaatgaggttagcaaataaggcattgaatatgttattggaaggaggcaacgatcctagtttaccaaatacgttcaaagctcctcccccagttgtttacgcgcaattgaaatatatttgggctacaggagcttataaagaagcattaaaccacttgataggatttacatccaggttagcgcatgatcttggtttggatccgaataatatgatcgcgcaaagtgtcaaactctccagtgcaagtactgctccgtatgttgaggaatacacaaaattattagctcgttgttttttaaagcaaggtgagtggagaatagcaacacaaccgaactggagaaacacaaatccggatgcaattcttggttcttatcttttggctacacatttcgataaaaattggtacaaggcatggcataattgggccttagctaattttgaagtaatatccatggttcaggaagagactaagctcaacggaggtaagaatgatgatgatgatgacacggcagttaataatgataatgtgagaattgacggtagtatcttgggaagtggttctttgactattaatggcaacagatacccgttagagcttattcaaagacatgttgttccagcgatcaagggcttttttcattccatatctttattagaaacaagttgtttgcaagacacgttgaggttattgactcttttatttaactttggtggtattaaagaagtctctcaagccatgtatgaaggcttcaatttgatgaaaatagagaactggcttgaagtcttaccacagttgatctctcgtatacatcagccagatcctacggtgagtaattcccttttgtctttgctttctgatttagggaaagctcatccacaagctctcgtgtatcctttaactgtcgcgatcaagtctgaatctgtttctagacaaaaagcggctctttccataatagagaaaattaggattcatagtccagtcttggtaaaccaggcagaattagttagtcacgagttgatcagagtagccgttttatggcacgaattatggtatgaaggattagaagatgcgagccgccaatttttcgttgaacataacatagaaaaaatgttttctactttagaacctttacataaacacttaggcaatgagcctcaaacgttaagtgaggtatcctttcagaaaagttttggtagagatttgaacgatgcctacgaatggttgaataactacaaaaagagtaaagacatcaataatttgaaccaagcttgggatatttattataacgtcttcagaaaaataacacgtcaaataccacagttacaaaccttagacttacagcatgtttctccccagcttttagctactcatgatctcgaattggctgttcctgggacatatttcccaggaaaacctaccattagaatagcgaagtttgagccattattttctgtgatctcttccaagcaaaggccaagaaaattctccatcaagggtagcgacggtaaagattataaatacgttttaaagggacatgaagatataagacaagatagccttgttatgcaattatttggtttagttaacactttgttgaagaatgattctgagtgtttcaagagacatttggatatccaacaatacccggctattccattgtctcctaaatctggtttattaggatgggtaccaaatagtgacacattccacgttttgatcagagaacaccgtgatgccaaaaaaattccgttgaacattgaacattgggttatgttacaaatggcccccgattatgagaatttgactcttttacaaaaaattgaagtattcacgtacgctttagataatacaaaaggccaagacctttataaaatattatggttaaagagtaggagtagtgagacatggttagaacgtagaacaacttatacgagatctttagcagttatgtccatgactggttatattttaggattaggtgatcgccatccaagcaacttgatgcttgatagaatcaccggtaaagttatccacattgatttcggcgattgttttgaagctgccatcttaagagaaaagtatccagaaaaagtgccatttagattaactaggatgttaacatacgcaatggaagttagtggaattgaaggcagtttcagaattacttgtgaaaatgtcatgagagtcttaagagataataaagaatctttaatggcgatcttggaagcttttgcgcttgatcctttgatccattggggatttgatttaccgccacaaaaacttactgagcaaactggaattcctttgccgttgattaatcctagtgaattattaaggaagggggcaattactgtcgaagaagcggcaaatatggaagcagaacaacaaaatgagaccaaaaacgccagagcaatgcttgttttgagacgtattacagataaattaacgggcaatgatatcaagaggttcaatgaattagacgtccctgagcaggttgataaattaatccaacaagccacttctattgaaaggttatgtcaacattatattggatggtgcccattctggtga

SEQ ID NO: 6243 - DNA, 426 bp, Saccharomyces cerevisiae
atgtcgaatacttgggacgatgtatgggcatcagacagtgatgtcgaaactgaacgatctccagatttagtgaagttaagagagaatcatagcaagagggggtacttggacggaatagtgagttctaaagaagaaaagctgcaagagggtttcaatgatggtttcccaacgggcgctaaattagggaaacaagttggcataattatggggattttacttggcctacgaacacgttttggtgatgaagatgaggacctcagtaaggcatatattgatgctcaaaaagaattacgcattaacaaagtacttagtaagtccatatttgatccaaactttgacttgcaagaaaaacatccgctcataacaaaatggactgatattgccaatacctattgtgaaaagtaccatgtgccatctatccaataa

SEQ ID NO: 6244 - DNA, 426 bp, Artificial Sequence
  Description of Artificial Sequence: Synthetic polynucleotide
atgagtaatacttgggacgatgtatgggcaagtgacagtgatgtcgaaactgaaagatctccagatttagtgaagttaagagagaatcatagcaagagggggtacttggacggaatagtgagttctaaagaagaaaagttacaagagggtttcaatgatggtttcccaacgggcgctaaattagggaaacaagttggcataattatggggattttacttggccttagaacacgttttggtgatgaagatgaggacctcagtaaggcatatattgatgctcaaaaagaattacgcattaacaaagtacttagtaagtccatatttgatccaaactttgacttgcaagaaaaacatccgctcataacaaaatggactgatattgccaatacctattgtgaaaagtaccatgtgccatctatccaatga

SEQ ID NO: 6245 - DNA, 1062 bp, Saccharomyces cerevisiae
atgtttgaagggtttggtccaaataaaaagcgtaagatatcaaagttagccgcagagcaatcattggcacaacaaccctgggttgagaaatacaggcccaaaaacctagatgaagtgacagctcaagatcatgccgttactgttttgaagaaaaccttaaagtcagctaatctaccacatatgttgttttatggtcccccaggaactggtaaaacgtctaccattttagcgctaacaaaagaattatatggacccgacttgatgaaatcaagaatattggagttgaacgcttctgacgaacgtggtatctctattgtaagagaaaaggtaaaaaattttgcaagattgactgtatccaagcctagcaaacatgacttggagaactatccgtgcccaccgtataagatcattattctcgatgaggccgattcaatgactgccgatgcacagagtgcattacgtagaacaatggaaacctattcaggagtaacaagattctgtttgatttgtaattatgtgacaagaattattgacccgctagcgtcccgttgttccaaatttagattcaaagccctagacgcaagtaatgccattgaccgtttgaggtttatcagcgaacaagaaaatgttaaatgtgatgatggagttttggaaaggatcttggacatttcggcaggtgacttgagaagaggcattacattattacaatccgcttccaagggggcgcaatacttgggtgatggtaaaaacataacttctacccaagtggaagaattagctggtgtggtacctcatgacattctaatagaaattgttgaaaaagtcaaaagtggtgattttgatgagattaagaaatacgtcaatacgtttatgaaaagcggttggtctgctgcgtcagtagttaaccaactacatgaatattacatcaccaacgataactttgatacgaacttcaaaaatcaaatatcttggttgctgtttactacggattccagattaaacaacggaacgaacgagcacatccaattattaaacttattggttaaaatatcccaactctaa

SEQ ID NO: 6246 - DNA, 1062 bp, Artificial Sequence
  Description of Artificial Sequence: Synthetic polynucleotide
atgtttgaagggtttggtccaaataaaaagcgtaagatatccaagttagccgcagagcaatctttggcacaacaaccctgggttgagaaatacaggcccaaaaaccttgatgaagtgacagctcaagatcatgccgttactgttttgaagaaaaccttaaagtctgctaatttaccacatatgttgttttatggtcccccaggaactggtaaaacgtctaccattttagcgttaacaaaagaattatatggacccgacttgatgaaatctagaatattggagttgaacgcttctgacgaacgtggtatctctattgtaagagaaaaggtaaaaaattttgcaagattgactgtatccaagcctagcaaacatgacttggagaactatccgtgcccaccgtataagatcattattctcgatgaggccgattctatgactgccgatgcacagagtgcattacgtagaacaatggaaacctattctggagtaacaagattctgtttgatttgtaattatgtgacaagaattattgacccgttagcgtcccgttgttccaaatttagattcaaagccttggacgcaagtaatgccattgaccgtttgaggtttatcagcgaacaagaaaatgttaaatgtgatgatggagttttggaaaggatcttggacatttctgcaggtgacttgagaagaggcattacattattacaatccgcttccaagggggcgcaatacttgggtgatggtaaaaacataacttctacccaagtggaagaattagctggtgtggtacctcatgacattttaatagaaattgttgaaaaagtcaaaagtggtgattttgatgagattaagaaatacgtcaatacgtttatgaaaagcggttggtctgctgcgagtgtagttaaccaattgcatgaatattacatcaccaacgataactttgatacgaacttcaaaaatcaaatatcttggttgttatttactacggattccagattaaacaacggaacgaacgagcacatccaattattaaacttattggttaaaatatcccaactctga

SEQ ID NO: 6247 - DNA, 594 bp, Saccharomyces cerevisiae
atgagcaacaacgaaattgtatttgtcactggcaatgccaacaagttaaaggaagtgcagtcgattttgactcaagaggtcgacaacaacaacaaaaccatccacttaatcaatgaggccttagacctggaagaattgcaggacacggatctgaatgccattgcgttagctaagggaaagcaagctgttgcggccttgggtaagggtaagccagtgtttgtggaagacactgcgttgagatttgacgaatttaacggtctaccaggtgcttatataaaatggtttttaaagagcatgggattggaaaaaattgtgaaaatgttggaaccctttgaaaataaaaacgctgaagcagttaccaccatttgttttgctgattctcggggtgaatatcacttctttcaaggtattacaagaggcaagatcgttccaagccggggacccactacattcggctgggattcaatttttgaaccttttgatagtcatggactgacttacgcagagatgagcaaagacgcaaagaatgctatttctcatcgtggtaaagccttcgctcagtttaaagagtacttgtatcaaaatgacttttag

SEQ ID NO: 6248 - DNA, 594 bp, Artificial Sequence
  Description of Artificial Sequence: Synthetic polynucleotide
atgagcaacaacgaaattgtatttgtcactggcaatgccaacaagttaaaggaagtgcagagtattttgactcaagaggtcgacaacaacaacaaaaccatccacttaatcaatgaggccttagacttggaagaattgcaggacacggatttgaatgccattgcgttagctaagggaaagcaagctgttgcggccttgggtaagggtaagccagtgtttgtggaagacactgcgttgagatttgacgaatttaacggtttgccaggtgcttatataaaatggtttttaaagagcatgggattggaaaaaattgtgaaaatgttggaaccctttgaaaataaaaacgctgaagcagttaccaccatttgttttgctgattctcgtggtgaatatcacttctttcaaggtattacaagaggcaagatcgttccaagcagaggacccactacattcggctgggattctatttttgaaccttttgatagtcatggattaacttacgcagagatgagcaaagacgcaaagaatgctatttctcatcgtggtaaagccttcgctcagtttaaagagtacttgtatcaaaatgacttttga

SEQ ID NO: 6249 - DNA, 978 bp, Saccharomyces cerevisiae
atgtctactaactttgaaaaacatttccaagaaaacgtcgatgaatgcactctagagcaactaagggacatcttagtcaacaagtccggcaaaacagttttggccaacagatttagagctctgttcaacttaaagactgttgctgaagaatttgccactaagccagaggaagccaaaaaggccatcgaatacattgccgaatccttcgtcaatgacaagtctgagttgttgaagcacgaagtggcctacgtgttgggtcaaaccaagaacttggacgctgctccaactttaagacacgttatgttagatcaaaatcaagaaccaatggtgagacacgaagccgctgaggctttgggtgccctaggtgacaaggattcgttggatgacctaaataaggctgctaaggaggatccacacgttgctgtgagagaaacctgtgaactggccattaacagaatcaactggacccatggaggtgccaaggataaggaaaacttgcaacaatccctatactcgagtattgacccagccccacctctaccattagaaaaggatgctaccatcccagaactacaggccttattgaatgatcctaagcaacctttgttccaaagatacagagccatgttcagactgagagatatcggtactgatgaagcaatcctggccttggccactggtttcagtgcagaatcctcccttttcaagcatgaaatcgcctacgtcttcggtcaaataggtagtccggctgctgtcccaagtttgattgaagttttgggcagaaaggaagaagctccaatggttaggcatgaagctgctgaagccttgggtgccattgcttctccagaagttgtcgacgtcttgaaatcttacctcaacgatgaagtcgatgtcgtcagagaatcttgtatcgttgcgctagatatgtatgattacgaaaacagcaacgaactagaatatgctccaactgctaattag

SEQ ID NO: 6250 - DNA, 978 bp, Artificial Sequence
  Description of Artificial Sequence: Synthetic polynucleotide
atgtctactaactttgaaaaacatttccaagaaaacgtcgatgaatgcactttagagcaattaagggacatcttagtcaacaagtccggcaaaacagttttggccaacagatttagagctttattcaacttaaagactgttgctgaagaatttgccactaagccagaggaagccaaaaaggccatcgaatacattgccgaatccttcgtcaatgacaagtctgagttgttgaagcacgaagtggcctacgtgttgggtcaaaccaagaacttggacgctgctccaactttaagacacgttatgttagatcaaaatcaagaaccaatggtgagacacgaagccgctgaggctttgggtgcccttggtgacaaggattctttggatgacttgaataaggctgctaaggaggatccacacgttgctgtgagagaaacctgtgaattggccattaacagaatcaactggacccatggaggtgccaaggataaggaaaacttgcaacaatccttgtactctagtattgacccagccccacctttaccattagaaaaggatgctaccatcccagaattacaggccttattgaatgatcctaagcaacctttgttccaaagatacagagccatgttcagattgagagatatcggtactgatgaagcaatcttggccttggccactggtttcagtgcagaatcctcccttttcaagcatgaaatcgcctacgtcttcggtcaaataggtagtccggctgctgtcccaagtttgattgaagttttgggcagaaaggaagaagctccaatggttaggcatgaagctgctgaagccttgggtgccattgcttctccagaagttgtcgacgtcttgaaatcttacctcaacgatgaagtcgatgtcgtcagagaatcttgtatcgttgcgttggatatgtatgattacgaaaacagcaacgaattggaatatgctccaactgctaattga

SEQ ID NO: 6251 - DNA, 1158 bp, Saccharomyces cerevisiae
atgagtctcagcacaatcatatgtattggtatggccggatccggtaaaacaactttcatgcaaaggttaaactcccacttgcgggcagagaaaacgccaccatacgtaatcaatcttgatcctgcagtattgagagtcccctatggtgcaaacatcgatatcagagactcaatcaaatacaagaaagtgatggagaattaccagctaggtccgaacggtgccattgtcaccagtttgaatttgttcagcaccaagattgatcaagttattaggttggtggaacagaagaaggacaagttccaaaactgcatcatcgacactccaggccaaatcgaatgttttgtgtggagtgcgtcgggtgccattatcacggaatcttttgcctccagctttcccacagtgattgcatatatcgtggatacgcctagaaactcatccccaactacattcatgagtaacatgctgtacgcctgctccattctgtataagaccaaacttcccatgattgtcgttttcaacaagaccgacgtgtgcaaggcagattttgctaaggaatggatgacggattttgagagtttccaagcagcaatcaaggaagatcaagacttgaatggtgacaatgggctgggctccgggtacatgagctcattggtcaattctatgtcactgatgcttgaagaattctattcccagctagacgtcgtgggcgtttccagttttaccggagacggattcgacgaatttatgcaatgcgtagacaagaaagttgatgaatacgaccaatactataagcaagaacgtgaaaaagcattgaacctaaaaaagaaaaaggaagagatgagaaagcaaaaatcattgaatggcctgatgaaggatctagggttaaacgagaagagcagcgctgcagccagcgacaacgacagcatagatgccattagcgacctcgaagaggatgccaatgatggtcttgtggatagggatgaggacgaaggcgttgagagagaatacacgttcccaggcgaagaaagaacaaaaggtgaggtcaacgagaactctgctccagacctacaaaggagatatcaggaagctatgcaacaagtagggaaaacggccagtagcgagactgcagaaaatatcgcgaagtatattagaaactaa

SEQ ID NO: 6252 - DNA, 1158 bp, Artificial Sequence
  Description of Artificial Sequence: Synthetic polynucleotide
atgagtctcagcacaatcatatgtattggtatggccggatccggtaaaacaactttcatgcaaaggttaaactcccacttgagagcagagaaaacgccaccatacgtaatcaatcttgatcctgcagtattgagagtcccctatggtgcaaacatcgatatcagagactctatcaaatacaagaaagtgatggagaattaccagttgggtccgaacggtgccattgtcaccagtttgaatttgttcagcaccaagattgatcaagttattaggttggtggaacagaagaaggacaagttccaaaactgcatcatcgacactccaggccaaatcgaatgttttgtgtggagtgcgtctggtgccattatcacggaatcttttgcctccagctttcccacagtgattgcatatatcgtggatacgcctagaaactcttccccaactacattcatgagtaacatgctttacgcctgctccattctttataagaccaaacttcccatgattgtcgttttcaacaagaccgacgtgtgcaaggcagattttgctaaggaatggatgacggattttgagagtttccaagcagcaatcaaggaagatcaagacttgaatggtgacaatgggttgggctccgggtacatgagctctttggtcaattctatgtctttgatgcttgaagaattctattcccagttagacgtcgtgggcgtttccagttttaccggagacggattcgacgaatttatgcaatgcgtagacaagaaagttgatgaatacgaccaatactataagcaagaacgtgaaaaagcattgaacttgaaaaagaaaaaggaagagatgagaaagcaaaaatctttgaatggcttaatgaaggatttagggttaaacgagaagagcagcgctgcagccagcgacaacgacagcatagatgccattagcgacctcgaagaggatgccaatgatggtcttgtggatagggatgaggacgaaggcgttgagagagaatacacgttcccaggcgaagaaagaacaaaaggtgaggtcaacgagaactctgctccagacttgcaaaggagatatcaggaagctatgcaacaagtagggaaaacggccagtagcgagactgcagaaaatatcgcgaagtatattagaaactga

SEQ ID NO: 6253 - DNA, 621 bp, Saccharomyces cerevisiae
atgaaggagtcagtccaagagatcatccagcaactcatccacagtgtcgatttacagtcttccaagttccagctggccattgtgtgcacgatgttcaatcctatcttttggaacatcgttgcaagaatggaataccacaagcattctctcaccaagatgtgtggtggggccagaaagggctgttacatgttggcggcgaccatattttcgctaggtatcgtcagagacatggtgtacgagtctgcattgcgtgaacagcctacgtgttctctgatcacgggcgagaactggaccaagctgggtgtggctctctttggtttggggcaagtgcttgttttgagttccatgtacaagctgggtatcacagggacgtacttgggtgactatttcggcatcctgatggatgagagagtcaccggcttccccttcaacgtttccaacaaccccatgtaccagggttccactttgtccttcttgggcatagccctttacaaaggaaagcctgcggggctggttgtttctgccgtagtttacttcatgtacaagatcgctcttcgttgggaagaaccttttactgccatgatctacgctaaccgtgataaggccaaaaagaatatgtaa

SEQ ID NO: 6254 - DNA, 621 bp, Artificial Sequence
  Description of Artificial Sequence: Synthetic polynucleotide
atgaaggagtctgtccaagagatcatccagcaactcatccacagtgtcgatttacagtcttccaagttccagttggccattgtgtgcacgatgttcaatcctatcttttggaacatcgttgcaagaatggaataccacaagcattctctcaccaagatgtgtggtggggccagaaagggctgttacatgttggcggcgaccatattttctttgggtatcgtcagagacatggtgtacgagtctgcattgcgtgaacagcctacgtgttctttgatcacgggcgagaactggaccaagttgggtgtggctctctttggtttggggcaagtgcttgttttgagttccatgtacaagttgggtatcacagggacgtacttgggtgactatttcggcatcttgatggatgagagagtcaccggcttccccttcaacgtttccaacaaccccatgtaccagggttccactttgtccttcttgggcatagccctttacaaaggaaagcctgcggggttggttgtttctgccgtagtttacttcatgtacaagatcgctcttcgttgggaagaaccttttactgccatgatctacgctaaccgtgataaggccaaaaagaatatgtga

SEQ ID NO: 6255 - DNA, 657 bp, Saccharomyces cerevisiae
atgaagattgaaaaggcttctcatatttcacaaccggtgcaactttccacatgcactctcattgacacctaccctggtcatcaaggaagcatgaacaacaaggaagtcgaattatacggcggcgccatcactactgtcgtcccacctgggtttatagacgcttctactctaagagaagtccccgatacacaggaggtgtacgtcaattcccgtcgcgatgaagaagaattcgaagatggactagccaccaatgaaagcattatcgtggatctcttggagacggtcgacaagagcgatctgaaggaggcttggcagttccacgtggaagacctgacggagttgaacgggaccaccaaatgggaagctttacaagaagacactgttcagcaaggaaccaagttcaccggactcgttatggaagtagcaaataagtggggaaaaccagatctggcacagaccgttgtcatcggcgtagcgttgatcagattaacccagtttgacacggatgtggtcatctccattaatgtacctttgacaaaggaggaggcgtcgcaagcaagcaacaaagagttgcctgcaagatgtcatgctgtttaccaattgttgcaagaaatggtacggaagtttcacgttgtggacacgtcgctgtttgcttaa

SEQ ID NO: 6256 - DNA, 657 bp, Artificial Sequence
  Description of Artificial Sequence: Synthetic polynucleotide
atgaagattgaaaaggcttctcatatttctcaaccggtgcaactttccacatgcactctcattgacacctaccctggtcatcaaggaagcatgaacaacaaggaagtcgaattatacggcggcgccatcactactgtcgtcccacctgggtttatagacgcttctactttgagagaagtccccgatacacaggaggtgtacgtcaattcccgtcgcgatgaagaagaattcgaagatggattggccaccaatgaaagcattatcgtggatctcttggagacggtcgacaagagcgatttgaaggaggcttggcagttccacgtggaagacttaacggagttgaacgggaccaccaaatgggaagctttacaagaagacactgttcagcaaggaaccaagttcaccggactcgttatggaagtagcaaataagtggggaaaaccagatttggcacagaccgttgtcatcggcgtagcgttgatcagattaacccagtttgacacggatgtggtcatctccattaatgtacctttgacaaaggaggaggcgtctcaagcaagcaacaaagagttgcctgcaagatgtcatgctgtttaccaattgttgcaagaaatggtaagaaagtttcacgttgtggacacgtccttatttgcttga

SEQ ID NO: 6257 - DNA, 1191 bp, Saccharomyces cerevisiae
atggccaaaacaacaaaaagagcctccagtttcaggaggttgatgatattcgccataatagccctcatctcattagcatttggagttagatacctatttcacaattctaatgctactgatttacaaaaaattctgcagaacttgcccaaagagatttcccaaagcattaatagtgccaacaatattcagagttcggattctgatctagttcaacattttgagagtttggctcaggagatcagacaccaacaggaagttcaagcaaagcaatttgataaacaacgtaagatcctggaaaaaaaaatccaagacttgaaacaaacacctccggaggccaccctaagagaacgcatagctatgactttcccctacgattcccatgtcaagttcccagcatttatttggcaaacttggtccaatgatgaaggtcccgagcgtgttcaagatataaagggcatgtgggaaagcaagaatccgggctttgcgcacgaagtgttgaaccatgacgtgataaacgcactagtacaccactacttctactccataccggaaatcctagagacttacgaagctctgccctccatcatcctaaagatagattttttcaaatacttaatactgttagttcatggaggtgtttatgctgacatcgacacgttccctgttcagccaattccaaactggattcctgaagagttgtcgccatccgacattgggttgatagttggagttgaggaagacgctcaaagagctgactggagaaccaagtatatcagaagacttcagtttggtacttggattatacaagcaaaacctggtcaccctgttttgagggaaatcatttctcgaattattgagaccactttacagagaaagagggacgaccaactaaacgtcaatctaaggaatgatctgaatattatgagttggacgggttctgggttgtggactgacactattttcacgtatttcaatgactttatgagaagtggtgtcagggagaaggttacatggaaattattccataacctaaatcaaccaaaattgctaagtgatgttctggtctttccaaaattctcctttaactgtccaaaccaaatcgataatgacgatccacacaagaaattctatttcattactcatttggcatcacaattttggaaaaatactccaaaggtggagcagaaataa

SEQ ID NO: 6258 - DNA, 1191 bp, Artificial Sequence
  Description of Artificial Sequence: Synthetic polynucleotide
atggccaaaacaacaaaaagagcctccagtttcaggaggttgatgatattcgccataatagccctcatctctttagcatttggagttagatacttgtttcacaattctaatgctactgatttacaaaaaattttacagaacttgcccaaagagatttcccaaagcattaatagtgccaacaatattcagagttctgattctgatttggttcaacattttgagagtttggctcaggagatcagacaccaacaggaagttcaagcaaagcaatttgataaacaacgtaagatcttggaaaaaaaaatccaagacttgaaacaaacacctccggaggccaccttgagagaacgcatagctatgactttcccctacgattcccatgtcaagttcccagcatttatttggcaaacttggtccaatgatgaaggtcccgagcgtgttcaagatataaagggcatgtgggaaagcaagaatccgggctttgcgcacgaagtgttgaaccatgacgtgataaacgcattggtacaccactacttctactccataccggaaatcttggagacttacgaagctcttccctccatcatcttgaagatagattttttcaaatacttaatattattagttcatggaggtgtttatgctgacatcgacacgttccctgttcagccaattccaaactggattcctgaagagttgtctccatccgacattgggttgatagttggagttgaggaagacgctcaaagagctgactggagaaccaagtatatcagaagacttcagtttggtacttggattatacaagcaaaacctggtcaccctgttttgagggaaatcatttctagaattattgagaccactttacagagaaagagggacgaccaattgaacgtcaatttaaggaatgatttgaatattatgagttggacgggttctgggttgtggactgacactattttcacgtatttcaatgactttatgagaagtggtgtcagggagaaggttacatggaaattattccataacttgaatcaaccaaaattgttaagtgatgttttggtctttccaaaattctcctttaactgtccaaaccaaatcgataatgacgatccacacaagaaattctatttcattactcatttggcatctcaattttggaaaaatactccaaaggtggagcagaaatga

SEQ ID NO: 6259 - DNA, 1248 bp, Saccharomyces cerevisiae
atgtccggaataattgacgcatcttctgcattaagaaaaagaaagcatttgaaaagaggtataaccttcactgtgatgatcgtgggccagtccggatctggtagatcgacttttataaatactttgtgcggtcagcaagttgtagacacttcgacgacaatcttgttacccacagatacgtccacagaaatagacttacaattgagagaggagacggtcgaattagaagatgatgaaggtgtcaagattcaacttaatatcatcgatactccgggattcggtgattctctcgacaattctccatctttcgaaatcatttccgactacattcgccaccaatatgatgaaatcttattggaagaaagtcgtgtgagaagaaacccaagatttaaggacggcagagttcattgttgtctttacttaatcaacccaactggccacggtttaaaagagattgatgtggaattcatcagacagttgggatccttagttaacatcatccctgtgatcagcaaatcagattccttgacaagagatgaactgaaactgaataaaaaattgatcatggaggatatcgacagatggaacttgccaatttataatttccctttcgatgaagatgaaatatcagacgaagattacgaaaccaatatgtacctacgtacacttctaccttttgctattattggatccaatgaagtttacgaaatgggcggcgatgttgggacaattcgtggcagaaagtatccatggggcatactggacgtggaagattcatcgatctctgattttgttatcttaaggaatgcgttattgatctctcatttacatgacttgaaaaactacacacatgagatattatatgaaagatatagaaccgaggcattatcaggtgaatctgtcgcggcagaatccatacgtccaaatctgacaaaattgaatggttcgtcgtcatcgtccaccacaacaaggagaaacacaaatcccttcaagcaaagtaataatattaataacgatgttctcaacccagcatccgatatgcacgggcaaagcactggcgaaaataacgaaacctacatgacacgtgaggagcaaatacggttagaagaagagcgactaaaggcatttgaggagagagttcagcaagaactgctgttgaaaagacaagaactgttgcaaagagaaaaggaattaagagaaattgaagccaggttggaaaaagaggcgaaaatcaaacaggaagaatga

SEQ ID NO: 6260 - DNA, 1248 bp, Artificial Sequence
  Description of Artificial Sequence: Synthetic polynucleotide
atgtccggaataattgacgcatcttctgcattaagaaaaagaaagcatttgaaaagaggtataaccttcactgtgatgatcgtgggccagtccggatctggtagatctacttttataaatactttgtgcggtcagcaagttgtagacacttccacgacaatcttgttacccacagatacgtccacagaaatagacttacaattgagagaggagacggtcgaattagaagatgatgaaggtgtcaagattcaacttaatatcatcgatactccgggattcggtgattctctcgacaattctccatctttcgaaatcatttccgactacattcgccaccaatatgatgaaatcttattggaagaaagtcgtgtgagaagaaacccaagatttaaggacggcagagttcattgttgtctttacttaatcaacccaactggccacggtttaaaagagattgatgtggaattcatcagacagttgggatccttagttaacatcatccctgtgatcagcaaatctgattccttgacaagagatgaattgaaattgaataaaaaattgatcatggaggatatcgacagatggaacttgccaatttataatttccctttcgatgaagatgaaatatctgacgaagattacgaaaccaatatgtacttgcgtacacttttaccttttgctattattggatccaatgaagtttacgaaatgggcggcgatgttgggacaattcgtggcagaaagtatccatggggcatattggacgtggaagattcttctatctctgattttgttatcttaaggaatgcgttattgatctctcatttacatgacttgaaaaactacacacatgagatattatatgaaagatatagaaccgaggcattatctggtgaatctgtcgcggcagaatccatacgtccaaatttgacaaaattgaatggttcttcttcttcttccaccacaacaaggagaaacacaaatcccttcaagcaaagtaataatattaataacgatgttctcaacccagcatccgatatgcacgggcaaagcactggcgaaaataacgaaacctacatgacacgtgaggagcaaataagattagaagaagagagattaaaggcatttgaggagagagttcagcaagaattattattgaaaagacaagaattattgcaaagagaaaaggaattaagagaaattgaagccaggttggaaaaagaggcgaaaatcaaacaggaagaatga

SEQ ID NO: 6261 - DNA, 936 bp, Saccharomyces cerevisiae
atgtctgtgtctgctgctcctgctattccacagtactctgtctctgactacatgaaattcgccctagccggcgccatagggtgcgggtcgactcactccagtatggtcccgatcgatgtcgttaagacgagaatccaactggaacctaccgtgtacaacaagggtatggtcggctctttcaagcaaatcatcgccggagaaggtgctggtgcgttgttgaccgggtttggtcctactttgttgggttactctatccaaggtgccttcaagttcggtggttacgaagtgttcaagaagttcttcattgacaacttgggttacgataccgcctctcgctacaagaactctgtttacatgggttctgctgccatggccgaattcttggcagacattgccttgtgtcccctagaagccactagaatcagattggtctcccaaccacagttcgctaatggactcgtcggagggttttccagaattttgaaagaagaaggtatcggctctttctacagtgggttcactccaattttgttcaagcaaattccttacaacattgctaaattcttggtctttgaacgtgcctccgagttctactacgggttcgccggtccaaaagaaaaattgtcctctacttccactactttgttgaatttgctttccggtttgactgctggtttggccgctgccattgtttcccagccagcagacactctgttgtccaaggtcaacaagactaagaaggctcctggccaatccacagtcggtttgttggctcagttggccaaacagttaggatttttcggttcctttgctgggttgcctactcgtttggtcatggttggtaccttgacctccttgcaatttggtatttatggttctttaaagagcactttgggttgcccaccaaccattgaaattggtggtggtggtcattag

SEQ ID NO: 6262 - DNA, 936 bp, Artificial Sequence
  Description of Artificial Sequence: Synthetic polynucleotide
atgtctgtgtctgctgctcctgctattccacagtactctgtctctgactacatgaaattcgccttggccggcgccatagggtgcgggtccactcactccagtatggtcccgatcgatgtcgttaagacgagaatccaattggaacctaccgtgtacaacaagggtatggtcggctctttcaagcaaatcatcgccggagaaggtgctggtgcgttgttgaccgggtttggtcctactttgttgggttactctatccaaggtgccttcaagttcggtggttacgaagtgttcaagaagttcttcattgacaacttgggttacgataccgcctctcgctacaagaactctgtttacatgggttctgctgccatggccgaattcttggcagacattgccttgtgtcccttagaagccactagaatcagattggtctcccaaccacagttcgctaatggactcgtcggagggttttccagaattttgaaagaagaaggtatcggctctttctacagtgggttcactccaattttgttcaagcaaattccttacaacattgctaaattcttggtctttgaacgtgcctccgagttctactacgggttcgccggtccaaaagaaaaattgtcctctacttccactactttgttgaatttgctttccggtttgactgctggtttggccgctgccattgtttcccagccagcagacactttattgtccaaggtcaacaagactaagaaggctcctggccaatccacagtcggtttgttggctcagttggccaaacagttaggatttttcggttcctttgctgggttgcctactcgtttggtcatggttggtaccttgacctccttgcaatttggtatttatggttctttaaagagcactttgggttgcccaccaaccattgaaattggtggtggtggtcattga

SEQ ID NO: 6263 - DNA, 1362 bp, Saccharomyces cerevisiae
atgaacaacacttccataaccggaccacaagtactacatagaacaaaaatgagaccactaccagtgctagaaaaatactgtatctcgccacatcatgggtttttggacgaccggttacccttgaccagactgagcagcaagaaatatatgaaatgggaagaaatcgttgctgacctgccctctcttttgcaagaggataacaaggtgcggagcgtcatcgatgggctggatgtcttggacttggatgagacgatcttgggcgacgtcagggagctcagaagagcatattccattttggggtttatggcgcacgcttatatttgggccagcggaactccccgggatgtattaccggagtgtattgcaaggccactgttggagacagcacatattttgggtgtgccaccgttagctacgtactcctcgttggtgttatggaacttcaaagtgaccgacgagtgcaagaaaacggaaaccgggtgtttggacttggaaaatattacaacgataaacacatttacgggaaccgttgacgaaagttggttttatctggtcagcgtgcggtttgaaaaaatcggcagcgcttgtttaaaccatgggttgcagatattgagagccattagaagcggtgataaaggagacgctaacgtgatagacgggttggagggcttggctgcaacgatcgaaaggttatcgaaagccttgatggaaatggagcttaagtgtgaacccaatgtattttatttcaagataagaccatttttggccgggtggacgaatatgtcgcatatggggttaccacagggtgttaggtatggagcggaaggacagtatcggatcttttctggcgggtccaatgcgcaaagctcgttgatacagacactggacatccttttgggtgtgaaacacactgcgaatgctgcgcattcttcccaaggagacagcaagatcaattatctggacgaaatgaaaaaatacatgccaagagaacatcgtgaatttctttaccatttggaatcggtatgtaatattcgcgaatacgtttctcgtaacgcttctaaccgtgcattgcaagaggcctatggacgttgcatttccatgctgaaaatatttagagataaccacattcaaattgttaccaagtacattattttgccctccaattcaaagcaacacggctccaataagccgaacgtactaagtccaatcgagcccaataccaaagcaagtggttgtttagggcataaagttgcctcatctaagactatcggaaccggtggtacaagattaatgcccttcttaaagcagtgcagggacgagactgtcgccactgcggacattaaaaatgaagataaaaattga

SEQ ID NO: 6264 - DNA, 1362 bp, Artificial Sequence
  Description of Artificial Sequence: Synthetic polynucleotide
atgaacaacacttccataaccggaccacaagtattacatagaacaaaaatgagaccattaccagtgttggaaaaatactgtatctctccacatcatgggtttttggacgacagattacccttgaccagattgagcagcaagaaatatatgaaatgggaagaaatcgttgctgacttgccctctcttttgcaagaggataacaaggtgagaagcgtcatcgatgggttagatgtcttggacttggatgagacgatcttgggcgacgtcagggagctcagaagagcatattccattttggggtttatggcgcacgcttatatttgggccagcggaactcccagagatgtattaccggagtgtattgcaaggccattgttggagacagcacatattttgggtgtgccaccgttagctacgtactcctctttggtgttatggaacttcaaagtgaccgacgagtgcaagaaaacggaaaccgggtgtttggacttggaaaatattacaacgataaacacatttacgggaaccgttgacgaaagttggttttatttagtcagcgtgagatttgaaaaaatcggcagcgcttgtttaaaccatgggttgcagatattgagagccattagaagcggtgataaaggagacgctaacgtgatagacgggttggagggcttggctgcaacgatcgaaaggttatccaaagccttgatggaaatggagcttaagtgtgaacccaatgtattttatttcaagataagaccatttttggccgggtggacgaatatgtcccatatggggttaccacagggtgttaggtatggagcggaaggacagtatagaatcttttctggcgggtccaatgcgcaaagctctttgatacagacattagacatccttttgggtgtgaaacacactgcgaatgctgcgcattcttcccaaggagacagcaagatcaattatttggacgaaatgaaaaaatacatgccaagagaacatcgtgaatttctttaccatttggaaagtgtatgtaatattcgcgaatacgtttctcgtaacgcttctaaccgtgcattgcaagaggcctatggacgttgcatttccatgttgaaaatatttagagataaccacattcaaattgttaccaagtacattattttgccctccaattctaagcaacacggctccaataagccgaacgtattgagtccaatcgagcccaataccaaagcaagtggttgtttagggcataaagttgcctcttctaagactatcggaaccggtggtacaagattaatgcccttcttaaagcagtgcagggacgagactgtcgccactgcggacattaaaaatgaagataaaaattga

SEQ ID NO: 6265 - DNA, 330 bp, Saccharomyces cerevisiae
atgaagataaaaattgacattatacattttattaacgcccccccttttttttttttttttgttgatgcagaagcctcgcaacttaaagcttttcagttgtttcttcttggtcatattttttatacatatatacatacatatatttgtgattttgatgagttcgagactaaagaccttgcagagggaaagataggcgatttgatttccagactggagttctgttcaaatgcgataattgaatccttgccaaatacattccaatcctttgtcccggtcaaattcagtacggacaagcttcttgaagaatcgaaaggtcttctcgatgtttga

SEQ ID NO: 6266 - DNA, 330 bp, Artificial Sequence
  Description of Artificial Sequence: Synthetic polynucleotide
atgaagataaaaattgacattatacattttattaacgcccccccttttttttttttttttgttgatgcagaagcctctcaacttaaagcttttcagttgtttcttcttggtcatattttttatacatatatacatacatatatttgtgattttgatgagttcgagactaaagaccttgcagagggaaagataggcgatttgatttccagattggagttctgttctaatgcgataattgaatccttgccaaatacattccaatcctttgtcccggtcaaattcagtacggacaagcttcttgaagaaagtaaaggtcttctcgatgtttga

SEQ ID NO: 6267 - DNA, 1185 bp, Saccharomyces cerevisiae
atgataagcccaagggtgaatactcgagtttggcagagatcaatttctcttttgagcccacaagcggccaagacggagagtaatgtcgtaactaaagaaaggacatatatcgagaacttaagcaaggatattgcgacttcccgtttcaggctagtagacgaaaatggtaaaattgcatctatcactgttcaaccagatattccaatttgtatcaaaaaggattgcctagtttccattcacaatttgaaccatttatccctttcctataaatggctgaatttttggtcaaacctgattaaatttcgttcattcaaatcttcattgtttcatagaattattggatcctccgttttagaaattctggctgccccaaactttcaaacatcgagaagacctttcgattcttcaagaagcttgtccgtactgaatttgaccgggacaaaggattggaatgtatttggcaaggattcaattatcgcatttgaacagaactccagtctggaaatcaaatcgcctatctttccctctgcaaggtctttagtctcgaactcatcaaaatcacaactaccacggaaatttcaaattctgaatgggagaggaaatgtgttagtatgtggaggtgggttggtatattcaattgagttaattgatgaaagcgacaaaattctggttaattccagaaacattttggccatcaacggccaaagtcaattggatattgcaaattcagtggagagacaagagttacacgtggaaggcgcgtacgtcggagattcaagtaatgatacggtggcacctaaattcattaagaaccaaacgctaaaatctgcttacggacatactgttcaatttttcaaaagaatgcgcagttggatccgtaaccagtacgaaaaaagatacatttatggtgtcgactcgtactttatgaagattaaaggtccaagaacaatattgattcaaacgcatgaaatgacaacatccaaagataatattctaactaaactaacgtccaagggccacgttaagaagagcaacgtgaatgataacggtgtcaatttagagaaacaagtggctaacgatgtaaattcaaagatcattgagcttgccaacagaccctcactgtttattgcgaccgtctcgcaagatgggagggttgattttcaaagtacttcgaagttcacataa

SEQ ID NO: 6268 - DNA, 1185 bp, Artificial Sequence
  Description of Artificial Sequence: Synthetic polynucleotide
atgataagcccaagggtgaatactcgtgtttggcagagatctatttctcttttgagcccacaagcggccaagacggagagtaatgtcgtaactaaagaaaggacatatatcgagaacttaagcaaggatattgcgacttcccgtttcaggttagtagacgaaaatggtaaaattgcatctatcactgttcaaccagatattccaatttgtatcaaaaaggattgcttagtttccattcacaatttgaaccatttatccctttcctataaatggttaaatttttggagcaacttgattaaatttcgttctttcaaatcttctttgtttcatagaattattggatcctccgttttagaaattttggctgccccaaactttcaaacatctagaagacctttcgattcttctagaagcttgtccgtattgaatttgaccgggacaaaggattggaatgtatttggcaaggattctattatcgcatttgaacagaactccagtttagaaatcaaatctcctatctttccctctgcaaggtctttagtctccaactcttctaaatctcaattaccaagaaaatttcaaattttgaatgggagaggaaatgtgttagtatgtggaggtgggttggtatattctattgagttaattgatgaaagcgacaaaattttggttaattccagaaacattttggccatcaacggccaaagtcaattggatattgcaaattctgtggagagacaagagttacacgtggaaggcgcgtacgtcggagattctagtaatgatacggtggcacctaaattcattaagaaccaaacgttgaaatctgcttacggacatactgttcaatttttcaaaagaatgcgcagttggatccgtaaccagtacgaaaaaagatacatttatggtgtcgactcttactttatgaagattaaaggtccaagaacaatattgattcaaacgcatgaaatgacaacatccaaagataatattttgactaaattaacgtccaagggccacgttaagaagagcaacgtgaatgataacggtgtcaatttagagaaacaagtggctaacgatgtaaattctaagatcattgagcttgccaacagaccctctttatttattgcgaccgtctctcaagatgggagggttgattttcaaagtacttctaagttcacatga

SEQ ID NO: 6269 - DNA, 342 bp, Saccharomyces cerevisiae
atgactgatgagctgaaaagttatgaagcattgaaagcggaactaaaaaagtccctccaagatagaagagagcaagaagatacctttgacaacttacaacaagagatatatgataaagagaccgagtatttctcacacaatagtaataacaaccattcaggtcatgggggagcccatgggtcaaaatcacactattctggtaacatcataaaagggtttgataccttctccaagtcacaccacagccatgcagattctgcattcaataacaatgatcgtattttttcattaagtagtgctacgtacgtgaagcagcagcatggccaatcacaaaacgactaa

SEQ ID NO: 6270 - DNA, 342 bp, Artificial Sequence
  Description of Artificial Sequence: Synthetic polynucleotide
atgactgatgagttgaaaagttatgaagcattgaaagcggaattgaaaaagtccctccaagatagaagagagcaagaagatacctttgacaacttacaacaagagatatatgataaagagaccgagtatttctctcacaatagtaataacaaccattctggtcatgggggagcccatgggtctaaatctcactattctggtaacatcataaaagggtttgataccttctccaagtctcaccacagccatgcagattctgcattcaataacaatgatcgtattttttctttaagtagtgctacgtacgtgaagcagcagcatggccaatctcaaaacgactga

SEQ ID NO: 6271 - DNA, 930 bp, Saccharomyces cerevisiae
atgtcagaagaccagcgtgtaattagtcaaccaattgaattacataagctgtcgattgtcgataaacactcccaaggacagcagcaacagccgcatcaaaaacaacatgaagtgcagcctgaatcaaaatcaccaagggttacgacacctttaaagcccaaaagacttgctatacctatatcaagtccgcaaagatctacgacaaatcagtcacccgtgagcgaccacgcaagtccgatttcaacagaccaagatttaatatataaattagctgcaaaacacagagaaatcaatgaacttagtttcaaattagaggtcgcccaaaaagaattaaaacaattagagttacagttcaaagatacactgccccgaaatggacaacagaaattaggtaaccagaacccaagtgaatacctctctacttttaccaaaagaattcaacagacatttgtggacgtaaataattcaccaaatatgctcaagggaaaaaagagtataaacgatttttttagtaagcccaataataatgttaatagcaacataaataacactctacccaatcgtaaaccgaaccctccgcctaatcggtcacaacgtatgcaaaatattgctccaagccgtagttcagaatcaactccaacatcgggtcctcccttgctacccccaaggaatactatgaagaatgctaataccacggcaactgctggggagaacacaccattcttacaaagaatacttaacaaattcaatcaaatgaatatggaagaggacgaattcgatgaccttttggaaaagaggaaaagtaagaaagatcactattacataaaagaaaatttgggttacgaatacgatgaagtacgcagtgaagacgaggatgatgaagagtttgaacccatgggtgacatacccgttcatttatttaaaaggtag

SEQ ID NO: 6272 - DNA, 930 bp, Artificial Sequence
  Description of Artificial Sequence: Synthetic polynucleotide
atgtctgaagaccagcgtgtaattagtcaaccaattgaattacataagctttctattgtcgataaacactcccaaggacagcagcaacagccgcatcaaaaacaacatgaagtgcagcctgaaagtaaatctccaagggttacgacacctttaaagcccaaaagacttgctatacctatatctagtccgcaaagatctacgacaaatcagtctcccgtgagcgaccacgcaagtccgatttctacagaccaagatttaatatataaattagctgcaaaacacagagaaatcaatgaacttagtttcaaattagaggtcgcccaaaaagaattaaaacaattagagttacagttcaaagatacattacccagaaatggacaacagaaattaggtaaccagaacccaagtgaatacctctctacttttaccaaaagaattcaacagacatttgtggacgtaaataattctccaaatatgctcaagggaaaaaagagtataaacgatttttttagtaagcccaataataatgttaatagcaacataaataacactttacccaatcgtaaaccgaaccctccgcctaatagatctcaacgtatgcaaaatattgctccaagccgtagttctgaatctactccaacatctggtcctcccttgttgcccccaaggaatactatgaagaatgctaataccacggcaactgctggggagaacacaccattcttacaaagaatacttaacaaattcaatcaaatgaatatggaagaggacgaattcgatgaccttttggaaaagaggaaaagtaagaaagatcactattacataaaagaaaatttgggttacgaatacgatgaagtacgcagtgaagacgaggatgatgaagagtttgaacccatgggtgacatacccgttcatttatttaaaaggtga

SEQ ID NO: 6273 - DNA, 1272 bp, Saccharomyces cerevisiae
atggatgttgatataggatgttattttgaagagaaacgctatgacgacaaactgttagacttcatcagatatgacgttaaaacacctaaaaagactaaatatatactacaaaggcctacggcgacagatgaagagagtgtacgattacaaaggttttaccaattaggagtagatctaaaattgaagtattccaagcggaggtcattgaagaagcaagggcggatcaagaatgctactgaggaattgctgcgattagccaatgaacagttgaaacttttcaacagaatagtagaaagagaaaccaattggataatttatccgctgtgggtaatggctaaacaattaattcgtctggcaaacgaatctagtgaacttaataaagactcaattgaggaatgtggacgcactatccatagaagctttactatatgcctcaatgataggaacccaagattgaatgaaaataaaaaaatcgggtgttatatgtttgctaatctagagttttccatctaccatcggttaagtaataaagatatgattaaaaatttagtgaaagtcctcgagagcagagtgaacgcccgggatataccaccgttgaataaaagcctggcaatggaacataagtctcaagtggtgttgtataattattatctaggtcaatactacggatgtctggaaaacgatcacgaacgcgggttcttccatttaaatgaagcattattgcaatgtccaatgctatatgtggaatctaccggcaagttcgtcttacagggccaaatggaaaagataatgatactgctggttccgcttgctcttttaactaaaaggttgtaccctcactgggatcatccagtaatcgccggagtaattactaggagtaagcgcttaagtcaagtttatccgacattagtgcgtagcgtaatctcagggaacctgtcactgtacgaggctaccgcagcaagccatgaaagatttttcctttcgcaaggattgcatgtcgtcatcacattacttcgagaggtggtcttcactcggttggtacaacgatgttggcaatgggggaatgatcggaaaagtatcatgcccttgaaaattcttctggcaacaaaacaacacgatagttctgccaatgaggacgaagaggagcagttggatgccctagaatgccgtctagcaagtgctatagcaagtgggcttttgcgtgcttatctttctcactccaaccgctgcatcgttttcagtaagaaggagccctttccccatagcaaatga

SEQ ID NO: 6274 - DNA, 1272 bp, Artificial Sequence
  Description of Artificial Sequence: Synthetic polynucleotide
atggatgttgatataggatgttattttgaagagaaacgctatgacgacaaattattagacttcatcagatatgacgttaaaacacctaaaaagactaaatatatattgcaaaggcctacggcgacagatgaagagagtgtaaggttacaaaggttttaccaattaggagtagatttgaaattgaagtattccaagagaaggtctttgaagaagcaagggagaatcaagaatgctactgaggaattgttaagattagccaatgaacagttgaaacttttcaacagaatagtagaaagagaaaccaattggataatttatccgttatgggtaatggctaaacaattaattcgtttagcaaacgaatctagtgaacttaataaagacagtattgaggaatgtggacgcactatccatagaagctttactatatgcctcaatgataggaacccaagattgaatgaaaataaaaaaatcgggtgttatatgtttgctaatttggagttttccatctaccatagattaagtaataaagatatgattaaaaatttagtgaaagtcctcgagagcagagtgaacgccagagatataccaccgttgaataaaagcttagcaatggaacataagtctcaagtggtgttgtataattattatttgggtcaatactacggatgtttagaaaacgatcacgaacgcgggttcttccatttaaatgaagcattattgcaatgtccaatgctttatgtggaatctaccggcaagttcgtcttacagggccaaatggaaaagataatgatattattggttccgcttgctcttttaactaaaaggttgtaccctcactgggatcatccagtaatcgccggagtaattactaggagtaagcgcttaagtcaagtttatccgacattagtgcgtagcgtaatctctgggaacttatctttgtacgaggctaccgcagcaagccatgaaagatttttcctttctcaaggattgcatgtcgtcatcacattacttcgtgaggtggtcttcactagattggtacaaagatgttggcaatgggggaatgataggaaaagtatcatgcccttgaaaattcttttagcaacaaaacaacacgatagttctgccaatgaggacgaagaggagcagttggatgccttggaatgccgtttagcaagtgctatagcaagtgggcttttgcgtgcttatctttctcactccaaccgctgcatcgttttcagtaagaaggagccctttccccatagcaaatga

SEQ ID NO: 6275 - DNA, 318 bp, Saccharomyces cerevisiae
atggaacatccagcatatacattgagtcttttgactacagccggtggccttatgggatactaccgtaagggctccattccatctctagtatctggcttagtattcggtagtgtatatgggattgccggttacttgctacatatgaatagagatggtgggctcgaaatggcattgggtgcatcgaccttactacttggtgctggtgtcataagaggcatgccttccaggttcactaaacctgtccctgtcgttttgacagctttgggtgggctcggcagttactactattataacaaatacaaggaattttacccttag

SEQ ID NO: 6276 - DNA, 318 bp, Artificial Sequence
  Description of Artificial Sequence: Synthetic polynucleotide
atggaacatccagcatatacattgagtcttttgactacagccggtggccttatgggatactaccgtaagggctccattccatctttagtatctggcttagtattcggtagtgtatatgggattgccggttacttgttgcatatgaatagagatggtgggctcgaaatggcattgggtgcatctaccttattacttggtgctggtgtcataagaggcatgccttccaggttcactaaacctgtccctgtcgttttgacagctttgggtgggctcggcagttactactattataacaaatacaaggaattttacccttga

SEQ ID NO: 6277 - DNA, 333 bp, Saccharomyces cerevisiae
atgacatcagttcaaaactctccacgcttacaacaacctcaggaacagcaacagcaacagcaacagctttccttaaagataaaacaattgaagttaaaaagaatcaacgaacttaacaataaactgaggaaagaactcagccgtgaaagaattactgcttcaaatgcatgtcttacaataataaactatacctcgaatacaaaagattatacattaccagaactatggggctaccccgtagcaggatcaaatcattttatagagggtttgaaaaatgctcaaaaaaatagccaaatgtcaaactcaaatagtgtttgttgtacgcttatgtaa

SEQ ID NO: 6278 - DNA, 333 bp, Artificial Sequence
  Description of Artificial Sequence: Synthetic polynucleotide
atgacatctgttcaaaactctccacgcttacaacaacctcaggaacagcaacagcaacagcaacagctttccttaaagataaaacaattgaagttaaaaagaatcaacgaacttaacaataaattgaggaaagaactcagccgtgaaagaattactgcttctaatgcatgtcttacaataataaactatacctctaatacaaaagattatacattaccagaattatggggctaccccgtagcaggaagtaatcattttatagagggtttgaaaaatgctcaaaaaaatagccaaatgtccaacagtaatagtgtttgttgtacgcttatgtga

SEQ ID NO: 6279 - DNA, 879 bp, Saccharomyces cerevisiae
atgttgaaggatttggttagagaaaagcttttgacaattatgaataccaaagcgtatactcaatttaatccagaacaattactgcaactagaaaatgaaatgaaaatttacatgaaaagcggagactctgcactaacagaaggaaactatttcttcttgatggaaatgcttttctatgttttggtgtaccgaaaccaagacgttgatgcgcaagttgtttataatacattaagagatcgtcttggtgaaaattcgtataaaatggtaatcatgaaagccactttattgcagataaacggaaatgataaaggcgctattgaatatctggaaaatttgttgaatgatgatctggagtatgaaacggacttcgttacttatgtctctattgcaaagaaattgatagctatcaagacaacttccaagaacttgagccaagaaagtgttcttaaagaagtggtagctcttacagataaattcccgcttgatgcagaattgtggtggtatgccagcgagatttatttcgaaatgggccaatttgaaaaagcctgttattgtttggaacaggtcctatgtattacaccattcaattacgcttgttttggtaggctaagtgagactctgtattatgaggctctacgtagcaagaaacaaaccaagaccgagctcttggaaaaggcattaaagaatgctttgaggagcgttgaacttagcgaactatacctaaaagggtgggcattggttaacatcatttctcgcgaactgggacgtaataaacaaaatgacttgatcaaactatctgcatcgaagctaaaggaaatttctgcgaagtctaacaataaagataagattaccgctgaattaattttgaataagatatga

SEQ ID NO: 6280 - DNA, 879 bp, Artificial Sequence
  Description of Artificial Sequence: Synthetic polynucleotide
atgttgaaggatttggttagagaaaagcttttgacaattatgaataccaaagcgtatactcaatttaatccagaacaattattacaattggaaaatgaaatgaaaatttacatgaaaagcggagactctgcattaacagaaggaaactatttcttcttgatggaaatgcttttctatgttttggtgtacagaaaccaagacgttgatgcgcaagttgtttataatacattaagagatcgtcttggtgaaaattcttataaaatggtaatcatgaaagccactttattgcagataaacggaaatgataaaggcgctattgaatatttggaaaatttgttgaatgatgatttagagtatgaaacggacttcgttacttatgtctctattgcaaagaaattgatagctatcaagacaacttccaagaacttgagccaagaaagtgttcttaaagaagtggtagctcttacagataaattcccgcttgatgcagaattgtggtggtatgccagcgagatttatttcgaaatgggccaatttgaaaaagcctgttattgtttggaacaggtcttatgtattacaccattcaattacgcttgttttggtaggttgagtgagactttatattatgaggctttgcgtagcaagaaacaaaccaagaccgagctcttggaaaaggcattaaagaatgctttgaggagcgttgaacttagcgaattatacttgaaagggtgggcattggttaacatcatttctcgcgaattaggacgtaataaacaaaatgacttgatcaaattatctgcatccaagttgaaggaaatttctgcgaagtctaacaataaagataagattaccgctgaattaattttgaataagatatga

SEQ ID NO: 6281 - DNA, 2865 bp, Saccharomyces cerevisiae
atggatggtcaaatagataaaatggagaagcgatatagcatgaccaaactggagaataggttaaggactttccaagatggtgttgcacttgaaaaaaaaaagttaaagtggagttttaaagttattccgtatcaggcaatggccaagcttggattttactttgatccagtgatcgatcctaagacatctaaactgaaaaaagactctgtaagatgttgctattgtcatcgtcaaacatacaatgtgagagactgcagatccaaaagaaaagatgttcttgagactctaagcaatataatgaggcaacatctgactgttactgataacaaacaagtttgcctccttatttacttgcgcaataagctattgacggactatagcttccatatgggggtttcggactggaaaaatgacaagtacttcagcaatccagatgatgaaaacgtgataaacctaagaaaatttacttttcaagataactggcctcacagtggttctcaaaatgaacatccgctgggtatagaaaagatggtgaatgcaggactcatgcgatacgactccagcatagaaggcttaggcgatccaagcatggataaaacacttatgaacgatacctgttattgtatttattgcaaacagttgttacaaggttggtcaataaatgacgatccgatgagccgacattataaggtttctcaaaatgggaactgttatttctttcagacacgtaatcgatttgagagaataaaaaatgacaatgacagtatcacgaaaaattgcgaagtctctccaactttaggcgaaaatgggaaaagagaagtgatcaacacgaaaaccgcttctcaaaggcagtgtcctttatttgagtcacctccatctagtactggtcctcaacttgacgattataatgagaagacagatatatctgttattcaacataatataagtgtgcttgatggagcacaaggcgaaaatgtaaaacgtaatagtgtggaagaaaaagaacaaatcaacatggaaaatggaagcactacattagaagagggcaatataaatcgtgatgttttagcagataagaaagaagttatttcgacaccaactgcaaaagaaatcaaacgtccaaatgtccagctaacccaatcatcgtcacctataaaaaagaaaagaaagtttaagagaatatcgcctagaaaaatctttgatgaggaagatagcgaacactcccttaataataattctgccaacggagacaacaaagataaggatttggttatagattttacaagccatatcataaaaaatagagatgtagggagaaagaatgctattttagatgacagcacagatgaattcagtttcagtaaccaaggacataacacatttgacatacctataccaacctcatcacatttgctcaaaggtatagattcagataatgacaatgttatacgagaagatgatactggcataaatacagacacaaaaggagcgtcttctaaacacgaaaaattttctgttaattctgaagaagatttaaatttcagtgaagtgaaactcacaggtagagacagtagtactaatattcttataagaacgcaaattgtagatcagaatttgggtgatatcgacagagataaggtccccaatggtggatccccagaagttccaaagacacatgagttaattagagataactctgaaaagagggaagcacaaaacggggaatttcgacatcaaaaagattcaactgtacggcaatctccagatatattacattctaataaaagtggtgataattccagtaatattaccgcaatacccaaagaggaacaaaggagaggcaatagcaaaacatccagcattcccgctgatattcatcctaaaccaaggaaaaacttgcaagaaccaagaagcctatcaataagtggaaaagttgttccaacagaaagaaaattagataacatcaatatagatctaaatttttcggcgtccgatttttcaccatcatcacaatctgagcaatcatcaaaaagctcaagcgttatttcaacgccggtagcgagccctaaaattaatctcacacgcagtttgcatgcagtcaaagagctttctggcctcaaaaaagaaactgacgatggtaagtattttactaataagcaggaaactataaaaatactggaagatgtgtctgtgaagaatgagaccccaaataatgaaatgttactttttgagactggaaccccgatcgcatctcaagaaaacaagtcaagaaaattatttgatgaagagttttctgggaaggaattggatatacctatagattcatcaactgtagaaataaaaaaggttattaaacccgaatttgagccagtcccatcagttgcaaggaatttggtgtctggaacctcttcatatccacggaattcacgtttagaagaacaaagaaaggaaacaagcacaagtttggctgataattctaagaaaggaagttcatttaatgagggcaacaacgaaaaagaaccgaatgcagcagaatggtttaaaattgatgaaaatagacaccttgtaaaaaattacttccatgatttgttaaaatatataaataataatgatgctacgctagctaatgacaaagacggtgatctggcttttttgattaagcaaatgcctgcagaagagttggacatgacattcaacaattgggtgaacctaaaagtgcaatctattaagcgcgaatttatagatgactgtgataagaaattggacatattgagaagggattactatactgccacaaattttattgaaactttggaagatgacaatcaattgatcgatattgctaagaaaatgggcattttatag

SEQ ID NO: 6282 - DNA, 2865 bp, Artificial Sequence
  Description of Artificial Sequence: Synthetic polynucleotide
atggatggtcaaatagataaaatggagaagagatatagcatgaccaaattagagaataggttaaggactttccaagatggtgttgcacttgaaaaaaaaaagttaaagtggagttttaaagttattccgtatcaggcaatggccaagcttggattttactttgatccagtgatcgatcctaagacatctaaattgaaaaaagactctgtaagatgttgctattgtcatcgtcaaacatacaatgtgagagactgcagatccaaaagaaaagatgttcttgagactttaagcaatataatgaggcaacatttgactgttactgataacaaacaagtttgcctccttatttacttgcgcaataagttgttgacggactatagcttccatatgggggtttctgactggaaaaatgacaagtacttcagcaatccagatgatgaaaacgtgataaacttgagaaaatttacttttcaagataactggcctcacagtggttctcaaaatgaacatccgttgggtatagaaaagatggtgaatgcaggactcatgagatacgactccagcatagaaggcttaggcgatccaagcatggataaaacacttatgaacgatacctgttattgtatttattgcaaacagttgttacaaggttggtccataaatgacgatccgatgagcaggcattataaggtttctcaaaatgggaactgttatttctttcagacacgtaatagatttgagagaataaaaaatgacaatgacagtatcacgaaaaattgcgaagtctctccaactttaggcgaaaatgggaaaagagaagtgatcaacacgaaaaccgcttctcaaaggcagtgtcctttatttgagtctcctccatctagtactggtcctcaacttgacgattataatgagaagacagatatatctgttattcaacataatataagtgtgcttgatggagcacaaggcgaaaatgtaaaacgtaatagtgtggaagaaaaagaacaaatcaacatggaaaatggaagcactacattagaagagggcaatataaatcgtgatgttttagcagataagaaagaagttatttctacaccaactgcaaaagaaatcaaacgtccaaatgtccagttgacccaatcttcttctcctataaaaaagaaaagaaagtttaagagaatatctcctagaaaaatctttgatgaggaagatagcgaacactcccttaataataattctgccaacggagacaacaaagataaggatttggttatagattttacaagccatatcataaaaaatagagatgtagggagaaagaatgctattttagatgacagcacagatgaattcagtttcagtaaccaaggacataacacatttgacatacctataccaacctcttctcatttgctcaaaggtatagattctgataatgacaatgttataagagaagatgatactggcataaatacagacacaaaaggagcgtcttctaaacacgaaaaattttctgttaattctgaagaagatttaaatttcagtgaagtgaaactcacaggtagagacagtagtactaatattcttataagaacgcaaattgtagatcagaatttgggtgatatcgacagagataaggtccccaatggtggatccccagaagttccaaagacacatgagttaattagagataactctgaaaagagggaagcacaaaacggggaatttagacatcaaaaagattctactgtaaggcaatctccagatatattacattctaataaaagtggtgataattccagtaatattaccgcaatacccaaagaggaacaaaggagaggcaatagcaaaacatccagcattcccgctgatattcatcctaaaccaaggaaaaacttgcaagaaccaagaagcttatctataagtggaaaagttgttccaacagaaagaaaattagataacatcaatatagatttgaatttttctgcgtccgatttttctccatcttctcaatctgagcaatcttctaaaagcagcagcgttatttctacgccggtagcgagccctaaaattaatctcacacgcagtttgcatgcagtcaaagagctttctggcctcaaaaaagaaactgacgatggtaagtattttactaataagcaggaaactataaaaatattggaagatgtgtctgtgaagaatgagaccccaaataatgaaatgttactttttgagactggaaccccgatcgcatctcaagaaaacaagtctagaaaattatttgatgaagagttttctgggaaggaattggatatacctatagattcttctactgtagaaataaaaaaggttattaaacccgaatttgagccagtcccatctgttgcaaggaatttggtgtctggaacctcttcttatccaagaaattctcgtttagaagaacaaagaaaggaaacaagcacaagtttggctgataattctaagaaaggaagttcttttaatgagggcaacaacgaaaaagaaccgaatgcagcagaatggtttaaaattgatgaaaatagacaccttgtaaaaaattacttccatgatttgttaaaatatataaataataatgatgctacgttggctaatgacaaagacggtgatttggcttttttgattaagcaaatgcctgcagaagagttggacatgacattcaacaattgggtgaacttgaaagtgcaatctattaagcgcgaatttatagatgactgtgataagaaattggacatattgagaagggattactatactgccacaaattttattgaaactttggaagatgacaatcaattgatcgatattgctaagaaaatgggcattttatga

SEQ ID NO: 6283 - DNA, 3456 bp, Saccharomyces cerevisiae
atggatcaggataacaacaaccacaatgacagcaataggctgcacccacctgatatacatccaaatttgggccctcaattgtggctgaatagtagcggtgattttgacgacaacaacaacaacaacaacaacaacaacaataataatagcacaagaccacaaatgccatcacgaactagagaaacggcaacttcggaaagaaatgcaagtgaggttagggatgcaacgctaaataatatctttaggttcgatagtattcaacgggaaacgcttttgccaaccaacaacggacaaccgctaaatcaaaacttttcgctgacatttcaaccacaacagcaaacaaatgcgctgaacgggattgacataaacactgtgaacacaaaccttatgaatggtgtcaatgttcaaatagatcaacttaatcgattgttaccgaacctaccagaggaagaacggaagcaaatccacgaattcaagctaatagtgggcaaaaaaatccaagagtttctggttgttatagagaaacgtagaaaaaaaatactgaacgaaattgagctagacaaccttaaactaaaggagctacgtattgataactccccacaagcaattagttatttgcataaattacaaagaatgaggcttagggcgctagagacagaaaacatggaaattagaaatttaaggctaaaaatattaacaattatagaagagtacaaaaagtcattatatgcatactgccattccaagctaagaggtcaacaagtggaaaatccaacagataatttcatcatttggataaactccatagatactactgaatcatctgacttgaaagaagggctacaagatctttcgagatattcaaggcagttcataaataatgtgctttcgaatccatcaaatcaaaacatatgtacgagtgtcacccgaagatcacctgtgtttgccctaaacatgctaccctcggaaatattacacttaatattagataaacttaaccaaaaatatgatattgtaaaattccttaccgtttccaaactctgggctgaaataattgtgaagatactttattacagaccgcacatcaacaaaaagagtcaattagacttgtttttaaggactatgaagttaacttctgaagaaactgtattcaactatcgtttaatgatcaaaagattaaatttttcatttgttggtgactacatgcacgatacagagcttaactattttgtcggatgtaagaatttggagcgactaactttagtattttgcaagcatataaccagtgttccaatatcggctgttttgagaggatgtaaatttctccaaagtgtggatatcactggaataagagacgtttccgatgacgtatttgataccttagcgacatattgtcccagagtacagggcttttatgttcctcaggcaaggaatgtaacattcgattcactgcggaatttcatagtccattccccgatgttgaaaagaataaaaatcacagcaaacaataacatgaatgacgaattagtagaactattagccaacaaatgccctttgcttgtagaggtcgatataacattaagtccaaatgtcactgattctagtttgttaaaactcctcactaggttagttcagctgagggaattcagaataactcataatacgaatattacggataatcttttccaggagctttctaaagtagttgacgatatgccctctttaagattgattgatctttctggatgtgaaaatattacagataaaactatagaaagtatagtcaatttagcccctaaattacgtaatgtttttctaggcaagtgtagccgaattacagatgcatcgttgttccaattatcgaagctgggcaaaaacttgcaaacagtgcattttgggcactgtttcaatataactgataacggggtaagagcactctttcattcatgtacaagaatacagtatgtggactttgcgtgctgtacgaatttaaccaatagaactctttatgaactagcagacttaccaaaattaaagagaattggccttgtcaaatgtacgcaaatgactgacgagggtttgttgaatatggtttccttgcgaggccgaaatgatactttagaaagggtacatttatcttactgttctaatttaacaatatatccgatatatgagcttctaatgtcttgcccaaggctctcacatttgtctttgactgctgttccgtcatttttacgccccgatataacgatgtattgcaggcctgcaccctcagactttagtgaaaatcaacgtcaaatattctgcgtattttcagggaaaggtgttcataaacttcgccattatttagtaaatttaacgtcgcccgcttttggaccacatgtcgatgtaaatgatgttttgacaaaatatattagatccaagaatttgatatttaacggtgaaacacttgaagatgctcttaggagaatcataactgatttaaatcaagattccgctgcaattatagctgctacaggattaaatcaaatcaacggtctaaataacgattttcttttccagaatatcaattttgaacgaatagatgaagtattcagttggtatctcaatacttttgatggcattaggatgagctcggaggaagttaactcactattattgcaagtaaacaagacgttttgtgaagatccatttagtgatgtggacgatgatcaagattatgtcgtagcacctggtgtaaaccgggaaattaacagtgaaatgtgtcatattgttagaaaattccatgagttaaatgatcatattgatgatttcgaggtgaatgttgctagtttggtaagagttcagtttcagtttactggttttttacttcatgaaatgactcaaacctatatgcaaatgattgaattaaacagacaaatttgtttagtacaaaaaacggttcaggaatcgggcaacatagattaccaaaaagggcttttaatatggcgacttttattcattgacaaattcattatggtggttcagaagtacaagctctccaccgttgttttgagactatatttaaaagataacataacattgttaaccagacaaagagaactattaatagcccaccaaagatcagcatggaataacaataatgacaatgacgccaaccggaacgccaacaacatagtgaatattgtatcggatgctggggcaaacgatacaagtaacaatgaaactaacaatggtaatgatgacaatgaaacagaaaatccaaatttctggcgtcagtttggcaatagaatgcaaatatcacctgaccagatgaggaatctccaaatgggacttcgtaatcagaacatggttaggaacaataacaacaacacaattgacgaatcaatgcctgacactgccattgattctcaaatggatgaagcatcaggaacgcccgatgaagatatgttataa

SEQ ID NO: 6284 - DNA, 3456 bp, Artificial Sequence
  Description of Artificial Sequence: Synthetic polynucleotide
atggatcaggataacaacaaccacaatgacagcaataggttacacccacctgatatacatccaaatttgggccctcaattgtggttaaatagtagcggtgattttgacgacaacaacaacaacaacaacaacaacaacaataataatagcacaagaccacaaatgccaagtagaactagagaaacggcaacttctgaaagaaatgcaagtgaggttagggatgcaacgttgaataatatctttaggttcgatagtattcaaagagaaacgcttttgccaaccaacaacggacaaccgttaaatcaaaacttttctttaacatttcaaccacaacagcaaacaaatgcgttgaacgggattgacataaacactgtgaacacaaaccttatgaatggtgtcaatgttcaaatagatcaacttaatagattgttaccgaacttaccagaggaagaaagaaagcaaatccacgaattcaagttaatagtgggcaaaaaaatccaagagtttttggttgttatagagaaacgtagaaaaaaaatattaaacgaaattgagttggacaaccttaaattgaaggagttgcgtattgataactccccacaagcaattagttatttgcataaattacaaagaatgaggcttagggcgctcgagacagaaaacatggaaattagaaatttaaggttgaaaatattaacaattatagaagagtacaaaaagtctttatatgcatactgccattccaagttgagaggtcaacaagtggaaaatccaacagataatttcatcatttggataaactccatagatactactgaaagctctgacttgaaagaagggttgcaagatctttctagatattctaggcagttcataaataatgtgctttctaatccatccaatcaaaacatatgtacgagtgtcaccagaagatctcctgtgtttgccttgaacatgttgcccagtgaaatattacacttaatattagataaacttaaccaaaaatatgatattgtaaaattccttaccgtttccaaactctgggctgaaataattgtgaagatactttattacagaccgcacatcaacaaaaagagtcaattagacttgtttttaaggactatgaagttaacttctgaagaaactgtattcaactatcgtttaatgatcaaaagattaaatttttcttttgttggtgactacatgcacgatacagagcttaactattttgtcggatgtaagaatttggagagattaactttagtattttgcaagcatataaccagtgttccaatatctgctgttttgagaggatgtaaatttctccaaagtgtggatatcactggaataagagacgtttccgatgacgtatttgataccttagcgacatattgtcccagagtacagggcttttatgttcctcaggcaaggaatgtaacattcgattctttaagaaatttcatagtccattccccgatgttgaaaagaataaaaatcacagcaaacaataacatgaatgacgaattagtagaattattagccaacaaatgccctttgcttgtagaggtcgatataacattaagtccaaatgtcactgattctagtttgttaaaactcctcactaggttagttcagttgagggaattcagaataactcataatacgaatattacggataatcttttccaggagctttctaaagtagttgacgatatgccctctttaagattgattgatctttctggatgtgaaaatattacagataaaactatagaaagtatagtcaatttagcccctaaattacgtaatgtttttttgggcaagtgtagcagaattacagatgcaagtttgttccaattatccaagttgggcaaaaacttgcaaacagtgcattttgggcactgtttcaatataactgataacggggtaagagcactctttcattcttgtacaagaatacagtatgtggactttgcgtgctgtacgaatttaaccaatagaactctttatgaattggcagacttaccaaaattaaagagaattggccttgtcaaatgtacgcaaatgactgacgagggtttgttgaatatggtttccttgagaggcagaaatgatactttagaaagggtacatttatcttactgttctaatttaacaatatatccgatatatgagcttttgatgtcttgcccaaggctctctcatttgtctttgactgctgttccgtcctttttacgccccgatataacgatgtattgcaggcctgcaccctctgactttagtgaaaatcaacgtcaaatattctgcgtattttctgggaaaggtgttcataaacttcgccattatttagtaaatttaacgtctcccgcttttggaccacatgtcgatgtaaatgatgttttgacaaaatatattagatccaagaatttgatatttaacggtgaaacacttgaagatgctcttaggagaatcataactgatttaaatcaagattccgctgcaattatagctgctacaggattaaatcaaatcaacggtttgaataacgattttcttttccagaatatcaattttgaaagaatagatgaagtattcagttggtatctcaatacttttgatggcattaggatgagctctgaggaagttaactctttattattgcaagtaaacaagacgttttgtgaagatccatttagtgatgtggacgatgatcaagattatgtcgtagcacctggtgtaaacagagaaattaacagtgaaatgtgtcatattgttagaaaattccatgagttaaatgatcatattgatgatttcgaggtgaatgttgctagtttggtaagagttcagtttcagtttactggttttttacttcatgaaatgactcaaacctatatgcaaatgattgaattaaacagacaaatttgtttagtacaaaaaacggttcaggaaagtggcaacatagattaccaaaaagggcttttaatatggagacttttattcattgacaaattcattatggtggttcagaagtacaagctctccaccgttgttttgagattatatttaaaagataacataacattgttaaccagacaaagagaattattaatagcccaccaaagaagtgcatggaataacaataatgacaatgacgccaacagaaacgccaacaacatagtgaatattgtatctgatgctggggcaaacgatacaagtaacaatgaaactaacaatggtaatgatgacaatgaaacagaaaatccaaatttctggcgtcagtttggcaatagaatgcaaatatctcctgaccagatgaggaatctccaaatgggacttcgtaatcagaacatggttaggaacaataacaacaacacaattgacgaaagtatgcctgacactgccattgattctcaaatggatgaagcatctggaacgcccgatgaagatatgttatga

SEQ ID NO: 6285 - DNA, 3276 bp, Saccharomyces cerevisiae
atggataaaagtaagcagatgaacatcaacaacttgtccaacatccccgaggtgattgaccctggcatcactatcccaatatacgaggaagaatacgagaacaatggagagagtaatagccaactgcagcaacaaccccaaaagcttggatcatataggtcgcgagcaggaaaattttctaatacattgagtaaccttttgccctccatcagtgccaagttacaccattcgaagaaaaatagtcacggaaagaacggtgctgagttttcctctagcaacaacagttcccaatctacggtggcgtccaagacaccaagggccagcccttccaggagtaagatgatggaaagttctatagacggtgtaactatggatagacctggcagtttaacccctcctcaagacatggaaaaattggtgcattttcctgactcgagtaataacttcttaattcctgccccccgaggatctagcgactcgtttaacttgccacatcagatctcgaggacgagaaacaacacaatgtcttctcagataacttccatttcatcaatcgcccccaagcctcgtacttcgagcggaatatggtcttcaaatgctagtgcgaacgatcccatgcaacagcaccttttgcaacaattgcaacctacgacaagcaataatacaactaattcaaacacgctcaacgattattcgacaaaaactgcatattttgacaacatggtatctactagtggaagccaaatggcagataataagatgaatacgaataacttggctatcccaaactctgtttggtcaaataccagacagagatctcaatccaacgcgtctagcatatataccgacgctccactgtacgaacagcccgctcgtgccagtatttcatcgcactatactattccaacacaggaatctccattgattgctgatgaaatagatccgcaatccatcaattgggtaacaatggaccccactgtaccatcaataaaccaaatatcgaaccttttacccacaaataccatttctatttccaacgtttttcccctacagcaccagcagccacaattaaataacgcgataaacttaacaagtacttccttggcaaccctatgctccaaatatggtgaagtcatatctgctaggactttaaggaatttaaacatggctttagttgaattttcttccgtggaaagtgccgtaaaagccttagatagtttacagggcaaggaggtatctatgattggagcaccaagtaaaatttcatttgccaaaatcttacctatgcatcaacaacccccacaatttcttctcaattctcaaggcttgccattgggtttagaaaacaacaatttgcaaccacagcctttattacaggagcagttattcaatggagctgtgactttccaacaacaaggaaatgtttctatacctgtatttaaccagcaatcacaacaatcgcagcaccaaaaccatagttcgggttctgctggttttagcaatgttctccatggttataataataacaatagtatgcacggaaacaacaataactcagcaaatgaaaaagaacaatgtcctttccctctaccaccacctaacgttaacgaaaaggaagatttgttaagagagatcatcgaactttttgaagcaaattccgatgaataccaaatcaattcgttgataaaaaaatcgctgaatcacaaaggcacttccgatacgcaaaactttggacctttaccagaaccattgtctggcagggagttcgatccaccaaaattacgcgaattgcgaaaatcaatcgattcaaacgcattttccgacttagagatcgaacagttggctattgcaatgcttgacgaattgcccgaattgagttcagattacttgggtaacactatcgttcaaaaattatttgaacattcatctgatattattaaagacatcatgctgaggaaaacaagcaaatacctaacctctatgggtgttcacaaaaacggaacatgggcttgtcagaagatgatcactatggcgcatactccgagacaaatcatgcaagtgacgcaaggggtcaaggactactgtactccattaatcaatgaccaattcggaaattatgtcatacagtgcgttttgaaatttggattcccctggaaccagtttatttttgaaagtataatagctaatttttgggttattgttcagaatagatatggtgcaagggcagtcagagcttgtttagaggcacatgacattgtaactcctgaacaatcaatagttttgagtgcaatgatcgttacatatgctgaatatctaagcactaatagcaatggtgcgttgttagtaacgtggtttttagatactagtgttttacccaacagacattctatcttggcaccaagattgacgaaaagaattgtagagttatgtggccacagattggcttctttgactattttgaaggtcttgaattacagaggggatgataacgctagaaaaatcatcctagattccctatttggaaacgtgaacgcacacgattcttcgccaccaaaggaattaacaaagcttttatgtgaaacaaattatggcccaacctttgtccataaagttttagcaatgccattattagaagatgacttaagagcccacatcattaaacaagtcagaaaagtattgacggattctactcaaatccaaccaagccgccgtttattggaagaagtcgggttggcatcaccctctagtactcataacaagacaaaacaacaacagcagcagcatcataacagcagcatttcgcacatgttcgccactcctgatacttctggacaacacatgagaggtctttctgtttctagcgttaaaagtggtggatctaaacataccacaatgaacaccacgactacaaatggttcttctgcctctacattatccccgggccaaccattgaatgccaattctaattcttcaatgggctattttagttatcctggcgtcttccctgtcagcggcttttcaggcaacgccagtaatggatatgctatgaacaacgatgacttaagttcccagtttgatatgctaaactttaataacggaacccgtttatcgttgccacaactgagcctaactaaccataacaacactactatggaattagtaaacaatgttggctcctcacaacctcatacgaacaacaacaacaataataacaacacgaactataacgacgataacaccgtttttgaaactctgactttacactctgcaaactga

SEQ ID NO: 6286 - DNA, 3276 bp, Artificial Sequence
  Description of Artificial Sequence: Synthetic polynucleotide
atggataaaagtaagcagatgaacatcaacaacttgtccaacatccccgaggtgattgaccctggcatcactatcccaatatacgaggaagaatacgagaacaatggagagagtaatagccaattgcagcaacaaccccaaaagcttggatcctataggtctagagcaggaaaattttctaatacattgagtaaccttttgccctccatcagtgccaagttacaccattctaagaaaaatagtcacggaaagaacggtgctgagttttcctctagcaacaacagttcccaatctacggtggcgtccaagacaccaagggccagcccttccaggagtaagatgatggaaagttctatagacggtgtaactatggatagacctggcagtttaacccctcctcaagacatggaaaaattggtgcattttcctgacagcagtaataacttcttaattcctgcccccagaggatctagcgactcttttaacttgccacatcagatctccaggacgagaaacaacacaatgtcttctcagataacttccatttcttctatcgcccccaagcctcgtacttccagcggaatatggtcttccaatgctagtgcgaacgatcccatgcaacagcaccttttgcaacaattgcaacctacgacaagcaataatacaactaatagcaacacgctcaacgattattctacaaaaactgcatattttgacaacatggtatctactagtggaagccaaatggcagataataagatgaatacgaataacttggctatcccaaactctgtttggtctaataccagacagagatctcaatccaacgcgtctagcatatataccgacgctccattgtacgaacagcccgctcgtgccagtatttcttctcactatactattccaacacaggaatctccattgattgctgatgaaatagatccgcaatccatcaattgggtaacaatggaccccactgtaccaagtataaaccaaataagcaaccttttacccacaaataccatttctatttccaacgtttttcccttgcagcaccagcagccacaattaaataacgcgataaacttaacaagtacttccttggcaaccttgtgctccaaatatggtgaagtcatatctgctaggactttaaggaatttaaacatggctttagttgaattttcttccgtggaaagtgccgtaaaagccttagatagtttacagggcaaggaggtatctatgattggagcaccaagtaaaatttcctttgccaaaatcttacctatgcatcaacaacccccacaatttcttctcaattctcaaggcttgccattgggtttagaaaacaacaatttgcaaccacagcctttattacaggagcagttattcaatggagctgtgactttccaacaacaaggaaatgtttctatacctgtatttaaccagcaatctcaacaatctcagcaccaaaaccatagttctggttctgctggttttagcaatgttctccatggttataataataacaatagtatgcacggaaacaacaataactctgcaaatgaaaaagaacaatgtcctttccctttaccaccacctaacgttaacgaaaaggaagatttgttaagagagatcatcgaactttttgaagcaaattccgatgaataccaaatcaattctttgataaaaaaatctttgaatcacaaaggcacttccgatacgcaaaactttggacctttaccagaaccattgtctggcagggagttcgatccaccaaaattacgcgaattgagaaaatctatcgattccaacgcattttccgacttagagatcgaacagttggctattgcaatgcttgacgaattgcccgaattgagttctgattacttgggtaacactatcgttcaaaaattatttgaacattcttctgatattattaaagacatcatgttaaggaaaacaagcaaatacttgacctctatgggtgttcacaaaaacggaacatgggcttgtcagaagatgatcactatggcgcatactccgagacaaatcatgcaagtgacgcaaggggtcaaggactactgtactccattaatcaatgaccaattcggaaattatgtcatacagtgcgttttgaaatttggattcccctggaaccagtttatttttgaaagtataatagctaatttttgggttattgttcagaatagatatggtgcaagggcagtcagagcttgtttagaggcacatgacattgtaactcctgaacaaagtatagttttgagtgcaatgatcgttacatatgctgaatatttgagcactaatagcaatggtgcgttgttagtaacgtggtttttagatactagtgttttacccaacagacattctatcttggcaccaagattgacgaaaagaattgtagagttatgtggccacagattggcttctttgactattttgaaggtcttgaattacagaggggatgataacgctagaaaaatcatcttagattccttatttggaaacgtgaacgcacacgattcttctccaccaaaggaattaacaaagcttttatgtgaaacaaattatggcccaacctttgtccataaagttttagcaatgccattattagaagatgacttaagagcccacatcattaaacaagtcagaaaagtattgacggattctactcaaatccaaccaagccgccgtttattggaagaagtcgggttggcatctccctctagtactcataacaagacaaaacaacaacagcagcagcatcataacagcagcatttctcacatgttcgccactcctgatacttctggacaacacatgagaggtctttctgtttctagcgttaaaagtggtggatctaaacataccacaatgaacaccacgactacaaatggttcttctgcctctacattatccccgggccaaccattgaatgccaattctaattcttctatgggctattttagttatcctggcgtcttccctgtcagcggcttttctggcaacgccagtaatggatatgctatgaacaacgatgacttaagttcccagtttgatatgttgaactttaataacggaacccgtttatctttgccacaattgagcttaactaaccataacaacactactatggaattagtaaacaatgttggctcctctcaacctcatacgaacaacaacaacaataataacaacacgaactataacgacgataacaccgtttttgaaactttaactttacactctgcaaactga

SEQ ID NO: 6287 - DNA, 4344 bp, Saccharomyces cerevisiae
atgcacgacgcagagagtaccgtagattctctactgaaggagatagacaatgaaatggaacaaacaaagtctaatatcacgcaaaatggttccgaagatacaccacacaactggaagcttccgctgcaggaaataggcgatgataccatggaaatgttggtcaaacacaatactaggtcgaatgctacagaaaatagtagaggtcgatcaccttctaagatgtctaccatctcaaatgaaagccttaatttgggtctcttacgtgtaaattcggaacttgaagagtctccagccgctgtgcatcaggaacggattaaaaactctgttgccaacggggcacttggtcatgccaattctcccaaagtgcttaataatctgaaaaatatggcacaagatatagataaactagcccgtgatgaggaaaagcccgtaaaacttagcagctctccccttaaatttactttgaaatcgactcaaccactgctgtcgtatccagaatcgcccatccacagaagttctattgaaattgaaacgaattacgatgacgaagatgaagaggaagaagatgcatacacatgtttaacacagtcacctcaaatattacactctccatcaaggattccaataactaacgcagtgtcgattaataagctcaatcttgatttcacattgaatcccaacgaatcagacaaaagtctagtatctgacacctcagttgatagcacaggacgagaactagatacgaaaacaatcccagaattaccattttgtatgtcatcaacgcccgaaatgacgccagtcgatgagaaatgtaaccttccaagtaaattgttgaacactagtaacaattcacattctgattcaagatcgccaacagcctctgtggaggatttaaacatttcaacgaatctgccgggtgctgattccagccaaaataatccagtcactactgatgcggatgcgcttattgaaaacgatgttgtgcgggaccttcaacagaatatggaacatatcgatgatgcttttgatgagaaaaaagttcttgacgaaggttgcagcaatgagcccgttacctttttgggtgaaaatgacactaggtccatagtatactctaataaagggaccaatgctaatgttcaagaattttcacaggaagattctctagcgcacagtgaacccaaattcaaagatcttaatgctacatcggatgacgtatggaatgaagacaaagaaacagacgcaaatatttcaacatctacaaagtcagaggaaagctacattgctgactataaagtaacgagacaagaagactgggataccaaaaagcttcatcaagaaagtgaacatgcaaatgaacaaccggcaataattcctcaaaaggattcttcagaagaaacattcactgaactaaataatgaaagtgaattccaaaggaactttaaggatggagaggaataccgaatcgttcaacacgaggagagcctgtatggacaaagaacaaagagtccagaagaaaatataataaatggcagtgaaattggtgtcgaccatggagaggccgctgaagtgaatgaaccattggcaaaaacttctgcagaagaacatgatctttcatcatcatgtgaagatcagtcggtgagcgaggctcgtaataaagacagaattgaagagaaggaagttgaaactaaggatgagaacattgaaaccgagaaagatgaaagtgagtaccataaagtcgaagaaaatgaagagccggaacacgttcccctcttaccacccctgccaagatgggaagaaattcaattcaacgagccatttatagatgaaaatgatacctccaatgattccatcgatttaaccagatccatgaaaccatcagattacatttctatatggcatatccaagaagaggaaatcaaatccaattcaccagaatccattgccaactcccaattttcacaacaatcctcgattaccactgcatctacggtcgattctaagaaggataatggatcaacttcgttcaaattcaaacctagaatagtgagcaggagtaggatttacaatccaaaaagcagagtatcctcattgaattactacgataatgaagattacattttaagcaacagtgaatggaatgcactcgaccctatgagaagaaatacactcatctctaaaaggattcaagataacataagaactcaaaagggtcacgctccacttattaggccaagcatcatgaaacttaatggcgaagattctggttttcagaatcatttcttggaggtagaacaaccgcaagaacacgaaaatatcccattaagtacgcacctaagcgaacaagatatcacaacaaatgtaggcctcgatgaacagaaattaccaaccaatacccaggacgaagctgaaatttccattcgggaaatagagagtgcgggtgatatcacttttaataggggcgatttactatctttatcctttgatgaggaattgggtcaggattttgctaattttctagacgctttggatcatgactccacatctttcaatcatgggccggatgattcatccagttttcaaagagacagttcaaagaaaagcttcaattctctttgggaaagcagttacgaactaaaaccgccaccttccataagaaagcaacctattgcccccgacgtcctgcaaaaattattagaatcagatactaaagatgacgcagatttggaaaaaattagagaagagcgtataactgaaccaaggactggtttggggattggaatgctgaaaacaccagttaaggatgtttcaattgcgctagctgcaagcattaaaggatatgaggcaagtttcagcgatactgactctcgtccagagggcatgaataatagtgatgccatcactttgaacatgttcgacgatttcgaagaagataaaatgaccccttccactccagttcgtagtataagtccaataaaacggcatgttagcagtcctttcaaggtcgtgaaagctggaaacaaacaagagaataatgaaataaacattaaggctgaagaggaaatagagccaatgacgcagcaagaaaccgatggtttgaaacaagatattcctccactgctagcgcagacaaaagataacgtcgaagcaaaagaagaaacgataactcaacttgaagaaccacaagacgttgaacaagaatttccggatatgggaacactttatttaagtataaaggctatttccacgcttgcattatatggaactaagagtcatagagcaacatatgctattgtttttgacaatggggaaaatgtcgttcagacaccctgggagtcgcttccgtatgacggtaacatcaggatcaataaggaatttgaattgcccatagattttaaaggaaaagccgaaacatcctccgcttcttctgaaagagatagctacaaaaaatgtgttatcacattaaaatgtaaatatgaaaaacctcgacatgaattggtcgaaatagtagacaaggtgccggtgggtaagagtttttttggaaagacaaagtataaatttgaaaagaagtatgtacagaaaaaacctaaacaagatgagtgggattatctatttgcacaagacggttcatttgctcgttgtgaaattgaaattaatgaagagtttttgaaaaacgtggcatttaataccagtcatatgcattacaatatgattaacaagtggagtagaatcgcagacaaaattcacggctcaaaaaggctgtacgagttaccacgcaaggcgcctcacaaagtggcttcgttggatgtggaagcatgtttcttagaaagaacttctgcctttgaacaatttcccaaacaattttcattggtcaataagattgtttccaaatacaagttgcaacaaaatatctataaagaagggtatttattgcaggatggtggtgatctgaaaggaaagatagaaaacaggtttttcaaactgcacggctcgcaactttctggttatcatgaaatctctagaaaggctaagatcgatattaatctgttgaaagtcacgaaagtcctacgtaatgaagacatccaggcggataatggagggcaaaggaattttacagattgggtactctttaatgaatgcttccagctagtatttgacgatggtgaaagaattactttcaacgcggaatgctctaatgaggaaaaaagtgattggtacaataagctccaggaagttgttgagttgaatgttttccatcaaccctgggtgaaaaagtattgtgaaaagttagctgaggaggaaaagactcgaacaaccggtcataatttgaagcaagattttaattag

SEQ ID NO: 6288 - DNA, 4344 bp, Artificial Sequence
  Description of Artificial Sequence: Synthetic polynucleotide
atgcacgacgcagagagtaccgtagattctttattgaaggagatagacaatgaaatggaacaaacaaagtctaatatcacgcaaaatggttccgaagatacaccacacaactggaagcttccgttgcaggaaataggcgatgataccatggaaatgttggtcaaacacaatactaggtctaatgctacagaaaatagtagaggtagatctccttctaagatgtctaccatctctaatgaaagccttaatttgggtctcttacgtgtaaattctgaacttgaagagtctccagccgctgtgcatcaggaaagaattaaaaactctgttgccaacggggcacttggtcatgccaattctcccaaagtgcttaataatttgaaaaatatggcacaagatatagataaattggcccgtgatgaggaaaagcccgtaaaacttagcagctctccccttaaatttactttgaaatctactcaaccattattatcttatccagaaagtcccatccacagaagttctattgaaattgaaacgaattacgatgacgaagatgaagaggaagaagatgcatacacatgtttaacacagtctcctcaaatattacactctccatctaggattccaataactaacgcagtgtccattaataagctcaatcttgatttcacattgaatcccaacgaaagtgacaaaagtttagtatctgacacctctgttgatagcacaggaagagaattagatacgaaaacaatcccagaattaccattttgtatgtcttctacgcccgaaatgacgccagtcgatgagaaatgtaaccttccaagtaaattgttgaacactagtaacaattctcattctgattccagatctccaacagcctctgtggaggatttaaacatttctacgaatttaccgggtgctgattccagccaaaataatccagtcactactgatgcggatgcgcttattgaaaacgatgttgtgagagaccttcaacagaatatggaacatatcgatgatgcttttgatgagaaaaaagttcttgacgaaggttgcagcaatgagcccgttacctttttgggtgaaaatgacactaggtccatagtatactctaataaagggaccaatgctaatgttcaagaattttcccaggaagattctttagcgcacagtgaacccaaattcaaagatcttaatgctacatctgatgacgtatggaatgaagacaaagaaacagacgcaaatatttctacatctacaaagagtgaggaaagctacattgctgactataaagtaacgagacaagaagactgggataccaaaaagcttcatcaagaaagtgaacatgcaaatgaacaaccggcaataattcctcaaaaggattcttctgaagaaacattcactgaattgaataatgaaagtgaattccaaaggaactttaaggatggagaggaatacagaatcgttcaacacgaggagagcttgtatggacaaagaacaaagagtccagaagaaaatataataaatggcagtgaaattggtgtcgaccatggagaggccgctgaagtgaatgaaccattggcaaaaacttctgcagaagaacatgatctttcttcttcttgtgaagatcagtctgtgagcgaggctcgtaataaagacagaattgaagagaaggaagttgaaactaaggatgagaacattgaaaccgagaaagatgaaagtgagtaccataaagtcgaagaaaatgaagagccggaacacgttcccctcttaccacccttaccaagatgggaagaaattcaattcaacgagccatttatagatgaaaatgatacctccaatgattccatcgatttaaccagatccatgaaaccaagtgattacatttctatatggcatatccaagaagaggaaatcaaatccaattctccagaatccattgccaactcccaattttctcaacaatccagtattaccactgcatctacggtcgattctaagaaggataatggatctacttctttcaaattcaaacctagaatagtgagcaggagtaggatttacaatccaaaaagcagagtatcctctttgaattactacgataatgaagattacattttaagcaacagtgaatggaatgcactcgaccctatgagaagaaatacactcatctctaaaaggattcaagataacataagaactcaaaagggtcacgctccacttattaggccaagcatcatgaaacttaatggcgaagattctggttttcagaatcatttcttggaggtagaacaaccgcaagaacacgaaaatatcccattaagtacgcacttgagcgaacaagatatcacaacaaatgtaggcctcgatgaacagaaattaccaaccaatacccaggacgaagctgaaatttccattagagaaatagagagtgcgggtgatatcacttttaataggggcgatttattatctttatcctttgatgaggaattgggtcaggattttgctaattttttggacgctttggatcatgactccacatctttcaatcatgggccggatgattcttccagttttcaaagagacagttccaagaaaagcttcaattctctttgggaaagcagttacgaattgaaaccgccaccttccataagaaagcaacctattgcccccgacgtcttacaaaaattattagaaagtgatactaaagatgacgcagatttggaaaaaattagagaagagcgtataactgaaccaaggactggtttggggattggaatgttgaaaacaccagttaaggatgtttctattgcgttagctgcaagcattaaaggatatgaggcaagtttcagcgatactgactctcgtccagagggcatgaataatagtgatgccatcactttgaacatgttcgacgatttcgaagaagataaaatgaccccttccactccagttcgtagtataagtccaataaaaagacatgttagcagtcctttcaaggtcgtgaaagctggaaacaaacaagagaataatgaaataaacattaaggctgaagaggaaatagagccaatgacgcagcaagaaaccgatggtttgaaacaagatattcctccattgttagcgcagacaaaagataacgtcgaagcaaaagaagaaacgataactcaacttgaagaaccacaagacgttgaacaagaatttccggatatgggaacactttatttaagtataaaggctatttccacgcttgcattatatggaactaagagtcatagagcaacatatgctattgtttttgacaatggggaaaatgtcgttcagacaccctgggagtctcttccgtatgacggtaacatcaggatcaataaggaatttgaattgcccatagattttaaaggaaaagccgaaacatcctccgcttcttctgaaagagatagctacaaaaaatgtgttatcacattaaaatgtaaatatgaaaaacctagacatgaattggtcgaaatagtagacaaggtgccggtgggtaagagtttttttggaaagacaaagtataaatttgaaaagaagtatgtacagaaaaaacctaaacaagatgagtgggattatttatttgcacaagacggttcttttgctcgttgtgaaattgaaattaatgaagagtttttgaaaaacgtggcatttaataccagtcatatgcattacaatatgattaacaagtggagtagaatcgcagacaaaattcacggctctaaaaggttgtacgagttaccacgcaaggcgcctcacaaagtggcttctttggatgtggaagcatgtttcttagaaagaacttctgcctttgaacaatttcccaaacaattttctttggtcaataagattgtttccaaatacaagttgcaacaaaatatctataaagaagggtatttattgcaggatggtggtgatttgaaaggaaagatagaaaacaggtttttcaaattacacggctctcaactttctggttatcatgaaatctctagaaaggctaagatcgatattaatttattgaaagtcacgaaagtcttgcgtaatgaagacatccaggcggataatggagggcaaaggaattttacagattgggtactctttaatgaatgcttccagttggtatttgacgatggtgaaagaattactttcaacgcggaatgctctaatgaggaaaaaagtgattggtacaataagctccaggaagttgttgagttgaatgttttccatcaaccctgggtgaaaaagtattgtgaaaagttagctgaggaggaaaagactagaacaaccggtcataatttgaagcaagattttaattga

SEQ ID NO: 6289 - DNA, 984 bp, Saccharomyces cerevisiae
atgagctccagtgaagacgaagacgacaagttcttgtatggttccgactccgaattagcactaccttcatctaaacgatcaagagatgatgaagcagacgcaggtgcgtccagtaatcctgatatagttaaaaggcaaaaattcgactctcccgtggaagaaactccagctactgccagagatgatcgttctgatgaagatatctactctgactcctcagatgacgatagtgattctgacctagaggttatcataagtctgggtcctgaccctactaggttagatgcaaaactactcgattcttattctaccgcagcgacatcttcaagcaaagacgtaattagcgtagctacagatgtatccaataccatcacaaagacatcagatgaaagactaataacagaaggagaagcaaatcaaggtgtaacggcaacgaccgtaaaagctacagagagcgatggaaatgtaccgaaagcaatgactggttctatagacctggataaagagggaatctttgatagtgttggcataacgacaatagatcctgaagtattaaaggagaaaccctggaggcaaccgggggccaacttaagtgattatttcaattacggttttaacgaatttacctggatggagtatttacatagacaggaaaaactacaacaagattataatcctaggaggatcctaatgggcctattatccctccaacagcaagggaagttgaattccgcgaatgatacagactcaaacctcggtaatataattgataacaacaacaacgtaaacaatgcaaatatgtctaatctgaacagtaatatgggtaatagtatgtctggaacaccaaaccctcccgctccaccaatgcatccaagcttcccacccttacctatgtttggtagctttccaccattccccatgccaggtatgatgccacccatgaaccaacagcctaatcaaaatcaaaatcaaaattcgaaatga

SEQ ID NO: 6290 - DNA, 984 bp, Artificial Sequence
  Description of Artificial Sequence: Synthetic polynucleotide
atgagctccagtgaagacgaagacgacaagttcttgtatggttccgactccgaattagcattaccttcttctaaaagatctagagatgatgaagcagacgcaggtgcgtccagtaatcctgatatagttaaaaggcaaaaattcgactctcccgtggaagaaactccagctactgccagagatgatcgttctgatgaagatatctactctgactccagtgatgacgatagtgattctgacttggaggttatcataagtttgggtcctgaccctactaggttagatgcaaaattactcgattcttattctaccgcagcgacatcttctagcaaagacgtaattagcgtagctacagatgtatccaataccatcacaaagacatctgatgaaagattaataacagaaggagaagcaaatcaaggtgtaacggcaacgaccgtaaaagctacagagagcgatggaaatgtaccgaaagcaatgactggttctatagacttggataaagagggaatctttgatagtgttggcataacgacaatagatcctgaagtattaaaggagaaaccctggaggcaaccgggggccaacttaagtgattatttcaattacggttttaacgaatttacctggatggagtatttacatagacaggaaaaattacaacaagattataatcctaggaggatcttgatgggcttattatccctccaacagcaagggaagttgaattccgcgaatgatacagactccaacctcggtaatataattgataacaacaacaacgtaaacaatgcaaatatgtctaatttgaacagtaatatgggtaatagtatgtctggaacaccaaaccctcccgctccaccaatgcatccaagcttcccacccttacctatgtttggtagctttccaccattccccatgccaggtatgatgccacccatgaaccaacagcctaatcaaaatcaaaatcaaaattctaaatga

SEQ ID NO: 6291 - DNA, 1083 bp, Saccharomyces cerevisiae
atgcaagcggatatgcatggaaaacttcacgctgccttagaagatggtttcttcctctttccttttgaacagcaacaacaacctaacatttattatgacacaaccaccgatcaagaagaccgtccttgtttttcttttggatctacaatttcccctagaagttggcattttgaaaagtctgacaaaattgcctcatctcagctgcagaacttggttcatacacaaccaattcatttaattaatcctcaaatattgttcaatgaagagtttctgaatttggaaaatattgattctcagcctatttccaaggaaacgaaaactacgaaggactgcacaatggcaactggtcctgaaagaggaaaaaagagctctgaaagtaccagatcctcttcattatcatctcttttttctaatgatgaatccgcatctacgttccactcatcattcaataaccatgataactttcaaaagagcaacagaaatggagatgatatcgatattagtgacacaataaaatatgaaactaatacaaatgcacaaaaagatatcaaaatattccaagaaaattttgaattcaatgaattcccatacacacaagacttctacccatataccactaattatacctattcaaaacccacaaatattcatgaatcaataaattcaaaaaacacggattcatactcccaatatcaagatcagtttccaccacatactgataacatacattcctttaataatcgtcactatagcaaccataaaagcactaattgtaattactataataataccagcaataataacaacgcctccgataatgtatatgaggcagatccatttatagatgaacctcaggtgccctcctactattacccattagaaattgccttcgacgttgaaaaatcaccaccgccatcactacaaaaattaaattcaaaagagttagaattcctaaaaaagttgaactccaaactgtcaagatatgctgcggcttactccttcagcagttctaatgatcaagattattatgacaaggtcaggtttcaagaaatatcctacaagtttagtaaaacctattcttaa

SEQ ID NO: 6292 - DNA, 1083 bp, Artificial Sequence
  Description of Artificial Sequence: Synthetic polynucleotide
atgcaagcggatatgcatggaaaacttcacgctgccttagaagatggtttcttcctctttccttttgaacagcaacaacaacctaacatttattatgacacaaccaccgatcaagaagaccgtccttgtttttcttttggatctacaatttcccctagaagttggcattttgaaaagtctgacaaaattgcctcttctcagttacagaacttggttcatacacaaccaattcatttaattaatcctcaaatattgttcaatgaagagtttttgaatttggaaaatattgattctcagcctatttccaaggaaacgaaaactacgaaggactgcacaatggcaactggtcctgaaagaggaaaaaagagctctgaaagtaccagatcctcttctttatcttctcttttttctaatgatgaatccgcatctacgttccactcttctttcaataaccatgataactttcaaaagagcaacagaaatggagatgatatcgatattagtgacacaataaaatatgaaactaatacaaatgcacaaaaagatatcaaaatattccaagaaaattttgaattcaatgaattcccatacacacaagacttctacccatataccactaattatacctattctaaacccacaaatattcatgaaagtataaattctaaaaacacggattcttactcccaatatcaagatcagtttccaccacatactgataacatacattcctttaataatcgtcactatagcaaccataaaagcactaattgtaattactataataataccagcaataataacaacgcctccgataatgtatatgaggcagatccatttatagatgaacctcaggtgccctcctactattacccattagaaattgccttcgacgttgaaaaatctccaccgccatctttacaaaaattaaattctaaagagttagaattcttgaaaaagttgaactccaaattatctagatatgctgcggcttactccttcagcagttctaatgatcaagattattatgacaaggtcaggtttcaagaaatatcctacaagtttagtaaaacctattcttga

SEQ ID NO: 6293 - DNA, 279 bp, Saccharomyces cerevisiae
atggctaagagaacaaagaaggtcggtatcacaggtaaatacggtgtccgttatggttcatcattgagaagacaagttaagaagcttgaaattcaacaacatgccagatatgactgttccttctgtggtaagaagactgttaagagaggtgcagctggtatttggacttgttcctgttgtaagaagaccgttgccggtggtgcttatactgtttctactgcagctgccgctactgttagatctaccatcagaagattaagagaaatggttgaagcttaa

SEQ ID NO: 6294 - DNA, 279 bp, Artificial Sequence
  Description of Artificial Sequence: Synthetic polynucleotide
atggctaagagaacaaagaaggtcggtatcacaggtaaatacggtgtccgttatggttcttctttgagaagacaagttaagaagcttgaaattcaacaacatgccagatatgactgttccttctgtggtaagaagactgttaagagaggtgcagctggtatttggacttgttcctgttgtaagaagaccgttgccggtggtgcttatactgtttctactgcagctgccgctactgttagatctaccatcagaagattaagagaaatggttgaagcttga

SEQ ID NO: 6295 - DNA, 969 bp, Saccharomyces cerevisiae
atgtctcaaaaaaagaaggcttcccatccagccatcaatctcatggctggcggcacagcaggtttatttgaagcattgtgttgtcatcctttagatacaattaaggtgagaatgcaaatatacagacgggtagctggtattgaacatgttaaacccccaggatttattaaaactgggcgtaccatttatcaaaaagaaggtttcttggctctgtataaaggtctaggtgctgtggtcatcggtattatacctaagatggcaatccgtttctcgtcttatgaattctatagaaccttattggttaacaaggaatcaggaattgtgtctaccggtaatacttttgttgctggtgttggggctggtatcaccgaagctgttcttgtcgtgaacccgatggaagttgtaaagattaggttacaagctcagcatttaactccgagtgagccaaatgctggtcctaaatataacaacgccattcatgcagcctacactattgtcaaagaagaaggtgtttctgccttatatagaggcgtttccttaactgcggcaaggcaagcaactaatcagggtgctaacttcacagtttattctaaactgaaggagtttttgcagaattaccatcagatggatgtcctaccttcatgggaaacttcttgcataggtttgatttcgggtgctattgggccgttttccaacgctccattggatactataaagacaaggctgcaaaaggataagtccatctcattggaaaaacagtccggtatgaagaaaatcataaccattggtgctcaactactgaaagaagaaggttttagagctttgtacaagggtattaccccaagagtgatgagggtggctccaggtcaggctgtcacctttaccgtttatgaatatgtaagggagcatttagaaaatttgggtatattcaagaagaatgacacaccaaagccaaagccattaaagtag

SEQ ID NO: 6296 - DNA, 969 bp, Artificial Sequence
  Description of Artificial Sequence: Synthetic polynucleotide
atgtctcaaaaaaagaaggcttcccatccagccatcaatctcatggctggcggcacagcaggtttatttgaagcattgtgttgtcatcctttagatacaattaaggtgagaatgcaaatatacagaagagtagctggtattgaacatgttaaacccccaggatttattaaaactgggcgtaccatttatcaaaaagaaggtttcttggctttgtataaaggtttaggtgctgtggtcatcggtattatacctaagatggcaatccgtttcagttcttatgaattctatagaaccttattggttaacaaggaatctggaattgtgtctaccggtaatacttttgttgctggtgttggggctggtatcaccgaagctgttcttgtcgtgaacccgatggaagttgtaaagattaggttacaagctcagcatttaactccgagtgagccaaatgctggtcctaaatataacaacgccattcatgcagcctacactattgtcaaagaagaaggtgtttctgccttatatagaggcgtttccttaactgcggcaaggcaagcaactaatcagggtgctaacttcacagtttattctaaattgaaggagtttttgcagaattaccatcagatggatgtcttaccttcctgggaaacttcttgcataggtttgatttctggtgctattgggccgttttccaacgctccattggatactataaagacaaggttacaaaaggataagtccatctctttggaaaaacagtccggtatgaagaaaatcataaccattggtgctcaattattgaaagaagaaggttttagagctttgtacaagggtattaccccaagagtgatgagggtggctccaggtcaggctgtcacctttaccgtttatgaatatgtaagggagcatttagaaaatttgggtatattcaagaagaatgacacaccaaagccaaagccattaaagtga

SEQ ID NO: 6297 - DNA, 849 bp, Saccharomyces cerevisiae
atggttcctaagttttacaaactttcaaacggcttcaaaatcccaagcattgctttgggaacctacgatattccaagatcgcaaacagccgaaattgtgtatgaaggtgtcaagtgcggctaccgtcatttcgatactgctgttctttatggtaatgagaaggaagttggcgatggtatcattaaatggttgaacgaagatccagggaaccataaacgtgaggaaatcttctacactactaaattatggaattcgcaaaacggatataaaagagctaaagctgccattcggcaatgtttgaatgaagtctcgggcttgcaatacatcgatcttcttttgattcattcgccactggaaggttctaaattaaggttggaaacttggcgcgccatgcaagaagcggttgatgaaggattggttaagtctataggggtttccaactatgggaaaaagcacattgatgaacttttgaactggccagaactgaagcacaagccagtggtcaaccaaatcgagatatcaccttggattatgagacaagaattagcagattactgtaaatctaaaggtctcgtcgtcgaagcctttgccccattgtgtcacggctacaaaatgactaatccagatttattaaaagtttgcaaagaggtggaccgtaatccaggtcaagttttgattcgttggtctttacaacacggttatttaccactaccgaagactaaaactgtgaagaggttagaaggtaaccttgcagcctacaactttgaactgtcagacgaacagatgaaatttcttgatcatcctgatgcttatgagcctaccgattgggaatgcacagacgcgccataa

SEQ ID NO: 6298 - DNA, 849 bp, Artificial Sequence
  Description of Artificial Sequence: Synthetic polynucleotide
atggttcctaagttttacaaactttccaacggcttcaaaatcccaagcattgctttgggaacctacgatattccaagatctcaaacagccgaaattgtgtatgaaggtgtcaagtgcggctaccgtcatttcgatactgctgttctttatggtaatgagaaggaagttggcgatggtatcattaaatggttgaacgaagatccagggaaccataaacgtgaggaaatcttctacactactaaattatggaattctcaaaacggatataaaagagctaaagctgccattagacaatgtttgaatgaagtctccggcttgcaatacatcgatcttcttttgattcattctccattggaaggttctaaattaaggttggaaacttggcgcgccatgcaagaagcggttgatgaaggattggttaagtctataggggtttccaactatgggaaaaagcacattgatgaacttttgaactggccagaattgaagcacaagccagtggtcaaccaaatcgagatatctccttggattatgagacaagaattagcagattactgtaaatctaaaggtctcgtcgtcgaagcctttgccccattgtgtcacggctacaaaatgactaatccagatttattaaaagtttgcaaagaggtggaccgtaatccaggtcaagttttgattcgttggtctttacaacacggttatttaccattaccgaagactaaaactgtgaagaggttagaaggtaaccttgcagcctacaactttgaattaagtgacgaacagatgaaatttcttgatcatcctgatgcttatgagcctaccgattgggaatgcacagacgcgccatga

SEQ ID NO: 6299 - DNA, 519 bp, Saccharomyces cerevisiae
atgtcattggtgaattcgttaacacactacgaaattttaagaattccatcggatgcaacacaagatgaaatcaaaaaggcatataggaatcggttactaaatacgcaccccgataaactttctaaaagcatacatgatacggttagcaacgtcacaatcaataagattcaagatgcttataaaatactatcgaatataaaaactcgtcgcgaatatgataggttgatccttgaaaactataaacgccaaggatttcataattgtggtgatgggctggatgaattttccttagacgatttctcatttgatgaagataagctggagtttatgatgaattgtcctcgctgtcaatttgttggtggttttcattttagtgagagtttgttagatgaatgcattgataatgtagacgctatggaacggagtcattctggttatcaattattaacccaatgtagcgcatgcagcttatggctgaaggttaattttgacatcgaggaagagcaagaaggacaataa

SEQ ID NO: 6300 - DNA, 519 bp, Artificial Sequence
  Description of Artificial Sequence: Synthetic polynucleotide
atgtctttggtgaattctttaacacactacgaaattttaagaattccaagtgatgcaacacaagatgaaatcaaaaaggcatataggaatagattattgaatacgcaccccgataaactttctaaaagcatacatgatacggttagcaacgtcacaatcaataagattcaagatgcttataaaatattatccaatataaaaactcgtcgcgaatatgataggttgatccttgaaaactataaacgccaaggatttcataattgtggtgatgggttagatgaattttccttagacgatttctcctttgatgaagataagttggagtttatgatgaattgtcctcgctgtcaatttgttggtggttttcattttagtgagagtttgttagatgaatgcattgataatgtagacgctatggaaagaagtcattctggttatcaattattaacccaatgtagcgcatgcagcttatggttaaaggttaattttgacatcgaggaagagcaagaaggacaatga

SEQ ID NO: 6301 - DNA, 1971 bp, Saccharomyces cerevisiae
atgatggcaactccggctactgatcttatttccgataatgataaatataacaagcaatgtctttctgattcaagtgatagtggtagtgatgtaagctttttttccgtaaatgaaagcgaaggtgaattggatacaatggagaaagtggataccttgattggaggtgcaagagttataagcaataaagtagaaaaagacagcgatagtgaacaaaggggaagaaagaaggaaacaactgggcccaataactatcataatttagaagagaagcaagcgagtgccatttctcttgacgctgatgatgaagatctcgatgaaattatttcttattcgcatgacgggaactatgacagctctcataaaactttctccttttccttaccatttggtaatacaaatttccgatcaagttcaccattagccataattaaaactgtgcttcccaagactccagatgagttcatcaaaaagaatctaagaaagaatgagatcaagcaaaaactgaaaaaatcaacctccatttcttccttggaagagatagaattatttaaatacgaaaggggcattgataattcaaggttaagggctgttaaagaatctttggaaatggatgccttgaagaactccattaagcaaataacagcagacccattcgacaaaactcatgacggatattaccgttcgcgtttagaatctatatggaatgaattggaaggagatgtcgttataatgggtggatatcgaggtagtgtgctaagggatgctactactcataagcgaatttggatcccattaaaggcaggtttgaatatgacgaaagtcgatttattgatcggacctaatgacgaagatgaacttaaaactcagaaggagattgtccctgatggaatgctaacacatatagggcctgttgatatctctaagaggttgataaagaggctagacgcaaatcctaatttaaatgttcagcagtttggctatgattggagattatccttggacatatctgccaagcatttaacgactaaactagaggaaatttacaataagcaaaaaaataagaagggaatatacatcattgcccattcaatgggcggattggtcgcacataaagtgttgcaagactgtactcatttgataagaggtattatttacgtgggttccccaagccaatgtccaaatattttaggtcctattaggtttggagatgatgtgatgtggaataaaactattttcactaaagaaaccaacttttttatgagaagtagtttctattttctaccgttagatggtagatgttttgttgacaaaattaccttagagaggtatgatttcgatttttttgatacagatgtttggaaaacccttggcttgtcacctctcgtcaatgagaaaagagaggaatcagctcacgaaaaatcaaaattattaccaaggaaaacgaaatcagcgctttcgcttaaagctaccctaaacgcaactaccaagtttgtcctaaatgcacctgttgttaggaatgtagccggcaataataaacaggtaccaagggatgtgcctttcgatgaagtcttccatacatcttatgaagatagctgtgaatatttagcgagaactttaaaacgtacaaagaattatttggatagcttagattacgacccgaacaaagaatatcctccattggccatggtttacggtaacaaggttcccactgttagaggtgctaaagtgaacggtatacaagatataaaagatgggaattatgaagatttttactatggtccgggcgacggtgttgttcaccataaatggttattgcctgaacagagaggctttccagttgtttgtaaaatcgccagttcttcaggtcatgttagcttaatgacggatttgaaatcaatggcaaaagcattcatatctatcgtcgacagcgaaaaagaaggaagaagatctcgaacacgaacttcttcatga

SEQ ID NO: 6302 - DNA, 1971 bp, Artificial Sequence
  Description of Artificial Sequence: Synthetic polynucleotide
atgatggcaactccggctactgatcttatttccgataatgataaatataacaagcaatgtctttctgattctagtgatagtggtagtgatgtaagctttttttccgtaaatgaaagcgaaggtgaattggatacaatggagaaagtggataccttgattggaggtgcaagagttataagcaataaagtagaaaaagacagcgatagtgaacaaaggggaagaaagaaggaaacaactgggcccaataactatcataatttagaagagaagcaagcgagtgccatttctcttgacgctgatgatgaagatctcgatgaaattatttcttattctcatgacgggaactatgacagctctcataaaactttctccttttccttaccatttggtaatacaaatttcagaagtagttctccattagccataattaaaactgtgcttcccaagactccagatgagttcatcaaaaagaatttaagaaagaatgagatcaagcaaaaattgaaaaaatctacctccatttcttccttggaagagatagaattatttaaatacgaaaggggcattgataattctaggttaagggctgttaaagaatctttggaaatggatgccttgaagaactccattaagcaaataacagcagacccattcgacaaaactcatgacggatattaccgttcccgtttagaatctatatggaatgaattggaaggagatgtcgttataatgggtggatatcgtggtagtgtgttaagggatgctactactcataagagaatttggatcccattaaaggcaggtttgaatatgacgaaagtcgatttattgatcggacctaatgacgaagatgaacttaaaactcagaaggagattgtccctgatggaatgttaacacatatagggcctgttgatatctctaagaggttgataaagaggttggacgcaaatcctaatttaaatgttcagcagtttggctatgattggagattatccttggacatatctgccaagcatttaacgactaaattagaggaaatttacaataagcaaaaaaataagaagggaatatacatcattgcccattctatgggcggattggtcgcacataaagtgttgcaagactgtactcatttgataagaggtattatttacgtgggttccccaagccaatgtccaaatattttaggtcctattaggtttggagatgatgtgatgtggaataaaactattttcactaaagaaaccaacttttttatgagaagtagtttctattttttaccgttagatggtagatgttttgttgacaaaattaccttagagaggtatgatttcgatttttttgatacagatgtttggaaaacccttggcttgtctcctctcgtcaatgagaaaagagaggaatctgctcacgaaaaatctaaattattaccaaggaaaacgaaatctgcgctttctcttaaagctaccttgaacgcaactaccaagtttgtcttgaatgcacctgttgttaggaatgtagccggcaataataaacaggtaccaagggatgtgcctttcgatgaagtcttccatacatcttatgaagatagctgtgaatatttagcgagaactttaaaacgtacaaagaattatttggatagcttagattacgacccgaacaaagaatatcctccattggccatggtttacggtaacaaggttcccactgttagaggtgctaaagtgaacggtatacaagatataaaagatgggaattatgaagatttttactatggtccgggcgacggtgttgttcaccataaatggttattgcctgaacagagaggctttccagttgtttgtaaaatcgccagttcttctggtcatgttagcttaatgacggatttgaaatctatggcaaaagcattcatatctatcgtcgacagcgaaaaagaaggaagaagatctcgcacaagaacttcttcttga

SEQ ID NO: 6303 - DNA, 711 bp, Saccharomyces cerevisiae
atgagcggagaaaatcgtgctgtggtgccgattgaatcaaaccctgaagtttttacaaattttgcacataaattaggtttaaaaaatgaatgggcgtatttcgatatctatagcttaacagagccagagttactagcattcttaccaaggccagtgaaggccattgtgctgctatttccgataaacgaggatagaaaatcgagtaccagtcaacaaattacaagttcttatgatgttatatggtttaagcaatcagtcaaaaatgcgtgcggattgtatgcaattcttcattctttgagcaataaccagtcattgttggagcccggctccgacttggacaattttttaaaatctcaaagtgatacttcaagctcgaagaataggtttgatgatgttactaccgaccaattcgtcttgaatgtaataaaagagaatgtacaaacattttctactggccagtcagaagcaccagaagcaactgcagatactaatctacactatatcacatatgtggaagagaacggagggatatttgaactggatggaaggaatttgagcggacccctctatttgggaaagagtgacccaactgccaccgatttgattgaacaggaattagttagagtgagagtcgcctcatatatggaaaatgcaaatgaagaagatgtattaaactttgctatgctaggattgggccctaattgggaataa

SEQ ID NO: 6304 - DNA, 711 bp, Artificial Sequence
  Description of Artificial Sequence: Synthetic polynucleotide
atgagcggagaaaatcgtgctgtggtgccgattgaatctaaccctgaagtttttacaaattttgcacataaattaggtttaaaaaatgaatgggcgtatttcgatatctatagcttaacagagccagagttattggcattcttaccaaggccagtgaaggccattgtgcttttatttccgataaacgaggatagaaaatctagtaccagtcaacaaattacaagttcttatgatgttatatggtttaagcaatctgtcaaaaatgcgtgcggattgtatgcaattcttcattctttgagcaataaccagtctttgttggagcccggctccgacttggacaattttttaaaatctcaaagtgatacttccagctctaagaataggtttgatgatgttactaccgaccaattcgtcttgaatgtaataaaagagaatgtacaaacattttctactggccagtctgaagcaccagaagcaactgcagatactaatttacactatatcacatatgtggaagagaacggagggatatttgaattagatggaaggaatttgagcggacccctctatttgggaaagagtgacccaactgccaccgatttgattgaacaggaattagttagagtgagagtcgcctcttatatggaaaatgcaaatgaagaagatgtattaaactttgctatgcttggattgggccctaattgggaatga

SEQ ID NO: 6305 - DNA, 984 bp, Saccharomyces cerevisiae
atgcatagaacggcaatatttctaacttaccgatcatgtatgagaaatttcagtacactgagtaaaacattaacggtttcttctggtaaagtaatcagaaacggtccatttaggagagtaattcgtgaaaagaaccaaataacgaaggcgccatcagtaaaagcatttaaagaaaatagcaatagcgggataataaaagtacatgatcctatagctactacgatacttaatgaaccgacagttattatcgaaaggcaaatagaatttatgaacgtttttctaggtttcgagcaggctaataggtatgccataatggatgtgaacggaaacaaaatagcatcaatgatggaaagagatttttctataacaaaggccataatgcggcagttttatcgtctacatcgtccttttttggtagatgtctttgataattggggaaatgtaataatgacgattaaaaggcccttttcgttcatcaattctcatataaagactatcatacctccttccgcgtatgttgataatggcagtgactccactcactatcacgacggtaaagaaggaacgacagtaggagagaccattcagaactggcatctctggaggcgtcgttacgaattattccagaaagatggagtagaaggatccacttttgaccaatttggtaagatagatgcacctttcttatcatttgattttcctgtaacagatgctgatggtaagataatggcgagtgtagacagaaattgggttggtttaggaagagaaatgtttaccgatactggtgtttatgttgttagatttgattcgcagagatgctttgataatatttatcctactgagatgctaagttctcaagtactaactttggatcaaagggccgtgttattagcaaacgctgtgtccatcgatttcgattatttttcgagacattccagacaaactggaggtttcctttcttttggcggtggctatgatgagtag

SEQ ID NO: 6306 - DNA, 984 bp, Artificial Sequence
  Description of Artificial Sequence: Synthetic polynucleotide
atgcatagaacggcaatatttttaacttacaggagttgtatgagaaatttcagtacattgagtaaaacattaacggtttcttctggtaaagtaatcagaaacggtccatttaggagagtaattcgtgaaaagaaccaaataacgaaggcgccatctgtaaaagcatttaaagaaaatagcaatagcgggataataaaagtacatgatcctatagctactacgatacttaatgaaccgacagttattatcgaaaggcaaatagaatttatgaacgtttttttaggtttcgagcaggctaataggtatgccataatggatgtgaacggaaacaaaatagcatctatgatggaaagagatttttctataacaaaggccataatgaggcagttttatcgtttgcatcgtccttttttggtagatgtctttgataattggggaaatgtaataatgacgattaaaaggcccttttctttcatcaattctcatataaagactatcatacctccttccgcgtatgttgataatggcagtgactccactcactatcacgacggtaaagaaggaacgacagtaggagagaccattcagaactggcatctctggaggcgtcgttacgaattattccagaaagatggagtagaaggatccacttttgaccaatttggtaagatagatgcacctttcttatcttttgattttcctgtaacagatgctgatggtaagataatggcgagtgtagacagaaattgggttggtttaggaagagaaatgtttaccgatactggtgtttatgttgttagatttgattctcagagatgctttgataatatttatcctactgagatgttaagttctcaagtattgactttggatcaaagggccgtgttattagcaaacgctgtgtccatcgatttcgattatttttccagacattccagacaaactggaggtttcctttcttttggcggtggctatgatgagtga

SEQ ID NO: 6307 - DNA, 801 bp, Saccharomyces cerevisiae
atgcttgttttcaaaaggggtattcacgtagtacctaaactaccaaattctaaggccctactgcaaaatggagtgcctaatatactcagttcttcgggattcaagacggtgtggttcgactaccagcgatatctatgtgataagctaacgctggcgacagcgggacagtctttggaatcatattatccatttcacatattgctgaaaactgcaggaaatccattacagtcaaacatcttcaatttggcgtcctctatccataataaccatttattcgtggagaacattctaccttctgctgttgaacatggcactaactcgaacgccgttgtgaagacagagccttctaggctttttttatccaaaatcaaagattcattcaacggcagcgattgggaagtagtgaaggaggaaatgatttaccgtgctgagaatgaagtcttgggacaaggctggttatttctagttgaaaacaatgagaaaaaactcttcatattaacgagcaataataatggtacgccgtattattttcccaggaaccagtcatttgatttaaacagtgcgatatccatcgatgaatttgctaccttgaaacaaatgaaagaactgataggaaagtctactaagttgaatggtaaggttcaagactggaccatgcctataatctgtgtcaatctgtgggatcatgcttatttacatgattatggcgttggtaaccggtccaaatacgtgaagaatgttctagataacttgaattggtcagtggtaaataataggatattctctggtatatcgaagtaa

SEQ ID NO: 6308 - DNA, 801 bp, Artificial Sequence
  Description of Artificial Sequence: Synthetic polynucleotide
atgcttgttttcaaaaggggtattcacgtagtacctaaattaccaaattctaaggccttattacaaaatggagtgcctaatatactcagttcttctggattcaagacggtgtggttcgactaccagagatatttatgtgataagttgacgttggcgacagcgggacagtctttggaaagttattatccatttcacatattgttgaaaactgcaggaaatccattacagtccaacatcttcaatttggcgtcctctatccataataaccatttattcgtggagaacattttaccttctgctgttgaacatggcactaactccaacgccgttgtgaagacagagccttctaggctttttttatccaaaatcaaagattctttcaacggcagcgattgggaagtagtgaaggaggaaatgatttaccgtgctgagaatgaagtcttgggacaaggctggttatttttggttgaaaacaatgagaaaaaactcttcatattaacgagcaataataatggtacgccgtattattttcccaggaaccagtcttttgatttaaacagtgcgatatccatcgatgaatttgctaccttgaaacaaatgaaagaattgataggaaagtctactaagttgaatggtaaggttcaagactggaccatgcctataatctgtgtcaatttatgggatcatgcttatttacatgattatggcgttggtaacagatccaaatacgtgaagaatgttttggataacttgaattggtctgtggtaaataataggatattctctggtatatccaagtga

SEQ ID NO: 6309 - DNA, 609 bp, Saccharomyces cerevisiae
atgtctgcattacctccagtatactcattccctccactatatacccgtcaacccaattctttaacaaggagacaacagataagtacgtggatagacatcatatcacaatattgcaagaccaagaaaatttggtacatgtctgttgacgggactgtaatcaatgacaacgaactagatagtggaagtacagataatgacgattcaaaaaaaatctcgaaaaatctttttaataatgaggacatccaaagatctgtatcacaggtatttattgatgaaatttggtcgcaaatgaccaaagaaggcaaatgcttaccgattgaccaaagtggtaggagaagcagcaataccaccactacgagatattttatattatggaagagcttagacagttgggcttctttgatactacagtggttcgaagactctggaaaactgaatcaagtcattacgttatacgaattgagtgaaggtgatgaaacagtcaattgggagttccatagaatgcccgaaagcttgctctattattgtttgaagcccctatgcgatagaaatagggccacaatgctgaaagatgaaaatgataaagtaattgccattaaggttgtttaa

SEQ ID NO: 6310 - DNA, 609 bp, Artificial Sequence
  Description of Artificial Sequence: Synthetic polynucleotide
atgtctgcattacctccagtatactctttccctccattgtatacccgtcaacccaattctttaacaaggagacaacagataagtacgtggatagacatcatatctcaatattgcaagaccaagaaaatttggtacatgtctgttgacgggactgtaatcaatgacaacgaattagatagtggaagtacagataatgacgattctaaaaaaatctccaaaaatctttttaataatgaggacatccaaagatctgtatctcaggtatttattgatgaaatttggtctcaaatgaccaaagaaggcaaatgcttaccgattgaccaaagtggtaggagaagcagcaataccaccactacgagatattttatattatggaagagcttagacagttgggcttctttgatattacagtggttcgaagactctggaaaattgaatcaagtcattacgttatacgaattgagtgaaggtgatgaaacagtcaattgggagttccatagaatgcccgaaagcttgctctattattgtttgaagcccctttgcgatagaaatagggccacaatgttgaaagatgaaaatgataaagtaattgccattaaggttgtttga

SEQ ID NO: 6311 - DNA, 1737 bp, Saccharomyces cerevisiae
atgaaatacgttgttgtttctggtggtgttatctcaggtattggtaagggtgttttagcgtcctctacagggatgctactgaaaaccctcggcctaaaggttacttccatcaagattgacccatatatgaatattgacgccgggacgatgtctcccttggaacatggtgagtgttttgtacttgatgatggtggggaaacggacttggatctcggtaattacgagcggtacctcggtattaccttaagcagggaccacaacatcaccaccggtaagatatactcccacgtaatttccagagaaaggagaggtgattatttaggtaagacagttcaaattgttcctcatttgactaacgcaattcaggattggattcaacgtgtttcaaaaattccagtggatgacacaggattagaaccagacgtctgtatcatcgagttaggtggtacggtcggtgacattgagagtgcgcccttcgtggaagcattacgacaatttcagttcgaagttggaagagagaatttcgccctgatccatgtttcacttgtgcccgtcattcatggtgaacagaagacgaaacccacccaagcagcaatcaaagatttaaggtcattagggcttattcccgatatgattgcctgcagatgcagcgaagaacttaacaggagcactattgacaagattgccatgttttgccatgtggggccggagcaagtggtcaacgttcatgatgttaactccacgtaccacgttcccttattgctgctaaagcaacatatgatcgactacctccattcaaggttgaaattaggtgaagtgcctctaaccttggaagacaaggaaagagggtctcaattattgactaactgggaaaacatgaccaaaaacctagatgattctgatgatgttgtcaagattgctcttgtgggaaaatacactaatttgaaggattcctacctatctgtgaccaaatccttagaacacgcaagcatgaagtgccgtcgtcagctagaaatcctctgggtagaggcaagtaacctagagcccgaaactcaagaggtggacaagaacaagttccacgattcatggaataagctcagttccgccgacggaattttggttcctggtggatttggcacgagaggtattgaaggtatgattcttgctgccaaatgggcccgtgaatccggtgttccctttcttggtgtctgtcttggattacaagttgccgctatcgagttcgcccgcaatgtgataggccgcccaaacagcagttctacagaatttttggacgagacactactagctcctgaagaccaagtagtcatatacatgcccgagatcgacaaggaacacatgggtggcacgatgagattgggtttgaggcctaccattttccaaccgaactcagaatggagcaacataaggaagctttatggtgaagttaatgaggtgcatgagagacatcgtcatcgctatgagataaacccgaaaatagtgaatgatatggagtctcgtggctttatttttgttggtaaggacgagacgggccagcgttgcgaaatattcgaattgaaaggccatccatactacgtgggcactcaataccatccagagtatacatcgaaggtgctggaaccatcaagaccgttttgggggcttgtggccgcagcctccggcacacttggtgaagtgatcaaggacataaatctaagcgagggaaatgaaaatgaatga

SEQ ID NO: 6312 - DNA, 1737 bp, Artificial Sequence
  Description of Artificial Sequence: Synthetic polynucleotide
atgaaatacgttgttgtttctggtggtgttatcagtggtattggtaagggtgttttagcgtcctctacagggatgttattgaaaaccctcggcttgaaggttacttccatcaagattgacccatatatgaatattgacgccgggacgatgtctcccttggaacatggtgagtgttttgtacttgatgatggtggggaaacggacttggatctcggtaattacgagagatacctcggtattaccttaagcagggaccacaacatcaccaccggtaagatatactcccacgtaatttccagagaaaggagaggtgattatttaggtaagacagttcaaattgttcctcatttgactaacgcaattcaggattggattcaacgtgtttccaaaattccagtggatgacacaggattagaaccagacgtctgtatcatcgagttaggtggtacggtcggtgacattgagagtgcgcccttcgtggaagcattaagacaatttcagttcgaagttggaagagagaatttcgccttgatccatgtttcccttgtgcccgtcattcatggtgaacagaagacgaaacccacccaagcagcaatcaaagatttaaggtctttagggcttattcccgatatgattgcctgcagatgcagcgaagaacttaacaggagcactattgacaagattgccatgttttgccatgtggggccggagcaagtggtcaacgttcatgatgttaactccacgtaccacgttcccttattgttattgaagcaacatatgatcgactacctccattccaggttgaaattaggtgaagtgcctttgaccttggaagacaaggaaagagggtctcaattattgactaactgggaaaacatgaccaaaaaccttgatgattctgatgatgttgtcaagattgctcttgtgggaaaatacactaatttgaaggattcctacttgtctgtgaccaaatccttagaacacgcaagcatgaagtgccgtcgtcagttagaaatcctctgggtagaggcaagtaacttggagcccgaaactcaagaggtggacaagaacaagttccacgattcttggaataagctcagttccgccgacggaattttggttcctggtggatttggcacgagaggtattgaaggtatgattcttgctgccaaatgggcccgtgaatccggtgttccctttcttggtgtctgtcttggattacaagttgccgctatcgagttcgcccgcaatgtgataggccgcccaaacagcagttctacagaatttttggacgagacattgttggctcctgaagaccaagtagtcatatacatgcccgagatcgacaaggaacacatgggtggcacgatgagattgggtttgaggcctaccattttccaaccgaactctgaatggagcaacataaggaagctttatggtgaagttaatgaggtgcatgagagacatcgtcatcgctatgagataaacccgaaaatagtgaatgatatggagtctcgtggctttatttttgttggtaaggacgagacgggccagcgttgcgaaatattcgaattgaaaggccatccatactacgtgggcactcaataccatccagagtatacatccaaggtgttggaaccatctagaccgttttgggggcttgtggccgcagcctccggcacacttggtgaagtgatcaaggacataaatttgagcgagggaaatgaaaatgaatga

SEQ ID NO: 6313 - DNA, 465 bp, Saccharomyces cerevisiae
atggttcaagcagtcgcagtgttaaagggtgatgccggtgtctctggtgttgtcaagttcgaacaggcttccgaatccgagccaaccactgtctcttacgagatcgctggtaacagtcctaacgcagaacgtgggttccacattcatgagtttggagatgccaccaatggttgtgtctctgctggtcctcacttcaatcctttcaagaagacacatggtgctccaactgacgaagtcagacatgtcggtgacatgggtaacgtaaagacggacgaaaatggtgtggccaagggctccttcaaggactctttgatcaagcttatcggtcctacctccgttgtaggcagaagcgtcgttatccacgccggccaagatgacttaggtaagggtgacactgaagaatctttgaagactggtaatgccggtccaagaccagcctgtggtgtcattggtctaaccaactaa

SEQ ID NO: 6314 - DNA, 465 bp, Artificial Sequence
  Description of Artificial Sequence: Synthetic polynucleotide
atggttcaagcagtcgcagtgttaaagggtgatgccggtgtctctggtgttgtcaagttcgaacaggcttccgaatccgagccaaccactgtctcttacgagatcgctggtaacagtcctaacgcagaacgtgggttccacattcatgagtttggagatgccaccaatggttgtgtctctgctggtcctcacttcaatcctttcaagaagacacatggtgctccaactgacgaagtcagacatgtcggtgacatgggtaacgtaaagacggacgaaaatggtgtggccaagggctccttcaaggactctttgatcaagcttatcggtcctacctccgttgtaggcagaagcgtcgttatccacgccggccaagatgacttaggtaagggtgacactgaagaatctttgaagactggtaatgccggtccaagaccagcctgtggtgtcattggtttgaccaactga

SEQ ID NO: 6315 - DNA, 1023 bp, Saccharomyces cerevisiae
atgaccgcaccattggtagtattgggtaacccacttttagatttccaagccgacgtcacggctgaatacctggccaagtattctctaaaggaaaacgacgcaattttggtcgatgccaaatcaggcgatgctaagatggctatttttgacgagctcttacagatgccagaaacaaagcttgttgcaggtggtgctgctcaaaacactgctagaggggcagcatacgttttgggcgccggccaggtggtgtacttcggttccgtcggtaaggacaagttcagcgagagattgcttaacgaaaacgaaaaagctggtgtcaagtctatgtaccaagttcaaaatgatattggtaccggtaagtgtgccgcattaatcactggccataaccggtccttggtcactgacttgggtgctgccaatttctttactccagaccacttggacaagcattgggacttggtcgaagcagctaagctcttctacatcggtggtttccacttgaccgtgtctccagacgctatcgttaagttgggccaacatgctaaagagaacagcaaacctttcgtgttgaactttagtgctcctttcattcctcatgtcttcaaagacgcattggccagagttttgccttatgctaccgtcatcatcgctaacgaatcggaggccgaagccttttgcgacgccttccaattagactgtgccaacactgatttggaagctattgctcaaagaattgtcaaggactctccagttgaaaagactgtcatcttcacccacggtgtcgaaccaacagtggtcgtgtcctccaagggtaccagcacatatccagtcaaacctttggactcttctaagatcgtcgacaccaacggtgctggtgacgccttcgctggtggctttatggctgggttgactaaaggtgaagatttggaaacctctattgacatgggtcaatggctagctgctttgtctattcaagaagttggtccctcttacccttccgaaaaaatatcttactctaaatag

SEQ ID NO: 6316 - DNA, 1023 bp, Artificial Sequence
  Description of Artificial Sequence: Synthetic polynucleotide
atgaccgcaccattggtagtattgggtaacccacttttagatttccaagccgacgtcacggctgaatacttggccaagtattctttgaaggaaaacgacgcaattttggtcgatgccaaatctggcgatgctaagatggctatttttgacgagctcttacagatgccagaaacaaagcttgttgcaggtggtgctgctcaaaacactgctagaggggcagcatacgttttgggcgccggccaggtggtgtacttcggttccgtcggtaaggacaagttcagcgagagattgcttaacgaaaacgaaaaagctggtgtcaagtctatgtaccaagttcaaaatgatattggtaccggtaagtgtgccgcattaatcactggccataacagatccttggtcactgacttgggtgctgccaatttctttactccagaccacttggacaagcattgggacttggtcgaagcagctaagctcttctacatcggtggtttccacttgaccgtgtctccagacgctatcgttaagttgggccaacatgctaaagagaacagcaaacctttcgtgttgaactttagtgctcctttcattcctcatgtcttcaaagacgcattggccagagttttgccttatgctaccgtcatcatcgctaacgaaagtgaggccgaagccttttgcgacgccttccaattagactgtgccaacactgatttggaagctattgctcaaagaattgtcaaggactctccagttgaaaagactgtcatcttcacccacggtgtcgaaccaacagtggtcgtgtcctccaagggtaccagcacatatccagtcaaacctttggactcttctaagatcgtcgacaccaacggtgctggtgacgccttcgctggtggctttatggctgggttgactaaaggtgaagatttggaaacctctattgacatgggtcaatggttggctgctttgtctattcaagaagttggtccctcttacccttccgaaaaaatatcttactctaaatga

SEQ ID NO: 6317 - DNA, 2178 bp, Saccharomyces cerevisiae
atggactgggcaatcaatgtcgcccatccacgattactttacaaggatcctaaactttcagtaacgtttattgtgccgagcttatttcatatcattattgctttcgtgttattaggaatatgtgcatccgattttctttgccccaacgtggcccatatatcagatcccaacagccttcgatcgaatggttctttagtctcaaaaacggcgtcccatgcatctcatactggggcattaatggcagttctactatcttggtgtaactcttcgcctgacctattttccaacttaatgagctgggcaacctctacgagagaaacaaggtcaacctcagtatcgctatcaattggtgaggtgcttggcgcttgcggcattatcctgtgcattgtagagggctccatttttattattatgtcaagaactcacattgaaatctcgcaaattcaaaaactatccatcatgagagacttgttattttctttagctgccatgtgcgtaatgagttacgtttcccttatgaatcaggtcactgtgctgaattgccttttgatggcgttcctttatgccttttatctagtcgttaagttaactttcaagcttaatcattctgcagaaaccccagatgaaactgctgcggatacgagcctcagagaaaactccgtttctccttttttggatgactctctgatggcttctggtttactaccaccaatacaacctggctttgacatatccaattctataacacacggcattaagcctagtttgctatctgctatggatttcaatagtttcttatcaatgcttgaaaactcatctttggaggaggatgactcaaggaatgaaatggcagaattgaacactctacgtagcatgacgccgggacaacattggtccgcctctgcaacagttgcaggagaggcaacgagtgctggaagacctttcagtgagccaacgaatgcgtttacggaatatagagattctgaaagagcaataaatagttccccagcggtgttcgccccctaccgtgacaaccctgatgatgaagagtctcaagagcaagtattattggagacaacaacgcatggtcattttggtgcgcaagaaatgcgaaggttctccaaaaggtctctgggctggattataaaaattttcataccacatctctcaaatttttcccagaaatccatctcagatgcgatcttttccataataactgttccgtttttcattattttcaaactatcatgtcctcaaccgccttcagatattttgagttatgatcccactttgaacagatactctttaacaacgttacccataattttattatttatccaatcaattactgcacccttcctcctttgcagtatactttctgtgcttttgacatatcatctaggctatctcgtttaccttttccctcttatattagctatggccttaattttactattgacggcttttattacaaaggtaaatctgcataacaagtttactctgtcattagacagctctaacattttacaggaaaagctacaaaaaagaaaactcctcgaaaggcttaacacaagcatccaaataatttttctagctatcggcataataaatatcataatttggatatcacttttagccaattctcttattgagatgatggaaatttaccaaaaaatattaggattatcgaaagctattttgggccttaccattttcgcatggggcaactcagtaggagacttgatctccaacatatctatgtgcaggctctacaaaacccaaactcactaccaagacagagttcgtttagccacaaaattttttatgatatcatgcgcatcttgcttaggaggcgtaatgctgaattctatgggtggaataggctttagtgggctagtatcaatgctttttattggcgcttttaatgataacgaatggtggttcctaagaaaggttaaattacaagaaacaagtcaattggataatacattaaattacaaattcatagtttcttgcgtcttcattatcctacagattattctcttgctgttattcttcggagggcctaacaatattaaacggcgcctcacaaaggagatgaagttagtcggaatctctatgtgcggactatgggcactagccacgttgattaatatacttctagaactgtttagctaa

SEQ ID NO: 6318 - DNA, 2178 bp, Artificial Sequence
  Description of Artificial Sequence: Synthetic polynucleotide
atggactgggcaatcaatgtcgcccatccaagattactttacaaggatcctaaactttctgtaacgtttattgtgccgagcttatttcatatcattattgctttcgtgttattaggaatatgtgcatccgattttctttgccccaacgtggcccatatatctgatcccaacagccttagatctaatggttctttagtctccaaaacggcgtcccatgcatctcatactggggcattaatggcagttttgttatcttggtgtaactcttctcctgacttattttccaacttaatgagctgggcaacctctacgagagaaacaaggtctacctctgtatctttatccattggtgaggtgcttggcgcttgcggcattatcctttgcattgtagagggctccatttttattattatgagtagaactcacattgaaatctctcaaattcaaaaactttccatcatgagagacttgttattttctttagctgccatgtgcgtaatgagttacgtttcccttatgaatcaggtcactgtgttgaattgccttttgatggcgttcctttatgccttttatttagtcgttaagttaactttcaagcttaatcattctgcagaaaccccagatgaaactgctgcggatacgagcctcagagaaaactccgtttctccttttttggatgactctttgatggcttctggtttattaccaccaatacaacctggctttgacatatccaattctataacacacggcattaagcctagtttgttatctgctatggatttcaatagtttcttatctatgcttgaaaactcttctttggaggaggatgacagcaggaatgaaatggcagaattgaacactttacgtagcatgacgccgggacaacattggtccgcctctgcaacagttgcaggagaggcaacgagtgctggaagacctttcagtgagccaacgaatgcgtttacggaatatagagattctgaaagagcaataaatagttccccagcggtgttcgccccctaccgtgacaaccctgatgatgaagagtctcaagagcaagtattattggagacaacaacgcatggtcattttggtgcgcaagaaatgagaaggttctccaaaaggtctttaggctggattataaaaattttcataccacatctctctaatttttcccagaaatccatcagtgatgcgatcttttccataataactgttccgtttttcattattttcaaattaagttgtcctcaaccgccttctgatattttgagttatgatcccactttgaacagatactctttaacaacgttacccataattttattatttatccaatctattactgcacccttcctcctttgcagtatactttctgtgcttttgacatatcatttaggctatctcgtttaccttttccctcttatattagctatggccttaattttattattgacggcttttattacaaaggtaaatttacataacaagtttactttatctttagacagctctaacattttacaggaaaagttacaaaaaagaaaactcctcgaaaggcttaacacaagcatccaaataatttttttggctatcggcataataaatatcataatttggatatctcttttagccaattctcttattgagatgatggaaatttaccaaaaaatattaggattatccaaagctattttgggccttaccattttcgcatggggcaactctgtaggagacttgatctccaacatatctatgtgcaggctctacaaaacccaaactcactaccaagacagagttcgtttagccacaaaattttttatgatatcttgcgcatcttgcttaggaggcgtaatgttgaattctatgggtggaataggctttagtgggttggtatctatgctttttattggcgcttttaatgataacgaatggtggttcttaagaaaggttaaattacaagaaacaagtcaattggataatacattaaattacaaattcatagtttcttgcgtcttcattatcttacagattattctcttgttattattcttcggagggcctaacaatattaaaagacgcctcacaaaggagatgaagttagtcggaatctctatgtgcggattatgggcattggccacgttgattaatatacttttagaattatttagctga

SEQ ID NO: 6319 - DNA, 987 bp, Saccharomyces cerevisiae
atgcctgttgttcattgttcgtccaacctgcccatcactccatatatctatgagcgtctagtatattttattaaggcaagctctatatcaagctgcatatctgacaacttacttcttgttaataaaaccttcaacgacggaggttgtccaccacatattaacttctgcaatgatgagataattaacccaacagcgggtcaaacagtggttgaattagttcttaatgcaaaaaaaggtgaattaggctcgggttatctggctgttgaccacggaaaaaaggttgttattttagcatttagaggatccacaacaagacaagattggtttagtgattttgaaatatatcctgttaactattctcccctttgcgttaaggaatatcgtaagcttatagaggaaggaaaaatcagagaatgtgaaggttgtaaaatgcatagaggatttctaaggttcacagaaactctcgggatggacgtctttaaaaaaatggagtcgattctggaaagctttccggaatataggatcgttgtcactgggcactccttgggggcagcattagcaagtttggctgggattgaattaaagataagaggctttgatccgttagtgctgacattcgcaacaccaaagatatttaacagtgaaatgaaacaatgggtagacgagttatttgaaacagatgctatagaaaaggagtcaattcttaaagatgaaattcaatttcgtaagggctattttagggttgtgcatacaggtgattatattcctatggttccaccattctatcatccggctggtttagagatgtttattaacaaagttggtctacctcagaatgcggaagatattgaataccgtggtaaaaataacaggttaactttaaaggatggatttcgagagggtatgagcggtttggttgaagactggttacatgtctatgaacatcgagcctacttcattgacgtagtgggatgttctggactttaa

SEQ ID NO: 6320 - DNA, 987 bp, Artificial Sequence
  Description of Artificial Sequence: Synthetic polynucleotide
atgcctgttgttcattgttcttccaacttgcccatcactccatatatctatgagcgtttagtatattttattaaggcaagctctatatctagctgcatatctgacaacttacttcttgttaataaaaccttcaacgacggaggttgtccaccacatattaacttctgcaatgatgagataattaacccaacagcgggtcaaacagtggttgaattagttcttaatgcaaaaaaaggtgaattaggcagtggttatttggctgttgaccacggaaaaaaggttgttattttagcatttagaggatccacaacaagacaagattggtttagtgattttgaaatatatcctgttaactattctcccctttgcgttaaggaatatcgtaagcttatagaggaaggaaaaatcagagaatgtgaaggttgtaaaatgcatagaggatttttaaggttcacagaaactctcgggatggacgtctttaaaaaaatggagtctattttggaaagctttccggaatataggatcgttgtcactgggcactccttgggggcagcattagcaagtttggctgggattgaattaaagataagaggctttgatccgttagtgttaacattcgcaacaccaaagatatttaacagtgaaatgaaacaatgggtagacgagttatttgaaacagatgctatagaaaaggagtctattcttaaagatgaaattcaatttcgtaagggctattttagggttgtgcatacaggtgattatattcctatggttccaccattctatcatccggctggtttagagatgtttattaacaaagttggtttgcctcagaatgcggaagatattgaataccgtggtaaaaataacaggttaactttaaaggatggatttagagagggtatgagcggtttggttgaagactggttacatgtctatgaacatagagcctacttcattgacgtagtgggatgttctggactttga

SEQ ID NO: 6321 - DNA, 237 bp, Saccharomyces cerevisiae
atgtgtgatgatagctatgatgctgtagaagaatactatttcaacaaaagcgtagccgggattagtggccaggagaactggaataagcagttagctacccaagtgtattcaagaagtttacaaccagaaatattaccaaccctaaaacctctttcatgtaacaaagagagggccaatgcaggaaaaagagtttcagaagaagagcagataaatggaaaacgtaagagaaaagattag

SEQ ID NO: 6322 - DNA, 237 bp, Artificial Sequence
  Description of Artificial Sequence: Synthetic polynucleotide
atgtgtgatgatagctatgatgctgtagaagaatactatttcaacaaaagcgtagccgggattagtggccaggagaactggaataagcagttagctacccaagtgtattctagaagtttacaaccagaaatattaccaaccttgaaacctctttcctgtaacaaagagagggccaatgcaggaaaaagagtttctgaagaagagcagataaatggaaaacgtaagagaaaagattga

SEQ ID NO: 6323 - DNA, 372 bp, Saccharomyces cerevisiae
atgtcttggaggtactctatcttgaccgtagatggaagctttaaaattttcatcccttgggaaatattcctcacgtggaattttttgagcgctgcatggctaaattctaccgaatccaatacgtatatccactactcaacatgttggggcacaagtgattacacacttaatatctctgtcatagaagctactacagagaaattggttgacactagattattaacaacactcgagaatgcaaccgcttggattaactcaaactctattgatgaagacgaagatgatatgcctcatgccactaacgtagcagaccggcttgatgggttatcccttagcaagcgcgtatatagcatctgtcactacgaattttag

SEQ ID NO: 6324 - DNA, 372 bp, Artificial Sequence
  Description of Artificial Sequence: Synthetic polynucleotide
atgtcttggaggtactctatcttgaccgtagatggaagctttaaaattttcatcccttgggaaatattcctcacgtggaattttttgagcgctgcatggttaaattctaccgaatccaatacgtatatccactactccacatgttggggcacaagtgattacacacttaatatctctgtcatagaagctactacagagaaattggttgacactagattattaacaacactcgagaatgcaaccgcttggattaactccaactctattgatgaagacgaagatgatatgcctcatgccactaacgtagcagacaggcttgatgggttatcccttagcaagcgcgtatatagcatctgtcactacgaattttga

SEQ ID NO: 6325 - DNA, 3357 bp, Saccharomyces cerevisiae
atgacatcgatttatacatcaacagagcctacgaattctgcttttactaccgaggactacaaacctcaattagttgaaggagtaaattctgtacttgtcattggatcaggagggctctctattggtcaagctggtgaattcgattacagtggttctcaagctatcaaagctctgaaggaagataacaagtttactatattggttaacccaaatatcgctactaaccagacttctcattccctggcggacaagatttattacttgcccgttacaccagaatacatcacatatatcattgaacttgaaaggccggatgctatacttttaaccttcggtggtcaaacaggtctaaattgtggggtggctctggatgaatctggtgttttggctaaatacaacgtcaaagttttaggtactcctatcaaaactttgatcacttctgaagatagggatcttttcgcatctgcgttaaaggatatcaacattcccatcgcagaatcatttgcttgtgaaaccgtggatgaagctttggaggctgctgaaagggtcaaatacccagttattgtcagatctgcatacgctttgggtgggttaggctcaggtttcgctaacaatgcaagtgaaatgaaggaacttgccgcacagtccttgtcgttggccccacaaattcttgttgaaaaatctttgaaaggttggaaagaagttgaatatgaagtggtcagagatagggttggtaactgtattacagtatgtaatatggaaaatttcgacccacttggtgttcatactggtgattctatggtttttgctccttcgcagaccctatcagatgaagagtttcatatgttaagatccgccgcaattaaaatcattagacaccttggtgttattggtgaatgtaatgtccaatacgctttgcaacctgatgggctagactatagagttattgaagtgaacgcacgtttatctcgttcctctgcattggcgtctaaggccactggttatcccttagcatacactgccgccaaaattgggctaggctatactttgccagaattgccaaacccaatcacaaaaactacagtggctaactttgagccatctttggattatattgtggcaaaaatacctaagtgggatctttctaagttccaatacgtggacagatccattggttcctctatgaaatcagttggagaagttatggctattggtagaaactatgaagaagcctttcaaaaagcattaagacaggtggatccatcattattgggattccaaggttctactgaattcggcgatcaacttgatgaagccttgagaactccaactgatagaagagtccttgccattggtcaggccttaatccatgaaaactatactgttgagagagttaatgaattgagtaaaattgataaatggtttctttacaagtgcatgaacattgttaatatctataaagagcttgaatcagttaaatctttaagtgacttgagtaaagatctcttgcagagagccaagaaattagggttttcagataagcagattgcggttactataaataaacacgcctccacaaacattaacgaactggaaatcagaagtttaagaaaaacgttaggtataatcccttttgtcaagagaatcgatactttggccgcagaatttccagcacaaaccaattatttgtataccacttacaatgctacaaagaacgatgtggagttcaacgaaaatggtatgctggttttaggctctggtgtctatcgtattggttcatctgtagaatttgattggtgtgccgtgaacaccgcgaagacattaagagatcaaggcaagaaaactatcatgataaattataacccagaaacagtttccacagatttcgatgaagttgatagattatactttgaagaattatcgtatgaaagagtgatggacatttatgagttggagcaatctgagggttgcattatttctgtcggtggtcaattacctcaaaacattgccttgaaactttacgataacggctgtaatataatgggtaccaatccaaacgatattgatagagctgagaacagacacaaattctcatctattttggattctattgatgttgaccaacctgaatggagtgaattaacatcagtagaagaagcaaaattatttgcttctaaagttaactaccctgtgttgattcgtccctcatatgttctttccggtgcggcaatgagtgttgttaataatgaggaggaactgaaggctaaattaactttggcatctgacgtttctccagaccacccagtcgtcatgtctaaatttattgaaggtgctcaagaaattgatgtggacgccgttgcttataatggtaatgtcttggtacatgccatttccgagcatgttgaaaatgcgggtgtgcactccggtgatgcttctttagtcttaccgccacaacatctttctgacgatgtgaagattgccctaaaagacattgctgataaggtcgcaaaagcttggaagatcactggccccttcaatatgcaaatcatcaaggatggggagcatacattgaaagtgattgaatgtaacattagagcttctagatcatttccattcgtttcaaaagttttaggcgttaattttattgaaattgctgtcaaggcatttttgggcggtgacattgtaccaaaacctgttgatttgatgctcaacaaaaagtacgactatgttgctactaaagttcctcaattttcctttacaaggttggctggtgcagatcctttcttaggggttgaaatggcatcaactggtgaagttgcttcatttggtagagatttaattgaaagctattggactgctattcaaagtaccatgaacttccatgtaccactacctccaagtggtatattatttggaggtgatacatctcgagaatacttgggccaagtggcttccatagtggccactattggttacagaatatacacaactaatgagaccactaaaacgtatctacaggaacacatcaaagaaaagaacgcaaaggtttctttgattaaatttccaaagaatgataagagaaaattgcgtgaactatttcaagaatatgacataaaagctgttttcaatttagcctccaagagagctgagagcactgacgatgttgactatattatgagaaggaatgctattgattttgctatcccattgttcaatgaacctcaaacggctttgttatttgcaaagtgtttgaaggcaaaaattgcagaaaagatcaaaattttggaatctcatgacgttatagttccaccagaagtccgttcctgggatgaatttattggtttcaaagcatattga

SEQ ID NO: 6326 - DNA, 3357 bp, Artificial Sequence
  Description of Artificial Sequence: Synthetic polynucleotide
atgacatccatttatacatctacagagcctacgaattctgcttttactaccgaggactacaaacctcaattagttgaaggagtaaattctgtacttgtcattggatctggagggctctctattggtcaagctggtgaattcgattacagtggttctcaagctatcaaagctttgaaggaagataacaagtttactatattggttaacccaaatatcgctactaaccagacttctcattccttagcggacaagatttattacttgcccgttacaccagaatacatcacatatatcattgaacttgaaaggccggatgctatacttttaaccttcggtggtcaaacaggtttgaattgtggggtggctttagatgaatctggtgttttggctaaatacaacgtcaaagttttaggtactcctatcaaaactttgatcacttctgaagatagggatcttttcgcatctgcgttaaaggatatcaacattcccatcgcagaaagttttgcttgtgaaaccgtggatgaagctttggaggctgctgaaagggtcaaatacccagttattgtcagatctgcatacgctttgggtgggttaggcagtggtttcgctaacaatgcaagtgaaatgaaggaacttgccgcacagtccttgtctttggccccacaaattcttgttgaaaaatctttgaaaggttggaaagaagttgaatatgaagtggtcagagatagggttggtaactgtattacagtatgtaatatggaaaatttcgacccacttggtgttcatactggtgattctatggtttttgctccttctcagaccttaagtgatgaagagtttcatatgttaagatccgccgcaattaaaatcattagacaccttggtgttattggtgaatgtaatgtccaatacgctttgcaacctgatgggttggactatagagttattgaagtgaacgcacgtttatctcgttcctctgcattggcgtctaaggccactggttatcccttagcatacactgccgccaaaattgggttgggctatactttgccagaattgccaaacccaatcacaaaaactacagtggctaactttgagccatctttggattatattgtggcaaaaatacctaagtgggatctttctaagttccaatacgtggacagatccattggttcctctatgaaatctgttggagaagttatggctattggtagaaactatgaagaagcctttcaaaaagcattaagacaggtggatccatctttattgggattccaaggttctactgaattcggcgatcaacttgatgaagccttgagaactccaactgatagaagagtccttgccattggtcaggccttaatccatgaaaactatactgttgagagagttaatgaattgagtaaaattgataaatggtttctttacaagtgcatgaacattgttaatatctataaagagcttgaatctgttaaatctttaagtgacttgagtaaagatctcttgcagagagccaagaaattagggttttctgataagcagattgcggttactataaataaacacgcctccacaaacattaacgaattggaaatcagaagtttaagaaaaacgttaggtataatcccttttgtcaagagaatcgatactttggccgcagaatttccagcacaaaccaattatttgtataccacttacaatgctacaaagaacgatgtggagttcaacgaaaatggtatgcttgttttaggctctggtgtctatcgtattggttcttctgtagaatttgattggtgtgccgtgaacaccgcgaagacattaagagatcaaggcaagaaaactatcatgataaattataacccagaaacagtttccacagatttcgatgaagttgatagattatactttgaagaattatcttatgaaagagtgatggacatttatgagttggagcaatctgagggttgcattatttctgtcggtggtcaattacctcaaaacattgccttgaaactttacgataacggctgtaatataatgggtaccaatccaaacgatattgatagagctgagaacagacacaaattcagttctattttggattctattgatgttgaccaacctgaatggagtgaattaacatctgtagaagaagcaaaattatttgcttctaaagttaactaccctgtgttgattcgtccctcttatgttctttccggtgcggcaatgagtgttgttaataatgaggaggaattgaaggctaaattaactttggcatctgacgtttctccagaccacccagtcgtcatgtctaaatttattgaaggtgctcaagaaattgatgtggacgccgttgcttataatggtaatgtcttggtacatgccatttccgagcatgttgaaaatgcgggtgtgcactccggtgatgcttctttagtcttaccgccacaacatctttctgacgatgtgaagattgccttgaaagacattgctgataaggtcgcaaaagcttggaagatcactggccccttcaatatgcaaatcatcaaggatggggagcatacattgaaagtgattgaatgtaacattagagcttctagatcttttccattcgtttccaaagttttaggcgttaattttattgaaattgctgtcaaggcatttttgggcggtgacattgtaccaaaacctgttgatttgatgctcaacaaaaagtacgactatgttgctactaaagttcctcaattttcctttacaaggttggctggtgcagatcctttcttaggggttgaaatggcatctactggtgaagttgcttcttttggtagagatttaattgaaagctattggactgctattcaaagtaccatgaacttccatgtaccattgcctccaagtggtatattatttggaggtgatacatctagagaatacttgggccaagtggcttccatagtggccactattggttacagaatatacacaactaatgagaccactaaaacgtatttacaggaacacatcaaagaaaagaacgcaaaggtttctttgattaaatttccaaagaatgataagagaaaattgcgtgaattatttcaagaatatgacataaaagctgttttcaatttagcctccaagagagctgagagcactgacgatgttgactatattatgagaaggaatgctattgattttgctatcccattgttcaatgaacctcaaacggctttgttatttgcaaagtgtttgaaggcaaaaattgcagaaaagatcaaaattttggaatctcatgacgttatagttccaccagaagtccgttcctgggatgaatttattggtttcaaagcatattga

SEQ ID NO: 6327 - DNA, 2067 bp, Saccharomyces cerevisiae
atggagtacatcaagattgccaaagtatctaatgtagtgctgcatagaagaggtacggccacacaaggtactttacatttgactactcaccatttgatctttgagtcaccacaattgtcgacggaattttggtttccatatcctttgatctatggagtgcataaaaacccgggtagtacattactgtccaagttgacttccactaatcaaatccaattggagggaacggattcacagaattacaagctttaccagggtaaggatctatggtcttttgtaaatatcaaggtaattgggaaagattatgcggtattctcattggatttcggtggtgatttacatctacaggcaagaaaggtgtatgattccatcttaaatttgacggtcctgtccaatatcacgcaactatatgcatttatttacatatccaacaatctggaaaggaaactaccttcacccgatagctgggatatatatgacccaattaaggaatttcgaaggcagggcctcgacagtaaagatgaaacatgtccttggaggctatccacggtaaacgaacactatgaattttgtccaacgtatccctcaaaactttttgtaccaagatccacgtcagatatattattgaagcatgcttcgaagtttagatcacagaaaagaattcctgttttaacttatcatcacaaggcaacagattgcaacattcttaggtcatctcaaccattaccggggttgatcaatcagaggtccattcaagatgaaaaattagtttgggaaagcttcaactcattttgtaataaagatattagaagaacgaaacatgtaatagtagatgccagacccagaacaaatgcattagcacagatggcgttgggtggcgggacagaaaatatggataattataatttttttttagctgataacaatatgggtgtcgataaaagtctaaaactgcccacagttacacggttatttcttggtatagataacattcatattgtttccaacacagctgcatacatgacggaagttatctgccaaggtggcgatttgaatttaccactggaacagaatttaattaggagtcaaaaattttccaattggttgaagttgaacactcttattttaaaatccgttgatatgcttttaaagtccatcattttcaatcattccaacgttttggttcattgttctgacggttgggacagaaccagtcaagttgtatcactattagaaatttgtttggatcctttctatagaacttttgaaggttttatgatcctagtggaaaaagattggtgctcttttggtcaccggtttttggaaagaagtggtcatttaaactctgatattagatttcatgataacactatgcattccaacttcaacgatgtggataccaatggcgatgatcttgacataggtgttaacactcaagacgattatgctgaagatgatgaaggaggtgaagatgagacgaatttaattaatttgagtagaatttccaaaaaatttaacgaaaactttaaattgaacaagaaaagtctaaagttcgtctccccagttttccaacaatttttagactgtgtataccaacttttgacgcaaaacccagatctatttgaattcaacgaaagatttttaagaagactagtttaccacttgtattcatgccaatatggaacattcctttccaatagcgagaaggagaaatttcaacagaatttgccaaacaagactaaaagtgtctgggactacttcagatctagaagaaagcagttcataaatccaaatttcatacagagaaaaagaagcggcatgaatgagcacgatcaaaaccttgaagaggaagaaaaagtggagtggatttcgccggatctgaagaaagtccaatggtggtggcagttatatggaagaaaagattcagaaatgaatgatgaattacgccataaacgagactcagtacccatatcggtggataaaaagagtaaagagcatagtaattccgatggcggtaagggtttaaatttgtcaatttttggatttgatatgtttaatagaaagtga

SEQ ID NO: 6328 - DNA, 2067 bp, Artificial Sequence
  Description of Artificial Sequence: Synthetic polynucleotide
atggagtacatcaagattgccaaagtatctaatgtagtgttacatagaagaggtacggccacacaaggtactttacatttgactactcaccatttgatctttgagtctccacaattgagcacggaattttggtttccatatcctttgatctatggagtgcataaaaacccgggtagtacattattatccaagttgacttccactaatcaaatccaattggagggaacggattctcagaattacaagctttaccagggtaaggatttatggtcttttgtaaatatcaaggtaattgggaaagattatgcggtattcagtttggatttcggtggtgatttacatttacaggcaagaaaggtgtatgattccatcttaaatttgacggtcttgtccaatatcacgcaattatatgcatttatttacatatccaacaatttggaaaggaaattaccttctcccgatagctgggatatatatgacccaattaaggaatttagaaggcagggcctcgacagtaaagatgaaacatgtccttggaggctttccacggtaaacgaacactatgaattttgtccaacgtatccctctaaactttttgtaccaagatccacgtctgatatattattgaagcatgcttccaagtttagaagccagaaaagaattcctgttttaacttatcatcacaaggcaacagattgcaacattcttaggtcttctcaaccattaccggggttgatcaatcagaggtccattcaagatgaaaaattagtttgggaaagcttcaactctttttgtaataaagatattagaagaacgaaacatgtaatagtagatgccagacccagaacaaatgcattagcacagatggcgttgggtggcgggacagaaaatatggataattataatttttttttagctgataacaatatgggtgtcgataaaagtttgaaattgcccacagttacaagattatttcttggtatagataacattcatattgtttccaacacagctgcatacatgacggaagttatctgccaaggtggcgatttgaatttaccattggaacagaatttaattaggagtcaaaaattttccaattggttgaagttgaacactcttattttaaaatccgttgatatgcttttaaagtccatcattttcaatcattccaacgttttggttcattgttctgacggttgggacagaaccagtcaagttgtatctttattagaaatttgtttggatcctttctatagaacttttgaaggttttatgatcttagtggaaaaagattggtgctcttttggtcacagatttttggaaagaagtggtcatttaaactctgatattagatttcatgataacactatgcattccaacttcaacgatgtggataccaatggcgatgatcttgacataggtgttaacactcaagacgattatgctgaagatgatgaaggaggtgaagatgagacgaatttaattaatttgagtagaatttccaaaaaatttaacgaaaactttaaattgaacaagaaaagtttgaagttcgtctccccagttttccaacaatttttagactgtgtataccaacttttgacgcaaaacccagatttatttgaattcaacgaaagatttttaagaagattggtttaccacttgtattcttgccaatatggaacattcctttccaatagcgagaaggagaaatttcaacagaatttgccaaacaagactaaaagtgtctgggactacttcagatctagaagaaagcagttcataaatccaaatttcatacagagaaaaagaagcggcatgaatgagcacgatcaaaaccttgaagaggaagaaaaagtggagtggatttctccggatttgaagaaagtccaatggtggtggcagttatatggaagaaaagattctgaaatgaatgatgaattacgccataaaagagactctgtacccatatctgtggataaaaagagtaaagagcatagtaattccgatggcggtaagggtttaaatttgtctatttttggatttgatatgtttaatagaaagtga

SEQ ID NO: 6329 - DNA, 852 bp, Saccharomyces cerevisiae
atgaaccagatactaaatgcacaaaggctgatacaattatcacaatttcaccctaaactgaagaatatatggtaccttgttgcggccgccacgttcagtgtttgtaatgagccacaggaaatacctaaattataccactatgccatgctactgagtaatgataatgcacacatgtatagattcacattagcttcccaaaccattgacttactgcgctcagaattaccaatgagaaaaactttgatcaatgagaattaccaacaacctacttttttccaaaagcaattgacagcaaaatttagagaagttattcttaaaacaggacctctggccggccttccaagagcgatcaatggcctgactatgctaaaggaaactactccggacattttagtaccgcacttagacccaatagacccgtgggaggctgccatgggaaacagttctcccctttcggaaacctctatgagaaggaagcatgacaagacaatccaggaaagagatcataccatacagaacggcttacggcattggaattcaatatacaacaaagtctcaacccgcgtggtaaacaatctaaactcttcgtacccagacttatggtattatacactggtccatgtatatggccctttgtttgcctttgatgagatactatctgcgcaagagacaagtttagtgataattgcttctttggttccacaagatgttaatcctcaattgcgtgggcatttgaaaggtgccttgaatattggttgtgataaggaaactgtggaggcagtgagaggattggctatactaatatctcagtggtgtggtgttagttggaaatctggtgttgtaaaattgtaa

SEQ ID NO: 6330 - DNA, 852 bp, Artificial Sequence
  Description of Artificial Sequence: Synthetic polynucleotide
atgaaccagatattgaatgcacaaaggttgatacaattatctcaatttcaccctaaattgaagaatatatggtaccttgttgcggccgccacgttcagtgtttgtaatgagccacaggaaatacctaaattataccactatgccatgttattaagtaatgataatgcacacatgtatagattcacattagcttcccaaaccattgacttacttcgcagtgaattaccaatgagaaaaactttgatcaatgagaattaccaacaacctacttttttccaaaagcaattgacagcaaaatttagagaagttattcttaaaacaggacctttggccggccttccaagagcgatcaatggcttaactatgttgaaggaaactactccggacattttagtaccgcacttagacccaatagacccgtgggaggctgccatgggaaacagttctcccctttctgaaacctctatgagaaggaagcatgacaagacaatccaggaaagagatcataccatacagaacggcttaagacattggaattctatatacaacaaagtctccacccgcgtggtaaacaatttgaactcttcctacccagacttatggtattatacattggtccatgtatatggccctttgtttgcctttgatgagatattatctgcgcaagagacaagtttagtgataattgcttctttggttccacaagatgttaatcctcaattgcgtgggcatttgaaaggtgccttgaatattggttgtgataaggaaactgtggaggcagtgagaggattggctatattaatatctcagtggtgtggtgttagttggaaatctggtgttgtaaaattgtga

SEQ ID NO: 6331 - DNA, 606 bp, Saccharomyces cerevisiae
atggttaactcacatggaatacggtatattcggttgaagcaggtctttaatcgtgcattggaccaatcgatttcgaaattacagagttgggacaaggtcagttcatgcttcccgcaatatgtgaatagcaagcagggcgctataaacgtcgccaattgtcagcgccaattaacggaattctggacggagctttgtcaacgagagtttaaagaaattatggaagaacgaaacgtcgagcagaaactaaatgagttggacgaactgattttggaggctaaagaacgttacacggatcgtgatcaagatgaagtaaacaaagggcccgcgatcgatgagctctccagcaaagagcttgtggaatgccatttatacagccaacggatgcatgccatacacgagatagacgagcggcttgcgaaagtgaatgagatgaacgaccagttagcccaggagttgaaagacttagagacgcaagtagaggtagagaaaaacgaaattggcaagatgtacgatgagtacctgggctcccacacggaccaaccggccaacgtgctgctggtacagagcctcaatgatatggtcttggaattgaaggaaaactattga

SEQ ID NO: 6332 - DNA, 606 bp, Artificial Sequence
  Description of Artificial Sequence: Synthetic polynucleotide
atggttaactctcatggaataagatatattagattgaagcaggtctttaatcgtgcattggaccaatctatttccaaattacagagttgggacaaggtcagttcctgcttcccgcaatatgtgaatagcaagcagggcgctataaacgtcgccaattgtcagcgccaattaacggaattctggacggagctttgtcaaagagagtttaaagaaattatggaagaaagaaacgtcgagcagaaattgaatgagttggacgaattgattttggaggctaaagaacgttacacggatcgtgatcaagatgaagtaaacaaagggcccgcgatcgatgagctctccagcaaagagcttgtggaatgccatttatacagccaaagaatgcatgccatacacgagatagacgagaggcttgcgaaagtgaatgagatgaacgaccagttagcccaggagttgaaagacttagagacgcaagtagaggtagagaaaaacgaaattggcaagatgtacgatgagtacttgggctcccacacggaccaaccggccaacgtgttgttagtacagagcctcaatgatatggtcttggaattgaaggaaaactattga

SEQ ID NO: 6333 - DNA, 330 bp, Saccharomyces cerevisiae
atggtacagctgagaagaaccatcactaccaacaaagtgtttcaagcgatcacgtcgactaacgacaaagttgctcactttgtcgtgttcatgtgggagtcgtggctgtttgtaaagatgtttgctgaggacatcgtgactttccgcaagctacaggccaacaagtacgtgttaggggtgctgatctgttcattatgcgcaagtgtaacgagtgaattcgcccaaagcgtggtttcgcggggacaaagggtgttcgatgtgaaggatattatttgtaatttctggggcagtctgcttggtgtgggcattgccttctaccaggaccgataa

SEQ ID NO: 6334 - DNA, 330 bp, Artificial Sequence
  Description of Artificial Sequence: Synthetic polynucleotide
atggtacagttaagaagaaccatcactaccaacaaagtgtttcaagcgatcacgtctactaacgacaaagttgctcactttgtcgtgttcatgtgggagagttggttatttgtaaagatgtttgctgaggacatcgtgactttccgcaagttacaggccaacaagtacgtgttaggggtgttaatctgttctttatgcgcaagtgtaacgagtgaattcgcccaaagcgtggtttctagaggacaaagggtgttcgatgtgaaggatattatttgtaatttctggggcagtttacttggtgtgggcattgccttctaccaggaccgttga

SEQ ID NO: 6335 - DNA, 744 bp, Saccharomyces cerevisiae
atgctgcattgtgcgaggaggtatatgttagtcaggccacgtctcctgtggcaaagtgggacatgtgttgctcgtttccagtcgtcagtacgaacaccagctagcgaaccatcggcagagaaaggggtcgacgagtggcttgaagcgatcaacgagctaagggaagagttctctgcaaaagaatacctgccagagacctcgctggctccaccgggccagtccaaagtagacctcttacagggttcacaggcgggctccaagataaagccaactgcagagcagttggcacaatgggaggcactgaagtccgtgcccattcctccacgcaagaacgcaacgctggatcacatcacaaacatgatcatgcgccacggtaagaaggaaaaggcacaaaccattctgtccagggccttatatctggtgtactgccagacccggcaggaccccatccaggctttggaaaagtcactcgacgaactagctccgctgatgatgaccaagacattcaacacaggcgtggccaaggcttctgtcattcctgtgcctctgaacaagaggcaaagaaataggatcgcgtggaactggatcgtacaaagcgcaaaccaaagagtgtcgagcgacttcgccgtgcgtttgggagaagaactcactgccattgccaaaggcacttcgtctgcctttgaaaagagggaccagattcacaagacagccattgctcacagagcatatattcaattaaagtaa

SEQ ID NO: 6336 - DNA, 744 bp, Artificial Sequence
  Description of Artificial Sequence: Synthetic polynucleotide
atgttgcattgtgcgaggaggtatatgttagtcaggccacgtctcttatggcaaagtgggacatgtgttgctcgtttccagtcttctgtaagaacaccagctagcgaaccatctgcagagaaaggggtcgacgagtggcttgaagcgatcaacgagttgagggaagagttctctgcaaaagaatacttgccagagacctccttggctccaccgggccagtccaaagtagacctcttacagggttctcaggcgggctccaagataaagccaactgcagagcagttggcacaatgggaggcattgaagtccgtgcccattcctccacgcaagaacgcaacgttagatcacatcacaaacatgatcatgcgccacggtaagaaggaaaaggcacaaaccattttatccagggccttatatttggtgtactgccagaccagacaggaccccatccaggctttggaaaagtctctcgacgaattggctccgttaatgatgaccaagacattcaacacaggcgtggccaaggcttctgtcattcctgtgcctttgaacaagaggcaaagaaataggatcgcgtggaactggatcgtacaaagcgcaaaccaaagagtgagtagcgacttcgccgtgcgtttgggagaagaactcactgccattgccaaaggcacttcttctgcctttgaaaagagggaccagattcacaagacagccattgctcacagagcatatattcaattaaagtga

SEQ ID NO: 6337 - DNA, 510 bp, Saccharomyces cerevisiae
atgttcacaaatacacgtacaatattaatatacaatagtaaggtgatgaacacacacacacacacacacacacacacacacacacacatatatatatatacaggagatcaagttagtgtgaggggacgactactgagtttgaagttctttaaagtgttaaagttatttttcccctctcccacctcgttggcaacctctcacccaccgcttagcagcatgtctccgtacatgaccatacctcagcaatacttatacataagcaagatacgttccaagctgtctcagtgcgcccttactcgacaccaccacagagaacttgatctacgaaaaatggtgggccacgccaatatgctggacaggatcctcgacgaaatagacgaaatcgacagcgaggtagtactgtgtgacgctgccgatggttcttctactgcagaagctcattccgcttccccagcatccagcgactcttctcctctcactaataacatccggcccattagcattatgtga

SEQ ID NO: 6338 - DNA, 510 bp, Artificial Sequence
  Description of Artificial Sequence: Synthetic polynucleotide
atgttcacaaatacacgtacaatattaatatacaatagtaaggtgatgaacacacacacacacacacacacacacacacacacacacatatatatatatacaggagatcaagttagtgtgaggggaagattattaagtttgaagttctttaaagtgttaaagttatttttcccctctcccacctctttggcaacctctcacccaccgcttagcagcatgtctccgtacatgaccatacctcagcaatacttatacataagcaagatacgttccaagttatctcagtgcgcccttactagacaccaccacagagaacttgatttaagaaaaatggtgggccacgccaatatgttggacaggatcctcgacgaaatagacgaaatcgacagcgaggtagtattatgtgacgctgccgatggttcttctactgcagaagctcattccgcttccccagcatccagcgactcttctcctctcactaataacatcagacccattagcattatgtga

SEQ ID NO: 6339 - DNA, 840 bp, Saccharomyces cerevisiae
atgaacgccaactctaccacgacagcaatcggcctcaccagccccttcgaaaagctgtccttcttccctcattcgtctaatttaatactggctcatttgcatgagatcatcttcagcttcgtcttctaccagctcgcattctccgttgtcgcaccgttcttgaataaagtggtctttcgcaagcactacaccacgatccgtgacccactgctgaaaattgatttcaatgtccacaccgtctcgatgatccaggctgtcgtctcgaacaccgtcctgttgcccaccctcacgacgccaatgcattataatgttgtcacctacacagattcgtacagttcaatggtatcttccctcagcgcagggtactttatctgggacttgactatgtgcgtgcgttacttcaagctttatggtctcgagttcacgggccacgccattggctccgtatatgtgatgctgttgtccttaagaccgttctgccaaccctggatcggcaggttccttatctacgaggcctccactccctttgtgaacatcaattggttcatcatgcaatgtaacgccaagagcaagaactctatccctctgtggtttaatgtcgtcaatggccttttgctcatgactgtgtttttcgtcgtcaggatttgctggggctccatcgcatccgctctcttattcaggcagatgtggaaggtaagagacgagttacccaagttttctgctgtcacgatgatgtcgctgaacattttcatgaaccttttgaacgtgctttggttcaagaagatgattagaatcgccaagaaacttgcaaaaccagccccaacgtcgaagctagactaa

SEQ ID NO: 6340 - DNA, 840 bp, Artificial Sequence
  Description of Artificial Sequence: Synthetic polynucleotide
atgaacgccaactctaccacgacagcaatcggcctcaccagccccttcgaaaagttatccttcttccctcattcttctaatttaatattggctcatttgcatgagatcatcttcagcttcgtcttctaccagctcgcattctccgttgtcgcaccgttcttgaataaagtggtctttcgcaagcactacaccacgatccgtgacccattattgaaaattgatttcaatgtccacaccgtctccatgatccaggctgtcgtctccaacaccgtcttattgcccaccctcacgacgccaatgcattataatgttgtcacctacacagattcttacagttctatggtatcttccctcagcgcagggtactttatctgggacttgactatgtgcgtgcgttacttcaagctttatggtctcgagttcacgggccacgccattggctccgtatatgtgatgcttttgtccttaagaccgttctgccaaccctggatcggcaggttccttatctacgaggcctccactccctttgtgaacatcaattggttcatcatgcaatgtaacgccaagagcaagaactctatccctttatggtttaatgtcgtcaatggccttttgctcatgactgtgtttttcgtcgtcaggatttgctggggctccatcgcatccgctctcttattcaggcagatgtggaaggtaagagacgagttacccaagttttctgctgtcacgatgatgtctttgaacattttcatgaaccttttgaacgtgctttggttcaagaagatgattagaatcgccaagaaacttgcaaaaccagccccaacgtccaagttggactga

SEQ ID NO: 6341 - DNA, 1362 bp, Saccharomyces cerevisiae
atgtttgatcttaagacgattctcgaccatcctaatatcccgtggaaattaatcatttctgggttctcgattgcccaattttctttcgaatcttacttgacgtacagacagtaccagaagctatctgaaacaaagttgccacctgtgctggaagacgaaattgatgatgaaacttttcataaatcaaggaactactcccgggccaaggccaagttctccattttcggtgacgtctataacctagcccaaaagctagttttcatcaaatacgacctcttccctaaaatctggcacatggccgtttctttattgaatgcagtcctgccagtcagatttcatatggtctccactgtcgcacagagtttatgcttcttgggtctcttatccagtttgtctaccttggttgatttgccactctcttactatagccattttgtcctggaagaaaaatttggtttcaataaattgaccgtccaactatggatcaccgatatgatcaagagtctgactttggcgtatgctattggtggcccaatcctttacctgttccttaagatctttgataaattccctactgatttcctttggtacattatggtcttcttgttcgttgtccaaatcttagccatgacaatcattccagtcttcatcatgcccatgtttaataagttcactccattggaggacggtgaactgaaaaaatctattgaaagtttggccgatagagttgggttccctctagataagatttttgtcattgacggctcaaaaagatcttctcattcaaacgcatatttcacaggtttgccattcacctccaagagaattgttttgttcgacactttagtgaacagtaattctactgatgaaattacggctgttttggcccatgaaatcggtcactggcaaaaaaaccacatcgttaatatggtcatctttagtcaattgcacaccttcctcattttctcccttttcaccagcatctacagaaatacatcattttacaacaccttcggctttttcttagagaagtccactggcagttttgttgatcccgttatcactaaggaattccccattatcattggatttatgttatttaacgacttattaactccactcgaatgtgccatgcaattcgtgatgagtttaatttccagaactcatgaatatcaagctgatgcttatgctaaaaaattgggctacaagcaaaatctatgtagggctctaattgatctacaaatcaaaaacctttccaccatgaatgtagatcctctgtattctagctatcattattcccatccaactctagctgaaagattgaccgctctagactatgttagtgaaaagaagaaaaactaa

SEQ ID NO: 6342 - DNA, 1362 bp, Artificial Sequence
  Description of Artificial Sequence: Synthetic polynucleotide
atgtttgatcttaagacgattctcgaccatcctaatatcccgtggaaattaatcatttctgggttctccattgcccaattttctttcgaatcttacttgacgtacagacagtaccagaagttatctgaaacaaagttgccacctgtgttggaagacgaaattgatgatgaaacttttcataaatctaggaactactccagagccaaggccaagttctccattttcggtgacgtctataacttggcccaaaagttggttttcatcaaatacgacctcttccctaaaatctggcacatggccgtttctttattgaatgcagtcttgccagtcagatttcatatggtctccactgtcgcacagagtttatgcttcttgggtctcttatccagtttgtctaccttggttgatttgccactctcttactatagccattttgtcttggaagaaaaatttggtttcaataaattgaccgtccaattatggatcaccgatatgatcaagagtttgactttggcgtatgctattggtggcccaatcctttaccttttccttaagatctttgataaattccctactgatttcctttggtacattatggtcttcttgttcgttgtccaaatcttagccatgacaatcattccagtcttcatcatgcccatgtttaataagttcactccattggaggacggtgaattgaaaaaatctattgaaagtttggccgatagagttgggttccctttggataagatttttgtcattgacggctctaaaagatcttctcattccaacgcatatttcacaggtttgccattcacctccaagagaattgttttgttcgacactttagtgaacagtaattctactgatgaaattacggctgttttggcccatgaaatcggtcactggcaaaaaaaccacatcgttaatatggtcatctttagtcaattgcacaccttcctcattttctcccttttcaccagcatctacagaaatacatctttttacaacaccttcggctttttcttagagaagtccactggcagttttgttgatcccgttatcactaaggaattccccattatcattggatttatgttatttaacgacttattaactccactcgaatgtgccatgcaattcgtgatgagtttaatttccagaactcatgaatatcaagctgatgcttatgctaaaaaattgggctacaagcaaaatttatgtagggctttgattgatttgcaaatcaaaaacctttccaccatgaatgtagatcctttatattctagctatcattattcccatccaactttggctgaaagattgaccgctttggactatgttagtgaaaagaagaaaaactga

SEQ ID NO: 6343 - DNA, 612 bp, Saccharomyces cerevisiae
atggctcaagccttgaactccaccaatattgcttttttcagagtagcatttttattcacgatcgccttcttttgtttaaagaacgttaattctattttgcaaaatacatatttcatagtcttaacgcaagcgatgaatttaccgcagttaacactgtcacgttatagtggtcaattgggtcttttcgctcttctgtttactcttaacggtgttcatgatctaattcccctgttagaaaacaatgttaaatacttccaatctgttgtgccagttagattactaattttttttattttgacaagtatctcgtacctttgggagtcaaacttttacgttcacaataactctgtttttatttactgttttgcagaagtttggataaattttcttttgtataatgccattagggaggagaaaaatgaagagttcaaaagattgaaccaattcatggttaatgatgaggatattgaagaaccccaaccatttaccgtgaagactgaaaccacagaaatcattgaaataatcaatgatgaagaaaatgacgatgaagatgggaaagataatgatgataacaatgagaaaggtaatgatgatagcgatgcaaaaaaataa

SEQ ID NO: 6344 - DNA, 612 bp, Artificial Sequence
  Description of Artificial Sequence: Synthetic polynucleotide
atggctcaagccttgaactccaccaatattgcttttttcagagtagcatttttattcacgatcgccttcttttgtttaaagaacgttaattctattttgcaaaatacatatttcatagtcttaacgcaagcgatgaatttaccgcagttaacattatctcgttatagtggtcaattgggtcttttcgctcttttatttactcttaacggtgttcatgatttgattcccttattagaaaacaatgttaaatacttccaatctgttgtgccagttagattattgattttttttattttgacaagtatctcctacctttgggagagcaacttttacgttcacaataactctgtttttatttactgttttgcagaagtttggataaattttcttttgtataatgccattagggaggagaaaaatgaagagttcaaaagattgaaccaattcatggttaatgatgaggatattgaagaaccccaaccatttaccgtgaagactgaaaccacagaaatcattgaaataatcaatgatgaagaaaatgacgatgaagatgggaaagataatgatgataacaatgagaaaggtaatgatgatagcgatgcaaaaaaatga

SEQ ID NO: 6345 - DNA, 2187 bp, Saccharomyces cerevisiae
atggaggaaattcctgccctgtatccaacggaacaagaattcaaaaatccgatcgattatctctctaacccccacattaaaaggcttggtgtacgatatggtatggtcaaggtcgtaccaccaaacgggttctgcccgccactttctattgatatggaaaattttacttttcaaccaagaattcaaaatctggagaacctagacctgaaaaataggtgtaggctattttttatgaaacagttaaataattttaaaagatccgttaaggatccatcgaaacttatacttagggaaccttatacgattgtagaatattcagattctactcatgcatcggaaatactaaaaaaaaaagtgtacttttatgacgttttctctgaactaataaaagacaatcggacacttactgacactacacagtcattcaggcgaaaattgaaatttagagatatttcccaattaagaggcgacatcagtctatggaggaccatttctaaaaaattcaacgtaccaatcggcttgttaaaggaaatttttgagaaatatattgcctcatactacatatttcttcattcactgaacgagaacgtgcacacggcgctgcatgctgaccagtatccaaaatccttattaagtgatgacgaggacgatttcgatcttgggccagattcgaattctgggtcggattttgaggaggacgatgatgatgcttgtattgtttgtcgcaagacaaatgatccaaaaagaacaattttatgtgattcatgtgacaaaccattccatatatattgtttatcaccacctttggaacgtgttccctctggcgattggatttgtaacacttgtatcgtcggaaacggatattacggattcactcaggacacgcatgactattctctaccagagtttcaagaatattgtaaacgtcaaaattcaaggttattaccagcacgaaaactgtctatagatgagttggaagagatgttttggagcttagtgaccaagaatcgtcgcagttcattaacgacagttaaatacggtgctgacatacataacgaattgccaggtcaaattaccggctttccgacgagagaatttatacccaaaaatataaatggggacgaattgatagactacctcaaatattgcgatcatcctatgaatttaactaacttgcctatggctcataattcgctattaccgttatttaaaagaaatatttctggcatgactattccttggatttacataggctccttattttccacattttgttggcatatggaagatcagtataccctaagtgctaactatcaacatgaaggtgaccctaaggtctggtacagcattcccgaatcgggatgtacgaaattcaacgatctattaaatgatatgtcaccagacttatttatcaaacaaccagacctactgcatcagctagtgactttaatatctccgtacgatccaaatttcaagaaatcaggtattcctgtgtacaaagctgtgcaaaagcccaacgaatatattatcacgtttcctaaatgttaccatgctggttttaatacaggttataattttaatgaagctgtcaattttactatagatttctggctaccatatggatttggtgcgattacggattataaattaactcagaaagcatgtgtttttgatatgtttgatttaatgatcaatgttttggacaagtacaataaagatactctattgttcaatgatgcttttgttaggcaatgttactcttcattgatcgtcttttataatactgaattaaaacgcatacggaaaattcaggccattgtaccacggacaactcttttggaggtgcatactgatccaaacgatgaagatgaggaatacgatatattttgttcccaatgtaagactatatgttcaatagcctttgtattgcgaaagaataactatgattcaattagaacgtataaaagacacaagaaaaaccatttaagtattaggcagtggaatgaactatccacgacggacagtaaagtgagtatcctgtgtacgcaggattacttaaaatcaatacaaaacttgaacaatagcgacggtgaagaaccttatattgacgatgaattgtatttcactaagtctttgaaggatattgactctttaataaagcaagttggtgttaagttagatagatag

SEQ ID NO: 6346 - DNA, 2187 bp, Artificial Sequence
  Description of Artificial Sequence: Synthetic polynucleotide
atggaggaaattcctgccttatatccaacggaacaagaattcaaaaatccgatcgattatctctctaacccccacattaaaaggcttggtgtaagatatggtatggtcaaggtcgtaccaccaaacgggttctgcccgccactttctattgatatggaaaattttacttttcaaccaagaattcaaaatttggagaacttggacttgaaaaataggtgtaggttattttttatgaaacagttaaataattttaaaagatccgttaaggatccatctaaacttatacttagggaaccttatacgattgtagaatattctgattctactcatgcatctgaaatattgaaaaaaaaagtgtacttttatgacgttttctctgaattgataaaagacaatagaacacttactgacactacacagtctttcaggagaaaattgaaatttagagatatttcccaattaagaggcgacatcagtttatggaggaccatttctaaaaaattcaacgtaccaatcggcttgttaaaggaaatttttgagaaatatattgcctcttactacatatttcttcattctttgaacgagaacgtgcacacggcgttgcatgctgaccagtatccaaaatccttattaagtgatgacgaggacgatttcgatcttgggccagattctaattctgggtctgattttgaggaggacgatgatgatgcttgtattgtttgtcgcaagacaaatgatccaaaaagaacaattttatgtgattcttgtgacaaaccattccatatatattgtttatctccacctttggaacgtgttccctctggcgattggatttgtaacacttgtatcgtcggaaacggatattacggattcactcaggacacgcatgactattctttaccagagtttcaagaatattgtaaacgtcaaaattctaggttattaccagcaagaaaattatctatagatgagttggaagagatgttttggagcttagtgaccaagaatcgtcgcagttctttaacgacagttaaatacggtgctgacatacataacgaattgccaggtcaaattaccggctttccgacgagagaatttatacccaaaaatataaatggggacgaattgatagactacctcaaatattgcgatcatcctatgaatttaactaacttgcctatggctcataattctttattaccgttatttaaaagaaatatttctggcatgactattccttggatttacataggctccttattttccacattttgttggcatatggaagatcagtataccttaagtgctaactatcaacatgaaggtgaccctaaggtctggtacagcattcccgaatctggatgtacgaaattcaacgatttattaaatgatatgtctccagacttatttatcaaacaaccagacttattacatcagttggtgactttaatatctccgtacgatccaaatttcaagaaatctggtattcctgtgtacaaagctgtgcaaaagcccaacgaatatattatcacgtttcctaaatgttaccatgctggttttaatacaggttataattttaatgaagctgtcaattttactatagatttctggttaccatatggatttggtgcgattacggattataaattaactcagaaagcatgtgtttttgatatgtttgatttaatgatcaatgttttggacaagtacaataaagatactttattgttcaatgatgcttttgttaggcaatgttactcttctttgatcgtcttttataatactgaattaaaacgcataagaaaaattcaggccattgtaccaagaacaactcttttggaggtgcatactgatccaaacgatgaagatgaggaatacgatatattttgttcccaatgtaagactatatgttctatagcctttgtattgagaaagaataactatgattctattagaacgtataaaagacacaagaaaaaccatttaagtattaggcagtggaatgaattatccacgacggacagtaaagtgagtatcttgtgtacgcaggattacttaaaatctatacaaaacttgaacaatagcgacggtgaagaaccttatattgacgatgaattgtatttcactaagtctttgaaggatattgactctttaataaagcaagttggtgttaagttagatagatga

SEQ ID NO: 6347 - DNA, 351 bp, Saccharomyces cerevisiae
atgcgctgggatgttatcatcttatacgcaattagccgcccatatgccacccggcgcaccgggtcgcacacacacccccgtgattcgcgatatatagcggccaatcaacggcgacctccaagcgcgtgccgggtgggcccctcgccggccaagcagcgcaaggatattcccatcttcgagctcttagatacaacgcttataaagaacgcactttttgcattaacctcttttttgtattacagaacaaacattttaacttgcccttttttaaactttctttatctctccaggacaggccaattggataaattttgcaaagatcaaacagtaacacaaattttagcaacctaa

SEQ ID NO: 6348 - DNA, 351 bp, Artificial Sequence
  Description of Artificial Sequence: Synthetic polynucleotide
atgcgctgggatgttatcatcttatacgcaattagccgcccatatgccaccagacgcaccgggtctcacacacacccccgtgattctagatatatagcggccaatcaaagaagacctccaagcgcgtgcagggtgggcccctctccggccaagcagcgcaaggatattcccatcttcgagctcttagatacaacgcttataaagaacgcactttttgcattaacctcttttttgtattacagaacaaacattttaacttgcccttttttaaactttctttatctctccaggacaggccaattggataaattttgcaaagatcaaacagtaacacaaattttagcaacctga

SEQ ID NO: 6349 - DNA, 1536 bp, Saccharomyces cerevisiae
atggttttgccaagactatatactgctacatcccgtgctgcttttaaagcagccaaacaatccgctccgcttctatccacttcgtggaaaagatgtatggcctcagctgctcaatctactccaatcaccggtaaagttaccgctgtcattggtgccattgttgacgttcattttgaacaatcagagttgcccgctattttgaacgctttagaaattaaaacacctcaaggtaagttggttttggaagttgctcaacatttgggtgaaaacactgtcagaaccattgctatggatggtaccgaaggtttggtccgtggtgaaaaggttcttgacactggtggccctatctccgtcccagttgggagagaaactttagggagaatcatcaacgttatcggtgaacctattgatgaaagaggtccaattaagtccaaactaagaaagccaattcacgcagaccctcctagttttgcagaacaatctacttcggctgaaattttggaaacaggtatcaaagtcgtcgatctattagctccttatgccagaggtggtaagattggtcttttcggtggtgcaggtgtcggtaagactgtgttcattcaagaattgattaacaatatcgccaaggcccatggtggtttttccgttttcaccggtgttggtgaaagaacaagagaaggtaatgacttgtaccgtgaaatgaaggaaactggtgtcattaacttggaaggtgaatccaaggtcgccttagtgttcggtcaaatgaacgaacctccaggagccagagccagagtcgctttaactggtttgacgatcgctgaatatttcagagatgaagaaggtcaagatgtcttgttgtttatcgacaatatctttagatttactcaagctggttcagaagtctctgcccttttgggtcgtattccatctgccgtcggttatcaaccaactttggccactgatatgggtctcttacaagaaagaattaccaccacaaagaagggttctgtcacttctgtgcaagccgtttatgttccagccgatgatttaacagatcctgctcctgccactacttttgcccatttggacgctactaccgtcttgtcaagaggtatttcagaattaggtatttaccctgcagtggatccattggattctaaatcaaggttattggatgccgccgttgtcggtcaagaacattatgacgtcgcctccaaggttcaagaaactttacagacctataaatctttacaagatatcattgctattttgggtatggatgaattgtccgaacaagataaactaactgtcgaaagggcaagaaagattcaaagattcttatctcaaccatttgctgtcgccgaagtctttactggtatcccaggtaaattagtgagattaaaggacaccgttgcctcgttcaaagccgttttggaaggtaaatacgataatataccagaacatgctttctatatggttggtggtattgaagatgttgttgctaaagctgaaaagttagccgctgaagccaactag

SEQ ID NO: 6350 - DNA, 1536 bp, Artificial Sequence
  Description of Artificial Sequence: Synthetic polynucleotide
atggttttgccaagattatatactgctacatcccgtgctgcttttaaagcagccaaacaatccgctccgcttctttccacttcttggaaaagatgtatggcctctgctgctcaatctactccaatcaccggtaaagttaccgctgtcattggtgccattgttgacgttcattttgaacaaagtgagttgcccgctattttgaacgctttagaaattaaaacacctcaaggtaagttggttttggaagttgctcaacatttgggtgaaaacactgtcagaaccattgctatggatggtaccgaaggtttggtccgtggtgaaaaggttcttgacactggtggccctatctccgtcccagttgggagagaaactttagggagaatcatcaacgttatcggtgaacctattgatgaaagaggtccaattaagtccaaattgagaaagccaattcacgcagaccctcctagttttgcagaacaatctactagtgctgaaattttggaaacaggtatcaaagtcgtcgatttattagctccttatgccagaggtggtaagattggtcttttcggtggtgcaggtgtcggtaagactgtgttcattcaagaattgattaacaatatcgccaaggcccatggtggtttttccgttttcaccggtgttggtgaaagaacaagagaaggtaatgacttgtaccgtgaaatgaaggaaactggtgtcattaacttggaaggtgaatccaaggtcgccttagtgttcggtcaaatgaacgaacctccaggagccagagccagagtcgctttaactggtttgacgatcgctgaatatttcagagatgaagaaggtcaagatgtcttgttgtttatcgacaatatctttagatttactcaagctggttctgaagtctctgcccttttgggtcgtattccatctgccgtcggttatcaaccaactttggccactgatatgggtctcttacaagaaagaattaccaccacaaagaagggttctgtcacttctgtgcaagccgtttatgttccagccgatgatttaacagatcctgctcctgccactacttttgcccatttggacgctactaccgtcttgtccagaggtatttctgaattaggtatttaccctgcagtggatccattggattctaaatctaggttattggatgccgccgttgtcggtcaagaacattatgacgtcgcctccaaggttcaagaaactttacagacctataaatctttacaagatatcattgctattttgggtatggatgaattgtccgaacaagataaattaactgtcgaaagggcaagaaagattcaaagattcttatctcaaccatttgctgtcgccgaagtctttactggtatcccaggtaaattagtgagattaaaggacaccgttgcctctttcaaagccgttttggaaggtaaatacgataatataccagaacatgctttctatatggttggtggtattgaagatgttgttgctaaagctgaaaagttagccgctgaagccaactga

SEQ ID NO: 6351 - DNA, 1494 bp, Saccharomyces cerevisiae
atgttcatcagtagaagatgcagaattaaaggctttacccttaagaatttgctgtggttcaggtcatcatcaactcgatttgtttcaactgaatcaccagatgcgagcgcaattacgaaaccagatggtattttcaattattctctgttggaaaacagaacatacatcaggatacgaggacccgacacagtgaaatttctaaacggattagttacctcgaaactattacctcattttattaagaaaaatctaaccactgtagaagagaatgaagtgcctactgaagaaggaacgacgaaggttgatccaattattcctgtgccagaatttgatgcacgactgggaaattggggactgtataacgaaaaaggtattcaagggccatatatttcaaggtttggtttgtactctgcatttttaaacggtaaggggaagttaataacagatacaattatttaccccactcctgtgaccgtaagcgaacaaatttcaaattatcctgagtatctgttagagcttcacgggaatgtagtggacaaaattttgcacgttttacaaactcacaagttggccaataagattaaattcgaaaaaattgatcattcctccttgaaaacctgggatgttgaggttcaattccctaatttgcccaaagatattgaaaacccgtggtttgataatctactggatcctatggctctaccaaaaaattccatagatgctaataattttgctgttaatgttttaaattctttgtttaactcagatcctagaatattgggtatttacgtagaaagaagaactgagtcaatgtcaaggcattactccacatttccacaatccttcagagttgtcacttccgagcaagtggatgatctctctaagctatttaactttaacgttttcgacttcccttttcaagtaaataaaaaagcttccgttcaagttagagaaatcagatttcaaaaaggtcttatagatagcactgaggattacatatctgagactttgctacctttggaactaaactttgatttttttccaaacactataagcacaaacaaaggatgttatgtaggacaagagctgacagccaggacatatgctacaggcattctacggaaacgtttggtcccagttaagctggataattatcaacttttagatacagacccagaaagaaagtacgcagaattccatatcgacaacgttgtagaaaagagccttgcagagaacgagccaaccctcaatccatttaccaataaaccgcccgaacgaaccaagagaaagcaaaggccggcaggcttattgatttctaatgaagggctgtatggcgtagctttacttagaacagagcatttctctgctgccttctcatctgatgagccagtcgaattttacattactacaacgaagggtgaaaatattaaaataacacctcaaaaaccattctggtttagcgactggaaaaacaataacgggcctcataaatag

SEQ ID NO: 6352 - DNA, 1494 bp, Artificial Sequence
  Description of Artificial Sequence: Synthetic polynucleotide
atgttcatcagtagaagatgcagaattaaaggctttacccttaagaatttgttatggttcaggagttcttctactagatttgtttccactgaatctccagatgcgagcgcaattacgaaaccagatggtattttcaattattctttgttggaaaacagaacatacatcaggataagaggacccgacacagtgaaatttttgaacggattagttacctccaaattattacctcattttattaagaaaaatttgaccactgtagaagagaatgaagtgcctactgaagaaggaacgacgaaggttgatccaattattcctgtgccagaatttgatgcaagattaggaaattggggattgtataacgaaaaaggtattcaagggccatatatttctaggtttggtttgtactctgcatttttaaacggtaaggggaagttaataacagatacaattatttaccccactcctgtgaccgtaagcgaacaaatttctaattatcctgagtatcttttagagcttcacgggaatgtagtggacaaaattttgcacgttttacaaactcacaagttggccaataagattaaattcgaaaaaattgatcattcctccttgaaaacctgggatgttgaggttcaattccctaatttgcccaaagatattgaaaacccgtggtttgataatttattagatcctatggctttgccaaaaaattccatagatgctaataattttgctgttaatgttttaaattctttgtttaacagtgatcctagaatattgggtatttacgtagaaagaagaactgagtccatgtctaggcattactccacatttccacaatccttcagagttgtcacttccgagcaagtggatgatctctctaagttatttaactttaacgttttcgacttcccttttcaagtaaataaaaaagcttccgttcaagttagagaaatcagatttcaaaaaggtcttatagatagcactgaggattacatatctgagactttgttacctttggaattgaactttgatttttttccaaacactataagcacaaacaaaggatgttatgtaggacaagagttgacagccaggacatatgctacaggcattttaagaaaacgtttggtcccagttaagttggataattatcaacttttagatacagacccagaaagaaagtacgcagaattccatatcgacaacgttgtagaaaagagccttgcagagaacgagccaaccctcaatccatttaccaataaaccgcccgaaagaaccaagagaaagcaaaggccggcaggcttattgatttctaatgaagggttatatggcgtagctttacttagaacagagcatttctctgctgccttcagttctgatgagccagtcgaattttacattactacaacgaagggtgaaaatattaaaataacacctcaaaaaccattctggtttagcgactggaaaaacaataacgggcctcataaatga

SEQ ID NO: 6353 - DNA, 678 bp, Saccharomyces cerevisiae
atgtctgacaccgaagctccagttgaagttcaagaagatttcgaagttgttgaagaattcaccccagtcgtcttggctactccaattccagaagaagtccaacaagctcaaaccgagattaagttgttcaacaaatggtcttttgaagaagttgaagttaaggatgcttctttggttgactacgttcaagttagacaaccaatctttgttgctcacaccgctggtcgttacgccaacaagagattcagaaaggctcaatgtccaatcattgaaagattgaccaactccttgatgatgaacggtagaaacaacggtaagaaattaaaggctgttagaatcatcaagcacactttggacatcatcaatgtcttgactgaccaaaacccaatccaagttgttgttgacgctatcaccaacactggtccaagagaagacaccaccagagtcggtggtggtggtgctgctagacgtcaagctgtcgatgtttctccattgagaagagttaaccaagctattgctttgttgaccattggtgccagagaagctgctttcagaaacatcaagaccattgctgaaactttggccgaagaattgatcaatgctgctaagggttcctctacttcttacgctatcaagaagaaggatgaattggaacgtgttgccaagtctaaccgttaa

SEQ ID NO: 6354 - DNA, 678 bp, Artificial Sequence
  Description of Artificial Sequence: Synthetic polynucleotide
atgtctgacaccgaagctccagttgaagttcaagaagatttcgaagttgttgaagaattcaccccagtcgtcttggctactccaattccagaagaagtccaacaagctcaaaccgagattaagttgttcaacaaatggtcttttgaagaagttgaagttaaggatgcttctttggttgactacgttcaagttagacaaccaatctttgttgctcacaccgctggtcgttacgccaacaagagattcagaaaggctcaatgtccaatcattgaaagattgaccaactccttgatgatgaacggtagaaacaacggtaagaaattaaaggctgttagaatcatcaagcacactttggacatcatcaatgtcttgactgaccaaaacccaatccaagttgttgttgacgctatcaccaacactggtccaagagaagacaccaccagagtcggtggtggtggtgctgctagacgtcaagctgtcgatgtttctccattgagaagagttaaccaagctattgctttgttgaccattggtgccagagaagctgctttcagaaacatcaagaccattgctgaaactttggccgaagaattgatcaatgctgctaagggttcctctacttcttacgctatcaagaagaaggatgaattggaacgtgttgccaagtctaaccgttga

SEQ ID NO: 6355 - DNA, 1347 bp, Saccharomyces cerevisiae
atggcaccggaaatttttgttaaattcaagtgtgcaagtagagacataaagctactatgggcgtccgtctttcttagacttctatcatatggtttaacaaatcaagttttgacgctttttttaaatgccatcaatatgacagaggataaaattgggctgtttatgtcattaacactggcaggggatgtaatttgctcttacattcttacttggtatgcggattcctggggccgaagaagagtcctagtttatggttgtgcaatgatgttgttaagtgggttggttttcagttttagcgaaaatttcaccctcttgctagtatttgctatcttcggtgttatatcgccttcaagtgatgaagtcgggcctttcaaatctatagaagaggccatgattgcacatctgagtcctcataatgcaagaccagagatttatgctattcacgccttggttggaacaattggaagcgctctaggtgcaataatttgtggtatatttgtagatcttttgaaaagaactggtttagctgctactgatttgcaatgttataaattagttttcttactgtatgccttcttcgccttttgcaaaatggtcatcatgctcttattatcagatgctacagaattggacgggcattatgaacatacagattgcaatgaagaaacagctgaaccattggacgttaacgatgaaactgcaccattaatgagacaagcaactcacccagaagaaagatccaacaaactatctaaggagaccgtttcggttttgatgaaattgttagtaatcttcatggtcgactctctcgggtccgggtttatgacaagtggctggatggtttactactatagtaagcaatttttgatgggatctctggcgttgggtactttatttttcatcacgcaactggttatggcatcttccaccatcccatcatcaataattgccagatgttttggcccagtaagagccacactattggtccaaattccatcagggatattttctattctcatccctatggccaagaattacttgcccttatctattttgtttttgaatctgcattttgcaacaactgccatggacgttacaccaaggcaaattctattaacaaatatcatcaaaccaagagatttaaccaaagttatgggggtggtcaacattggaaagacatttgctcggtgtgttggtccaatattcacgggtatacttgctaacaataattatttatggctatgttacatcattagtgggtccttggtgataacggcggatctaatactggcatgcatgtttttaggagtggacgctaaaattaaaaagcaaatgaaccgccattaa

SEQ ID NO: 6356 - DNA, 1347 bp, Artificial Sequence
  Description of Artificial Sequence: Synthetic polynucleotide
atggcaccggaaatttttgttaaattcaagtgtgcaagtagagacataaagttattatgggcgtccgtctttcttagacttttatcttatggtttaacaaatcaagttttgacgctttttttaaatgccatcaatatgacagaggataaaattgggttgtttatgtctttaacattagcaggggatgtaatttgctcttacattcttacttggtatgcggattcctggggcagaagaagagtcttggtttatggttgtgcaatgatgttgttaagtgggttggttttcagttttagcgaaaatttcaccctcttgttagtatttgctatcttcggtgttatatctccttctagtgatgaagtcgggcctttcaaatctatagaagaggccatgattgcacatttgagtcctcataatgcaagaccagagatttatgctattcacgccttggttggaacaattggaagcgctttgggtgcaataatttgtggtatatttgtagatcttttgaaaagaactggtttagctgctactgatttgcaatgttataaattagttttcttattatatgccttcttcgccttttgcaaaatggtcatcatgctcttattaagtgatgctacagaattggacgggcattatgaacatacagattgcaatgaagaaacagctgaaccattggacgttaacgatgaaactgcaccattaatgagacaagcaactcacccagaagaaagatccaacaaattatctaaggagaccgtttctgttttgatgaaattgttagtaatcttcatggtcgactctctcgggtccgggtttatgacaagtggctggatggtttactactatagtaagcaatttttgatgggatctttagcgttgggtactttatttttcatcacgcaattggttatggcatcttccaccatcccatcttctataattgccagatgttttggcccagtaagagccacattattggtccaaattccatctgggatattttctattctcatccctatggccaagaattacttgcccttatctattttgtttttgaatttacattttgcaacaactgccatggacgttacaccaaggcaaattttattaacaaatatcatcaaaccaagagatttaaccaaagttatgggggtggtcaacattggaaagacatttgctcgttgtgttggtccaatattcacgggtatacttgctaacaataattatttatggttatgttacatcattagtgggtccttggtgataacggcggatttgatattggcatgcatgtttttaggagtggacgctaaaattaaaaagcaaatgaaccgccattga

SEQ ID NO: 6357 - DNA, 1227 bp, Saccharomyces cerevisiae
atgagtttagaggatacattagccaacatgtcattatatgacgccaagaaatattttcgtaaagctcaaaatgttgttttcaattatactgagatggaggggaaagttcgtgaagcgacaaacaacgagccttggggtgcctcatccactttaatggaccagatttctcaaggaacttacaatttcagggaaagagaagaaattttgtccatgatattcagaaggttcactgaaaaggcaggtagtgagtggaggcaaatttataaagccttgcaattgctcgattaccttatcaaacacggttctgaaaggtttatcgatgatacaaggaatagcattaacttaattaggattttagaaacttttcactatattgattcccagggaagagatcaaggaattaatgtcagaactagggtcaaagctttgattgaattattgagcgacgataataagatacgcgcagaaagaaaaaaggcaagagaaacggcaaagaagtacaagggcgttgctggaggatctgcctctgctgatggcagtttgaattcgaaggcaggtttcacgtcaacgaaagtgcacggcattagcgtgagtgctgatttcgatagtgacaatgaagataacgaagatggttcttttagtcaaaatggatataacgataatgcctcgagagccacatctactcctgggcaaggaaaacaagaaccagaggactttgttgactttttttctagtgagtcttcaaaaccatctaaagaactcatacaagaagatgaaaagaaggcggacgaagaagaggacgatgatgacgagttttcagaatttcaaagcgccgtccctgttaccaaccctgctaattcgtttaacttgctaaacacgagcccaattgagggtatgcccgccaccacgagttcaatgcctttttataacagctccactaccgaccaaggcaagattaccccagctattgcggaacctaaaaaagtagatccttttagctctctcttttcaactgcaaaggcatctgcagaagcacctagtgctcctaaagcatcccaagcgaaagccgctgcctctaatcctgtatctaatagcacaactgcactaagtacagatcaagatgatgatgacgaatttggtgaaatgcatggtggagctgttcaacaagaacagaataccaataataaccatacatcatccaaagaaatcgatttactttccttttga

SEQ ID NO: 6358 - DNA, 1227 bp, Artificial Sequence
  Description of Artificial Sequence: Synthetic polynucleotide
atgagtttagaggatacattagccaacatgtctttatatgacgccaagaaatattttcgtaaagctcaaaatgttgttttcaattatactgagatggaggggaaagttcgtgaagcgacaaacaacgagccttggggtgcctcttccactttaatggaccagatttctcaaggaacttacaatttcagggaaagagaagaaattttgtccatgatattcagaaggttcactgaaaaggcaggtagtgagtggaggcaaatttataaagccttgcaattgctcgattaccttatcaaacacggttctgaaaggtttatcgatgatacaaggaatagcattaacttaattaggattttagaaacttttcactatattgattcccagggaagagatcaaggaattaatgtcagaactagggtcaaagctttgattgaattattgagcgacgataataagatacgcgcagaaagaaaaaaggcaagagaaacggcaaagaagtacaagggcgttgctggaggatctgcctctgctgatggcagtttgaattctaaggcaggtttcacgtccacgaaagtgcacggcattagcgtgagtgctgatttcgatagtgacaatgaagataacgaagatggttcttttagtcaaaatggatataacgataatgcctctagagccacatctactcctgggcaaggaaaacaagaaccagaggactttgttgactttttttctagtgagtcttctaaaccatctaaagaactcatacaagaagatgaaaagaaggcggacgaagaagaggacgatgatgacgagttttctgaatttcaaagcgccgtccctgttaccaaccctgctaattcttttaacttgttgaacacgagcccaattgagggtatgcccgccaccacgagttctatgcctttttataacagctccactaccgaccaaggcaagattaccccagctattgcggaacctaaaaaagtagatccttttagctctctcttttccactgcaaaggcatctgcagaagcacctagtgctcctaaagcatcccaagcgaaagccgctgcctctaatcctgtatctaatagcacaactgcattaagtacagatcaagatgatgatgacgaatttggtgaaatgcatggtggagctgttcaacaagaacagaataccaataataaccatacatcttccaaagaaatcgatttactttccttttga

SEQ ID NO: 6359 - DNA, 2436 bp, Saccharomyces cerevisiae
atgagaatgatacagagagagagaaagagagagaaagaggaaggtcaattaaaggagagaactgttgttaatatggcagaccctgatgacaatgaggccgaagccactggattacaacaatatagtggcgagaccactcgcgatgacaatgaagaaagcatgaatgattctttcactttaacatccaggaatagaggcagaagtaatacaatatctagtattgttagtggttatgaaataatgaaagaacatatggacaaggaaaagtttatgtacttgattctagcgagtctccttttgtacatgggatttgttgccgcatttgctcccaggacgtctttatcaagagactttcggcggtttcactcttccagattgacgaatgcagaggtttataggatatacttgaactccttgcaacaggaaaatagagcgaaagaacatgtatacaagtatgctgggtacatgagcaacggagcaagtgattcgtcaacgtttaaatataccttggacgagtttctagatatggggtacaaacccaaagttgaaaaatattacccatggataggtgaaccagtagacactaacgtagctcctttagaaaatggtaaagtggtctacgaagcaagcatgatcgaggatagagttaaaggtgatcctgcttctcacgctaggaaaaggcaaaagggtttccatcaatattcaaaaaatggaagtgtaactgctcgatacgtgttttgcaattatggtagcatcagtgattacaagctacttttgaagaaaaacattgatattgaagataaaatccacatcgtacgatcgggtaaaatattacctggattaaaggtaaagaatgcagaactttatggcgcttccagtgtcattatatatacagacccatttgacgatggtaaagttactgaggaaaatgggtttttacactatccttatggaccagcaagaaacccaagttatattaggagagattctgtaaactatttcagtgacactccaggagatccgacaactccagggtatccctccaaggattccgacactgaacatatgtcaccggtagggagagtgccgaggataccatcggtgccgatgagtgctagagatgtccaaccaattttagaaagattgaatggcaggggttttcaaattgggcccggtagtaatataaaagattttggatcattcactggaccttcaagctctatcgataaagtccatttgcataatgagctaacttacaacatcaaggaaatgagtagtgtagaggttagtatccctggtatattcactgagggggagattattatcggagctcatagggattcgctcgcctcgagtagcgccggtgatgcaaatagtggcagcgctattcttttagaaattgcacgaggaatgagtaaattacttaagcatggttggaagccactgcgtcctatcaaactaataagttgggatggtgaacgatccggccttctgggatctacagattatgcagaagctcatgctgcgattctcaggagaagggccttggtatacctaaatctagataatgcaatctctgggacaaattttcactgtaaagccaacccacttttacaagacgtgatatacgaagctgctaagctcacggaatttaatgggcacgaagactggtcattgttcgaccattggaaatacacttctaatgccactatttctctacttgatgggttgtctagttacacttcatttcagtaccatcttggagtgcccgctgcacattttcagtttaatgccaatgatacttcaggcgcagtctatcatagtaactccgtattcgatagcccaacttggttggaaaaatttaccaattctgactacaagttacacaacaccatggccatgtttgtaggtttgacaacgctgatgctgagtgaaaacgaactggcaagattcaatacacatgtttacctgaagaaaatatataactggtatatcgcatggcactctaatctatcttcagcatttccccaggacgatgaagtgaacagcttagcaaaaagggttctggacttattaaaagttgccacacaggaagatagcatccaatttgaccaacaaaatggtattctctataaagagtgtagggaagctttacctgtttgggctttttacaaaaaaatcaagagctatattaaactgcaacgatccaatagcaaatcaaagcaaattgatcaattatttattacacacagaggactgaaagacagggaatggatgaagtactctcttttagcacctagtaagtttgagggatctgtcggggaagttttgcccggccttcacgaaggattggctgatattgatagaaacgaggtcattcagtggttaaccattttgctaagccaattcagcaacgttcgctatttacttcaataa

SEQ ID NO: 6360 - DNA, 2436 bp, Artificial Sequence
  Description of Artificial Sequence: Synthetic polynucleotide
atgagaatgatacagagagagagaaagagagagaaagaggaaggtcaattaaaggagagaactgttgttaatatggcagaccctgatgacaatgaggccgaagccactggattacaacaatatagtggcgagaccactcgcgatgacaatgaagaaagcatgaatgattctttcactttaacatccaggaatagaggcagaagtaatacaatatctagtattgttagtggttatgaaataatgaaagaacatatggacaaggaaaagtttatgtacttgattttggcgagtctccttttgtacatgggatttgttgccgcatttgctcccaggacgtctttatctagagactttagaagatttcactcttccagattgacgaatgcagaggtttataggatatacttgaactccttgcaacaggaaaatagagcgaaagaacatgtatacaagtatgctgggtacatgagcaacggagcaagtgattcttctacgtttaaatataccttggacgagtttttggatatggggtacaaacccaaagttgaaaaatattacccatggataggtgaaccagtagacactaacgtagctcctttagaaaatggtaaagtggtctacgaagcaagcatgatcgaggatagagttaaaggtgatcctgcttctcacgctaggaaaaggcaaaagggtttccatcaatattctaaaaatggaagtgtaactgctagatacgtgttttgcaattatggtagcatcagtgattacaagcttcttttgaagaaaaacattgatattgaagataaaatccacatcgtaagatctggtaaaatattacctggattaaaggtaaagaatgcagaactttatggcgcttccagtgtcattatatatacagacccatttgacgatggtaaagttactgaggaaaatgggtttttacactatccttatggaccagcaagaaacccaagttatattaggagagattctgtaaactatttcagtgacactccaggagatccgacaactccagggtatccctccaaggattccgacactgaacatatgtctccggtagggagagtgccgaggataccatctgtgccgatgagtgctagagatgtccaaccaattttagaaagattgaatggcaggggttttcaaattgggcccggtagtaatataaaagattttggaagtttcactggaccttccagctctatcgataaagtccatttgcataatgagttaacttacaacatcaaggaaatgagtagtgtagaggttagtatccctggtatattcactgagggggagattattatcggagctcatagggattctctcgcctccagtagcgccggtgatgcaaatagtggcagcgctattcttttagaaattgcaagaggaatgagtaaattacttaagcatggttggaagccattgcgtcctatcaaattgataagttgggatggtgaaagatccggccttttgggatctacagattatgcagaagctcatgctgcgattctcaggagaagggccttggtatacttgaatttggataatgcaatctctgggacaaattttcactgtaaagccaacccacttttacaagacgtgatatacgaagctgctaagctcacggaatttaatgggcacgaagactggtctttgttcgaccattggaaatacacttctaatgccactatttctttacttgatgggttgtctagttacacttcttttcagtaccatcttggagtgcccgctgcacattttcagtttaatgccaatgatacttctggcgcagtctatcatagtaactccgtattcgatagcccaacttggttggaaaaatttaccaattctgactacaagttacacaacaccatggccatgtttgtaggtttgacaacgttgatgttaagtgaaaacgaattggcaagattcaatacacatgtttacttgaagaaaatatataactggtatatcgcatggcactctaatttatcttctgcatttccccaggacgatgaagtgaacagcttagcaaaaagggttttggacttattaaaagttgccacacaggaagatagcatccaatttgaccaacaaaatggtattctctataaagagtgtagggaagctttacctgtttgggctttttacaaaaaaatcaagagctatattaaattacaaagatccaatagcaaatccaagcaaattgatcaattatttattacacacagaggattgaaagacagggaatggatgaagtactctcttttagcacctagtaagtttgagggatctgtcggggaagttttgcccggccttcacgaaggattggctgatattgatagaaacgaggtcattcagtggttaaccattttgttgagccaattcagcaacgttcgctatttacttcaatga

SEQ ID NO: 6361 - DNA, 4143 bp, Saccharomyces cerevisiae
atggaaccgttcgcatttggacgaggggcgcctgcattatgcatactaaccgcggccgctcgaataaatctggacaattttgttccgtgttgctgggcacttttccgtctgtctttctttttcccgcttgaccctgcatatattagaaacgaaaacaaagaaacaaggacttcttggatttccatagagttttttttcttcgttaaacattgcctctctcaacacacgtttttctcgaagactcttgcaccaaaaagaaactttagggcgaagaagctaaaagacattggcgatactagaatagatagggcagataaagattttttattagtgccggagccaagtatgtttgtgaacggtaatcaatctaatttcgctaagcccgctggtcaaggtattctgcccattcctaaaaaatctcgaattattaagactgataagccaagaccgttcttgtgtcccacatgcactaggggttttgtcaggcaggagcatttgaagagacatcagcattcgcatacccgtgagaaaccgtatctttgtatcttttgcggtaggtgttttgctcgtagagatttagtgctcaggcatcagcaaaaacttcatgctgctcttgtaggtacgggggatccacggcgaatgacgccagcaccaaattcgacttcttcttttgcctccaagcggcgccattccgtggcggcggatgatccaaccgaccttcatatcattaaaatagccggaaataaagagactattctacccaccccgaagaaccttgctggtaagacatctgaagaattgaaagaggccgtggttgccttggccaaatcaaataatgtagaacttcccgtctcggccccagtaatgaacgataagcgagagaaaactcctcctagtaaggcaggctccctaggatttcgagagttcaagttcagcacgaaaggcgtgccagttcactctgcatcaagcgatgctgttatcgacagggcgaacactccctcttccatgcataagacgaaaagacatgcgtctttctctgcatccagtgcaatgacttacatgtctagtagcaatagcccccaccattcaattaccaatttcgagctcgttgaagacgctccgcatcaagtcggcttttctactccacaaatgaccgcgaagcagctcatggaaagcgtgtcagaattggatttacctccgttaaccctggacgaaccaccgcaagctatcaagtttaacttaaatctatttaacaatgacccctccggacagcaacaacaacaacaacaacaacagcaaaattccacctctagtaccatagtgaacagcaacaatggaagtacagttgctacacctggagtgtatctcttaagtagcggtccatctttaaccgatcttttgacaatgaactctgcacatgcaggtgcgggaggatacatgtctagccaccattcgccatttgatttgggctgcttcagtcatgataaaccgacagtttctgaatttaaccttccgtcaagcttcccgaatactataccgtctaattctactacggcttctaatagttacagtaatttggcaaatcaaacttataggcaaatgagcaatgagcagccgcttatgtcactatctcctaaaaacccaccaacaactgtttcagattcctcttccacgatcaatttcaatccaggcacaaataatttactggaaccatcaatggagcccaatgataaggatagtaatatcgatcctgctgccatagatgacaagtggttatcagagtttattaacaactctgatccaaaatctaccttcaagatcaacttcaatcatttcaatgacattgggtttatttattctccaccttcatcaaggtcatctataccaaacaagtcacctccaaaccattctgctacctcattaaatcatgaaaaagcttctttatcacctcgcttaaacttgagtttgaatggaagcacagatttaccaagtacaccacaaaaccaactaaaggagccttcctattctgaccctatttcccatagttctcataagaggcgtcgtgatagcgtcatgatggactacgatctatccaattttttcagctcaaggcaattggatatttccaaggtattaaacgggacagagcaaaataattctcatgtgaacgacgatgttctcactttgtctttccccggcgaaactgattctaatgcaacacagaaacagctgcctgttcttactccttcggatttgttatctccgttttctgtcccttcagtatctcaagtgctttttaccaatgagctaaggagtatgatgctagccgacaataatatcgattcaggagccttccccacaactagtcaattgaacgattatgtgacttactataaggaagaattccatccatttttttcatttattcatcttccttctatcatacctaatatggacagttatcccttgttattatctatctccatggtcggagcattgtatgggtttcattcgacgcatgcaaaagtgttagctaatgcagctagcacccaaattaggaaaagcttgaaagttagtgagaaaaacccggagacgacagagttatgggttatacagacattagtattgctaacgttctactgtattttcaataaaaatacagccgtgatcaaggggatgcatggtcagttgacgactattattcgtctcttgaaggcctctcgtttaaatttgcccctagagtccctatgccagccgcctattgagagtgatcatattatggaatatgaaaacagtcctcatatgttttcaaaaataagagagcaatacaacgcgccgaatcaaatgaacaaaaactaccaatattttgtattggcgcagtcacgtatcaggacttgccatgcggtattacttatatctaacttattttcttcactggtaggtgctgattgctgttttcattcagtcgatttaaaatgtggtgttccatgctataaagaagaattatatcagtgccgaaattccgatgaatggtcggacctattatgtcaatacaaaataacgttagattcgaaattttcgttgattgaattgtctaatggtaacgaggcatatgaaaattgtttgaggtttctttctacaggcgatagttttttttacggaaatgctagggtttcgttaagtacatgtctatcattgttgatatctatccatgagaaaatacttattgaaagaaataacgcaaggatcagtaataacaacaccaatagcaataacattgagttggacgatattgagtggaagatgacttccagacaacggatcgatacaatgttaaaatactgggaaaacctttatttgaaaaatggtggcatcttgacacctaccgagaatagcatgtcaacaataaacgccaatccagcaatgaggttaataattccggtatatttgtttgccaaaatgagacggtgtttggacctggcacatgttattgagaaaatctggttgaaagattggtccaatatgaataaagctttggaggaagtttgctatgacatgggttcattgagggaagctaccgagtatgcactgaatatggtggatgcgtggacttcattttttacgtacattaaacagggcaagcgcagaattttcaatactcctgtatttgcgaccacatgtatgttcactgcagtattagtgatttcggaatacatgaaatgtgtagaggattgggcacgcgggtacaatgccaacaaccctaactcagcattattggatttttcggaccgtgtcttatggctaaaagcagaaaggattttgagaagattacaaatgaacttgataccgaaggagtgtgatgtgttgaaatcgtacactgatttcttaagatggcaggacaaggatgccctagatttgtcagcactaaatgaagaacaagcacaaagggccatggacccgaataccgatataaatgagacaattcaactaattgtagcggcaagtctatcctccaaatgtttatatttgggtgttcaaatattgggtgatgcgccaatttggcctataatattatcgttcgctcatggtttgcaatcaagagctatctatagtgttacgaaaaaaagaaacactagaatataa

SEQ ID NO: 6362 - DNA, 4143 bp, Artificial Sequence
  Description of Artificial Sequence: Synthetic polynucleotide
atggaaccgttcgcatttggaagaggggcgcctgcattatgcatattgaccgcggccgctagaataaatttggacaattttgttccgtgttgctgggcacttttccgtttatctttctttttcccgcttgaccctgcatatattagaaacgaaaacaaagaaacaaggacttcttggatttccatagagttttttttcttcgttaaacattgcctctctcaacacacgtttttctccaagactcttgcaccaaaaagaaactttagggcgaagaagttgaaagacattggcgatactagaatagatagggcagataaagattttttattagtgccggagccaagtatgtttgtgaacggtaatcaatctaatttcgctaagcccgctggtcaaggtattttgcccattcctaaaaaatctagaattattaagactgataagccaagaccgttcttgtgtcccacatgcactaggggttttgtcaggcaggagcatttgaagagacatcagcattctcatacccgtgagaaaccgtatctttgtatcttttgcggtaggtgttttgctcgtagagatttagtgctcaggcatcagcaaaaacttcatgctgctcttgtaggtacgggggatccaagaagaatgacgccagcaccaaattctacttcttcttttgcctccaagaggcgccattccgtggcggcggatgatccaaccgaccttcatatcattaaaatagccggaaataaagagactattttgcccaccccgaagaaccttgctggtaagacatctgaagaattgaaagaggccgtggttgccttggccaaatctaataatgtagaacttcccgtctctgccccagtaatgaacgataagagagagaaaactcctcctagtaaggcaggctccttgggatttagagagttcaagttcagcacgaaaggcgtgccagttcactctgcaagtagcgatgctgttatcgacagggcgaacactccctcttccatgcataagacgaaaagacatgcgtctttctctgcatccagtgcaatgacttacatgtctagtagcaatagcccccaccattctattaccaatttcgagctcgttgaagacgctccgcatcaagtcggcttttctactccacaaatgaccgcgaagcagctcatggaaagcgtgtctgaattggatttacctccgttaaccttagacgaaccaccgcaagctatcaagtttaacttaaatttatttaacaatgacccctccggacagcaacaacaacaacaacaacaacagcaaaattccacctctagtaccatagtgaacagcaacaatggaagtacagttgctacacctggagtgtatctcttaagtagcggtccatctttaaccgatcttttgacaatgaactctgcacatgcaggtgcgggaggatacatgtctagccaccattctccatttgatttgggctgcttcagtcatgataaaccgacagtttctgaatttaaccttccgtctagcttcccgaatactataccgtctaattctactacggcttctaatagttacagtaatttggcaaatcaaacttataggcaaatgagcaatgagcagccgcttatgtctttatctcctaaaaacccaccaacaactgtttctgattcctcttccacgatcaatttcaatccaggcacaaataatttattggaaccaagcatggagcccaatgataaggatagtaatatcgatcctgctgccatagatgacaagtggttatctgagtttattaacaactctgatccaaaatctaccttcaagatcaacttcaatcatttcaatgacattgggtttatttattctccaccttcttccaggtcttctataccaaacaagtctcctccaaaccattctgctaccagtttaaatcatgaaaaagcttctttatctcctcgcttaaacttgagtttgaatggaagcacagatttaccaagtacaccacaaaaccaattgaaggagccttcctattctgaccctatttcccatagttctcataagaggcgtcgtgatagcgtcatgatggactacgatttatccaattttttcagcagtaggcaattggatatttccaaggtattaaacgggacagagcaaaataattctcatgtgaacgacgatgttctcactttgtctttccccggcgaaactgattctaatgcaacacagaaacagttgcctgttcttactccttctgatttgttatctccgttttctgtcccttctgtatctcaagtgctttttaccaatgagttgaggagtatgatgttggccgacaataatatcgattctggagccttccccacaactagtcaattgaacgattatgtgacttactataaggaagaattccatccatttttttcttttattcatcttccttctatcatacctaatatggacagttatcccttgttattatctatctccatggtcggagcattgtatgggtttcattctacgcatgcaaaagtgttagctaatgcagctagcacccaaattaggaaaagcttgaaagttagtgagaaaaacccggagacgacagagttatgggttatacagacattagtattgttgacgttctactgtattttcaataaaaatacagccgtgatcaaggggatgcatggtcagttgacgactattattcgtctcttgaaggcctctcgtttaaatttgcccttggagtccttatgccagccgcctattgagagtgatcatattatggaatatgaaaacagtcctcatatgttttccaaaataagagagcaatacaacgcgccgaatcaaatgaacaaaaactaccaatattttgtattggcgcagtctcgtatcaggacttgccatgcggtattacttatatctaacttattttcttctttagtaggtgctgattgctgttttcattctgtcgatttaaaatgtggtgttccatgctataaagaagaattatatcagtgcagaaattccgatgaatggtctgacttattatgtcaatacaaaataacgttagattctaaattttctttgattgaattgtctaatggtaacgaggcatatgaaaattgtttgaggtttctttctacaggcgatagttttttttacggaaatgctagggtttctttaagtacatgtttatctttgttgatatctatccatgagaaaatacttattgaaagaaataacgcaaggatcagtaataacaacaccaatagcaataacattgagttggacgatattgagtggaagatgacttccagacaaagaatcgatacaatgttaaaatactgggaaaacctttatttgaaaaatggtggcatcttgacacctaccgagaatagcatgtctacaataaacgccaatccagcaatgaggttaataattccggtatatttgtttgccaaaatgagaagatgtttggacttggcacatgttattgagaaaatctggttgaaagattggtccaatatgaataaagctttggaggaagtttgctatgacatgggttctttgagggaagctaccgagtatgcattgaatatggtggatgcgtggacttctttttttacgtacattaaacagggcaagcgcagaattttcaatactcctgtatttgcgaccacatgtatgttcactgcagtattagtgatttctgaatacatgaaatgtgtagaggattgggcacgcgggtacaatgccaacaaccctaactctgcattattggatttttctgaccgtgtcttatggttgaaagcagaaaggattttgagaagattacaaatgaacttgataccgaaggagtgtgatgtgttgaaatcttacactgatttcttaagatggcaggacaaggatgccttggatttgagtgcattgaatgaagaacaagcacaaagggccatggacccgaataccgatataaatgagacaattcaattgattgtagcggcaagtttatcctccaaatgtttatatttgggtgttcaaatattgggtgatgcgccaatttggcctataatattatctttcgctcatggtttgcaatctagagctatctatagtgttacgaaaaaaagaaacactagaatatga

SEQ ID NO: 6363 - DNA, 360 bp, Saccharomyces cerevisiae
atgcagggtcaagcgggaaaaagaaagacagacggaaaagtgcccagcaacacggaacaaaattgtccagatttattcgagcggccgcggttagtatgcataatgcaggcgcccctcgtccaaatgcgaacggttccatccgaaacaggccatttcccaaaaattatttctcttaatagaagttgctcgcgtagttacctattgtcgatgccgcatacgcagttaccttatccgttgccctacggagaatttccgcgatgcagcaccgtgcggcgagatcacaattttccttgtacactctactctgcccctggagtggttcacccccgtctgtgcgtattttcgtgtatgatgatataa

SEQ ID NO: 6364 - DNA, 360 bp, Artificial Sequence
  Description of Artificial Sequence: Synthetic polynucleotide
atgcagggtcaagcgggaaaaagaaagacagacggaaaagtgcccagcaacacggaacaaaattgtccagatttattcgagaggccgagattagtatgcataatgcaggcgcccctcgtccaaatgagaacggttccatccgaaacaggccatttcccaaaaattatttctcttaatagaagttgctctcgtagttacttgttgtccatgccgcatacgcagttaccttatccgttgccctacggagaatttccgaggtgcagcaccgtgagaagagatcacaattttccttgtacactctactctgcccctggagtggttcacccccgtttatgcgtattttcttgtatgatgatatga

SEQ ID NO: 6365 - DNA, 1020 bp, Saccharomyces cerevisiae
atgaatgaagatctattctacgatagattacatcagcggtgccctggaaaatacttgctagaagagttggaaacaagcaaatctaacgatgtcctgcatgcatcgagatttgtttgtgagatggaacttgtgcaaaagacgaatgcatattattgcaaaaccatagtcaagatgctcttagaccacgaatggattttcgcgaaggcattcacaattgtcaacgatggcgaagacgagatagagatatatgattatctctatgagaagtacataaaactattaagcacaggcaagccagacccgatgatgaaagacgtcgtgaggtacaggtttgacgaggacgtaaagatcaaaattgaggaaacaccgaatttgatcagtgcggccagtactacaggtttcaggacatgggaagctgccttatacatgggtgatttccttattcataagcccttacaagagttggcaccggtacaaggacaagacgatggcaagaaaaaattaaatgttcttgaggtcggcgctggcacaggcatagtgagtctcgtcattttacaaaagtatcacgagttcgtaaataagatgtacgtcacggatggtgattcgaatctcgttgagacgcagctgaaaagaaattttgaattgaacaatgaagtgcgtgagaacgaaccagacatcaagttgcaaagattatggtggggcagcgatagagttcctgaggatatagatttagtagtgggggcagatgttacgtatgacccaactatccttcctgatctatgcgagtgtctggccgaatgtcttgctttagaccgatgcaaactgtgtctcctatccgcgacaattagaagcgaatccactgtccaactgttttctcaagagtgcaataaactcgggctaaaatgtaccatagtcaccagcacagagtacgacgcaaacaacgagatccgcgcgatgaaagccctgcaattcaaacctttgattgcacccatacggatctacaagatcacgaaacaataa

SEQ ID NO: 6366 - DNA, 1020 bp, Artificial Sequence
  Description of Artificial Sequence: Synthetic polynucleotide
atgaatgaagatcttttctacgatagattacatcagcgttgccctggaaaatacttgttggaagagttggaaacaagcaaatctaacgatgtcttgcatgcatctagatttgtttgtgagatggaacttgtgcaaaagacgaatgcatattattgcaaaaccatagtcaagatgctcttagaccacgaatggattttcgcgaaggcattcacaattgtcaacgatggcgaagacgagatagagatatatgattatctctatgagaagtacataaaattattaagcacaggcaagccagacccgatgatgaaagacgtcgtgaggtacaggtttgacgaggacgtaaagatcaaaattgaggaaacaccgaatttgatcagtgcggccagtactacaggtttcaggacatgggaagctgccttatacatgggtgatttccttattcataagcccttacaagagttggcaccggtacaaggacaagacgatggcaagaaaaaattaaatgttcttgaggtcggcgctggcacaggcatagtgagtctcgtcattttacaaaagtatcacgagttcgtaaataagatgtacgtcacggatggtgattctaatctcgttgagacgcagttgaaaagaaattttgaattgaacaatgaagtgcgtgagaacgaaccagacatcaagttgcaaagattatggtggggcagcgatagagttcctgaggatatagatttagtagtgggggcagatgttacgtatgacccaactatccttcctgatttatgcgagtgtttggccgaatgtcttgctttagacaggtgcaaattatgtctcttatccgcgacaattagaagcgaatccactgtccaattattttctcaagagtgcaataaactcgggttgaaatgtaccatagtcaccagcacagagtacgacgcaaacaacgagatccgcgcgatgaaagccttgcaattcaaacctttgattgcacccataagaatctacaagatcacgaaacaatga

SEQ ID NO: 6367 - DNA, 1920 bp, Saccharomyces cerevisiae
atgatatctagaaccattggtgaatctattccgcccaacacaaaacatgctgtttccgtgtgtttgcccacatgggaagctacagtaggctatgaagagggtgaaagcagtataattaactcgcttactaccggatatccaagatttttcatacacaagtcaataaagaaattatgtgaaattttatccgctaagtactccatggaagatgaagcttgtctttgcttcccctcttacaaggttgccaataggtgcagagagtttatcaaagtgaaaacgggtctttctaccaaagtacgcatcttacaactatgtacacctaaacctatgaaccaagaggaaaagctctggagaagggaatgtaaaatcacggtggtgtttgtagaccaggaaatattccccgtgatgaagcagtattggcaacattctggtgagattgtatctagcagaatggcggagtatattttacatgaattacaagtcaaggataatcttaagaagatggaaacagtggataacggtaaaaaatttatgaccgaagatgaaaacagagtgaacgaagaatatatagaaacgagatttgggagaaatttaaattttcttgctgctgataaagccaaatatctaatacgaaagaggattgccacaaaagttgttgaaaaaattgactctgaaggtctatcggacctattctcttttgaacactataacgagagcaacggtccattcaatgttggcagtggagaggctctggatgatgatcagttgaattcggacatacctgccgaaacaattacttctatgggagaaagtggctcaaacagtacttttgaaaacacagctaccgatgacttgaagtttcatgtcaaccctaatacggatgtttacttatttccaagtggaatggcgtccattttcactgcccacaggctgcttttaaacttcgatgccaagcgcttatcaaggtcttctagtagacaagataagttgattggatatggacctccgttcaagaagaccgtcatgtttggattcccatatacagatactctgagcattcttcggaagttcaatcacacacatttcttgggacagggagattcaacgtcaatgaacgctctgaaaaatattttacattctggtgagcaaatactggcggtatttatagaagctccatcgaacccactgttgaaaatgggagatttacaagaactgaaaaggctatcagacttgtattcattttacatagtggtcgatgaaactgtgggtggctttgtcaatatagatgtattaccgtatgccgatattgtttgtagttcgctaacgaaaatcttcagcggcgactcgaacgttattgcaggatccttagtactaaatcctagaggaaagatttatgagtttgctagaaaatttatgaagactgaagacggatatgaagattgcctatggtgcgaagatgcgttatgcctggaaagaaattcgagagacttcgtggaacgtacaatcaaggtgaatacaaacactgatatattgttaaaaagggtgttattgcctcaggtgggaaaattgttcaagaaaatatattaccccagtttaacatcagaggataccaagcggaattatgacagcgttatgtctacaaaagatggtgggtatggaggtttattttcactaacttttttcaatattgaagaggcaaagaagtttttcaataatctggaattgtgcaaaggaccttctctcggtacgaatttcactttggcgtgtccatatgctattattgcccactaccaggaattagacgaggtagctcaatatggtgtcgaaacaaatcttgtaagagtgagcgtcggtttggaaaatagcgacgttttatgcaatgtttttcagcgtgccattgagaaagctttaggggaataa

SEQ ID NO: 6368 - DNA, 1920 bp, Artificial Sequence
  Description of Artificial Sequence: Synthetic polynucleotide
atgatatctagaaccattggtgaatctattccgcccaacacaaaacatgctgtttccgtgtgtttgcccacatgggaagctacagtaggctatgaagagggtgaaagcagtataattaactctcttactaccggatatccaagatttttcatacacaagagtataaagaaattatgtgaaattttatccgctaagtactccatggaagatgaagcttgtctttgcttcccctcttacaaggttgccaataggtgcagagagtttatcaaagtgaaaacgggtctttctaccaaagtacgcatcttacaattatgtacacctaaacctatgaaccaagaggaaaagctctggagaagggaatgtaaaatcacggtggtgtttgtagaccaggaaatattccccgtgatgaagcagtattggcaacattctggtgagattgtatctagcagaatggcggagtatattttacatgaattacaagtcaaggataatcttaagaagatggaaacagtggataacggtaaaaaatttatgaccgaagatgaaaacagagtgaacgaagaatatatagaaacgagatttgggagaaatttaaattttcttgctgctgataaagccaaatatttgataagaaagaggattgccacaaaagttgttgaaaaaattgactctgaaggtttaagtgaccttttctcttttgaacactataacgagagcaacggtccattcaatgttggcagtggagaggctttagatgatgatcagttgaatagtgacatacctgccgaaacaattacttctatgggagaaagtggctctaacagtacttttgaaaacacagctaccgatgacttgaagtttcatgtcaaccctaatacggatgtttacttatttccaagtggaatggcgtccattttcactgcccacaggttacttttaaacttcgatgccaagcgcttatctaggtcttctagtagacaagataagttgattggatatggacctccgttcaagaagaccgtcatgtttggattcccatatacagatactttaagcattcttagaaagttcaatcacacacatttcttgggacagggagattctacgtctatgaacgctttgaaaaatattttacattctggtgagcaaatattggcggtatttatagaagctccatctaacccattgttgaaaatgggagatttacaagaattgaaaaggttaagtgacttgtattctttttacatagtggtcgatgaaactgtgggtggctttgtcaatatagatgtattaccgtatgccgatattgtttgtagttctttgacgaaaatcttcagcggcgactccaacgttattgcaggatccttagtattgaatcctagaggaaagatttatgagtttgctagaaaatttatgaagactgaagacggatatgaagattgcctctggtgcgaagatgcgttatgcttagaaagaaattctagagacttcgtggaacgtacaatcaaggtgaatacaaacactgatatattgttaaaaagggtgttattgcctcaggtgggaaaattgttcaagaaaatatattaccccagtttaacaagtgaggataccaagagaaattatgacagcgttatgtctacaaaagatggtgggtatggaggtttattttctttgacttttttcaatattgaagaggcaaagaagtttttcaataatttggaattgtgcaaaggaccttctctcggtacgaatttcactttggcgtgtccatatgctattattgcccactaccaggaattagacgaggtagctcaatatggtgtcgaaacaaatcttgtaagagtgagcgtcggtttggaaaatagcgacgttttatgcaatgtttttcagcgtgccattgagaaagctttaggggaatga

SEQ ID NO: 6369 - DNA, 1650 bp, Saccharomyces cerevisiae
atgaagaactctgtcggtatttcaattgcaaccattgttgctatcatagcagctatatactatgtgccatggtacgaacactttgagagaaagtcaccgggggccggagaaatgagagatcggattgaaagcatgttcttggaatcgtggagagactattccaagcatggctggggatacgatgtgtatggacctattgagcacacttcccataatatgcctcgtggcaaccagccgttaggctggattatcgtagattcagtggataccttgatgttaatgtataactcctccacactatacaaaagtgagttcgaggcagaaattcagagatcggagcattggataaacgatgttttggattttgatattgatgccgaagtgaatgtttttgaaactactattagaatgctaggtggtttattatccgcatatcatctatctgatgttttagaagtaggtaataagactgtctacttgaacaaagcaatagatttgggggataggcttgctttggcgttcttatccactcagaccggaattccatactcaagtataaaccttcatagtggccaagcggttaagaaccatgcagatgggggggcatcttctaccgcagaattcactacgctacaaatggaattcaaatatctggcgtatttgacaggaaatcgtacttattgggagctggtggagcgtgtttacgagccattatacaaaaataacgatcttctaaatacctacgatggattggttccaatttatacatttccagatactgggaagtttggtgcttcgactatccggttcggatcaagaggtgattctttttatgagtatttactaaaacaatatttattgacgcacgaaacactttattatgatctgtacagaaaatccatggaaggtatgaaaaagcatttattagcacaatccaaaccctcttctctgtggtacattggggaaagagaacaaggtctacatggacaactttctcctaagatggaccacctcgtgtgctttatggggggattgttagcatcaggctctactgagggcctttctattcatgaagcccgaagacgtccgtttttctctctttcccttgaaagaaaaagtgactgggatttggctaaagggataactgacacatgttatcaaatgtacaagcagtcttcctcggggcttgcgcctgaaatcgttgtcttcaatgatggaaacataaaacaggatggttggtggcggtcgtctgtgggtgatttttttgttaaaccactcgataggcacaacctacaaagaccagaaacggtggaatcgattatgttcatgtatcatttatctcatgatcacaaatatcgtgaatggggggcggaaatcgcaactagcttctttgaaaatacctgtgttgattgtaatgacccaaaattaaggcggttcaccagtttaagtgattgtatcacgttacctacaaagaaatctaacaatatggaaagtttctggttggcagagactttaaagtatttatatatattgtttttagacgagtttgatttgaccaaagttgttttcaacacagaagctcatccttttccagtattagacgaagaaatattaaaatcgcagtctctgaccacaggttggtcgttgtag

SEQ ID NO: 6370 - DNA, 1650 bp, Artificial Sequence
  Description of Artificial Sequence: Synthetic polynucleotide
atgaagaactctgtcggtatttccattgcaaccattgttgctatcatagcagctatatactatgtgccatggtacgaacactttgagagaaagagcccgggggccggagaaatgagagatagaattgaaagcatgttcttggaaagttggagagactattccaagcatggctggggatacgatgtgtatggacctattgagcacacttcccataatatgcctcgtggcaaccagccgttaggctggattatcgtagattctgtggataccttgatgttaatgtataactcctccacattgtacaaaagtgagttcgaggcagaaattcagagaagtgagcattggataaacgatgttttggattttgatattgatgccgaagtgaatgtttttgaaactactattagaatgttgggtggtttattatccgcatatcatttatctgatgttttagaagtaggtaataagactgtctacttgaacaaagcaatagatttgggggataggcttgctttggcgttcttatccactcagaccggaattccatactctagtataaaccttcatagtggccaagcggttaagaaccatgcagatgggggggcatcttctaccgcagaattcactacgttacaaatggaattcaaatatttggcgtatttgacaggaaatcgtacttattgggagttggtggagcgtgtttacgagccattatacaaaaataacgatcttttgaatacctacgatggattggttccaatttatacatttccagatactgggaagtttggtgcttccactatcagattcggaagcagaggtgattctttttatgagtatttattgaaacaatatttattgacgcacgaaacactttattatgatttatacagaaaatccatggaaggtatgaaaaagcatttattagcacaatccaaaccctcttctctttggtacattggggaaagagaacaaggtttgcatggacaactttctcctaagatggaccacctcgtgtgctttatggggggattgttagcatctggctctactgagggcctttctattcatgaagccagaagacgtccgtttttctctctttcccttgaaagaaaaagtgactgggatttggctaaagggataactgacacatgttatcaaatgtacaagcagtcttccagtgggcttgcgcctgaaatcgttgtcttcaatgatggaaacataaaacaggatggttggtggagatcttctgtgggtgatttttttgttaaaccactcgataggcacaacttacaaagaccagaaacggtggaaagtattatgttcatgtatcatttatctcatgatcacaaatatcgtgaatggggggcggaaatcgcaactagcttctttgaaaatacctgtgttgattgtaatgacccaaaattaaggagattcaccagtttaagtgattgtatcacgttacctacaaagaaatctaacaatatggaaagtttctggttggcagagactttaaagtatttatatatattgtttttagacgagtttgatttgaccaaagttgttttcaacacagaagctcatccttttccagtattagacgaagaaatattaaaatctcagtctttaaccacaggttggtctttgtga

SEQ ID NO: 6371 - DNA, 3147 bp, Saccharomyces cerevisiae
atggatattacagaattgttacagtgctttgcctgtactttggaccataacgctgccgtaagaactaatgcagaaacacatcttaaaaatgcaagtaaagtaccgggattcttaggcgcatgcctggatatcattgctgctgatgaagtaccagaaaacatcaaattatcagcttccttatatttcaagaataagattacatacggatggtctgctggtgcaagacagggttcaaatgaattattagattcacatgttgatccggatgaaaaaccagtagtaaaagatatgttaattaaaacaatggtcagtgtgtccaagacctccccgcgttgtatcagagtgctaaaatctgcccttactgtaattatttcagaagattaccctagcaaaaaatggggcaatttgttaccaaattccttagaattactcgcaaatgaagacatcacagtaacatatgtcggacttctgtgtcttgctgagatttttaggacctataggtggaagaataatgatgaaagacaggacttagaagagttgattttaaattatttccctgctttattaaactatggcgcaaatgtccttttccaagatggtaaatatatgaataacgagcaaattggcgaattggtaaaattaatcattaaaatttataagttcgtttcataccatgacctaccatttacattacaacgctcagaatcgtttaccccatgggcatgtttttttgtcagcatcattcagcagccattgcctcaggaagttttggctatatcagatattgaggtcagaagtaaaaatccatgggtcaaatgtaagaaatgggctcttgcaaacctttatagacttttccagagatacgcatcaacgtcattaacaaggaagtttcagtacgatgagtttaaacagatgtactgtgaagagtttttgactcagtttttgcaagtcgtcttcgatcaaatcgagaaatggggaactggacagttgtggttaagtgacgaatgcttatactacatattgaactttgttgagcagtgtgttgtgcagaaaacaacttggaaacttgttgggccccactacaatgtaatacttcaacatgtcattttcccactactaaagcccactgcagagactttggaggcctttgacaatgaccctcaagaatatatcaaccggaatatggacttttgggatgtcggctattccccagatcttgccgcactggctttgctaacgacatgcgtgacgaaacgcggtaaaacgaccttacaaccgaccttagaatttatggtctcaaccttacaaagtgccgttggtgattacaacaatattatgttggataatgccttgcaaattgagtcctgtttgagaatattctccagcattattgaccgtttgataactaaagattctccatttgccagtgagatggaaaagtttatattgacatacgttttacctttttttaagtctcagtatgggtttctgcaaagtcgtgtttgcgatatttgttcgaagttgggttctatggatttcaaagacccggtaataacctctactatctacgaaggtgttatgaattgtctgaataactcttctaattctttacctgtagaattgacagctgcattggcattgcaaacttttatcagtgatgaccagtttaatatgaagttatccgaacacgttgttcctactatgcagaaattactaagtttgtctaatgattttgaatctgatgtcatttcaggcgttatgcaagattttgtggagcagtttgctgagcaattacaaccttttggtgttgaattaatgaacactttggtccaacagtttttgaaattagctattgatctgcatgaaacatccaatttggatccagattccttcacgaacgttgatagcatacccgatgaatctgacaagcaaatggcggcgctaggtattttgtcgactacgatatctattctgttgtcttttgagaattcacctgaaattttaaaaaacttggaacagtcattttatccagctgcagagtttattttgaaaaacgacatcgaagatttctatcgcgaatgttgcgaatttgtagagaactctacattcctactaagagatatcacacccatcagctggaaaattttggagctgattggagaatgtaatagaaaaccagatagtatggtatcttattatttaagtgatttcatgctagccttaaataatatcctcatttatggaaggaacgaattaaagaagaacgagttttacacaaaaatcatattcgaaatatatcaaaaggctgttactgcagaagataattcgttagacgatcttagagtggtttttgatttatcccaagagttggttcttgcattagatgacagtttacctcaacaatacagagagcgcctactggcggatgttgtcggctctattctaacgcaaaagaatgaattgaaaactaatgttgtatttagtgtgactgcttttaatgtcgtaatctcaaatatgataacagagcctttgatcacgcttcagtacctgaaacagcaaggttgtcttgaaatcttctttcaaacgtggattacagactatattccgaattataaaaggtgctatgatatcaaattatcagttcttgcgttattaaaaattatactgaagttagaaagcaacgattattcagtgttgaacttagaaaatttggttccgcaattagggagtattgttacgcagttagcttcgaggctaccaacggcgttaaggcaattagctaaccaacgcaaggaattctcatcatccggttttgaagaggatactaagtgggatgaaaattttcttgacgttggagacgatgatgaaaatgatgacgagggagaccttactgagaaatatctggaactgataaaaaatagagccgattccttggacttcgtagatggttatgacgcaaaggaaactttcgatgacctagaagaggacccattaacggggtcgatcctggacacagttgacgtatacaaggttttcaaggagtccattgcgaacttacaacatgttgacagcaatagatatcagggaatcttgagacatctgaccccggctgatcaagaactattcatgggaattatgaatgcctaa

SEQ ID NO: 6372 - DNA, 3147 bp, Artificial Sequence
  Description of Artificial Sequence: Synthetic polynucleotide
atggatattacagaattgttacagtgctttgcctgtactttggaccataacgctgccgtaagaactaatgcagaaacacatcttaaaaatgcaagtaaagtaccgggattcttaggcgcatgcttagatatcattgctgctgatgaagtaccagaaaacatcaaattatctgcttccttatatttcaagaataagattacatacggatggtctgctggtgcaagacagggtagtaatgaattattagattctcatgttgatccggatgaaaaaccagtagtaaaagatatgttaattaaaacaatggtcagtgtgtccaagacctccccgcgttgtatcagagtgttgaaatctgcccttactgtaattatttctgaagattaccctagcaaaaaatggggcaatttgttaccaaattccttagaattactcgcaaatgaagacatcacagtaacatatgtcggacttttatgtcttgctgagatttttaggacctataggtggaagaataatgatgaaagacaggacttagaagagttgattttaaattatttccctgctttattaaactatggcgcaaatgtccttttccaagatggtaaatatatgaataacgagcaaattggcgaattggtaaaattaatcattaaaatttataagttcgtttcttaccatgacttaccatttacattacaacgcagtgaaagttttaccccatgggcatgtttttttgtcagcatcattcagcagccattgcctcaggaagttttggctatatctgatattgaggtcagaagtaaaaatccatgggtcaaatgtaagaaatgggctcttgcaaacctttatagacttttccagagatacgcaagcacgtctttaacaaggaagtttcagtacgatgagtttaaacagatgtactgtgaagagtttttgactcagtttttgcaagtcgtcttcgatcaaatcgagaaatggggaactggacagttgtggttaagtgacgaatgcttatactacatattgaactttgttgagcagtgtgttgtgcagaaaacaacttggaaacttgttgggccccactacaatgtaatacttcaacatgtcattttcccattgttgaagcccactgcagagactttggaggcctttgacaatgaccctcaagaatatatcaacagaaatatggacttttgggatgtcggctattccccagatcttgccgcattggctttgttgacgacatgcgtgacgaaacgcggtaaaacgaccttacaaccgaccttagaatttatggtctccaccttacaaagtgccgttggtgattacaacaatattatgttggataatgccttgcaaattgagtcctgtttgagaatattctccagcattattgaccgtttgataactaaagattctccatttgccagtgagatggaaaagtttatattgacatacgttttacctttttttaagtctcagtatgggtttttgcaaagtcgtgtttgcgatatttgttccaagttgggttctatggatttcaaagacccggtaataacctctactatctacgaaggtgttatgaattgtttgaataactcttctaattctttacctgtagaattgacagctgcattggcattgcaaacttttatcagtgatgaccagtttaatatgaagttatccgaacacgttgttcctactatgcagaaattattaagtttgtctaatgattttgaatctgatgtcatttctggcgttatgcaagattttgtggagcagtttgctgagcaattacaaccttttggtgttgaattaatgaacactttggtccaacagtttttgaaattagctattgatttgcatgaaacatccaatttggatccagattccttcacgaacgttgatagcatacccgatgaatctgacaagcaaatggcggcgcttggtattttgtctactacgatatctattttattgtcttttgagaattctcctgaaattttaaaaaacttggaacagtctttttatccagctgcagagtttattttgaaaaacgacatcgaagatttctatcgcgaatgttgcgaatttgtagagaactctacattcttattaagagatatcacacccatcagctggaaaattttggagttgattggagaatgtaatagaaaaccagatagtatggtatcttattatttaagtgatttcatgttggccttaaataatatcctcatttatggaaggaacgaattaaagaagaacgagttttacacaaaaatcatattcgaaatatatcaaaaggctgttactgcagaagataattctttagacgatcttagagtggtttttgatttatcccaagagttggttcttgcattagatgacagtttacctcaacaatacagagagcgcttattggcggatgttgtcggctctattttaacgcaaaagaatgaattgaaaactaatgttgtatttagtgtgactgcttttaatgtcgtaatctctaatatgataacagagcctttgatcacgcttcagtacttgaaacagcaaggttgtcttgaaatcttctttcaaacgtggattacagactatattccgaattataaaaggtgctatgatatcaaattaagtgttcttgcgttattaaaaattatattgaagttagaaagcaacgattattctgtgttgaacttagaaaatttggttccgcaattagggagtattgttacgcagttagcttccaggttaccaacggcgttaaggcaattagctaaccaacgcaaggaattctcttcttccggttttgaagaggatactaagtgggatgaaaattttcttgacgttggagacgatgatgaaaatgatgacgagggagaccttactgagaaatatttggaattgataaaaaatagagccgattccttggacttcgtagatggttatgacgcaaaggaaactttcgatgacttggaagaggacccattaacggggtctatcttggacacagttgacgtatacaaggttttcaaggagtccattgcgaacttacaacatgttgacagcaatagatatcagggaatcttgagacatttgaccccggctgatcaagaattattcatgggaattatgaatgcctga

SEQ ID NO: 6373 - DNA, 630 bp, Saccharomyces cerevisiae
atggccgaaaatgagagaatgtacatctcctataataatattcacaagctttgtcagggagtggctaaacatatcttagctagaaacgaaagacctgatattattatcgccatcactggtggtggtatgatccccgcaagaattattaggtcctttttgaaaactaaaggacaaaagaatattccgattcaggccatcggcctatctttgtatgaagatttagggttggataatagcgtcgaaactatcggcaaagaggtcatcagaacacaatggctggacttcggtgctttgaaccaacatttcgattccttaattggtaaaaaggtcctaattgtggatgaagttgacgatactagaactaccctccactatgctgtttctgagctggaaaaagagattgctgaacaacaaaaggttttgaatagaatgagtgaggaaaccgttatttctatctttgttctacataataaggacaaaccaaagagagctggactacctgactccatgatgaattctggacgttacattgctgcgcaaactgtccctgataagtggttgtgctatccatgggacgctgaagatatcgaagaacataccatgctcgctaaggctcaaggtcatgactga

SEQ ID NO: 6374 - DNA, 630 bp, Artificial Sequence
  Description of Artificial Sequence: Synthetic polynucleotide
atggccgaaaatgagagaatgtacatctcctataataatattcacaagctttgtcagggagtggctaaacatatcttagctagaaacgaaagacctgatattattatcgccatcactggtggtggtatgatccccgcaagaattattaggtcctttttgaaaactaaaggacaaaagaatattccgattcaggccatcggcttatctttgtatgaagatttagggttggataatagcgtcgaaactatcggcaaagaggtcatcagaacacaatggttagacttcggtgctttgaaccaacatttcgattccttaattggtaaaaaggtcttgattgtggatgaagttgacgatactagaactaccctccactatgctgtttctgagttagaaaaagagattgctgaacaacaaaaggttttgaatagaatgagtgaggaaaccgttatttctatctttgttttgcataataaggacaaaccaaagagagctggattgcctgactccatgatgaattctggacgttacattgctgcgcaaactgtccctgataagtggttgtgctatccatgggacgctgaagatatcgaagaacataccatgctcgctaaggctcaaggtcatgactga

SEQ ID NO: 6375 - DNA, 2124 bp, Saccharomyces cerevisiae
atgagtaaaaaattatcgttggaagagagactctccttggcaactaagaaaggaagaaagaaaaataaaaggtcaacgtcaaatttgtcgtctccatcgcctgtggtgctgtcaaacaatgaacaagaaagtgctcgtacatccattgatgatgcggctgccggtgtggtgtcaattgacaatgctgaaaacatagatgatcctgcggtacgatcagaaagcactgtggaaggcgatacaggtaaggcagattcaatcgctgtcgatgacgtggtgcatcccgatcacaataggactgattgcttcgacgacactatggtatcactgcctacatggctacctaaaaattacactgaatttactgttgaagaattagtcaaagaaattagtcctgaatatttaagattaaacaaacagattgatgacctaactaacgaactaaacagaaaatcacaaatcgaaaccacggattctagttttttcaaattgattaaagagaaggacgacttgatagatcagttgagaaaagaaggagctaaattagcggaaactgagctgaggcaatcaaatcaaatcaaagctttaagaacaaaagtgaaagacttagagtatgaggtatctgaactaaacgatagttctgctcagagtgtcgaaaactataatgagctgcaatcattgtatcacaacatacaaggacaactggctgaagctacaaataaattaaaggatgcagataaacaaaaagagtcacttgaaacattagagaaaaatataaaagaaaaagatgatttgataacaattttacagcaatctttagataatatgagaacattgcttgaaaaagaaaaaagtgaatttcaaacggaaaagaaagcactacaagaagcaacagttgatcaagttaccactctagagactaaactagaacaactaagaatagaattagatagctctactcaaaatttagacgctaaatcaaatagagattttgtcgatgaccaacaaagttatgaagaaaaacaacacgcatctttccaatacaatcggctcaaagaacagcttgagtcatcaaaggccaactgggatagtattgaatacgctttgaacactaaaattgtgaacttggaaaaccgctttgaatctacaatgaaagaaaaaaatgatattgaagaaaaatatcaaactgccttacgttcatctgaaacattaggtaagcaattagaaaaagaaaaagagaatcattcgaaggcagttttggaagtgaaagacttggagagacgggcggagacattgaagtcatcattgcaaagtataagtgatgattataatctactgaagaagaagtacgaaattcaaaggtctcagttggaacaaaaagagaacgaactaaaaccacatcaagaaaacagcaatgagaaaattatagataaaatacctgtagaattaacagatagtttaaactccatggagggaaatatagaagacgaatggactttacctcaagaaaattctatgctgtcattatcaatgtcaaaacttggcgaattagaaagcgatccgtctctaaaacccatttacaatgaatctcacgaaaccatatgtagcgaagaaagccaacattttgatagaaaaaatgtggatttcagcattgacgatattccagaagaggccgctgctttacaagcaatcagggaaggggaatcaatgaactcgttaaacaacacatcaataccatacagaagagctagcgtccagctatcgaattctaacggccacataagcgctcatctggtgaacaagttaagtacggagttaaaaagattggaaggtgaattatcagcatcaaaggaattatacgataatttactgaaagaaaagacaaaagcaaatgatgagattttaagacttctggaagaaaacgataaattcaatgaggtaaataaacagaaagatgatctcttaaaaagagttgagcagatgcaaagtaaattggaaacctccttacaactattaggtgaaaagactgaacaagtggaggaattagaaaatgatgtgtccgatttaaaagagatgatgcatcaacaagttcaacaaatggtagaaatgcaaggaaaaatgagataa

SEQ ID NO: 6376 - DNA, 2124 bp, Artificial Sequence
  Description of Artificial Sequence: Synthetic polynucleotide
atgagtaaaaaattatctttggaagagagactctccttggcaactaagaaaggaagaaagaaaaataaaaggtctacgtccaatttgtcttctccatctcctgtggtgctttccaacaatgaacaagaaagtgctcgtacatccattgatgatgcggctgccggtgtggtgtccattgacaatgctgaaaacatagatgatcctgcggtaagaagtgaaagcactgtggaaggcgatacaggtaaggcagattctatcgctgtcgatgacgtggtgcatcccgatcacaataggactgattgcttcgacgacactatggtatctttgcctacatggttacctaaaaattacactgaatttactgttgaagaattagtcaaagaaattagtcctgaatatttaagattaaacaaacagattgatgacttgactaacgaattgaacagaaaatctcaaatcgaaaccacggattctagttttttcaaattgattaaagagaaggacgacttgatagatcagttgagaaaagaaggagctaaattagcggaaactgagttgaggcaaagcaatcaaatcaaagctttaagaacaaaagtgaaagacttagagtatgaggtatctgaattgaacgatagttctgctcagagtgtcgaaaactataatgagttacaatctttgtatcacaacatacaaggacaattggctgaagctacaaataaattaaaggatgcagataaacaaaaagagtctcttgaaacattagagaaaaatataaaagaaaaagatgatttgataacaattttacagcaatctttagataatatgagaacattgcttgaaaaagaaaaaagtgaatttcaaacggaaaagaaagcattacaagaagcaacagttgatcaagttaccactttagagactaaattagaacaattgagaatagaattagatagctctactcaaaatttagacgctaaatctaatagagattttgtcgatgaccaacaaagttatgaagaaaaacaacacgcatctttccaatacaatagactcaaagaacagcttgagtcttccaaggccaactgggatagtattgaatacgctttgaacactaaaattgtgaacttggaaaaccgctttgaatctacaatgaaagaaaaaaatgatattgaagaaaaatatcaaactgccttacgttcttctgaaacattaggtaagcaattagaaaaagaaaaagagaatcattctaaggcagttttggaagtgaaagacttggagagaagagcggagacattgaagagttctttgcaaagtataagtgatgattataatttattgaagaagaagtacgaaattcaaaggtctcagttggaacaaaaagagaacgaattgaaaccacatcaagaaaacagcaatgagaaaattatagataaaatacctgtagaattaacagatagtttaaactccatggagggaaatatagaagacgaatggactttacctcaagaaaattctatgctttctttatctatgtccaaacttggcgaattagaaagcgatccgtctttgaaacccatttacaatgaatctcacgaaaccatatgtagcgaagaaagccaacattttgatagaaaaaatgtggatttcagcattgacgatattccagaagaggccgctgctttacaagcaatcagggaaggggaaagtatgaactctttaaacaacacatctataccatacagaagagctagcgtccagttatccaattctaacggccacataagcgctcatttggtgaacaagttaagtacggagttaaaaagattggaaggtgaattaagtgcatccaaggaattatacgataatttattgaaagaaaagacaaaagcaaatgatgagattttaagacttttagaagaaaacgataaattcaatgaggtaaataaacagaaagatgatctcttaaaaagagttgagcagatgcaaagtaaattggaaacctccttacaattattaggtgaaaagactgaacaagtggaggaattagaaaatgatgtgtccgatttaaaagagatgatgcatcaacaagttcaacaaatggtagaaatgcaaggaaaaatgagatga

SEQ ID NO: 6377 - DNA, 720 bp, Saccharomyces cerevisiae
atggatgttgaaaaggatgtcctggatgtctacataaagaacctggagaaccagatcggaaacaaacgatatttcttgaagcaagctcaaggtgccatcgatgagatcacgaagagatctctggatacagagggtaaaccggtcaattctgaggtctttacagagttattaagaaaacccatgttcttctcagagagagctgatcctattggtttcagtttgacatcgaattttttgtctttgagagcccaaagttccagtgaatggctctcgcttatgaatgatcaatcagttgatcaaaaggccatgttattgttacagaataatattaatagtgacttgaaagagctgctacgaaaactgcagcatcaaatgaccattatggacagtaagaagcaagatcacgcccatattagaacacgaaaagccagaaataaagagctttgggactcactggcggactttctcaagggttatctagtaccgaatttggatgataatgatgaatcaatagatagcttaacgaacgaagtcatgctgttaatgaaaagactaattgagcatgatttgaatctgacattaaacgatttttcatctaaaacgataccaatatacagattattacttagggctaatataataacagtaattgagggctctacaaatccagggactaaatacatcaaactaatagatttcaatgagaccagtctaacttaa

SEQ ID NO: 6378 - DNA, 720 bp, Artificial Sequence
  Description of Artificial Sequence: Synthetic polynucleotide
atggatgttgaaaaggatgtcttggatgtctacataaagaacttggagaaccagatcggaaacaaaagatatttcttgaagcaagctcaaggtgccatcgatgagatcacgaagagatctttagatacagagggtaaaccggtcaattctgaggtctttacagagttattaagaaaacccatgttcttcagtgagagagctgatcctattggtttcagtttgacaagtaattttttgtctttgagagcccaaagttccagtgaatggctctcccttatgaatgatcaatctgttgatcaaaaggccatgttattgttacagaataatattaatagtgacttgaaagagttacttagaaaattacagcatcaaatgaccattatggacagtaagaagcaagatcacgcccatattagaacaagaaaagccagaaataaagagctttgggactctttagcggactttctcaagggttatttggtaccgaatttggatgataatgatgaaagtatagatagcttaacgaacgaagtcatgcttttaatgaaaagattgattgagcatgatttgaatttgacattaaacgatttttcttctaaaacgataccaatatacagattattacttagggctaatataataacagtaattgagggctctacaaatccagggactaaatacatcaaattgatagatttcaatgagaccagtttgacttga

SEQ ID NO: 6379 - DNA, 264 bp, Saccharomyces cerevisiae
atgtcttctctatcaacgtctgatttggcctcccttgatgacacttccaaaaaggaaattgctactttcttggagggagagaactccaaacaaaaagtccagatgtcaatccatcaattcactaatatatgcttcaaaaaatgtgttgagtctgtcaatgattctaatttaagttcgcaagaagagcaatgtttgtctaactgtgtgaatcggtttttggatactaatatcaggattgtgaacgggttgcaaaacacccgttaa

SEQ ID NO: 6380 - DNA, 264 bp, Artificial Sequence
  Description of Artificial Sequence: Synthetic polynucleotide
atgtcttctttatctacgtctgatttggcctcccttgatgacacttccaaaaaggaaattgctactttcttggagggagagaactccaaacaaaaagtccagatgtccatccatcaattcactaatatatgcttcaaaaaatgtgttgagtctgtcaatgattctaatttaagttctcaagaagagcaatgtttgtctaactgtgtgaatagatttttggatactaatatcaggattgtgaacgggttgcaaaacacccgttga

SEQ ID NO: 6381 - DNA, 1266 bp, Saccharomyces cerevisiae
atgacggccgtaactgatatcatcgatgaattgaatgattcgagtctttcttctacaaggcttcgagagttgtgtctccagttacgaaagaagacagatactggatgtgcaattacggtgtccgatgaggtcaaccttattgaatctctctcatatcactccatatctccaggagtagacatacaaatcaacacagatgttttgcagactatagattactactttcagcgtaacaaaagtgaacatgacgaaattatgtgcgtccttatttctaagttacagccactacttttaaaacgcaaaagcaacttcgaactcaaagagcaacgtaatcttggtctcaaacccacgcttggaatgtctttgaaagaagataacctaatgcaggcgtgggtaagtcagggtggcttgaaaggcattccgttattctacgtaattctgttacatttgaaaaggagagacatatctacgaatctttcttggattattccaggaattctaaacatactagatgataccactgatataagaagaattaaacttcgtggtgttctgctcctacagacgctattaaatcatacctttatgaacgaaaccaatgactcaaaatggatacagttctctagtactggtttatttccactgttcgaaaagacgctaatcaatatgtgctattttctccctccctcatacaatgctgatgaaacaatagccatatggcgggtcgttttcccaacgatacagtcgttatataaagtagaatttttggacaattacacaaagtatcaatatcacctggaaaagttcatgtcagagataatcttgcaaaacataattcctagggctagccttgcatacgaaaatttgacgttatacgcattggaatgcacaatgaacatactgagacttcaaagagaagggtctgttgtacatctccagaggctgatttttgttttaggtgaatatattgtacgaaatcctttttacacaacttttccaaaacttatttcaaaaactctttcagtggtaagtactctcataaaggtttgcccgaatgaaagaatagtggctcacagattcgacattttatcattaattctagttacatacgataagtgttcgcaagaggatgcgttgaacgaatcaatactacaacaatgtaaggaaacgataagctggttgctgaattgtgactgcgctatgggtgaacagttatcgactctatctaagcaaccgcggtttcagttactttttgagttctcatag

SEQ ID NO: 6382 - DNA, 1266 bp, Artificial Sequence
  Description of Artificial Sequence: Synthetic polynucleotide
atgacggccgtaactgatatcatcgatgaattgaatgattctagtctttcttctacaaggcttcgtgagttgtgtctccagttaagaaagaagacagatactggatgtgcaattacggtgtccgatgaggtcaaccttattgaatctctctcttatcactccatatctccaggagtagacatacaaatcaacacagatgttttgcagactatagattactactttcagcgtaacaaaagtgaacatgacgaaattatgtgcgtccttatttctaagttacagccattacttttaaaacgcaaaagcaacttcgaactcaaagagcaacgtaatcttggtctcaaacccacgcttggaatgtctttgaaagaagataacttgatgcaggcgtgggtaagtcagggtggcttgaaaggcattccgttattctacgtaattttattacatttgaaaaggagagacatatctacgaatctttcttggattattccaggaattttgaacatattggatgataccactgatataagaagaattaaacttcgtggtgttttactcttacagacgttattaaatcatacctttatgaacgaaaccaatgactctaaatggatacagttctctagtactggtttatttccattattcgaaaagacgttgatcaatatgtgctattttctccctccctcttacaatgctgatgaaacaatagccatatggagagtcgttttcccaacgatacagtctttatataaagtagaatttttggacaattacacaaagtatcaatatcacttggaaaagttcatgtctgagataatcttgcaaaacataattcctagggctagccttgcatacgaaaatttgacgttatacgcattggaatgcacaatgaacatattaagacttcaaagagaagggtctgttgtacatctccagaggttgatttttgttttaggtgaatatattgtaagaaatcctttttacacaacttttccaaaacttatttccaaaactctttctgtggtaagtactctcataaaggtttgcccgaatgaaagaatagtggctcacagattcgacattttatctttaattttggttacatacgataagtgttctcaagaggatgcgttgaacgaaagtatattgcaacaatgtaaggaaacgataagctggttgttgaattgtgactgcgctatgggtgaacagttatctactttatctaagcaaccgagatttcagttactttttgagttctcttga

SEQ ID NO: 6383 - DNA, 4329 bp, Saccharomyces cerevisiae
atgactgcttctgacctcttgacgctcccacaattgttggcgcaatattcctctagtgctccccaaaataaagtgttctacactactagcacaaaaaatagtcattcatccttcaaagggctagaatctgttgccacagatgctactcatctattgaacaatcaagatccattgaataccatcaaagatcaactctctaaggacattttaactaccgtttttacagatgaaactactttggtcaaatccatccaccatctatattctcttcctaataaacttccattggtgattacagtggatttgaatttgcaagattattccgcaattcctgcgttaaaggatctttctttccccatcttaatatcttctgatttgcaaactgcaatttcaaacgcggactcttcttataagattgctacaagttctctgaccccagttttccattttcttaacttggagaaaattggcacgagtacagctattgaacaagacatcgactttcctaccttggagattgctaacgaagagactaaagtagcattatcagaagctactgattcattgacaaattttgaactggttaaaggtaaagagtcaattaccactgtcattgttaacctgtcaccatatgacgcggaattcagtagcgtattgccttcaaacgtaggattgatcaagattagagtatacagaccatggaatttttccaagttcttggaaatactgccatcttctgttaccaaaatcgccgttttacagggtgtctctaagaaatcgcaatcaaacgaatttcaaccatttcttttggacttctttggcaattttaatgaattagtttctaggaacatcgagcaggtagtgttgactaatattggtaatgtgaatgattatggcaacgttatcaacaccgtcatatcgaatattaacaagaaggaaccagataataacttatttttaggtgaatccaatgaaaaggctgaggaacaagctgaagttactcaacttatttcttctgtcaaaaaagttgtgaacttagaagacgcctatatcaaagtgctaaaacagttattttcatcaaatctacaaattttgaatcaattttccagtgagacaattgaaccaagtaatccagaatttggttttggacgctttttaaaacaagaagcccagcgtgaagaattgatcagcttagcaaaaacctctcttgatccaagtctttacttgtccgaggatgcaaataaaattgttcaactattatctaaatggttgtcattcaatggacgcgatcttgacgaagctcaattacaagaggccaatgcgacaggtttggaaatatttcagttattacaatctaatcaagattcctctactgtcttaaaattcttaaagatagctccaacaagcgattcttttattttcaaatcaagctggctaattggctccgatgcctggtcttatgatttgggtcactcaggtattcaacaggttttatcctcccgtaaaaacattaatgttttattgattgattcagagccatatgaccatagaaagcaaaaccaggatagaaagaaagatgttggtttgtacgccatgaattattacagtgcctatgttgcctctgtagcagtatatgcttcttacacccaactattgactgcaataatagaggcatctaaatacaatggtccttctattgtcttggcttatttgccgtataattccgaaaatgatactccattagaagtcttaaaggaaaccaaaaacgccgttgaatctggttactggccattgtataggtttaatcctgtttatgacgatccatcaacagataaggaggcatttagcttggattcttcggttatcagaaaacaattacaggacttcttagaccgtgagaataagcttaccctattaaccagaaaagatccatctttgtcaagaaatctaaagcaatctgctggtgatgcgttgacaaggaaacaagaaaaaagaagcaaggctgccttcgatcagttattggagggtttgtccggcccaccgctacacgtctattatgcttctgacggtggtaatgctgcaaacttggcaaagagactagcagcaagggcatctgcaagaggtttaaaggctactgttctgtccatggatgacattattttggaagaattacctggtgaagagaatgtagttttcattacttccacggctgggcaaggtgaattcccccaagacggtaagtctttctgggaagctctgaaaaatgacaccgacttggatttagctagtttgaatgttgctgtttttggtctcggtgattctgagtattggccacgtaaagaagataaacattattttaacaagccttcacaggatttatttaagcgcttggaattattgagtgccaaagccctaattcccttgggactgggtgatgatcaagatgctgatggtttccaaactgcttattctgagtgggaacctaaattatgggaagctcttggtgtttccggcgctgctgttgatgatgagccaaaacctgttacaaacgaggatattaagagagaatctaatttcttgagaggtactatcagtgagaacttaaaggatacttcttcaggtggtgttactcacgctaatgaacaattaatgaaatttcacggtatttacacccaagacgatcgtgacattagagaaatacgtaagtcacaaggcttagagccatactatatgtttatggcaagagctcgtttaccaggtggtaagaccactccacaacaatggcttgctctggatcacttatctgatacttcaggcaatggtaccctgaaattaacaacaagggcaaccttccagattcatggtgtgctaaagaagaacttgaaacacacattgagaggaatgaatgcagttcttatggatacattagctgctgcaggtgacgtgaacagaaatgtcatggtttctgctctaccaaccaatgccaaggttcaccaacaaatcgctgatatgggaaaattgatttctgatcatttcttaccaaagactacggcctaccacgaagtttggctggagggcccagaagaacaggacgatgatccatcctggccatctatttttgaaaacagaaaagatggtccaagaaaaaagaagactctagttagcggtaacgctttggtcgatattgaaccaatttacggtccaacttatctgccaagaaagtttaaattcaacatcgccgttcctccatataacgatgtggatgtattatctatcgatgtcggtttagttgctatagttaacccagaaactcaaatcgtggagggttataatgtttttgttggtggtggtatgggtaccactcataacaacaagaaaacttacccaagattagggtcatgcttaggttttgttaaaactgaagacattattccaccacttgaaggtatcgttattgtccaaagagatcacggtgaccgtaaagaccgtaagcatgctcgtttaaagtatactgtagatgatatgggtgtcgaaggcttcaagcaaaaagtggaggaatactggggtaagaaattcgagcctgagagaccatttgagtttaaatctaatattgattactttggatggattaaagatgaaactgggttaaaccactttaccgcatttattgaaaatggtagggttgaagatacaccagatttgcctcaaaagacaggtattagaaaggttgctgaatacatgcttaagactaattctggtcatttcagattgactggtaatcaacatttggttatctctaatattacagatgaacatgttgctggaataaaatctattttaaagacctataaattggataacaccgatttcagcggtttgagattatcttcatcttcctgtgttggtttgccaacatgtggtttagcgtttgccgaatctgaacgtttcctacctgacattattactcagttggaagattgtttagaagagtatggtttacgccatgattccattattatgagaatgactggttgccctaacggttgttctcgtccatggctaggtgaattagctcttgttggtaaagctccacatacttataacttgatgcttggtggtggttacctcggccaaaggctaaacaaattgtataaggccaatgtgaaggatgaggaaattgtcgactacatcaaaccattgtttaaaaggtatgctttagaaagagaagaaggggaacactttggtgatttctgtataagagtaggtatcattaaaccaaccaccgagggtaaatacttccatgaagatgtgtctgaagatgcctattaa

SEQ ID NO: 6384 - DNA, 4329 bp, Artificial Sequence
  Description of Artificial Sequence: Synthetic polynucleotide
atgactgcttctgacctcttgacgctcccacaattgttggcgcaatattcctctagtgctccccaaaataaagtgttctacactactagcacaaaaaatagtcattcttccttcaaagggttggaatctgttgccacagatgctactcatcttttgaacaatcaagatccattgaataccatcaaagatcaactctctaaggacattttaactaccgtttttacagatgaaactactttggtcaaatccatccaccatttatattctcttcctaataaacttccattggtgattacagtggatttgaatttgcaagattattccgcaattcctgcgttaaaggatctttctttccccatcttaatatcttctgatttgcaaactgcaatttccaacgcggactcttcttataagattgctacaagttctttaaccccagttttccattttcttaacttggagaaaattggcacgagtacagctattgaacaagacatcgactttcctaccttggagattgctaacgaagagactaaagtagcattatctgaagctactgattctttgacaaattttgaattggttaaaggtaaagagtctattaccactgtcattgttaacttatctccatatgacgcggaattcagtagcgtattgccttccaacgtaggattgatcaagattagagtatacagaccatggaatttttccaagttcttggaaatattgccatcttctgttaccaaaatcgccgttttacagggtgtctctaagaaatctcaaagtaacgaatttcaaccatttcttttggacttctttggcaattttaatgaattagtttctaggaacatcgagcaggtagtgttgactaatattggtaatgtgaatgattatggcaacgttatcaacaccgtcatatccaatattaacaagaaggaaccagataataacttatttttaggtgaatccaatgaaaaggctgaggaacaagctgaagttactcaacttatttcttctgtcaaaaaagttgtgaacttagaagacgcctatatcaaagtgttgaaacagttattttcttccaatttacaaattttgaatcaattttccagtgagacaattgaaccaagtaatccagaatttggttttggacgctttttaaaacaagaagcccagcgtgaagaattgatcagcttagcaaaaacctctcttgatccaagtctttacttgtccgaggatgcaaataaaattgttcaattattatctaaatggttgagtttcaatggacgcgatcttgacgaagctcaattacaagaggccaatgcgacaggtttggaaatatttcagttattacaatctaatcaagattcctctactgtcttaaaattcttaaagatagctccaacaagcgattcttttattttcaaaagtagctggttgattggctccgatgcctggtcttatgatttgggtcactctggtattcaacaggttttatcctcccgtaaaaacattaatgttttattgattgattctgagccatatgaccatagaaagcaaaaccaggatagaaagaaagatgttggtttgtacgccatgaattattacagtgcctatgttgcctctgtagcagtatatgcttcttacacccaattattgactgcaataatagaggcatctaaatacaatggtccttctattgtcttggcttatttgccgtataattccgaaaatgatactccattagaagtcttaaaggaaaccaaaaacgccgttgaatctggttactggccattgtataggtttaatcctgtttatgacgatccatctacagataaggaggcatttagcttggattcttctgttatcagaaaacaattacaggacttcttagaccgtgagaataagcttaccttattaaccagaaaagatccatctttgtccagaaatttgaagcaatctgctggtgatgcgttgacaaggaaacaagaaaaaagaagcaaggctgccttcgatcagttattggagggtttgtccggcccaccgttgcacgtctattatgcttctgacggtggtaatgctgcaaacttggcaaagagattagcagcaagggcatctgcaagaggtttaaaggctactgttttatccatggatgacattattttggaagaattacctggtgaagagaatgtagttttcattacttccacggctgggcaaggtgaattcccccaagacggtaagtctttctgggaagctttgaaaaatgacaccgacttggatttagctagtttgaatgttgctgtttttggtctcggtgattctgagtattggccacgtaaagaagataaacattattttaacaagccttctcaggatttatttaagcgcttggaattattgagtgccaaagccttaattcccttgggattaggtgatgatcaagatgctgatggtttccaaactgcttattctgagtgggaacctaaattatgggaagctcttggtgtttccggcgctgctgttgatgatgagccaaaacctgttacaaacgaggatattaagagagaatctaatttcttgagaggtactatcagtgagaacttaaaggatacttcttctggtggtgttactcacgctaatgaacaattaatgaaatttcacggtatttacacccaagacgatcgtgacattagagaaatacgtaagtctcaaggcttagagccatactatatgtttatggcaagagctcgtttaccaggtggtaagaccactccacaacaatggcttgctttagatcacttatctgatacttctggcaatggtaccttgaaattaacaacaagggcaaccttccagattcatggtgtgttgaagaagaacttgaaacacacattgagaggaatgaatgcagttcttatggatacattagctgctgcaggtgacgtgaacagaaatgtcatggtttctgctttgccaaccaatgccaaggttcaccaacaaatcgctgatatgggaaaattgatttctgatcatttcttaccaaagactacggcctaccacgaagtttggttggagggcccagaagaacaggacgatgatccatcctggccatctatttttgaaaacagaaaagatggtccaagaaaaaagaagactttggttagcggtaacgctttggtcgatattgaaccaatttacggtccaacttatttaccaagaaagtttaaattcaacatcgccgttcctccatataacgatgtggatgtattatctatcgatgtcggtttagttgctatagttaacccagaaactcaaatcgtggagggttataatgtttttgttggtggtggtatgggtaccactcataacaacaagaaaacttacccaagattagggtcttgcttaggttttgttaaaactgaagacattattccaccacttgaaggtatcgttattgtccaaagagatcacggtgaccgtaaagaccgtaagcatgctcgtttaaagtatactgtagatgatatgggtgtcgaaggcttcaagcaaaaagtggaggaatactggggtaagaaattcgagcctgagagaccatttgagtttaaatctaatattgattactttggatggattaaagatgaaactgggttaaaccactttaccgcatttattgaaaatggtagggttgaagatacaccagatttgcctcaaaagacaggtattagaaaggttgctgaatacatgcttaagactaattctggtcatttcagattgactggtaatcaacatttggttatctctaatattacagatgaacatgttgctggaataaaatctattttaaagacctataaattggataacaccgatttcagcggtttgagattatcttcttcttcctgtgttggtttgccaacatgtggtttagcgtttgccgaatctgaacgtttcttacctgacattattactcagttggaagattgtttagaagagtatggtttacgccatgattccattattatgagaatgactggttgccctaacggttgttctcgtccatggttaggtgaattagctcttgttggtaaagctccacatacttataacttgatgcttggtggtggttacctcggccaaaggttaaacaaattgtataaggccaatgtgaaggatgaggaaattgtcgactacatcaaaccattgtttaaaaggtatgctttagaaagagaagaaggggaacactttggtgatttctgtataagagtaggtatcattaaaccaaccaccgagggtaaatacttccatgaagatgtgtctgaagatgcctattga

SEQ ID NO: 6385 - DNA, 4755 bp, Saccharomyces cerevisiae
atgttcgctaaattgcatgggaagaaacaaagaccaatttcttccatcaattcacaaactccaaggactagcaatactactcacgcaaatagcatatccttatcatcgggtaatttgatagtaggttccaatagaaatttaagacaaaagaaagagcagtttggttctcaacaaagggcttccggcagaaagctgatttcaaataaggaaaatgacgataacgtcaacaatggtggtgacaacaattatgacaatggggaacgggtccatcgccatcatattccaggactgaaaataaaggcgtatcaagctgaattaggctatcatgagtcccgattttccgagaatttagtgatgctaaatctagttgagttcccggatataaaacctggtgatttggtagaattgaaaacatatcacaaaaatccatctgcatcgaacggagataagaaaatttattttattgcaaaagattttgacggagagactaaaagaagggcaaaaacatctaatgtttcaatactttcgggtcaactgcaaactttgttagatttgccttctaggtctaggatatggataaaattgaaaccaaacaaatttgacttacaggcagatgtggtagagtttaatatcaaagattgcctactaaatagaggtgatatgtgggttctatcatctaagctggtagatacatgtgtgtttatggatcaaagactggcattcttagactctatcagaggtactattaagggaatttatcgaaatggtaagaagattgtttctggatatattggcgaacaaacaaggataatttttcggtccgaatctgccagattaatttttttgattcaaataactgatgaaatgtggaacttcgaagaaactggtgaacaattatttcaaaagatggttaattcatttttcccgaagatcttcaaaaaatggaaagatgtggacacccaccatactatcactatagccttcgctatatcaatggacttgtctgatacatcattcaaggacttaacacccggcgaatctttgaaaaattcacaggattattttaggatagttgtagatcaagtcagtattatccattgggttgatattatggaaacattaagagaagaatttatggaaatcagaaaagatttattaaacaagcaaacggataagggttacagtgtagcgaatggaagattttcacctgtaatcaagtcgaattttctcgaattggtcaattttgccacgacaattttaacggatcctttcaagcaattagatcttcgacacactacaacgcacgtcatgattatttcaccagggtctggattatttgacgttgattatagtttattaaggctaacaggaaaaaaactactctctcttgaaatgacgatggatttaatatgtctttcaaaagctccattgcacatagttccactttttaggtaccgagactttgagaacaagcttcatcattgtgtaccgctttggttaagtgttttcttttggaatgatcatgacaaaaagagtaactcagaatggactccaagatgtaaaatttatgacttacaaatgatggggattactgaaaatgagttaattcgggaagtggatgttgaatatttacagctgaacaagaaagtcaaatcactatccgagtttatgaatgattacgacaaaaatgccttcgaggtgaaaattttatgcgctggctctaatacgaaacaatctaagaaattaaattcaaagtttgataccgtcttcgagaatgatgttgttgtgaaggcaaggaaaatcccggcaacagcaacaacaacacacggtaacacaaaattcatatggagaggtccaaaagttgctctcccagccattaaggatattcaaaaaccaaacgtaataccagatctatcaataaaaacaatagaggcctctttttatgatgattgtaatactacaaatgataaaattagcactcccaccacttctaacaatgacaatctcgaaatgaatgactcattggtctctgtgagatctgctgataaccaaaacacatctttggcgctggattcgctcaaaggactaagcaaaaggaactcattgaaagattttactcaaagagtaattacaaaatttatttcgaacatagacacaagtaaaaataaaaaaataaagtcaacattactcagagatgatgtggataactcacctttaggttcaaatacaccactaccatcttctgaaagtaaaataagtggcctgaaattacaacaaaaaggcctggcagatgaaaacgttatcagtaaacgtggaaatttgataataaagaaaaacctatccatttttgggctacctagtaatgaaatcatgagtggttcaccctcctcatatttaggctcatcacataccagaacatcctctaaactttctaatatgtcagacaaggctgctttcattacagaagggcaaaaatcaaaacatgatgactcgaacacttatagcctcacacagcaattgaaacatcgtataagtgaaacttgggtggatattaaaagtccttccattccggtaagtagtgaatttgccaacgaattattgcctatacgttggaaagatgtatggccaaaatatgtggccagaaaatatagtaaatggaggtcttttacaaccccagcagagttaccaatcacaatttctgattttccatccaaggatgattttgataggaacttcatcttcagaaatcactcagtgactttaaacacagatcaagaacaatataatcagacatacaaagacttacttcgtgatatgatttatatgcgactgttaactggttttcaaatctgcgtgggccgacaagtagaaaaaatagaactttctagggaaagtggtgaaagtgaaactgtagtcaacaagtatttagatttcaatcaaaatgatgcgttcaaactttatctaatgatcgactctgaaatacacagaataacatgctcgtcaagtggaattattgatgtggagaggtatttgagaaaagatgaagcaaacttgtttgatcaggttcctagttatattccgttggttaaaacgagatacgagagctcatttcgtgatgctatgattgacccacttcatgttaaaagagaatctttgaactggaatcaaattgatcaggttctagcaggttatggcgataacttaatagataggaaatggcacggatttcgagctaaatatgtggtgttaccaacagatatccctcccaacacatattctatggttatcaatggtaaaagcgaaactttaaacccagaagaaatcagagtcgagggtttgagaagattaattggctcaataacgaggtcaagactaagaacagagaaagaaaaaaaaggaagaaaaactaagagagaagaaatacagcctgaagttatgttttacaccggcccgctttacaacttcattaatgagcaacaaacatctttagaaagctcggctataaattttaaagattcaatttttgttaatgataataaccttttaaacagaaatgtagaactatccaagttggcgtatcaaattcaacgtggcgaagatcgcattactttagtcaacagaaaatggcactggaaaaagcatgaaaagtgttttgttggctcggagatggttaattggctcataagaaacttctctgatatagatactcgagaagatgcaattaaatatgggcagaaggtgatgaaagagggattatttgttcacgttttaaataagcacaattttttggacgggcactacttttaccagttctcacctgaatacgtaatggacactaataaactagaaaaaacaaactcccatcgctctacattatccgatccaaagcagatgttgagaaaagcatccactggtagctcaaacgatccaagcgctatgactcctttttcttcagtagtacctgctataagcgcttcgaatgcttcagttgctgacgccaaagagccatcacgccctattttaatgctgagtaactctcttgttatcgatgttgatcccgcgggaaaatcctcgaaacaagaatcgtgtacagtccattatgacagagttcataaccccgaccactgttttcacataagattggaatggttgactaccaccccaaaattgatcgatgatttggttgggaactggtcaaggttatgcgaaaggtacggtttgaaaatgattgaaattccttgggaagaactttgtactatcccttcggtcaatccatttcactcttttgtggaaattaagttagctatcaatccttgggaagatcctgagttcaaggatagggagcttttcgctaaaagcaaattctactaccacgtttatcttttaaaggcatctgggtttttattagacaatagggcatccaaatttttacaaaatcaagatatagagtttgacatcatgtattcatggggcaaaccacagttcaaatatgttcaatatattcatcatacgggtgcttacgtcgcggaattgagggaaaatggctgcctatttttagctcctaacaacatttatatatccagagtgaatccgggaaacataatcgggaaaattcattctgcttcaagctcttcattagatgctcaaaaagtgatcctaaatttcaaatcaacttgcttggactatcagaagttaaggtcaattttccttgacgcaaaggaaatgtggattacaggaaagattgtagaagattga

SEQ ID NO: 6386 - DNA, 4755 bp, Artificial Sequence
  Description of Artificial Sequence: Synthetic polynucleotide
atgttcgctaaattgcatgggaagaaacaaagaccaatttcttccatcaattctcaaactccaaggactagcaatactactcacgcaaatagcatatccttatcttctggtaatttgatagtaggttccaatagaaatttaagacaaaagaaagagcagtttggttctcaacaaagggcttccggcagaaagttgatttctaataaggaaaatgacgataacgtcaacaatggtggtgacaacaattatgacaatggggaaagagtccatcgccatcatattccaggattgaaaataaaggcgtatcaagctgaattaggctatcatgagtccagattttccgagaatttagtgatgttgaatttggttgagttcccggatataaaacctggtgatttggtagaattgaaaacatatcacaaaaatccatctgcatctaacggagataagaaaatttattttattgcaaaagattttgacggagagactaaaagaagggcaaaaacatctaatgtttctatactttctggtcaattacaaactttgttagatttgccttctaggtctaggatatggataaaattgaaaccaaacaaatttgacttacaggcagatgtggtagagtttaatatcaaagattgccttttgaatagaggtgatatgtgggttttatcttctaagttggtagatacatgtgtgtttatggatcaaagattagcattcttagactctatcagaggtactattaagggaatttatagaaatggtaagaagattgtttctggatatattggcgaacaaacaaggataatttttagatccgaatctgccagattaatttttttgattcaaataactgatgaaatgtggaacttcgaagaaactggtgaacaattatttcaaaagatggttaattcttttttcccgaagatcttcaaaaaatggaaagatgtggacacccaccatactatcactatagccttcgctatatccatggacttgtctgatacatctttcaaggacttaacacccggcgaatctttgaaaaattctcaggattattttaggatagttgtagatcaagtcagtattatccattgggttgatattatggaaacattaagagaagaatttatggaaatcagaaaagatttattaaacaagcaaacggataagggttacagtgtagcgaatggaagattttctcctgtaatcaagagcaattttctcgaattggtcaattttgccacgacaattttaacggatcctttcaagcaattagatcttcgccacactacaacgcacgtcatgattatttctccagggtctggattatttgacgttgattatagtttattaaggttgacaggaaaaaaattactctctcttgaaatgacgatggatttaatatgtctttctaaagctccattgcacatagttccactttttaggtacagagactttgagaacaagcttcatcattgtgtaccgctttggttaagtgttttcttttggaatgatcatgacaaaaagagtaactctgaatggactccaagatgtaaaatttatgacttacaaatgatggggattactgaaaatgagttaattagagaagtggatgttgaatatttacagttgaacaagaaagtcaaatctttatccgagtttatgaatgattacgacaaaaatgccttcgaggtgaaaattttatgcgctggctctaatacgaaacaatctaagaaattaaattctaagtttgataccgtcttcgagaatgatgttgttgtgaaggcaaggaaaatcccggcaacagcaacaacaacacacggtaacacaaaattcatatggagaggtccaaaagttgctctcccagccattaaggatattcaaaaaccaaacgtaataccagatttatctataaaaacaatagaggcctctttttatgatgattgtaatactacaaatgataaaattagcactcccaccacttctaacaatgacaatctcgaaatgaatgactctttggtctctgtgagatctgctgataaccaaaacacatctttggcgttggattctctcaaaggattaagcaaaaggaactctttgaaagattttactcaaagagtaattacaaaatttatttccaacatagacacaagtaaaaataaaaaaataaagagtacattactcagagatgatgtggataactctcctttaggtagtaatacaccattaccatcttctgaaagtaaaataagtggcttgaaattacaacaaaaaggcttggcagatgaaaacgttatcagtaaacgtggaaatttgataataaagaaaaacctttccatttttgggttgcctagtaatgaaatcatgagtggttctccctccagctatttaggctcttctcataccagaacatcctctaaactttctaatatgtctgacaaggctgctttcattacagaagggcaaaaatctaaacatgatgactccaacacttatagcctcacacagcaattgaaacatcgtataagtgaaacttgggtggatattaaaagtccttccattccggtaagtagtgaatttgccaacgaattattgcctatacgttggaaagatgtatggccaaaatatgtggccagaaaatatagtaaatggaggtcttttacaaccccagcagagttaccaatcacaatttctgattttccatccaaggatgattttgataggaacttcatcttcagaaatcactctgtgactttaaacacagatcaagaacaatataatcagacatacaaagacttacttcgtgatatgatttatatgagattattaactggttttcaaatctgcgtgggcagacaagtagaaaaaatagaactttctagggaaagtggtgaaagtgaaactgtagtcaacaagtatttagatttcaatcaaaatgatgcgttcaaactttatttaatgatcgactctgaaatacacagaataacatgctcttccagtggaattattgatgtggagaggtatttgagaaaagatgaagcaaacttgtttgatcaggttcctagttatattccgttggttaaaacgagatacgagagctcctttcgtgatgctatgattgacccacttcatgttaaaagagaatctttgaactggaatcaaattgatcaggttttagcaggttatggcgataacttaatagataggaaatggcacggatttagagctaaatatgtggtgttaccaacagatatccctcccaacacatattctatggttatcaatggtaaaagcgaaactttaaacccagaagaaatcagagtcgagggtttgagaagattaattggctctataacgaggagcagattgagaacagagaaagaaaaaaaaggaagaaaaactaagagagaagaaatacagcctgaagttatgttttacaccggcccgctttacaacttcattaatgagcaacaaacatctttagaaagcagtgctataaattttaaagattctatttttgttaatgataataaccttttaaacagaaatgtagaattatccaagttggcgtatcaaattcaacgtggcgaagatcgcattactttagtcaacagaaaatggcactggaaaaagcatgaaaagtgttttgttggcagtgagatggttaattggctcataagaaacttctctgatatagatactagagaagatgcaattaaatatgggcagaaggtgatgaaagagggattatttgttcacgttttaaataagcacaattttttggacgggcactacttttaccagttcagtcctgaatacgtaatggacactaataaattagaaaaaacaaactcccatcgctctacattatccgatccaaagcagatgttgagaaaagcatccactggtagcagtaacgatccaagcgctatgactcctttttcttctgtagtacctgctataagcgcttctaatgcttctgttgctgacgccaaagagccaagccgccctattttaatgttaagtaactctcttgttatcgatgttgatcccgcgggaaaatcctctaaacaagaaagttgtacagtccattatgacagagttcataaccccgaccactgttttcacataagattggaatggttgactaccaccccaaaattgatcgatgatttggttgggaactggagcaggttatgcgaaaggtacggtttgaaaatgattgaaattccttgggaagaactttgtactatcccttctgtcaatccatttcactcttttgtggaaattaagttagctatcaatccttgggaagatcctgagttcaaggatagggagcttttcgctaaaagcaaattctactaccacgtttatcttttaaaggcatctgggtttttattagacaatagggcatccaaatttttacaaaatcaagatatagagtttgacatcatgtattcttggggcaaaccacagttcaaatatgttcaatatattcatcatacgggtgcttacgtcgcggaattgagggaaaatggctgcttatttttagctcctaacaacatttatatatccagagtgaatccgggaaacataatcgggaaaattcattctgcttctagctcttctttagatgctcaaaaagtgatcttgaatttcaaatctacttgcttggactatcagaagttaaggtctattttccttgacgcaaaggaaatgtggattacaggaaagattgtagaagattga

SEQ ID NO: 6387 - DNA, 1080 bp, Saccharomyces cerevisiae
atgagcactaaagttgttaatgttgccgttatcggtgccggtgttgttggttcagctttcttggatcaattgttagccatgaagtctaccattacttacaatctagttcttttggctgaagctgagcgttctttaatctccaaggacttttctccattaaatgttggttctgattggaaggctgctttagcagcctccactactaaaacgttgcctttggatgatttaattgctcatttgaagacttcacctaagccagtcattttggttgataacacttccagcgcttacattgctggtttttacactaagtttgtcgaaaatggtatttccattgctactccaaacaagaaggccttttcctctgatttggctacctggaaggctcttttctcaaataagccaactaacggttttgtctatcatgaagctaccgtcggtgctggtttgcctatcatcagtttcttaagagaaattattcaaaccggtgacgaagttgaaaaaattgaaggtatcttctctggtactctatcttatattttcaacgagttctccactagtcaagctaacgacgtcaaattctctgatgttgtcaaagttgctaaaaaattgggttatactgaaccagatccaagagatgatttgaatgggttggatgttgctagaaaggttaccattgttggtaggatatctggtgtggaagttgaatctccaacttccttccctgtccagtctttgattccaaaaccattggaatctgtcaagtctgctgatgaattcttggaaaaattatctgattacgataaagatttgactcaattgaagaaggaagctgccactgaaaataaggtattgagattcattggtaaagtcgatgttgccaccaaatctgtgtctgtaggaattgaaaagtacgattactcacacccattcgcatcattgaagggatcagataacgttatttccatcaagactaagcgttacaccaatcctgttgtcattcaaggtgccggtgccggtgctgccgttactgccgctggtgttttgggtgatgttatcaagattgctcaaagactttag

SEQ ID NO: 6388 - DNA, 1080 bp, Artificial Sequence
  Description of Artificial Sequence: Synthetic polynucleotide
atgagcactaaagttgttaatgttgccgttatcggtgccggtgttgttggttctgctttcttggatcaattgttagccatgaagtctaccattacttacaatttggttcttttggctgaagctgagcgttctttaatctccaaggacttttctccattaaatgttggttctgattggaaggctgctttagcagcctccactactaaaacgttgcctttggatgatttaattgctcatttgaagacttctcctaagccagtcattttggttgataacacttccagcgcttacattgctggtttttacactaagtttgtcgaaaatggtatttccattgctactccaaacaagaaggccttttcctctgatttggctacctggaaggctcttttcagtaataagccaactaacggttttgtctatcatgaagctaccgtcggtgctggtttgcctatcatcagtttcttaagagaaattattcaaaccggtgacgaagttgaaaaaattgaaggtatcttctctggtactttatcttatattttcaacgagttctccactagtcaagctaacgacgtcaaattctctgatgttgtcaaagttgctaaaaaattgggttatactgaaccagatccaagagatgatttgaatgggttggatgttgctagaaaggttaccattgttggtaggatatctggtgtggaagttgaatctccaacttccttccctgtccagtctttgattccaaaaccattggaatctgtcaagtctgctgatgaattcttggaaaaattatctgattacgataaagatttgactcaattgaagaaggaagctgccactgaaaataaggtattgagattcattggtaaagtcgatgttgccaccaaatctgtgtctgtaggaattgaaaagtacgattactctcacccattcgcaagtttgaagggaagtgataacgttatttccatcaagactaagcgttacaccaatcctgttgtcattcaaggtgccggtgccggtgctgccgttactgccgctggtgttttgggtgatgttatcaagattgctcaaagactttga

SEQ ID NO: 6389 - DNA, 4947 bp, Saccharomyces cerevisiae
atgtctatgttcaatgccctcaattcaaacatcgaaggtgaacaatatgaagcagaggagcattcaagagagcttcaaatagaacagagttttaatattttgcaggacgctctgattgatctaaaaaacaaggacttcgaaaagtcggacagcaaattccaagagctcttccagattgatgtcgtcaagcctgataggtggggcatgtatcgcaattcttctcctacgctagataacctgcgatatctatgttataggaacagagggatgtactatcatctgtatttggagaataactatgaaaggttgaactcacaagaactagttaattgtattttaaaagcagttgagaacttggttgagtctattcaacatagcgatgctgattttgcagttacagatttgctggctcgcatcttcaagagctttaatagtgtcaagttggaacgtttaatatcagaatatgaattcactaagcaggaaaatctttcacttttgttggggcgacatcgtaaatttcttttgaacgatttgactctgatgatgaataactacgtagaactcacgaacaaactattagtccccaacttatcggataacacaatctttgagagatatcatttggagaagtacaaagatattaagccggaaccactagcttttggtccaattctttctagaatatcagaaatgaaaaagcaagatgaggaaataatgaaaaagctggacgtgtttaatgtcactttgaatgaagaatcatgggatgaagttgcgaaggctttgaaaaacttactacccagcgttaaaacatcgtctcttattggaaggaatatggatccgtataacgaaattgaagaacctattgaagcggttaagtttgaactatcggaagcaattaataatacaccatctttagatagagagtctgagcgacaagaagaagagcaagataatgagagtgtacgagcagatgataagagtgggaatttagctccatcggatatccaaactaatgaagaagcaaggcctaacaagagaactgatgaacatatcgatagcacgaagcctcttcaaagaagtagtaaacgctttaaagaaagagaacaagaaaactcaaaagagcttgttatggacgttcataaaagattttttggtgagttcaacacgttgttgtcatatattcacattctacccttttgcgattttgacacatttgcttccaaatttatcattggctctagtgacaaacaacccgaaaaatttattccctatactgatctctatgaatgtttgaaatcttggagtagtagatatactgatatttttaaccaaaatgactacttgtccagtggttctaacgaaaatgaggaattattccaactaaatgcgctcctgaaatctaatgcatttgatgataaggagagctttcctagatatttaaatgatttggactcggatcacatcagatcttttatttccgaagtgaatgcaggcaatcttcacttccatcaagtgcgtttgaaattattattcaaattgcttggaacttacgatgaaggaaacggaaggcgtctcattatagactacctttgggagtctcagcttctaaaaattgttttatggtttgtatttggaatcgaatcgaacatttttgcacttattaacaaaaacaaaaggcaatgcaaatatttggctttatcgatttacgaacttcttgttaaccatttagggaatattgtggaggaaatcacaaataaacggattcaaggacataagtcagcagacctaaaaagtcaaagaaataaagtcgagaaaagaataaggtcgtggcatactctgttagaacaaattgctgacgaaaaagataaagaactgtatgtacattttcaatggacgcattactgcttcttgcaatatacatgtgatatagtcgatagcagactctctgaaactttgacgtctttagaaaatactataaaggattcagattcttctttagacattgcctatccgaattaccgtcatataccggcactaaacctaaacacagttcaatcccagaaaaggaaaataagaataatacaaaacataacagtcgaagatatatctgaagacacgaactctgacactcattcagaaaatcatctagagacactagaaaaagtccttttacatatattacacccttcgactaatcattcaaatattgatgaggagatggtttcctttattttcaactcaccatttttattgaaaattagactttggggcgttctcttttcgtcatatgtcaaaaaatccagtatacaggatgttcaaagaatttatttccacgtacttgattttatgaagggcgcattgacgtcacctgtctacaaagaatcgaacccacacggaaggcaccaaatgttattaacagtgttgacagcaattggctatctctcaagccaactgacagcgatactaaattcaaataggtgggaaagcagcgattttgtcttggaggactatatgtttgaaaagctgctgcaaacattcttcttcttttatactgtccttttctatgaaagctctgcggttaacgacgtttctaataagtcttttttcaaaagagcatcgaaatcatcagggaaaatgaaggatataatgatagatttagcgacgttgatactttattattatgatttacaagcaaagctcaggacacctgctgaacaaggtattgaaacaacggaactaatttggtccttacacactctttttggacatttccatttttgtgatgcatcaaatggaaagttcctagatttagctgaaaaactattgtgccagttcattaataatgattcttttttacaattgaagcaaatactgtggtgtagatatcactacgcgatagctagtgataacttcagtcctgatctgcatgatacaaaagcggtagagatggaaaagatacactctttgcctttaggtacatatctaatcaaattacagtatcaaaataagaacccttacctgtcgtcgtcaaagaccaccctaaaacagataatggataatattatagaaaaaattggcgacccatcaacgctggacaatcatatcatatctagaaactcatttctattaaatgaatatttatcaaggccaataacggcagacttgttgaagcatacattttctggtgcaacaagtttgtatttaacttctccaaacgacgagttacagcaaggcatgacagccggcttgttctacgtatccagcttacagtccctgggtttgtataaaatgagaaagaagtctatgcaagcaagaccttctgaattagactccattatcagaatgttaaagaatgacattatatacaacacaaaccgtttcgaaagttggatattactcggaaagtgttacagttatattgttgaagatgatttaatatggacctcagataagatcactgtccctgagaaaaaagatgttattgctttgactcaaagaaaggcaatattgtgttatttaatggccatttccatttattatagtaagttggatcgaactattgacgataaaaagattatattggaggcattggatgacttaggatctatgctgattagcggctactataatcccatgaataagctttgttttagctggaaaagcagtgctgagaatacaatgagattgtctgaaaccggtgaagtagtaatggaaaaaactaagaaaatcaccacaatctcagactttaacatcgagcaaagtatatttttatgttttaatagggcttgttctttatccggcgatatcaagtcacaggacgatgtattcgtgttgaattggtctagtttttacaatctggccaagttctttttcaaaacagatggtggtaataattgtaaattagttgccaaatatattactcagggttgccaaatagcttatgagtcatcacctgctaaagatccgatcatagaaccccattatctgttagttaatgcttgttacaagtgggtaaaaagaggcgtcataggtgttaacgaagctctgaccttactgtctaaagataaccaattcttccaggaacaagaggaattttgggtcaacgacgaaggtcttgcatgggattatcaagaaaaattcttttttgacaaaatcataagactacttcgccatttactatctgttgataaaaaaaaatggcagcacagacctcgttacagaatagcgcgcatattgtttgacgatttgggtgatgtgaacggtgctttggaggagatggatagcttaatatccgcaaaaagtataaacaaaaacttggtcaatatatggaaaccagattttgaaaggccagggaaacatttcatctatacttaccagtacctggttttgtatttggatttactcttcgcaataaaagacttcaatacaacaggtcttgttataaaaaagctaaggcgatttggttctggaactgtgaacgtaaacgaactattagagcgtgccattaatgtgtacacgcaaagtgccaaaatcaagctgcaattgcaagacaagagctacgtggagcaaatccttccaaccttgaactaccaagaattcctgaagattagtgagcaactgaaccaagttttcgaccaaggaaagtaccctgaagaaatatcatccgggttaaaacttgctttccagttgaaaaagggacatagcggaattgcatttgacagcgtttgcttgggcatttatttcgagtatctctattttcctctagctcgacaggatcaatccctcacagacgtgaacgatgaaaacaatccagcactaccgtcatcaggttctgtgacatcaaaaagcactccagaccctacttctaagccaagtgcaattaagaaacgtgttacaaagaaggaagtcttcgatagagtgaggctattagtggataagatcacgtga

SEQ ID NO: 6390 - DNA, 4947 bp, Artificial Sequence
  Description of Artificial Sequence: Synthetic polynucleotide
atgtctatgttcaatgccctcaatagcaacatcgaaggtgaacaatatgaagcagaggagcattccagagagcttcaaatagaacagagttttaatattttgcaggacgctttgattgatttgaaaaacaaggacttcgaaaagagtgacagcaaattccaagagctcttccagattgatgtcgtcaagcctgataggtggggcatgtatcgcaattcttctcctacgttagataacttaagatatttatgttataggaacagagggatgtactatcatttatatttggagaataactatgaaaggttgaactctcaagaattggttaattgtattttaaaagcagttgagaacttggttgagtctattcaacatagcgatgctgattttgcagttacagatttgttggctcgcatcttcaagagctttaatagtgtcaagttggaacgtttaatatctgaatatgaattcactaagcaggaaaatctttctcttttgttggggagacatcgtaaatttcttttgaacgatttgactttaatgatgaataactacgtagaactcacgaacaaattattagtccccaacttaagtgataacacaatctttgagagatatcatttggagaagtacaaagatattaagccggaaccattggcttttggtccaattctttctagaatatctgaaatgaaaaagcaagatgaggaaataatgaaaaagttggacgtgtttaatgtcactttgaatgaagaaagttgggatgaagttgcgaaggctttgaaaaacttattgcccagcgttaaaacatcttctcttattggaaggaatatggatccgtataacgaaattgaagaacctattgaagcggttaagtttgaattatctgaagcaattaataatacaccatctttagatagagagtctgagagacaagaagaagagcaagataatgagagtgtaagagcagatgataagagtgggaatttagctccaagtgatatccaaactaatgaagaagcaaggcctaacaagagaactgatgaacatatcgatagcacgaagcctcttcaaagaagtagtaaacgctttaaagaaagagaacaagaaaactccaaagagcttgttatggacgttcataaaagattttttggtgagttcaacacgttgttgagttatattcacattttgcccttttgcgattttgacacatttgcttccaaatttatcattggctctagtgacaaacaacccgaaaaatttattccctatactgatctctatgaatgtttgaaatcttggagtagtagatatactgatatttttaaccaaaatgactacttgtccagtggttctaacgaaaatgaggaattattccaattgaatgcgctcttgaaatctaatgcatttgatgataaggagagctttcctagatatttaaatgatttggacagtgatcacatcagatcttttatttccgaagtgaatgcaggcaatcttcacttccatcaagtgcgtttgaaattattattcaaattgcttggaacttacgatgaaggaaacggaaggcgtctcattatagactacctttgggagtctcagcttttgaaaattgttttatggtttgtatttggaatcgaatctaacatttttgcacttattaacaaaaacaaaaggcaatgcaaatatttggctttatccatttacgaacttcttgttaaccatttagggaatattgtggaggaaatcacaaataaaagaattcaaggacataagtctgcagacttgaaaagtcaaagaaataaagtcgagaaaagaataaggagttggcatactttattagaacaaattgctgacgaaaaagataaagaattgtatgtacattttcaatggacgcattactgcttcttgcaatatacatgtgatatagtcgatagcagactctctgaaactttgacgtctttagaaaatactataaaggattctgattcttctttagacattgcctatccgaattaccgtcatataccggcattgaacttgaacacagttcaatcccagaaaaggaaaataagaataatacaaaacataacagtcgaagatatatctgaagacacgaactctgacactcattctgaaaatcatttagagacattagaaaaagtccttttacatatattacacccttccactaatcattctaatattgatgaggagatggtttcctttattttcaactctccatttttattgaaaattagactttggggcgttctcttttcttcttatgtcaaaaaatccagtatacaggatgttcaaagaatttatttccacgtacttgattttatgaagggcgcattgacgtctcctgtctacaaagaatctaacccacacggaaggcaccaaatgttattaacagtgttgacagcaattggctatctctctagccaattgacagcgatattgaatagtaataggtgggaaagcagcgattttgtcttggaggactatatgtttgaaaagttattacaaacattcttcttcttttatactgtccttttctatgaaagctctgcggttaacgacgtttctaataagtcttttttcaaaagagcatccaaatcttctgggaaaatgaaggatataatgatagatttagcgacgttgatactttattattatgatttacaagcaaagctcaggacacctgctgaacaaggtattgaaacaacggaattgatttggtccttacacactctttttggacatttccatttttgtgatgcatctaatggaaagttcttggatttagctgaaaaacttttgtgccagttcattaataatgattcttttttacaattgaagcaaatattatggtgtagatatcactacgcgatagctagtgataacttcagtcctgatttgcatgatacaaaagcggtagagatggaaaagatacactctttgcctttaggtacatatttgatcaaattacagtatcaaaataagaacccttacttatcttcttccaagaccaccttgaaacagataatggataatattatagaaaaaattggcgacccatctacgcttgacaatcatatcatatctagaaactcttttttattaaatgaatatttatctaggccaataacggcagacttgttgaagcatacattttctggtgcaacaagtttgtatttaacttctccaaacgacgagttacagcaaggcatgacagccggcttgttctacgtatccagcttacagtccttgggtttgtataaaatgagaaagaagtctatgcaagcaagaccttctgaattagactccattatcagaatgttaaagaatgacattatatacaacacaaaccgtttcgaaagttggatattactcggaaagtgttacagttatattgttgaagatgatttaatatggacctctgataagatcactgtccctgagaaaaaagatgttattgctttgactcaaagaaaggcaatattgtgttatttaatggccatttccatttattatagtaagttggatagaactattgacgataaaaagattatattggaggcattggatgacttaggatctatgttgattagcggctactataatcccatgaataagctttgttttagctggaaaagcagtgctgagaatacaatgagattgtctgaaaccggtgaagtagtaatggaaaaaactaagaaaatcaccacaatcagtgactttaacatcgagcaaagtatatttttatgttttaatagggcttgttctttatccggcgatatcaagtctcaggacgatgtattcgtgttgaattggtctagtttttacaatttggccaagttctttttcaaaacagatggtggtaataattgtaaattagttgccaaatatattactcagggttgccaaatagcttatgagtcttctcctgctaaagatccgatcatagaaccccattatcttttagttaatgcttgttacaagtgggtaaaaagaggcgtcataggtgttaacgaagctttgaccttattatctaaagataaccaattcttccaggaacaagaggaattttgggtcaacgacgaaggtcttgcatgggattatcaagaaaaattcttttttgacaaaatcataagattacttcgccatttattatctgttgataaaaaaaaatggcagcacagacctcgttacagaatagcgcgcatattgtttgacgatttgggtgatgtgaacggtgctttggaggagatggatagcttaatatccgcaaaaagtataaacaaaaacttggtcaatatatggaaaccagattttgaaaggccagggaaacatttcatctatacttaccagtacttggttttgtatttggatttactcttcgcaataaaagacttcaatacaacaggtcttgttataaaaaagttaaggaggtttggttctggaactgtgaacgtaaacgaattattagagcgtgccattaatgtgtacacgcaaagtgccaaaatcaagttacaattgcaagacaagagctacgtggagcaaatccttccaaccttgaactaccaagaattcttgaagattagtgagcaattgaaccaagttttcgaccaaggaaagtaccctgaagaaatatcttccgggttaaaacttgctttccagttgaaaaagggacatagcggaattgcatttgacagcgtttgcttgggcatttatttcgagtatctctattttcctttggctagacaggatcaatccctcacagacgtgaacgatgaaaacaatccagcattaccgtcttctggttctgtgacaagtaaaagcactccagaccctacttctaagccaagtgcaattaagaaacgtgttacaaagaaggaagtcttcgatagagtgaggttattagtggataagatcacgtga

SEQ ID NO: 6391 - DNA, 1044 bp, Saccharomyces cerevisiae
atggttcaatatgtggtagaatggttaccaaggatacagagcatttcagtggtagtagaaggttggaagcaggtggagataaagaacttgaaggacacactcatgagcatatctggtgatgaagaacaagttgaagatattttacttccagtagaagttgaagaaaaagtagacgcttcttacaagttcaaaaacagaggtaaagacttagaatggatgacgaagttaagaagcaaatcctctaagatatatgacagttctatcatgtcgcttccagatggaagatggactaaagaagagcttcgctcagattctgatttctcgatagaatgtcttaactgtaagcaaaaaattataagcaaagataactgtcaagttttgaatgatatgccttcagagttttggttcgagttaatggattattggcattgccacaaacccgatgttaaggaagacaagtcttcctacacaagatttgaaacgctaaaaccatctaaaaacgaaattttaattggaagctcttattttcaaggcactcctgcgacttttgaaaatgtagcgactacaaaggaaaatgataatgttttatgcataaagtgctcagcagtgttaggccaagtaactgctggttcgctttataaactacacaaatggaaactgcagttaatacgcagtggaaacacatacaaatttcctccagaatgtgacattacaatttctttaataaacgtagttaaggcaaactcttgtcgttacgtactagtaaaatgtaaaacggaatcattgctagtttggatattttccgttgacattggagtcacattgacgggaaacaaaagcttcaagagagcgatgaagttgctttacacaaacagcgttaccacaataaatcgatgtctcaatcgacaagtcgtcgaggaattagatttccaagaaacatcgtttaatgctttttacagcgcccttcaacatactaatgcacttttaccctcaagcatgaaaaaaattggtgaatggaccattagctatacatcactaatctaa

SEQ ID NO: 6392 - DNA, 1044 bp, Artificial Sequence
  Description of Artificial Sequence: Synthetic polynucleotide
atggttcaatatgtggtagaatggttaccaaggatacagagcatttctgtggtagtagaaggttggaagcaggtggagataaagaacttgaaggacacactcatgagcatatctggtgatgaagaacaagttgaagatattttacttccagtagaagttgaagaaaaagtagacgcttcttacaagttcaaaaacagaggtaaagacttagaatggatgacgaagttaagaagcaaatcctctaagatatatgacagttctatcatgtctcttccagatggaagatggactaaagaagagcttcgctctgattctgatttctctatagaatgtcttaactgtaagcaaaaaattataagcaaagataactgtcaagttttgaatgatatgccttctgagttttggttcgagttaatggattattggcattgccacaaacccgatgttaaggaagacaagtcttcctacacaagatttgaaacgttgaaaccatctaaaaacgaaattttaattggaagctcttattttcaaggcactcctgcgacttttgaaaatgtagcgactacaaaggaaaatgataatgttttatgcataaagtgctctgcagtgttaggccaagtaactgctggttctctttataaattacacaaatggaaattacagttaatacgcagtggaaacacatacaaatttcctccagaatgtgacattacaatttctttaataaacgtagttaaggcaaactcttgtcgttacgtattggtaaaatgtaaaacggaatctttgttggtttggatattttccgttgacattggagtcacattgacgggaaacaaaagcttcaagagagcgatgaagttgctttacacaaacagcgttaccacaataaatagatgtctcaatagacaagtcgtcgaggaattagatttccaagaaacatcttttaatgctttttacagcgcccttcaacatactaatgcacttttaccctctagcatgaaaaaaattggtgaatggaccattagctatacatctttgatctga

SEQ ID NO: 6393 - DNA, 1029 bp, Saccharomyces cerevisiae
atgaaggtcgagaaatcatctaaaggcttggaagttttagtgaggacacaggaggatgatctagaggggttctctttcctggagattatggaccgcgtagaccctttaccattagacttcgagaattacaaaaatttcaaagagggcatttactatatgtgtacacacgatggcacaaagatcggtttcgtgttgaaatttgcgataaatgaaatggagactgtttgctcggaaatcttcgaagaaaccttccaattagatgaatctagacatgagttaaggtttaaaagtgaagattttgatcatagaaacaatctaattgaccaattggctcgtaaaatgtatttagaatcatccttgagtggtgtgaagggctggagaaacgagaaatatgccgtttgggttaataaaaaaccctatgtactggttgagcgtgcagtagcaggtgttcttggtataattacctacgggattcatattaatggttatgtgctagatccaaagtcaaaaaaagttcagttttgggttccaagaagatctaaaacgaaacaaacatggccgctaatgcttgacaacattatcgccgggggattaggttatccttatggtatctatgaaacagttttgaaagaaagcatggaggaagccaatctagaaaagagtgttattgaggataacattaaagcaactggttcagtttcctacctttactttacgggtgatatttctgtaacgaagttcaataaggaatcagattttatcgtaggggaagtacaatatgtatacgatctaaaactcagcgaagacatcattccaaaaccaaacgatggtgaagtcgagagtttcaatttattcagcctgcaagagacgattaatgctttaagaaaaaaagagttcaaaccaaattgtgcattggtaatggtagatttcttgattagacatggctacatcactccagaaaatgagcccaattatcttgaactagtaactagaatgcacagaaggttaccattccccaccttgaattaa

SEQ ID NO: 6394 - DNA, 1029 bp, Artificial Sequence
  Description of Artificial Sequence: Synthetic polynucleotide
atgaaggtcgagaaatcttctaaaggcttggaagttttagtgaggacacaggaggatgatttagaggggttctctttcttggagattatggaccgcgtagaccctttaccattagacttcgagaattacaaaaatttcaaagagggcatttactatatgtgtacacacgatggcacaaagatcggtttcgtgttgaaatttgcgataaatgaaatggagactgtttgcagtgaaatcttcgaagaaaccttccaattagatgaatctagacatgagttaaggtttaaaagtgaagattttgatcatagaaacaatttaattgaccaattggctcgtaaaatgtatttagaatcttccttgagtggtgtgaagggctggagaaacgagaaatatgccgtttgggttaataaaaaaccctatgtattggttgagcgtgcagtagcaggtgttcttggtataattacctacgggattcatattaatggttatgtgttggatccaaagagtaaaaaagttcagttttgggttccaagaagatctaaaacgaaacaaacatggccgttaatgcttgacaacattatcgccgggggattaggttatccttatggtatctatgaaacagttttgaaagaaagcatggaggaagccaatttggaaaagagtgttattgaggataacattaaagcaactggttctgtttcctacctttactttacgggtgatatttctgtaacgaagttcaataaggaaagtgattttatcgtaggggaagtacaatatgtatacgatttgaaactcagcgaagacatcattccaaaaccaaacgatggtgaagtcgagagtttcaatttattcagcttacaagagacgattaatgctttaagaaaaaaagagttcaaaccaaattgtgcattggtaatggtagatttcttgattagacatggctacatcactccagaaaatgagcccaattatcttgaattggtaactagaatgcacagaaggttaccattccccaccttgaattga

SEQ ID NO: 6395 - DNA, 2289 bp, Saccharomyces cerevisiae
atgtctgtgcccaaaaaacgtaaccatgggaagttaccaccttccactaaggacgtagacgatccttcgttgaagtacacgaaggccgcgcctaaatgtgaacaagttgctgaacattggctcttgcagccactaccggaaccggaatcacgttatagcttttgggtaacaattgttaccttattagcgtttgctgctagattttataagatctggtatccaaaagaagttgtttttgatgaggtacatttcgggaaatttgcatcgtattacttagaaaggtcttatttctttgacgttcatcccccttttgctaagatgatgattgccttcattggttggttatgtggctatgatggttcctttaagtttgatgagattgggtattcttatgaaactcatccagctccatatatcgcgtaccgttctttcaacgcgatattgggcacattgactgtaccaattatgttcaacactttgaaggaactgaatttcagggctattacatgtgcgtttgcatctctcttggttgcaatcgatactgcgcatgttacagaaactaggctgattttactggatgccatcttgattatttctattgctgctactatgtattgttacgttcgtttctacaagtgccaattgcgtcaaccttttacatggagttggtatatttggttacacgctactggtttgtctttatccttcgtgatttccacaaaatatgttggtgttatgacatattccgctattggttttgctgctgtggtcaacttatggcaattactggacatcaaggcgggtttgtccttgaggcagttcatgagacattttagtaaaaggctgaatggtttagttttgattccatttgtgatttacttgttttggttctgggttcatttcaccgttttgaatacttcaggtcctggcgacgcatttatgtctgctgaatttcaagaaacacttaaggactctcccttaagtgttgactctaaaaccgtcaattattttgatattatcactatcaaacatcaagatactgacgcattcttacattctcacttggcacgttacccacaacggtatgaagatggtcgtatctcatccgctggtcaacaagttactggttacacgcatcctgacttcaacaatcaatgggaagtgttaccaccccatggcagtgatgtcggtaaaggacaagctgttctattgaaccagcatataagattgagacatgtagccaccgatacctacttgttagcccatgatgtcgcctccccattttaccctaccaatgaagaaatcactacagtaactttagaagaaggtgatggggaattatatcctgaaacactttttgcattccaaccactgaaaaaatcagatgaaggtcacgttttaaagagtaaaacggtttctttccgtcttttccacgttgatacctccgtagctttgtggactcacaacgacgagttgttaccggattgggggttccaacaacaagaaattaatggtaacaaaaaagttattgatccttcaaataactgggttgttgatgaaattgttaacctggacgaggttcggaaggtatatattccgaaggttgttaagccattaccattcttgaagaaatggattgaaactcaaaaatctatgttcgaacataacaataaactatcatcagagcatccatttgcctctgaaccttacagttggcccggtagtttaagtggtgtttcgttctggaccaacggtgacgaaaagaagcaaatatatttcattggtaacatcattgggtggtggttccaagtcatatcattggctgtttttgttggcattatcgtggccgatttaattactagacatcgtggctattatgccctaaacaagatgaccagagaaaagctgtatggcccattgatgtttttcttcgtctcctggtgctgtcattattttccattctttttaatggcgcgtcaaaagtttttgcatcattacttaccagctcatttaatcgcgtgcttattctcaggagcactatgggaagtaattttcagtgattgcaaatcattggatttggagaaagacgaggatatttcaggtgcatcatatgaacggaaccctaaggtctacgttaaaccctataccgtcttcttggtgtgtgtctcctgtgctgttgcgtggttttttgtatacttttcaccactagtgtatggagatgtcagcttgtcaccatcggaagttgtttctagagagtggtttgacatagaattaaatttctccaagtaa

SEQ ID NO: 6396 - DNA, 2289 bp, Artificial Sequence
  Description of Artificial Sequence: Synthetic polynucleotide
atgtctgtgcccaaaaaacgtaaccatgggaagttaccaccttccactaaggacgtagacgatccttctttgaagtacacgaaggccgcgcctaaatgtgaacaagttgctgaacattggctcttgcagccattaccggaaccggaatcccgttatagcttttgggtaacaattgttaccttattagcgtttgctgctagattttataagatctggtatccaaaagaagttgtttttgatgaggtacatttcgggaaatttgcaagttattacttagaaaggtcttatttctttgacgttcatcccccttttgctaagatgatgattgccttcattggttggttatgtggctatgatggttcctttaagtttgatgagattgggtattcttatgaaactcatccagctccatatatcgcgtaccgttctttcaacgcgatattgggcacattgactgtaccaattatgttcaacactttgaaggaattgaatttcagggctattacatgtgcgtttgcatctctcttggttgcaatcgatactgcgcatgttacagaaactaggttgattttattagatgccatcttgattatttctattgctgctactatgtattgttacgttcgtttctacaagtgccaattgcgtcaaccttttacatggagttggtatatttggttacacgctactggtttgtctttatccttcgtgatttccacaaaatatgttggtgttatgacatattccgctattggttttgctgctgtggtcaacttatggcaattattagacatcaaggcgggtttgtccttgaggcagttcatgagacattttagtaaaaggttgaatggtttagttttgattccatttgtgatttacttgttttggttctgggttcatttcaccgttttgaatacttctggtcctggcgacgcatttatgtctgctgaatttcaagaaacacttaaggactctcccttaagtgttgactctaaaaccgtcaattattttgatattatcactatcaaacatcaagatactgacgcattcttacattctcacttggcacgttacccacaaagatatgaagatggtcgtatctcttccgctggtcaacaagttactggttacacgcatcctgacttcaacaatcaatgggaagtgttaccaccccatggcagtgatgtcggtaaaggacaagctgttttattgaaccagcatataagattgagacatgtagccaccgatacctacttgttagcccatgatgtcgcctccccattttaccctaccaatgaagaaatcactacagtaactttagaagaaggtgatggggaattatatcctgaaacactttttgcattccaaccattgaaaaaatctgatgaaggtcacgttttaaagagtaaaacggtttctttccgtcttttccacgttgatacctccgtagctttgtggactcacaacgacgagttgttaccggattgggggttccaacaacaagaaattaatggtaacaaaaaagttattgatccttccaataactgggttgttgatgaaattgttaacttggacgaggttagaaaggtatatattccgaaggttgttaagccattaccattcttgaagaaatggattgaaactcaaaaatctatgttcgaacataacaataaattatcttctgagcatccatttgcctctgaaccttacagttggcccggtagtttaagtggtgtttctttctggaccaacggtgacgaaaagaagcaaatatatttcattggtaacatcattgggtggtggttccaagtcatatctttggctgtttttgttggcattatcgtggccgatttaattactagacatcgtggctattatgccttgaacaagatgaccagagaaaagctttatggcccattgatgtttttcttcgtctcctggtgctgtcattattttccattctttttaatggcgcgtcaaaagtttttgcatcattacttaccagctcatttaatcgcgtgcttattcagtggagcattatgggaagtaattttcagtgattgcaaatctttggatttggagaaagacgaggatatttctggtgcaagttatgaaagaaaccctaaggtctacgttaaaccctataccgtcttcttggtgtgtgtctcctgtgctgttgcgtggttttttgtatacttttctccattggtgtatggagatgtcagcttgtctccatctgaagttgtttctagagagtggtttgacatagaattaaatttctccaagtga

SEQ ID NO: 6397 - DNA, 810 bp, Saccharomyces cerevisiae
atgaaaagcattttcaaggttagaggatgtgtatcgcatgctgctcaattttgccaaaaaagaaccgtggtgagtaccggcactagtaacaccgcaacagccggtgcagtgaggaaaagtttcaacagtaccgaaaccaagcctgtatttgcaacaaaatcggaagctggcaatggaagccacatgaaggaatattcaagcggcattaactctaaactcggcgggacccctttggaaacccgcagcaccgccgatgattctttgaacaatagttataagcaagtcaagggagacattgactggtatacttcatggtatggcctaggtatgaagccctttgaagcaaaagtgcaaaaggatctaatcgagcctctggaccctaaggatatagaaatcaagccagatggtttgatatacttgcctgaaattaaataccgtagaatactgaacaaagcttttggcgcaggcggttgggggctagtgccaagatcacaaacaatagtgacatccaagctggtcactagggagtacggtcttatttgccatggtcaattgatcagtgtggcaagaggcgaacaagactatttcaacgaagccggcataccaactgctacagaaggttgcaaaagtaatgcattaatgaggtgttgcaaagatctcggcgtcggttctgaattatgggaccctgttttcataaagaaattcaaagtggatcattgtactgagaagtttgtggaacatgttaccaccaagagaaagaagaaaatttggttaagaaaggacagacaagttgaatatccttataaatag

SEQ ID NO: 6398 - DNA, 810 bp, Artificial Sequence
  Description of Artificial Sequence: Synthetic polynucleotide
atgaaaagcattttcaaggttagaggatgtgtatctcatgctgctcaattttgccaaaaaagaaccgtggtgagtaccggcactagtaacaccgcaacagccggtgcagtgaggaaaagtttcaacagtaccgaaaccaagcctgtatttgcaacaaaaagtgaagctggcaatggaagccacatgaaggaatattctagcggcattaactctaaactcggcgggacccctttggaaacccgcagcaccgccgatgattctttgaacaatagttataagcaagtcaagggagacattgactggtatacttcttggtatggcttgggtatgaagccctttgaagcaaaagtgcaaaaggatttgatcgagcctttggaccctaaggatatagaaatcaagccagatggtttgatatacttgcctgaaattaaataccgtagaatattaaacaaagcttttggcgcaggcggttgggggttagtgccaagatctcaaacaatagtgacatccaagttggtcactagggagtacggtcttatttgccatggtcaattgatcagtgtggcaagaggcgaacaagactatttcaacgaagccggcataccaactgctacagaaggttgcaaaagtaatgcattaatgaggtgttgcaaagatctcggcgtcggttctgaattatgggaccctgttttcataaagaaattcaaagtggatcattgtactgagaagtttgtggaacatgttaccaccaagagaaagaagaaaatttggttaagaaaggacagacaagttgaatatccttataaatga

SEQ ID NO: 6399 - DNA, 786 bp, Saccharomyces cerevisiae
atggctagaggaccaaagaagcatctaaaaagattagcagctccacaccactggttattggacaagttgtccggttgttacgccccaagaccatctgctggtccacacaaattgcgtgaatccttgccattgattgtctttctaagaaacagattaaagtatgctttgaacggccgtgaagtcaaggctatcttgatgcaacgtcacgttaaagtggacggtaaggttagaaccgacactacctacccagctggtttcatggatgtcatcactctagatgccaccaatgaaaacttcagattggtctacgatgtcaagggtagattcgctgtccaccgtatcaccgatgaagaagcttcttacaagttgggtaaggtcaagaaggttcaattaggtaagaagggtgttccatacgttgttacccacgatggtagaactatcagatacccagacccaaacatcaaggtcaatgacactgttaagatcgacttggcctctggtaagattactgatttcatcaagttcgatgccggtaagttggtttacgttactggtggtcgtaacttgggtcgtatcggtactatcgttcacaaggaaagacacgatggtggtttcgatttagttcacatcaaggactccttggacaacactttcgtcactagattgaacaatgtcttcgtcatcggtgaacaaggtaagccttacatttctttgccaaagggtaagggtatcaagttgtctattgctgaagaacgtgacagaagaagagctcaacaaggtttataa

SEQ ID NO: 6400 - DNA, 786 bp, Artificial Sequence
  Description of Artificial Sequence: Synthetic polynucleotide
atggctagaggaccaaagaagcatttgaaaagattagcagctccacaccactggttattggacaagttgtccggttgttacgccccaagaccatctgctggtccacacaaattgcgtgaatccttgccattgattgtctttttaagaaacagattaaagtatgctttgaacggccgtgaagtcaaggctatcttgatgcaacgtcacgttaaagtggacggtaaggttagaaccgacactacctacccagctggtttcatggatgtcatcactttagatgccaccaatgaaaacttcagattggtctacgatgtcaagggtagattcgctgtccaccgtatcaccgatgaagaagcttcttacaagttgggtaaggtcaagaaggttcaattaggtaagaagggtgttccatacgttgttacccacgatggtagaactatcagatacccagacccaaacatcaaggtcaatgacactgttaagatcgacttggcctctggtaagattactgatttcatcaagttcgatgccggtaagttggtttacgttactggtggtcgtaacttgggtcgtatcggtactatcgttcacaaggaaagacacgatggtggtttcgatttagttcacatcaaggactccttggacaacactttcgtcactagattgaacaatgtcttcgtcatcggtgaacaaggtaagccttacatttctttgccaaagggtaagggtatcaagttgtctattgctgaagaacgtgacagaagaagagctcaacaaggtttatga

SEQ ID NO: 6401 - DNA, 354 bp, Saccharomyces cerevisiae
atgaaagtcggaaaagccaaaaagaaaccggaaatcttctctgcgcattgttctgtggccacggccttcctggacccgtccttcttttacccgaactttgtcgcccaaaaggcatctcattataatgacaaaactggatctgcaaatatttggacatatatctccagaacgggctcacttctcctcttcacccaggtggtatataggaagagtaagtggacgcatcagtccgcgacatttgcggactgtatatattgccagtcagggcagtcgccaagtgtgtctctttcgtgtagcgacgcacgtcagacatggatgcaacatcgaggatggagcagcctgatgtctttgtaa

SEQ ID NO: 6402 - DNA, 354 bp, Artificial Sequence
  Description of Artificial Sequence: Synthetic polynucleotide
atgaaagtcggaaaagccaaaaagaaaccggaaatcttctctgcgcattgttctgtggccacggccttcttggacccgtccttcttttacccgaactttgtcgcccaaaaggcatctcattataatgacaaaactggatctgcaaatatttggacatatatctccagaacgggctctcttctcctcttcacccaggtggtatataggaagagtaagtggacgcatcagtccgcgacatttgcggactgtatatattgccagagcgggcagtctccaagtgtgtctctttcctgtagcgacgcacgtcagacatggatgcaacatagaggatggagcagcttgatgtctttgtga

SEQ ID NO: 6403 - DNA, 1077 bp, Saccharomyces cerevisiae
atggatgcaacatcgaggatggagcagcctgatgtctttgtaagcaaactctaccacctgctgcaggggaacgcttactcgaacataatacaatggtcgactgatggcagcaagctcgtcatttggaatccggaccagttcaccaaagtcatcctagagcgattttttggtattcacacctttgcagcattcgttaagcaattgagcaaatataacttccagaaggcgggccgcccggactgcgtggagttttccaacattcattttcaaaaagataacattaatagcctctcactggttaaagctcatcagtctgccgccactcccaatgtcgccgccgtcaataatatgaataagcagtgtacttttcactgggaccctttcaaagtgaactccattctaagcaaggccatcggcaagccttccttcgagaaattagtgaaaaatgttgacaggcttcagggcaatcttgatgagcttaagtcgacaaacgcagatagtctgcgtattataagggaaattaacgccagcttacagacaatctcctaccaccagtttcacgcctaccaaaccgctaacttccttcaagaaaattttgaagccatcaaaaaggttgtatgcccggactcttgtctacaacaccagcaacgccaaccaaagcgccccaaacgctactcgttgctgttactaataccaaacgcatccgaattgtcagaaacacctttgatgcgcttcgccggcgtgttcgaatttatgaactgctctttggatacggccactcagtggcacccgcagttgcatcccgaggcatacgaccttcttttcgtcaccgtgtcgcccaacatgcaacaagaacatctcatctacttcaagagactgagaaacctactcccaagctttcctgtaatagccattattaacagacccgtctcccctcaagataccagcattgctccctccaactactctcgctattatttccaccattttttgcagttggggttcagtgacatcctagttagccccttcaccccaacacaacttataacgctcctttccaaacatcttcgaacgtga

SEQ ID NO: 6404 - DNA, 1077 bp, Artificial Sequence
  Description of Artificial Sequence: Synthetic polynucleotide
atggatgcaacatccaggatggagcagcctgatgtctttgtaagcaaactctaccacttgttacaggggaacgcttactctaacataatacaatggtctactgatggcagcaagctcgtcatttggaatccggaccagttcaccaaagtcatcttggagagattttttggtattcacacctttgcagcattcgttaagcaattgagcaaatataacttccagaaggcgggccgcccggactgcgtggagttttccaacattcattttcaaaaagataacattaatagcctctctttggttaaagctcatcagtctgccgccactcccaatgtcgccgccgtcaataatatgaataagcagtgtacttttcactgggaccctttcaaagtgaactccattttgagcaaggccatcggcaagccttccttcgagaaattagtgaaaaatgttgacaggcttcagggcaatcttgatgagcttaagagtacaaacgcagatagtttacgtattataagggaaattaacgccagcttacagacaatctcctaccaccagtttcacgcctaccaaaccgctaacttccttcaagaaaattttgaagccatcaaaaaggttgtatgcccggactcttgtttgcaacaccagcaacgccaaccaaagcgccccaaacgctactctttgttattattgataccaaacgcatccgaattgagtgaaacacctttgatgcgcttcgccggcgtgttcgaatttatgaactgctctttggatacggccactcagtggcacccgcagttgcatcccgaggcatacgaccttcttttcgtcaccgtgtctcccaacatgcaacaagaacatctcatctacttcaagagattgagaaacttactcccaagctttcctgtaatagccattattaacagacccgtctcccctcaagataccagcattgctccctccaactactctcgctattatttccaccattttttgcagttggggttcagtgacatcttggttagccccttcaccccaacacaacttataacgctcctttccaaacatcttagaacgtga

SEQ ID NO: 6405 - DNA, 1131 bp, Saccharomyces cerevisiae
atgaccttggcacccctagacgcctccaaagttaagataactaccacacaacatgcatctaagccaaaaccgaacagtgagttagtgtttggcaagagcttcacggaccacatgttaactgcggaatggacagctgaaaaagggtggggtaccccagagattaaaccttatcaaaatctgtctttagacccttccgcggtggttttccattatgcttttgagctattcgaagggatgaaggcttacagaacggtggacaacaaaattacaatgtttcgtccagatatgaatatgaagcgcatgaataagtctgctcagagaatctgtttgccaacgttcgacccagaagagttgattaccctaattgggaaactgatccagcaagataagtgcttagttcctgaaggaaaaggttactctttatatatcaggcctacattaatcggcactacggccggtttaggggtttccacgcctgatagagccttgctatatgtcatttgctgccctgtgggtccttattacaaaactggatttaaggcggtcagactggaagccactgattatgccacaagagcttggccaggaggctgtggtgacaagaaactaggtgcaaactacgccccctgcgtcctgccacaattgcaagctgcttcaaggggttaccaacaaaatttatggctatttggtccaaataacaacattactgaagtcggcaccatgaatgcttttttcgtgtttaaagatagtaaaacgggcaagaaggaactagttactgctccactagacggtaccattttggaaggtgttactagggattccattttaaatcttgctaaagaaagactcgaaccaagtgaatggaccattagtgaacgctacttcactataggcgaagttactgagagatccaagaacggtgaactacttgaagcctttggttctggtactgctgcgattgtttctcccattaaggaaatcggctggaaaggcgaacaaattaatattccgttgttgcccggcgaacaaaccggtccattggccaaagaagttgcacaatggattaatggaatccaatatggcgagactgagcatggcaattggtcaagggttgttactgatttgaactga

SEQ ID NO: 6406 - DNA, 1131 bp, Artificial Sequence
  Description of Artificial Sequence: Synthetic polynucleotide
atgaccttggcacccttagacgcctccaaagttaagataactaccacacaacatgcatctaagccaaaaccgaacagtgagttagtgtttggcaagagcttcacggaccacatgttaactgcggaatggacagctgaaaaagggtggggtaccccagagattaaaccttatcaaaatttatctttagacccttccgcggtggttttccattatgcttttgagcttttcgaagggatgaaggcttacagaacggtggacaacaaaattacaatgtttcgtccagatatgaatatgaagcgcatgaataagtctgctcagagaatctgtttgccaacgttcgacccagaagagttgattaccttgattgggaaattaatccagcaagataagtgcttagttcctgaaggaaaaggttactctttatatatcaggcctacattaatcggcactacggccggtttaggggtttccacgcctgatagagccttgttatatgtcatttgctgccctgtgggtccttattacaaaactggatttaaggcggtcagattagaagccactgattatgccacaagagcttggccaggaggctgtggtgacaagaaattgggtgcaaactacgccccctgcgtcttgccacaattgcaagctgcttccaggggttaccaacaaaatttatggttatttggtccaaataacaacattactgaagtcggcaccatgaatgcttttttcgtgtttaaagatagtaaaacgggcaagaaggaattggttactgctccattggacggtaccattttggaaggtgttactagggattccattttaaatcttgctaaagaaagactcgaaccaagtgaatggaccattagtgaacgctacttcactataggcgaagttactgagagatccaagaacggtgaattgcttgaagcctttggttctggtactgctgcgattgtttctcccattaaggaaatcggctggaaaggcgaacaaattaatattccgttgttgcccggcgaacaaaccggtccattggccaaagaagttgcacaatggattaatggaatccaatatggcgagactgagcatggcaattggagcagggttgttactgatttgaactga

SEQ ID NO: 6407 - DNA, 1215 bp, Saccharomyces cerevisiae
atgtactttttaaaccaactaatatttcaagacgtttccgtaatgtcggtggataaaagagaagatatgagcagatctttccaaaaatgtttaaacttgagataccctatcatccaggcccctatggcgggggtcacgactattgaaatggccgctaaggcttgtattgcgggcgccatagcttcactacccctatcccacttagacttcagaaaggtcaatgatattgaaaagcttaaactgatggtttcacaattcagagatcaagtagccgatgaatctttagagggcaatctcaacctaaactttttttgccatgatatcgttgataaaccgaccgatcttcaaacagctaactgggcgaagctatacagaaagtctatgaatgtgccgattgatatgaatgagattaaattcgataatggtaatgtatcttttaaggcatttgaaaaagaaaatgctcttcaagattttttccagtacctatcagatggctttaggcctaaaatcattagtttccattttggccatccgtcgaaatctacaatagaatatttacaaaaaattggaattctaatttttgtgactgccacctctgtaagagaagttcgattgttagcacgtctcggcattaatggcatagtgtgtcaaggctatgaagcgggaggacatagaggaaatttcttagtaaatgaccccaaagatgatgaaaacttatcaactgtacaattggtgaaaagaacagttgatgaacttgctgaaatgaaaaataaaggtcttatacatgctactccctttgtcattgcagcaggtggtataatggattccaaagatatatcatacatgttatcacagcaagcagacgctgttcaagtggggactgcttttcttggttgcagtgaatccaatgcatcaaaaaacttttcaagccccttcactcgagaaacaacaactaaaatggttaatataatatcaggaaagcctgcaaggaccatctctactccttttatcgaaaaagtcattgctaattttcaaggtgaggagcttcctccatatggctacatgtatagtgctttcaagcaagtaagaaaaaagtatccagaattggctaactttattttagctggacaaggatttcagaatgtccaatcaggaatcacaacagacaagaaaattgaaactatgggcgcaagattgaaaattgacggaaaataa

SEQ ID NO: 6408 - DNA, 1215 bp, Artificial Sequence
  Description of Artificial Sequence: Synthetic polynucleotide
atgtactttttaaaccaattgatatttcaagacgtttccgtaatgtctgtggataaaagagaagatatgagcagatctttccaaaaatgtttaaacttgagataccctatcatccaggcccctatggcgggggtcacgactattgaaatggccgctaaggcttgtattgcgggcgccatagcttctttacccttgtcccacttagacttcagaaaggtcaatgatattgaaaagcttaaattaatggtttctcaattcagagatcaagtagccgatgaatctttagagggcaatctcaacttgaactttttttgccatgatatcgttgataaaccgaccgatcttcaaacagctaactgggcgaagttgtacagaaagtctatgaatgtgccgattgatatgaatgagattaaattcgataatggtaatgtatcttttaaggcatttgaaaaagaaaatgctcttcaagattttttccagtacctttctgatggctttaggcctaaaatcattagtttccattttggccatccgtccaaatctacaatagaatatttacaaaaaattggaattttaatttttgtgactgccacctctgtaagagaagttagattgttagcacgtctcggcattaatggcatagtgtgtcaaggctatgaagcgggaggacatagaggaaatttcttagtaaatgaccccaaagatgatgaaaacttatctactgtacaattggtgaaaagaacagttgatgaacttgctgaaatgaaaaataaaggtcttatacatgctactccctttgtcattgcagcaggtggtataatggattccaaagatatatcttacatgttatctcagcaagcagacgctgttcaagtggggactgcttttcttggttgcagtgaatccaatgcatccaaaaacttttctagccccttcactagagaaacaacaactaaaatggttaatataatatctggaaagcctgcaaggaccatctctactccttttatcgaaaaagtcattgctaattttcaaggtgaggagcttcctccatatggctacatgtatagtgctttcaagcaagtaagaaaaaagtatccagaattggctaactttattttagctggacaaggatttcagaatgtccaaagtggaatcacaacagacaagaaaattgaaactatgggcgcaagattgaaaattgacggaaaatga

SEQ ID NO: 6409 - DNA, 897 bp, Saccharomyces cerevisiae
atgtctagaattagtatattagctgtcgccgcagcattagtggcaagtgcaaccgccgcatccgtgaccaccactctatccccttatgatgaaagggtcaatttgattgaattggctgtttacgtttctgatattggcgcccatttatctgaatattacgctttccaggctttgcataagactgaaacatacccacctgaaattgccaaggctgtttttgccggtggcgatttcaccaccatgttgactggtatttcaggtgatgaagtgaccagaatgatcaccggtgtgccatggtactctactagattgatgggtgctatttccgaagcacttgcgaatgaaggtattgctactgcagtaccagcttctaccacagaggcttcttccacctccacttcagaagcttctagtgccgccactgagtcttctagctcctctgaaagttcagcagagaccagctcaaacgctgcttccacccaagctactgtttcatctgaatctagctctgctgcaagcaccattgcaagttctgctgaaagttctgttgcaagctctgttgcaagctctgttgcaagctctgctagttttgccaataccacagctccagtttcttctacatcttctatctcagtcactccagtggtccaaaatggtactgacagcaccgtcacaaagactcaagcttccactgttgaaactaccataactagttgttcaaataacgtctgttcaactgtgactaagccagtctcctccaaagctcaatctacagctacttctgtcacatcgtcagcatctcgtgttattgacgttaccactaacggtgctaacaagttcaataacggtgttttcggtgccgctgctattgctggtgccgccgctctattgttatag

SEQ ID NO: 6410 - DNA, 897 bp, Artificial Sequence
  Description of Artificial Sequence: Synthetic polynucleotide
atgtctagaattagtatattagctgtcgccgcagcattagtggcaagtgcaaccgccgcatccgtgaccaccactttatccccttatgatgaaagggtcaatttgattgaattggctgtttacgtttctgatattggcgcccatttatctgaatattacgctttccaggctttgcataagactgaaacatacccacctgaaattgccaaggctgtttttgccggtggcgatttcaccaccatgttgactggtatttctggtgatgaagtgaccagaatgatcaccggtgtgccatggtactctactagattgatgggtgctatttccgaagcacttgcgaatgaaggtattgctactgcagtaccagcttctaccacagaggcttcttccacctccacttctgaagcttctagtgccgccactgagtcttctagctcctctgaaagttctgcagagaccagcagtaacgctgcttccacccaagctactgtttcttctgaatctagctctgctgcaagcaccattgcaagttctgctgaaagttctgttgcaagctctgttgcaagctctgttgcaagctctgctagttttgccaataccacagctccagtttcttctacatcttctatctctgtcactccagtggtccaaaatggtactgacagcaccgtcacaaagactcaagcttccactgttgaaactaccataactagttgttctaataacgtctgttccactgtgactaagccagtctcctccaaagctcaatctacagctacttctgtcacatcttctgcatctcgtgttattgacgttaccactaacggtgctaacaagttcaataacggtgttttcggtgccgctgctattgctggtgccgccgctttattgttatga

SEQ ID NO: 6411 - DNA, 3486 bp, Saccharomyces cerevisiae
atggttaatataagcatcgtagcaggaattgtagccttagctactagtgcggctgctattacagcgaccactactttatctccttacgatgaaagagtcaaccttattgaattggctgtttatgtttctgacatcagagcccacatatttcagtactactctttccggaatcaccataagactgaaacatatccttcggaaatcgcagcagccgtttttgactacggtgatttcactactcgattgaccggtatttcgggtgatgaagtaactagaatgatcactggtgttccgtggtactctaccagattaaagccggctatctcttcagcgctttcaaaggatggtatttacacggctatcccaacctctacttctacaacgactacaaaatctagtacttcgactactcctaccaccactatcacttctactacttctaccacatcgactactcctacaacctctactacttctaccactcctacaacttctaccacatcgactactcctacaacctctactacttctaccactcctacaacttctaccacatcgactactcctacaacctctactacttctaccactcctacaacttctaccacatcgactactcctacaacctctactacttctaccactcctacaacttctacaacttctaccactcctacaacttctaccactcctacaacttctacaacctccaccacttctcaaacttccaccaaatcgactactcctactacttcaagcacatcgactactcctacaacttctaccactcctacaacttctacaacctctaccgctcctacaacttctacaacttctacaacctctaccacttctaccatttctaccgctcccacgacctctacaacttcaagcactttcagtacttctagtgcctctgcatcctctgtcatttctaccactgctacaacctctaccacttttgccagtcttactacacctgccacatctacggcttctactgaccatacaacctctagtgtctcaacaactaacgcattcactacttctgcaactactactactacgagcgatacatatatcagttcaagtagtcccagccaagtcacttcatccgctgagcctactactgtcagtgaagtcacctcttctgttgaacctaccaggtctagtcaagtcacttcatccgctgaacctactactgtcagtgaattcacctcttctgttgaacctaccaggtctagtcaagtcacttcatccgctgaacctactactgtcagtgaattcacctcttctgttgaacctaccaggtctagtcaagtcacttcatccgctgaacctactactgtcagtgaattcacctcttctgttgaacctaccaggtctagtcaagtcacttcatccgctgaacctactactgtcagtgaattcacctcttctgttgaacctaccaggtctagtcaagtcacttcatccgctgaacctactactgtcagtgaattcacctcttctgttgaacctatcaggtctagtcaagtcacttcatccgctgaacctactactgtaagtgaagtcacctcttctgttgaacctatcaggtctagtcaagtgaccacgacagaacctgtttcttccttcgggtctactttcagtgaaatcacctcttctgctgaacctctctctttcagtaaagcaaccacttccgcagaatctatctcctctaatcaaatcaccatttccagtgaactaatagtttctagtgtaattacttcctcttctgagattccttcttccattgaagtacttacttcaagcgggatcagttcatcagttgaacccacttctttggttggaccttcttctgatgaatccatttcttctactgaaagtctatctgccacatccactttcacttcagccgttgtttcctcgagcaaggctgctgatttctttaccagatccactgtttctgctaaatctgatgtctctggtaactcctctacccaatctactaccttttttgctacgccttccactccacttgctgtttcttcaactgtggtcactagctctaccgattcagtttctcctaatattcccttcagtgaaatcagttcctctccagagtcgtctactgcaattacgtctacatccactagcttcattgctgagcggacttcttccttatatctttcgtcatcaaatatgtcaagtttcactttaagtactttcactgtttcccaatcgatcgtctcttcattttctatggaacctacatcgtcagtcgcatcttttgcatcaagttcccctctcttagtatcctcaagaagtaattgcagtgatgccagaagttccaacaccatcagtagcggtctgttcagcacgatagaaaatgttcgtaatgcaacctcaacatttacaaacctatcaacagatgaaattgtcatcacgagctgtaagagtagttgtactaatgaagatagtgttttgacgaaaactcaagtttctaccgttgaaactactataactagttgttcgggtggtatttgtaccacgctgatgtctccggttactactattaatgctaaggcgaacacattaacaactacagaaacttccacggtcgaaacaactataacaacatgccctggtggtgtttgctcgaccctgactgttccagttactacaatcaccagcgaagccactaccaccgctaccattagttgcgaagataatgaagaagatatcacttctactgaaaccgagttgctaactttggaaactactataactagttgttcgggtggtatttgtaccacgctgatgtctccggttactactattaatgctaaggcgaacacattaacaactacagaaacttccacggtcgaaacaactataacaacatgctctggtggtgtttgctcgaccctgactgttccagttactacaatcaccagcgaagcaactaccaccgctaccattagttgcgaagataatgaagaagatgtcgcctctactaaaaccgagttgctaactatggaaactactattactagttgttcgggtggtatttgcaccacgctgatgtctccggttagtagtttcaactccaaagccactacatcgaacaatgcagagtcgaccatccccaaagcgattaaagtcagttgctctgcgggtgcctgtaccaccctgactactgtcgatgcagggattagcatgtttaccagaaccggattgtctatcactcaaactactgtgaccaactgctcaggtggaacctgtaccatgttaactgcaccaatcgcgaccgctaccagcaaagtcatctcaccaattccaaaagcctcctcggctacttccattgctcattcatctgcttcttatactgtcagtatcaataccaacggtgcctataatttcgataaagataacatttttggtaccgctatcgttgctgttgtcgctttattactgctatag

SEQ ID NO: 6412 - DNA, 3486 bp, Artificial Sequence
  Description of Artificial Sequence: Synthetic polynucleotide
atggttaatataagcatcgtagcaggaattgtagccttagctactagtgcggctgctattacagcgaccactactttatctccttacgatgaaagagtcaaccttattgaattggctgtttatgtttctgacatcagagcccacatatttcagtactactctttcagaaatcaccataagactgaaacatatccttctgaaatcgcagcagccgtttttgactacggtgatttcactactagattgaccggtatttctggtgatgaagtaactagaatgatcactggtgttccgtggtactctaccagattaaagccggctatctcttctgcgctttccaaggatggtatttacacggctatcccaacctctacttctacaacgactacaaaatctagtacttctactactcctaccaccactatcacttctactacttctaccacatctactactcctacaacctctactacttctaccactcctacaacttctaccacatctactactcctacaacctctactacttctaccactcctacaacttctaccacatctactactcctacaacctctactacttctaccactcctacaacttctaccacatctactactcctacaacctctactacttctaccactcctacaacttctacaacttctaccactcctacaacttctaccactcctacaacttctacaacctccaccacttctcaaacttccaccaaatctactactcctactacttccagcacatctactactcctacaacttctaccactcctacaacttctacaacctctaccgctcctacaacttctacaacttctacaacctctaccacttctaccatttctaccgctcccacgacctctacaacttccagcactttcagtacttctagtgcctctgcatcctctgtcatttctaccactgctacaacctctaccacttttgccagtcttactacacctgccacatctacggcttctactgaccatacaacctctagtgtctctacaactaacgcattcactacttctgcaactactactactacgagcgatacatatatcagtagtagtagtcccagccaagtcacttcttccgctgagcctactactgtcagtgaagtcacctcttctgttgaacctaccaggtctagtcaagtcacttcttccgctgaacctactactgtcagtgaattcacctcttctgttgaacctaccaggtctagtcaagtcacttcttccgctgaacctactactgtcagtgaattcacctcttctgttgaacctaccaggtctagtcaagtcacttcttccgctgaacctactactgtcagtgaattcacctcttctgttgaacctaccaggtctagtcaagtcacttcttccgctgaacctactactgtcagtgaattcacctcttctgttgaacctaccaggtctagtcaagtcacttcttccgctgaacctactactgtcagtgaattcacctcttctgttgaacctatcaggtctagtcaagtcacttcttccgctgaacctactactgtaagtgaagtcacctcttctgttgaacctatcaggtctagtcaagtgaccacgacagaacctgtttcttccttcgggtctactttcagtgaaatcacctcttctgctgaacctctctctttcagtaaagcaaccacttccgcagaatctatctcctctaatcaaatcaccatttccagtgaattgatagtttctagtgtaattacttcctcttctgagattccttcttccattgaagtacttacttccagcgggatcagttcttctgttgaacccacttctttggttggaccttcttctgatgaatccatttcttctactgaaagtttatctgccacatccactttcacttctgccgttgtttcctctagcaaggctgctgatttctttaccagatccactgtttctgctaaatctgatgtctctggtaactcctctacccaatctactaccttttttgctacgccttccactccacttgctgtttcttctactgtggtcactagctctaccgattctgtttctcctaatattcccttcagtgaaatcagttcctctccagagtcttctactgcaattacgtctacatccactagcttcattgctgagagaacttcttccttatatctttcttcttccaatatgagcagtttcactttaagtactttcactgtttcccaatccatcgtctcttctttttctatggaacctacatcttctgtcgcatcttttgcaagtagttcccctctcttagtatccagcagaagtaattgcagtgatgccagaagttccaacaccatcagtagcggtcttttcagcacgatagaaaatgttcgtaatgcaacctctacatttacaaacttatctacagatgaaattgtcatcacgagctgtaagagtagttgtactaatgaagatagtgttttgacgaaaactcaagtttctaccgttgaaactactataactagttgttctggtggtatttgtaccacgttgatgtctccggttactactattaatgctaaggcgaacacattaacaactacagaaacttccacggtcgaaacaactataacaacatgccctggtggtgtttgctccaccttaactgttccagttactacaatcaccagcgaagccactaccaccgctaccattagttgcgaagataatgaagaagatatcacttctactgaaaccgagttgttgactttggaaactactataactagttgttctggtggtatttgtaccacgttgatgtctccggttactactattaatgctaaggcgaacacattaacaactacagaaacttccacggtcgaaacaactataacaacatgctctggtggtgtttgctccaccttaactgttccagttactacaatcaccagcgaagcaactaccaccgctaccattagttgcgaagataatgaagaagatgtcgcctctactaaaaccgagttgttgactatggaaactactattactagttgttctggtggtatttgcaccacgttgatgtctccggttagtagtttcaactccaaagccactacaagtaacaatgcagagtctaccatccccaaagcgattaaagtcagttgctctgcgggtgcctgtaccaccttaactactgtcgatgcagggattagcatgtttaccagaaccggattgtctatcactcaaactactgtgaccaactgctctggtggaacctgtaccatgttaactgcaccaatcgcgaccgctaccagcaaagtcatctctccaattccaaaagcctcctctgctacttccattgctcattcttctgcttcttatactgtcagtatcaataccaacggtgcctataatttcgataaagataacatttttggtaccgctatcgttgctgttgtcgctttattattattgtga

SEQ ID NO: 6413 - DNA, 51 bp, Saccharomyces cerevisiae
atgctatcgttaatcttttaccttcgtttcccatcttatataaggggatga

SEQ ID NO: 6414 - DNA, 51 bp, Artificial Sequence
  Description of Artificial Sequence: Synthetic oligonucleotide
atgctttctttaatcttttaccttcgtttcccatcttatataaggggatga

SEQ ID NO: 6415 - DNA, 1632 bp, Saccharomyces cerevisiae
atgtcagcggatgctagtacaaattcgaatgcttccctagacgaaaaaaatttaaacatcacttcagaagctgaaatcaagaatgaagacgtaaccgcggagccagttctaagcacggtactatcacccaacggtaaaattgtctacatcagtgacaaggttgatgaggccatgaagttggctgaagaagccaaagaaatcgaagtgacaccagaagaagatagaaaacttcgttggaagatcgactattgtatgtttcctttgatgtgtatattgtatgctgttcaatttatggacaagatttccactagttcagcggcggtcatgggattaagaactgacttgaaaatgcatggtgaccagtattcatgggttacttccgccttttatttcggctatctatttatgaacctaggcccggtacagttcattttccaaaggaccagtcacatgtcaaaaatgcttgcggtttttattgtcatatggggaatgttattagctttacatgcagctccaacagttaagtatccttctttcattgttttgagagtacttttaggttgcgcagaaagtgttgtcacaccttgctttaccattatcactgctcaatactggaagacagaggaacaattcacaagagtatcaatttggtttggtatgaacggtcttggctccatcctgatcaacgcaattgcgtacggtgtttacattcaccaggattcttatgctattaaaggctggagaaccttatttgtcattactggtgtgataacaatcttcattggtatcttgatattcctgtggatccctgacgatccatcaaaagcaaggtttttatctaaaagagagaaattaatggttgtccaaagaattaggtctaaccaacaagggttcggtaatcacgagatcaaaaaataccaaattatagaggcgttgaaggatgttaggacgtggttatatttcctctttactgtgagctctaatattcctaatggtggtatttcaagttttatgagtattctattgaatagtgattttggatattcatcaaaggaaaccctattaatgggtttacctacaggtgctgttgaattggtaggttgtccactttttggtattctagcagtttatgcagccaataagaagataccattttggaaatataagttgagttgggctatttttgcagctgtcttagcattgattgctagctgcatgttagggtttgcaacaaactccaaaaaagcaagactggctggtgcttacctgtggtacatctcgcccgtctcatttatttgcgtactttccaatatcagtgcgaattcctcgggatatagtaaaaaatggactgtatcttcaataaacttagtagcatatgctgcagctaacttggcaggaccacaaacctttattgctaagcaggctcctaaatatcatggcgctaaggtcgctatggtcgtatgttatgctgttatgatcgtgcttctatctatactgctcatcgtcaatttaagggaaaacaagagacgtgataagatagctgccgagagagggttccctgaagaaacagagaatttagagttttctgatttgactgattttgaaaatccaaatttcagatacactttatga

SEQ ID NO: 6416 - DNA, 1632 bp, Artificial Sequence
  Description of Artificial Sequence: Synthetic polynucleotide
atgagtgcggatgctagtacaaatagtaatgcttccttggacgaaaaaaatttaaacatcacttctgaagctgaaatcaagaatgaagacgtaaccgcggagccagttttaagcacggtattatctcccaacggtaaaattgtctacatcagtgacaaggttgatgaggccatgaagttggctgaagaagccaaagaaatcgaagtgacaccagaagaagatagaaaacttcgttggaagatcgactattgtatgtttcctttgatgtgtatattgtatgctgttcaatttatggacaagatttccactagttctgcggcggtcatgggattaagaactgacttgaaaatgcatggtgaccagtattcttgggttacttccgccttttatttcggctatttatttatgaacttgggcccggtacagttcattttccaaaggaccagtcacatgtccaaaatgcttgcggtttttattgtcatatggggaatgttattagctttacatgcagctccaacagttaagtatccttctttcattgttttgagagtacttttaggttgcgcagaaagtgttgtcacaccttgctttaccattatcactgctcaatactggaagacagaggaacaattcacaagagtatctatttggtttggtatgaacggtcttggctccatcttaatcaacgcaattgcgtacggtgtttacattcaccaggattcttatgctattaaaggctggagaaccttatttgtcattactggtgtgataacaatcttcattggtatcttgatattcttatggatccctgacgatccatctaaagcaaggtttttatctaaaagagagaaattaatggttgtccaaagaattaggtctaaccaacaagggttcggtaatcacgagatcaaaaaataccaaattatagaggcgttgaaggatgttaggacgtggttatatttcctctttactgtgagctctaatattcctaatggtggtatttccagttttatgagtattttattgaatagtgattttggatattcttccaaggaaaccttattaatgggtttacctacaggtgctgttgaattggtaggttgtccactttttggtattttggcagtttatgcagccaataagaagataccattttggaaatataagttgagttgggctatttttgcagctgtcttagcattgattgctagctgcatgttagggtttgcaacaaactccaaaaaagcaagattggctggtgcttacttatggtacatctcccccgtcagttttatttgcgtactttccaatatcagtgcgaattccagtggatatagtaaaaaatggactgtatcttctataaacttagtagcatatgctgcagctaacttggcaggaccacaaacctttattgctaagcaggctcctaaatatcatggcgctaaggtcgctatggtcgtatgttatgctgttatgatcgtgcttttatctatattactcatcgtcaatttaagggaaaacaagagacgtgataagatagctgccgagagagggttccctgaagaaacagagaatttagagttttctgatttgactgattttgaaaatccaaatttcagatacactttatga

SEQ ID NO: 6417 - DNA, 1086 bp, Saccharomyces cerevisiae
atgatttctgctaattcattacttatttccactttgtgcgcttttgcgatcgcaacacctttgtcaaaaagagattcctgtaccctaacaggatcttctttgtcttcactctcaaccgtgaaaaaatgtagcagcatcgttattaaagacttaactgtcccagctggacagactttagatttaactgggttaagcagtggtactactgttacgtttgaaggcacaaccacatttcagtacaaggaatggagcggccctttaatttcaatctcagggtctaaaatcagcgttgttggtgcttcgggacataccattgatggtcaaggagcaaaatggtgggatggcttaggtgatagcggtaaagtcaaaccgaagtttgtaaagttggcgttgacgggaacatctaaggtcaccggattgaatattaaaaatgctccacaccaagtcttcagcatcaataaatgttcagatttaaccatcagcgacataacaattgatatcagagacggtgattcggctggtggtcataatacggatgggtttgatgttggtagttctagtaacgtcttaattcaaggatgtactgtttataatcaggatgactgtattgctgtgaattccggttcaactattaaatttatgaacaactactgctacaatggccatggtatttctgtaggttctgttggtggccgttctgataatacagtcaatggtttctgggctgaaaataaccatgttatcaactctgacaacgggttgagaataaaaaccgtagaaggtgcgacaggcacagtcactaatgtcaactttatcagtaataaaattagcggcataaaaagttatggtattgttatcgaaggcgattatttgaatagtaagactactggaactgctacaggtggcgttcccatttcgaatttagtaatgaaggatatcaccgggagcgtgaactccacagcgaagagggttaaaattttggtgaaaaacgctactaactggcaatggtctggggtgtcaattaccggtggttcttcctattctggatgttctggaatcccatctggatctggtgcaagctgttaa

SEQ ID NO: 6418 - DNA, 1086 bp, Artificial Sequence
  Description of Artificial Sequence: Synthetic polynucleotide
atgatttctgctaattctttacttatttccactttgtgcgcttttgcgatcgcaacacctttgagtaaaagagattcctgtaccttaacaggatcttctttgtcttctctctctaccgtgaaaaaatgtagcagcatcgttattaaagacttaactgtcccagctggacagactttagatttaactgggttaagcagtggtactactgttacgtttgaaggcacaaccacatttcagtacaaggaatggagcggccctttaatttccatctctgggtctaaaatcagcgttgttggtgcttctggacataccattgatggtcaaggagcaaaatggtgggatggcttaggtgatagcggtaaagtcaaaccgaagtttgtaaagttggcgttgacgggaacatctaaggtcaccggattgaatattaaaaatgctccacaccaagtcttcagcatcaataaatgttctgatttaaccatcagcgacataacaattgatatcagagacggtgattctgctggtggtcataatacggatgggtttgatgttggtagttctagtaacgtcttaattcaaggatgtactgtttataatcaggatgactgtattgctgtgaattccggttctactattaaatttatgaacaactactgctacaatggccatggtatttctgtaggttctgttggtggccgttctgataatacagtcaatggtttctgggctgaaaataaccatgttatcaactctgacaacgggttgagaataaaaaccgtagaaggtgcgacaggcacagtcactaatgtcaactttatcagtaataaaattagcggcataaaaagttatggtattgttatcgaaggcgattatttgaatagtaagactactggaactgctacaggtggcgttcccatttctaatttagtaatgaaggatatcaccgggagcgtgaactccacagcgaagagggttaaaattttggtgaaaaacgctactaactggcaatggtctggggtgtccattaccggtggttcttcctattctggatgttctggaatcccatctggatctggtgcaagctgttga

SEQ ID NO: 6419 - DNA, 1041 bp, Saccharomyces cerevisiae
atgaacacagattcacacaaccttagtgagccatacaatataggtggccaaaaatacattaatatgaaaaaaaaggaagatcttggcgtatgccagcctggcttaacgcaaaaggcattcacagtcgaagacaagttcgattacaaagcaattattgaaaaaatggaagtatacggactttgcgtggtcaagaattttatagagacctccagatgtgatgaaatattgaaagaaatcgaaccgcatttttatagatacgaatcatggcaaggctcaccgtttcctaaggaaactactgtggcaacgagatcggttttacactcatctacagtcttaaaggatgtggtatgcgaccgtatgttttgtgatatctcaaaacattttttgaatgaagaaaactactttgcggcgggaaaggtgattaataaatgcactagtgatattcaactgaactccggtatagtctacaaggttggcgctggtgcaagtgaccagggctaccaccgagaagatattgttcatcatacgacccatcaagcatgtgaacgtttccagtatggaaccgaaaccatggtagggttaggtgtagcttttacagatatgaataaagaaaatggctctacgcgaatgatagtcggttcacatttgtggggtccgcacgattcctgtgggaactttgacaagaggatggaatttcacgttaatgttgcaaagggagacgcagttctattcttagggagcctctaccatgcagccagtgcaaatcgtacgtcacaagacagagttgctggatatttttttatgacaaagagctacttgaaaccagaggaaaatcttcacttagggactgatttgcgagtgtttaagggtttaccattggaagccttgcaactgttggggctcggaattagtgagccattttgtggtcacatagattataagagtccaggacatcttatcagttctagtttgtttgaaaatgatatcgaaaaggggtactatggagagacaataagggtgaattatgggtccacgcaataa

SEQ ID NO: 6420 - DNA, 1041 bp, Artificial Sequence
  Description of Artificial Sequence: Synthetic polynucleotide
atgaacacagattctcacaaccttagtgagccatacaatataggtggccaaaaatacattaatatgaaaaaaaaggaagatcttggcgtatgccagcctggcttaacgcaaaaggcattcacagtcgaagacaagttcgattacaaagcaattattgaaaaaatggaagtatacggactttgcgtggtcaagaattttatagagacctccagatgtgatgaaatattgaaagaaatcgaaccgcatttttatagatacgaaagttggcaaggctctccgtttcctaaggaaactactgtggcaacgagatctgttttacactcttctacagtcttaaaggatgtggtatgcgaccgtatgttttgtgatatctccaaacattttttgaatgaagaaaactactttgcggcgggaaaggtgattaataaatgcactagtgatattcaattgaactccggtatagtctacaaggttggcgctggtgcaagtgaccagggctaccacagagaagatattgttcatcatacgacccatcaagcatgtgaacgtttccagtatggaaccgaaaccatggtagggttaggtgtagcttttacagatatgaataaagaaaatggctctacgagaatgatagtcggttctcatttgtggggtccgcacgattcctgtgggaactttgacaagaggatggaatttcacgttaatgttgcaaagggagacgcagttttgttcttagggagcctctaccatgcagccagtgcaaatcgtacgtctcaagacagagttgctggatatttttttatgacaaagagctacttgaaaccagaggaaaatcttcacttagggactgatttgagagtgtttaagggtttaccattggaagccttgcaattattggggctcggaattagtgagccattttgtggtcacatagattataagagtccaggacatcttatcagttctagtttgtttgaaaatgatatcgaaaaggggtactatggagagacaataagggtgaattatgggtccacgcaatga

SEQ ID NO: 6421 - DNA, 867 bp, Saccharomyces cerevisiae
atggcatcaagaaaactgcgtgaccagattgtaattgccactaaatttaccacggattataaggggtatgatgtaggcaaggggaagagtgccaatttctgtgggaatcacaagcgcagtttgcatgtaagtgtgagagattcccttcgtaagttgcaaactgattggattgatattctttacgttcactggtgggattatatgagctccattgaggaagttatggatagtttgcacattcttgtgcagcagggcaaagtactctatctaggtgtgtctgatactcctgcctgggttgtttctgcagcaaattactacgccacatctcatggtaaaactccctttagtatctatcaaggtaaatggaatgtattgaacagggactttgaacgtgatatcattccaatggctaggcattttggtatggctcttgctccatgggatgttatgggaggcgggagatttcagagtaaaaaggcagtggaagagcggaagaagaaaggagaaggcttgcgtaccttttttggtacttcggaacagacggatatggaggttaaaatcagcgaagcattgttaaaagttgcggaagaacatggcactgagtctgtcactgctattgccatagcttatgttcggtctaaagcgaaacatgttttcccattagtgggaggaagaaagatcgaacatctcaaacagaacattgaggctttgagcattaaattaacaccagaacaaataaagtacttagaaagtattgttccttttgatgtcggatttcccactaattttattggagatgacccagctgttaccaagaaaccttcatttctcaccgaaatgtctgccaagattagcttcgaagattag

SEQ ID NO: 6422 - DNA, 867 bp, Artificial Sequence
  Description of Artificial Sequence: Synthetic polynucleotide
atggcatctagaaaattacgtgaccagattgtaattgccactaaatttaccacggattataaggggtatgatgtaggcaaggggaagagtgccaatttctgtgggaatcacaagcgcagtttgcatgtaagtgtgagagattcccttcgtaagttgcaaactgattggattgatattctttacgttcactggtgggattatatgagctccattgaggaagttatggatagtttgcacattcttgtgcagcagggcaaagtactctatttgggtgtgtctgatactcctgcctgggttgtttctgcagcaaattactacgccacatctcatggtaaaactccctttagtatctatcaaggtaaatggaatgtattgaacagggactttgaacgtgatatcattccaatggctaggcattttggtatggctcttgctccatgggatgttatgggaggcgggagatttcagagtaaaaaggcagtggaagagagaaagaagaaaggagaaggcttgcgtaccttttttggtacttctgaacagacggatatggaggttaaaatcagcgaagcattgttaaaagttgcggaagaacatggcactgagtctgtcactgctattgccatagcttatgttagatctaaagcgaaacatgttttcccattagtgggaggaagaaagatcgaacatctcaaacagaacattgaggctttgagcattaaattaacaccagaacaaataaagtacttagaaagtattgttccttttgatgtcggatttcccactaattttattggagatgacccagctgttaccaagaaaccttcttttctcaccgaaatgtctgccaagattagcttcgaagattga

SEQ ID NO: 6423 - DNA, 1023 bp, Saccharomyces cerevisiae
atgtctacagacaagatcacatttttgttgaactggcaaccaaccccataccatattccaattttcttggctcaaaccaaaggttacttcaaggagcaaggtctagacattgccatcctagaaccaaccaatccttcggatgtcactgagttaattggatctggtaaggtcgacatgggtttgaaagccatgatccacaccttggctgccaaggcccgtggtttcccagtgacctctgttgcctctttgttggacgaaccattcaccggtgtcttgtacttaaagggcagtggtatcactgaagacttccagtccctaaagggtaagaagatcggttacgttggtgaattcggtaagatccaaatcgatgaattgaccaagcactacggtatgaagccagaagactacactgctgtcagatgtggtatgaatgtcgccaagtacatcatcgaagataagattgatgctggtattggtatcgaatgtatgcaacaagtcgaattggaagagtacttggccaagcaaggcagaccagcttctgatgctaaaatgttgagaattgacaagttggcttgcttgggttgctgttgtttctgtaccgttctttacatctgcaacgatgaatttttgaagaaaaaccctgaaaaggtcagaaagttcttgaaagccatcaagaaggcaaccgactacgttctagccgaccctgtgaaggcttggaaagaatacatcgacttcaagcctcaattgaacaacgatctatcatacaagcaataccaaagatgttacgcttacttctcttcatctttgtacaatgttcaccgtgactggaagaaggttaccggttacggtaagagattagccattctgccaccagactatgtctcgaactacactaatgaatacttgtcctggccagaaccagaagaggtttctgatcctttggaagctcaaagattgatggctattcatcaagaaaaatgcagacaggaaggtactttcaagagattggctcttccagcttaa

SEQ ID NO: 6424 - DNA, 1023 bp, Artificial Sequence
  Description of Artificial Sequence: Synthetic polynucleotide
atgtctacagacaagatcacatttttgttgaactggcaaccaaccccataccatattccaattttcttggctcaaaccaaaggttacttcaaggagcaaggtttggacattgccatcttggaaccaaccaatccttctgatgtcactgagttaattggatctggtaaggtcgacatgggtttgaaagccatgatccacaccttggctgccaaggcccgtggtttcccagtgacctctgttgcctctttgttggacgaaccattcaccggtgtcttgtacttaaagggcagtggtatcactgaagacttccagtccttgaagggtaagaagatcggttacgttggtgaattcggtaagatccaaatcgatgaattgaccaagcactacggtatgaagccagaagactacactgctgtcagatgtggtatgaatgtcgccaagtacatcatcgaagataagattgatgctggtattggtatcgaatgtatgcaacaagtcgaattggaagagtacttggccaagcaaggcagaccagcttctgatgctaaaatgttgagaattgacaagttggcttgcttgggttgctgttgtttctgtaccgttctttacatctgcaacgatgaatttttgaagaaaaaccctgaaaaggtcagaaagttcttgaaagccatcaagaaggcaaccgactacgttttggccgaccctgtgaaggcttggaaagaatacatcgacttcaagcctcaattgaacaacgatttatcttacaagcaataccaaagatgttacgcttacttctcttcttctttgtacaatgttcaccgtgactggaagaaggttaccggttacggtaagagattagccattttaccaccagactatgtctccaactacactaatgaatacttgtcctggccagaaccagaagaggtttctgatcctttggaagctcaaagattgatggctattcatcaagaaaaatgcagacaggaaggtactttcaagagattggctcttccagcttga

SEQ ID NO: 6425 - DNA, 1704 bp, Saccharomyces cerevisiae
atggcaagcgaacagtcctcaccagaaattaatgcagataatctaaacagtagtgcagctgacgttcatgtacagccacccggagagaaagaatggtcagacgggttttatgacaaagaagtcattaatggaaatacgccagacgcaccgaagagaggctttttaggttaccttattatctacttactatgctatcctgtatcctttggcggttttttacctggttgggatagtggtattactgcaggcttcatcaatatggataactttaaaatgaattttggttcttacaagcacagtactggtgagtattatttgagcaacgtgcgtatgggtcttctcgtggccatgttcagtgtaggatgttccattggcggtgttgcttttgcgagacttgctgatactttaggtagaaggctagcaattgtaatcgtggttttggtatatatggttggtgcaattattcagatcagttcgaatcacaaatggtaccaatactttgtcggtaagatcatctacggtcttggtgctggtggctgttcggtgttgtgtccaatgcttttatctgaaatagcccccacagatttgagaggtggacttgtctcattgtaccaacttaacatgaccttcggtattttcttgggttattgtagcgtttatggaacaaggaagtatagtaatactgcgcaatggaggattcctgtgggactatgctttctgtgggctctaattatcatcgttggcatgttattagttccagagtccccaagatatctgattgaatgtgagagacatgaagaggcctgtgtctccatcgccaagatcgacaaggtttcaccagaggatccatgggtactcaaacaggctgatgaaatcaacgccggtgtccttgcccaaagagaactaggggaagcctcatggaaagaacttttctccgtcaaaacaaaagtccttcaacgtttgatcacaggtattcttgtgcaaacctttttgcaacttactggtgaaaactacttcttcttctacggaactaccattttcaaatcagttgggcttactgatgggtttgagacttcgatcgtcctaggtacagtgaatttcttctccactattattgctgttatggtcgtagacaaaataggccgtcgtaaatgtctgttattcggagcggcttcaatgatggcttgtatggtcatatttgcaagtatcggggtaaaatgtctttaccctcatggccaggatggtccatcctcgaaaggtgcaggtaatgccatgattgtgttcacatgcttctatatattctgctttgcaacgacatgggcccctgttgcttatattgtggttgccgagtcattcccttcgaaggtcaaatctaaagcaatgtcaatttcgactgcattcaactggttatggcaattcttgattggttttttcacaccattcattactgggtctatccacttctattatggttatgtgttcgtaggttgtttggttgctatgtttttgtacgttttcttctttttaccagaaacaattggtctatctttggaggaaacccagttactatatgaagaaggtataaaaccatggaaatctgcatcttgggtaccaccctcaaggagaggagcttcttccagggaaactgaggctaagaagaaaagctggaaagaagttttgaagttcccaaagagttttaattga

SEQ ID NO: 6426 - DNA, 1704 bp, Artificial Sequence
  Description of Artificial Sequence: Synthetic polynucleotide
atggcaagcgaacagtcctctccagaaattaatgcagataatttgaacagtagtgcagctgacgttcatgtacagccacccggagagaaagaatggtctgacgggttttatgacaaagaagtcattaatggaaatacgccagacgcaccgaagagaggctttttaggttaccttattatctacttattatgctatcctgtatcctttggcggttttttacctggttgggatagtggtattactgcaggcttcatcaatatggataactttaaaatgaattttggttcttacaagcacagtactggtgagtattatttgagcaacgtgcgtatgggtcttctcgtggccatgttcagtgtaggatgttccattggcggtgttgcttttgcgagacttgctgatactttaggtagaaggttagcaattgtaatcgtggttttggtatatatggttggtgcaattattcagatcagtagtaatcacaaatggtaccaatactttgtcggtaagatcatctacggtcttggtgctggtggctgttctgtgttgtgtccaatgcttttatctgaaatagcccccacagatttgagaggtggacttgtctctttgtaccaacttaacatgaccttcggtattttcttgggttattgtagcgtttatggaacaaggaagtatagtaatactgcgcaatggaggattcctgtgggattatgctttttatgggctttgattatcatcgttggcatgttattagttccagagtccccaagatatttgattgaatgtgagagacatgaagaggcctgtgtctccatcgccaagatcgacaaggtttctccagaggatccatgggtactcaaacaggctgatgaaatcaacgccggtgtccttgcccaaagagaattgggggaagccagttggaaagaacttttctccgtcaaaacaaaagtccttcaacgtttgatcacaggtattcttgtgcaaacctttttgcaacttactggtgaaaactacttcttcttctacggaactaccattttcaaatctgttgggcttactgatgggtttgagacttctatcgtcttgggtacagtgaatttcttctccactattattgctgttatggtcgtagacaaaataggccgtcgtaaatgtcttttattcggagcggcttccatgatggcttgtatggtcatatttgcaagtatcggggtaaaatgtctttaccctcatggccaggatggtccatcctctaaaggtgcaggtaatgccatgattgtgttcacatgcttctatatattctgctttgcaacgacatgggcccctgttgcttatattgtggttgccgagagtttcccttctaaggtcaaatctaaagcaatgtctatttctactgcattcaactggttatggcaattcttgattggttttttcacaccattcattactgggtctatccacttctattatggttatgtgttcgtaggttgtttggttgctatgtttttgtacgttttcttctttttaccagaaacaattggtctttctttggaggaaacccagttattatatgaagaaggtataaaaccatggaaatctgcatcttgggtaccaccctctaggagaggagcttcttccagggaaactgaggctaagaagaaaagctggaaagaagttttgaagttcccaaagagttttaattga

SEQ ID NO: 6427 - DNA, 1074 bp, Saccharomyces cerevisiae
atgtctcaaaatagtaaccctgcagtagttctagagaaagtcggcgatattgccatcgagcaaagaccaatccctaccattaaggacccccattatgtcaagttagctattaaagccactggtatctgcggctctgatattcattattatagaagcggtggtattggtaagtacatattgaaggcgccaatggttttaggtcatgaatcaagcggacaggttgtggaagttggtgatgccgtcacaagggtcaaagttggtgaccgtgttgctattgaacctggtgttcctagccgttactctgatgagaccaaagaagggaggtataacctttgcccacatatggcatttgctgcaactcctccaattgatggtactcttgtgaagtactatttatctccagaagatttccttgtgaaattgccagaaggcgtcagttatgaagagggcgcttgtgtcgaacccttatcagtcggtgtacactctaataaattggctggggtccgctttggtaccaaagttgttgtatttggtgcaggtcctgtggggcttttaactggcgcagtcgcccgcgcttttggtgccaccgacgtcattttcgtcgatgtattcgacaacaagctacagagagcaaaagatttcggagccacaaacactttcaattcttcccagttttccaccgataaagcccaagacttggccgatggggtccaaaagcttttgggcggaaatcacgcagatgtggtgtttgagtgttcaggtgctgatgtttgcattgatgccgctgtcaaaacaactaaggttggaggtaccatggtgcaagtcggtatgggtaaaaactacactaattttccaattgctgaagttagtggaaaggaaatgaaattgattggatgtttccgttattcattcggtgattatcgtgacgctgtgaacttggttgccacaggaaaagtcaatgtcaagccattgataacccacaaatttaaatttgaagatgcagccaaggcttacgactacaacattgcccatggtggagaggtagtcaagactattatctttggtcctgaatga

SEQ ID NO: 6428 - DNA, 1074 bp, Artificial Sequence
  Description of Artificial Sequence: Synthetic polynucleotide
atgtctcaaaatagtaaccctgcagtagttttggagaaagtcggcgatattgccatcgagcaaagaccaatccctaccattaaggacccccattatgtcaagttagctattaaagccactggtatctgcggctctgatattcattattatagaagcggtggtattggtaagtacatattgaaggcgccaatggttttaggtcatgaaagtagcggacaggttgtggaagttggtgatgccgtcacaagggtcaaagttggtgaccgtgttgctattgaacctggtgttcctagccgttactctgatgagaccaaagaagggaggtataacctttgcccacatatggcatttgctgcaactcctccaattgatggtactcttgtgaagtactatttatctccagaagatttccttgtgaaattgccagaaggcgtcagttatgaagagggcgcttgtgtcgaacccttaagtgtcggtgtacactctaataaattggctggggtccgctttggtaccaaagttgttgtatttggtgcaggtcctgtggggcttttaactggcgcagtcgcccgcgcttttggtgccaccgacgtcattttcgtcgatgtattcgacaacaagttacagagagcaaaagatttcggagccacaaacactttcaattcttcccagttttccaccgataaagcccaagacttggccgatggggtccaaaagcttttgggcggaaatcacgcagatgtggtgtttgagtgttctggtgctgatgtttgcattgatgccgctgtcaaaacaactaaggttggaggtaccatggtgcaagtcggtatgggtaaaaactacactaattttccaattgctgaagttagtggaaaggaaatgaaattgattggatgtttccgttattctttcggtgattatcgtgacgctgtgaacttggttgccacaggaaaagtcaatgtcaagccattgataacccacaaatttaaatttgaagatgcagccaaggcttacgactacaacattgcccatggtggagaggtagtcaagactattatctttggtcctgaatga

SEQ ID NO: 6429 - DNA, 1809 bp, Saccharomyces cerevisiae
atgaaaaacttatcttttctcataaacagaagaaaggaaaatacaagtgactcgaatgtatacccaggaaaggctaagtcgcatgaacccagctggatagaaatggatgatcaaactaagaaggacggcttagatattgttcatgttgagttcagtccggatacaagagcgccaagcgatagcaataaagtaataacagagatatttgacgctactgaggatgccaaggaggcagacgaaagtgaaagaggaatgccacttgcgacagcattgaatacatatcccaaggcagcagcttggtcactattggtctctacaactttaatcatggaagggtacgacacagctattcttggagctttctacgccttgcctatttttcagagaaagtttggctcacaaaatgacaaaactggagaatgggaaatttcagcgtcatggcaaatcgggctgaccttatgttatatggcaggtgaaattgtggggctacagctaacggggccctccgtggatcttgttggaaatcgttacacattgattattgcattgttttttttagctgccttcacttttatactgtacttttgcaatagtttaggcatgattgctgtgggacaagcattgtgcgggatgccatggggttgttttcagtgtttgacggtgtcttacgcttctgaaatatgcccattggctctgagatattaccttacaacctattcaaacttgtgctggttatttggacaactttttgcagctggaatcatgaaaaattctcaaaaaaaatatgcggattcagaattaggatataaactaccatttgccctacagtggattttgccagttcctttagcactgggaattttttttgcacctgaatctccatggtggctagttaaaaaaggaaggtttgatgaggcaaggagatcacttagaagaactttaagcggcaagggacctgaaaaagaaatactagtaactctggaggtggacaaaataaaagtgactatagataaggaaaagagactcacaagtaaagaaggctcctatagtgattgttttgaagacaagattaatcgaagaagaacgagaattacttgtctctgctgggctggtcaagccacttgtggttcaatactaataggttattcaacttacttttacgaaaaggctggcgttagtactgaaatgtccttcacttttagtattattcaatactgtctcggtatttgtgctacatttctatcttggtgggcgtcaaagtattttggtagatatgacctttacgcttttggactagccttccaaaccattgtttttttcattattggcggtttggggtgctcaagtacgcacggttccaaaatgggaagtggttctcttttaatggctgtagcatttttttacaatttaggaattgccccggtcgttttttgcctagtctctgaaatgccatcttcaagactaagaacgaaaacaatcattctagcacgtaacacttataatgtggtcagtatcatatgtagcgttctcatcttataccaactgaactctaagaagtggaactggggcgctaagtcaggctttttctggggtgtcttatgcttttgtactttaatctgggctgtggttgacctaccagaaactgccggaaagactttcgtggaaataaatgagttatttaaacttggagtttctgcaagaaagttcaaatcgacgaaagtagatccgtttgttgtcaaaaccccccctaaagacgtctctcataacgaccccaagggagatatcgaagcttccattgcagaggaatag

SEQ ID NO: 6430 - DNA, 1809 bp, Artificial Sequence
  Description of Artificial Sequence: Synthetic polynucleotide
atgaaaaacttatcttttctcataaacagaagaaaggaaaatacaagtgactctaatgtatacccaggaaaggctaagagtcatgaacccagctggatagaaatggatgatcaaactaagaaggacggcttagatattgttcatgttgagttcagtccggatacaagagcgccaagcgatagcaataaagtaataacagagatatttgacgctactgaggatgccaaggaggcagacgaaagtgaaagaggaatgccacttgcgacagcattgaatacatatcccaaggcagcagcttggtctttgttggtctctacaactttaatcatggaagggtacgacacagctattcttggagctttctacgccttgcctatttttcagagaaagtttggctctcaaaatgacaaaactggagaatgggaaattagtgcgtcttggcaaatcgggttaaccttatgttatatggcaggtgaaattgtggggttgcagttaacggggccctccgtggatcttgttggaaatcgttacacattgattattgcattgttttttttagctgccttcacttttatattatacttttgcaatagtttaggcatgattgctgtgggacaagcattgtgcgggatgccatggggttgttttcagtgtttgacggtgtcttacgcttctgaaatatgcccattggctttgagatattaccttacaacctattccaacttgtgctggttatttggacaactttttgcagctggaatcatgaaaaattctcaaaaaaaatatgcggattctgaattaggatataaattaccatttgccttgcagtggattttgccagttcctttagcattgggaattttttttgcacctgaatctccatggtggttagttaaaaaaggaaggtttgatgaggcaaggagatctcttagaagaactttaagcggcaagggacctgaaaaagaaatattagtaactttagaggtggacaaaataaaagtgactatagataaggaaaagagactcacaagtaaagaaggctcctatagtgattgttttgaagacaagattaatagaagaagaacgagaattacttgtctctgctgggctggtcaagccacttgtggttccatattaataggttattctacttacttttacgaaaaggctggcgttagtactgaaatgtccttcacttttagtattattcaatactgtctcggtatttgtgctacatttttatcttggtgggcgtctaagtattttggtagatatgacctttacgcttttggattggccttccaaaccattgtttttttcattattggcggtttggggtgcagcagtacgcacggttccaaaatgggaagtggttctcttttaatggctgtagcatttttttacaatttaggaattgccccggtcgttttttgcttagtctctgaaatgccatcttctagattgagaacgaaaacaatcattttggcacgtaacacttataatgtggtcagtatcatatgtagcgttctcatcttataccaattgaactctaagaagtggaactggggcgctaagtctggctttttctggggtgtcttatgcttttgtactttaatctgggctgtggttgacttaccagaaactgccggaaagactttcgtggaaataaatgagttatttaaacttggagtttctgcaagaaagttcaaatctacgaaagtagatccgtttgttgtcaaaaccccccctaaagacgtctctcataacgaccccaagggagatatcgaagcttccattgcagaggaatga

SEQ ID NO: 6431 - DNA, 1152 bp, Saccharomyces cerevisiae
atgaaagagaatgaacttaaaaatgagaagagtgtagatgtattatccttcaaacagctcgaatcccaaaagattgttctacctcaagatcttttcagaagcagctttacctggttttgttatgaaatttacaagtccttagcgtttccgatctggatgctattatggctaccacttagcgtctggtggaaactttccaacaattgtatttacccacttatagtttcacttctggtcctgtttctgggaccaatatttgtccttgttatttgtggactttctcgtaagcgttccttatcgaaacaactcattcagttttgcaaagaggttactgaaaacacaccaagttctgatcctcatgattgggaagttgttgcagcaaatctaaattcgtacttatatgaaaataaggcttggaatactaggtactttttcttcaatgccatgggctgccaagaagcgttcagaacaacccttctcgaacccttctctttgaaaaaagacgaagctgccaaggttaagtcatttaaggattccgtcccttacattgaagaagcattgggagtttattttagagaagttgaaaaacaatggaagttgtttaatactgaaaaatcatggagccctgttggcctggaagacgttcagcttcccaaggatattcatcggtccaagcttacttggtttttaaagcggattttcactatttactctctaccattatggcttgcttttttgaactgtatctgcgtgtcacagcatttttgccttgcatttcgtatattgtgtcctggattgtttttcctcatgatggtgtggcttttccaaaatatgaggacgactgctttactcgtgaaaatggaacacaagatgcaattcttgttgactattataaatgagcaagaaagtggtgcgaatggatgggacgaaattgcaaggaaaatgaataggtacttgtttgagaaaaaagcctggaagaatgaagagtttttcttcgaggggattgactgtgaatggttttttagccacttcttctaccgccttctatctgcaaagaaatctatgtggcttttaccattgaatgtggaactatggccatatattaaagaagcgcaattgtcccgcaatgaagagtctttaatgaagaaatga

SEQ ID NO: 6432 - DNA, 1152 bp, Artificial Sequence
  Description of Artificial Sequence: Synthetic polynucleotide
atgaaagagaatgaacttaaaaatgagaagagtgtagatgtattatccttcaaacagctcgaatcccaaaagattgttttacctcaagatcttttcagaagcagctttacctggttttgttatgaaatttacaagtccttagcgtttccgatctggatgcttttatggttaccacttagcgtctggtggaaactttccaacaattgtatttacccacttatagtttcccttttggtcttgtttttgggaccaatatttgtccttgttatttgtggactttctcgtaagcgttccttatccaaacaactcattcagttttgcaaagaggttactgaaaacacaccaagttctgatcctcatgattgggaagttgttgcagcaaatttgaattcttacttatatgaaaataaggcttggaatactaggtactttttcttcaatgccatgggctgccaagaagcgttcagaacaacccttctcgaacccttctctttgaaaaaagacgaagctgccaaggttaagagctttaaggattccgtcccttacattgaagaagcattgggagtttattttagagaagttgaaaaacaatggaagttgtttaatactgaaaaaagttggagccctgttggccttgaagacgttcagcttcccaaggatattcatcgttccaagcttacttggtttttaaagagaattttcactatttactctttaccattatggcttgcttttttgaactgtatctgcgtgtcccagcatttttgccttgcatttcgtatattgtgtcctggattgtttttcctcatgatggtgtggcttttccaaaatatgaggacgactgctttactcgtgaaaatggaacacaagatgcaattcttgttgactattataaatgagcaagaaagtggtgcgaatggatgggacgaaattgcaaggaaaatgaataggtacttgtttgagaaaaaagcctggaagaatgaagagtttttcttcgaggggattgactgtgaatggttttttagccacttcttctaccgccttttatctgcaaagaaatctatgtggcttttaccattgaatgtggaattatggccatatattaaagaagcgcaattgtcccgcaatgaagagtctttaatgaagaaatga

SEQ ID NO: 6433 - DNA, 372 bp, Saccharomyces cerevisiae
atggtcaaattaacttcaatcgctgctggtgtcgccgccatcgctgctggtgttgccgctgccccagccactaccactctatctccatctgacgaaagagttaacttggtcgaattgggtgtttacgtctccgatatcagagctcatttggcccaatactacttgtttcaagcagctcatccaagtgagacctacccagttgaaattgctgaagctgttttcaactatggtgacttcaccaccatgttgactggtattccagctgaacaagtcaccagagttatcactggtgtcccatggtactctaccagattgagaccagctatctccagtgctctatccaaggacggtatctacactatcgcaaattag

SEQ ID NO: 6434 - DNA, 372 bp, Artificial Sequence
  Description of Artificial Sequence: Synthetic polynucleotide
atggtcaaattaacttctatcgctgctggtgtcgccgccatcgctgctggtgttgccgctgccccagccactaccactttatctccatctgacgaaagagttaacttggtcgaattgggtgtttacgtctccgatatcagagctcatttggcccaatactacttgtttcaagcagctcatccaagtgagacctacccagttgaaattgctgaagctgttttcaactatggtgacttcaccaccatgttgactggtattccagctgaacaagtcaccagagttatcactggtgtcccatggtactctaccagattgagaccagctatctccagtgctttgtccaaggacggtatctacactatcgcaaattga

SEQ ID NO: 6435 - DNA, 2118 bp, Saccharomyces cerevisiae
atgaagaatacggaacttagtcaaaaaaaaaaattagataggcagagtagaagaaagcctgcaaagtcgtgccacttttgtagagtaagaaagctcaagtgcgatcgagtaagaccgttctgtggaagttgctcttctcgaaatcgaaagcaatgtgaatataaagaaaacacttccgccatggaggaccaactcaggaaaaaatacaggagatgttcaaaattagagatggctcgtcgtattgaagagcttgaatctcagctaacaaaacaatcccagcctaacattcacgaaggacaaaaccctctttccaacatgagatatttatcttcaaagcacaataggcacattctttatggaccaacgtcgtatcgagcaatattagcaactcaaacagatacttttgccaaatacagagaggagatatggcaagtcctaaaactcagccgtaacaactggaaaagagagcatcattactcaacactctcggagattagttccattgagactgccccaccgcactcaggctcaccaagtgttattgaatacttatgtgaatcgcttccaaattatgaagttttgtgtgagtatttaactgatttttttgctagcgatttttacgatagttaccaaattgttcataaagaaaaagtattaagggatctgcaagattgttttgttaaaggcccaagaagtcataaaactggtcagcacacaataatttcccttaatctggacagtaaaaaaaattattataaagtgggtgttatgacagccattatgtgcttagcatcccatccaaaagaagtgccagaggctattgaagtcttccataaagttttaacgtcttttgtttcggctaaagttttttatactgagcgtgtgcaatttttatttttacgttacctgtacataaatgtggcgggtcttgacgggggcgatcagtcacattgcatatttattcatggtctgacaattgacacagctatccatatgggccttaatgaagatcttcgtcgtttatatctgagtaaaaatcatccaatagaggaaataccttacttggagagattgtggttatggatcctattcacggacgttaaaatttcactctctacaggaattccggtccgaatcaacgacgattttgtaaacaaggtacgtctagaaaactattcttcatcaggggacatccttctgtataaaacaacattaagactgagaaatattatgaaacaaattcatgctcgtgagaaaccgcctgacattccactcatcatcgaggacttaaaaaagttcaccattaaaatgtttaagccgttggatttttacttaaatgcatctaatttaaatggtaatgagttcaccgaacttcaattatggcatgcaactctccatatgataggaagtttatccaatctttataccttaacacatcaagattttgatgcgagaatattcaattttagcgtcctggctccactaaattcattacatttgtgctttaatgtccttgagacctattttgaattagacaacagcaaattatcttctaagtcattatgcctctccaaaaaatggccccatttaaacaatgcgttgtttcttatttatgtgaacgctttcagagcattaattcaaatttataccatttttctacagtatatggaaaataaagatatccaattattcattcagagaaattcgtccgcactaacttattctatatgtcctggagactttgagggtccacacaataagtgtatttcactgaaaattgcatttaaagaaatggaaaacatatttgatcatattcaccaagaaaagttgaaacctcttactcaaatttggcaaaactcctattacttttctattattatatcaatggaaaaaataggaagaagagcttttaacaaaggaatgaaaaatatcgatgaagggcctgaaaccgaaaatgatgcaactgaaaacagtttaacaactatactaaatgatttagagggacctttagaagatttctcggaaaatttcatcgatgatatattaggttctccaagtgccttctttgatacagctatttccgggtggagtaattttgaggacttcttttccagatag

SEQ ID NO: 6436 - DNA, 2118 bp, Artificial Sequence
  Description of Artificial Sequence: Synthetic polynucleotide
atgaagaatacggaacttagtcaaaaaaaaaaattagataggcagagtagaagaaagcctgcaaagtcttgccacttttgtagagtaagaaagctcaagtgcgatagagtaagaccgttctgtggaagttgctcttctagaaatagaaagcaatgtgaatataaagaaaacacttccgccatggaggaccaactcaggaaaaaatacaggagatgttctaaattagagatggctcgtcgtattgaagagcttgaatctcagttgacaaaacaatcccagcctaacattcacgaaggacaaaaccctctttccaacatgagatatttatcttccaagcacaataggcacattctttatggaccaacgtcctatagagcaatattagcaactcaaacagatacttttgccaaatacagagaggagatatggcaagtcttgaaactcagccgtaacaactggaaaagagagcatcattactccacactcagtgagattagttccattgagactgccccaccgcactctggctctccaagtgttattgaatacttatgtgaatctcttccaaattatgaagttttgtgtgagtatttaactgatttttttgctagcgatttttacgatagttaccaaattgttcataaagaaaaagtattaagggatttgcaagattgttttgttaaaggcccaagaagtcataaaactggtcagcacacaataatttcccttaatttggacagtaaaaaaaattattataaagtgggtgttatgacagccattatgtgcttagcatcccatccaaaagaagtgccagaggctattgaagtcttccataaagttttaacgtcttttgtttctgctaaagttttttatactgagcgtgtgcaatttttatttttacgttacttgtacataaatgtggcgggtcttgacgggggcgatcagtctcattgcatatttattcatggtttaacaattgacacagctatccatatgggccttaatgaagatcttcgtcgtttatatttgagtaaaaatcatccaatagaggaaataccttacttggagagattgtggttatggatcttattcacggacgttaaaatttctctctctacaggaattccggtcagaatcaacgacgattttgtaaacaaggtacgtttagaaaactattcttcttctggggacatccttttatataaaacaacattaagattgagaaatattatgaaacaaattcatgctcgtgagaaaccgcctgacattccactcatcatcgaggacttaaaaaagttcaccattaaaatgtttaagccgttggatttttacttaaatgcatctaatttaaatggtaatgagttcaccgaacttcaattatggcatgcaactctccatatgataggaagtttatccaatctttataccttaacacatcaagattttgatgcgagaatattcaattttagcgtcttggctccattgaattctttacatttgtgctttaatgtccttgagacctattttgaattagacaacagcaaattatcttctaagtctttatgcctctccaaaaaatggccccatttaaacaatgcgttgtttcttatttatgtgaacgctttcagagcattaattcaaatttataccatttttttgcagtatatggaaaataaagatatccaattattcattcagagaaattcttccgcattgacttattctatatgtcctggagactttgagggtccacacaataagtgtatttctttgaaaattgcatttaaagaaatggaaaacatatttgatcatattcaccaagaaaagttgaaacctcttactcaaatttggcaaaactcctattacttttctattattatatccatggaaaaaataggaagaagagcttttaacaaaggaatgaaaaatatcgatgaagggcctgaaaccgaaaatgatgcaactgaaaacagtttaacaactatattgaatgatttagagggacctttagaagatttctctgaaaatttcatcgatgatatattaggttctccaagtgccttctttgatacagctatttccgggtggagtaattttgaggacttcttttccagatga

SEQ ID NO: 6437 - DNA, 1422 bp, Saccharomyces cerevisiae
atgtccgaagaacggcatgaagatcatcatagggatgttgaaaataaattgaatttaaatggtaaagacgatattaacgggaatacctcaatctcgatcgaggtgcctgatggaggatatgggtggtttattcttcttgcttttattctgtacaacttttctacttggggggcaaattctggttatgctatttatttagcgcattatttagagaataatacttttgctggtgggagtaaattagactatgcttctataggtgggttagcattcagttgtggacttttttttgccccagttataacatggctttatcatatattttcaattcaattcattataggcttagggatactgtttcaaggggcagcgctactgcttgcagctttttctgtcacactctgggaaatttatctcacgcaaggcgttttaattggattcggtttagcatttattttcatacccagtgtcacactcatcccactatggttcagaaataaaagatctttagcctctggtataggaactgctggaagcgggttaggtggtattgtctttaacttgggaatgcaaagtattctacaaaagaggggcgttaaatgggcgctcattgctcagtgcataatatgcacatcacttagcaccattgcgcttatgttgaccagaacaacacatcaaggcctacgtcaacataagagatcttacaaatttgaattgctagattatgatgtgctttcaaatttcgcggtctggttactttttggatttgtatcatttgctatgttaggatatgttgtccttttgtattccttgtctgattttaccgttagtttaggttatactagtaagcaaggctcatacgtatcgtgcatggtgagtgtcggctctctgctgggacgaccaattgtgggtcacattgctgataaatatggatcactaacagttggcatgatattgcaccttgtcatggccatcctttgttgggccatgtggataccttgtaaaaatttggccactgcgatagcttttggattattggttggttctattatgggaacaatttggccaacaattgcttcaattgttacacgcattgttggtcttcaaaagcttcctggtacctttggtagtacctggatttttatggcggcttttgccttagttgcccccataatcggtctggaacttcgttcaactgatacgaatggaaacgattattatcgtacagcaatattcgtgggttttgcgtactttggtgttagtttatgccaatggctattgagagggtttataatagctcgagatgagattgctgtgcgtgaagcctattcagctgaccaaaatgaattgcatttaaacgttaagttatcacatatgagtaaatgtctttttcgttataaacaattacctaggagagtctaa

SEQ ID NO: 6438 - DNA, 1422 bp, Artificial Sequence
  Description of Artificial Sequence: Synthetic polynucleotide
atgtccgaagaaagacatgaagatcatcatagggatgttgaaaataaattgaatttaaatggtaaagacgatattaacgggaatacctctatctccatcgaggtgcctgatggaggatatgggtggtttattcttcttgcttttattttatacaacttttctacttggggggcaaattctggttatgctatttatttagcgcattatttagagaataatacttttgctggtgggagtaaattagactatgcttctataggtgggttagcattcagttgtggacttttttttgccccagttataacatggctttatcatatattttctattcaattcattataggcttagggatattgtttcaaggggcagcgttattacttgcagctttttctgtcacactctgggaaatttatctcacgcaaggcgttttaattggattcggtttagcatttattttcatacccagtgtcacactcatcccattatggttcagaaataaaagatctttagcctctggtataggaactgctggaagcgggttaggtggtattgtctttaacttgggaatgcaaagtattttacaaaagaggggcgttaaatgggcgctcattgctcagtgcataatatgcacatctcttagcaccattgcgcttatgttgaccagaacaacacatcaaggcttgcgtcaacataagagatcttacaaatttgaattgttggattatgatgtgctttctaatttcgcggtctggttactttttggatttgtatcctttgctatgttaggatatgttgtccttttgtattccttgtctgattttaccgttagtttaggttatactagtaagcaaggctcttacgtaagttgcatggtgagtgtcggctctttattaggaagaccaattgtgggtcacattgctgataaatatggatctttaacagttggcatgatattgcaccttgtcatggccatcctttgttgggccatgtggataccttgtaaaaatttggccactgcgatagcttttggattattggttggttctattatgggaacaatttggccaacaattgcttccattgttacacgcattgttggtcttcaaaagcttcctggtacctttggtagtacctggatttttatggcggcttttgccttagttgcccccataatcggtttggaacttcgttccactgatacgaatggaaacgattattatcgtacagcaatattcgtgggttttgcgtactttggtgttagtttatgccaatggttattgagagggtttataatagctagagatgagattgctgtgcgtgaagcctattctgctgaccaaaatgaattgcatttaaacgttaagttatctcatatgagtaaatgtctttttcgttataaacaattacctaggagagtctga

SEQ ID NO: 6439 - DNA, 2136 bp, Saccharomyces cerevisiae
atgcattggacgtccatcttgagcgctattttgcttttctgcctgtcaggagcaagagcatcacctgcaaagacagttattcgtaacaaggtgcccttgcttgtcactaatgcctgcacgaggatttttcaaaaagttacttgggagtataccagcaagtctaagcgttcatcaccagtatgttcttacgaaccagcgtttcaatcaatgctgtattgtatctatgaaacgttggatgaaaaaggttattcgaataaaaccttagaaaaaacatttagtaccatcaaaaaaaactgtgcaagttatagtgatgctcttcagaacatgactaattctgagttttatgacgttctaaacaacggaacgaggcatatgacgccctatgtcaaaggcagtgcaaacctaacatatccagttgaaatggatacacagttaagaaaagcctactatcatgcattgcatggtttctatgctaacttagatgtcggaaacatatatggtggcattatatgtgcttattttgtcgctatcatggcttttgcaggcgttcttcattgcatgaattacactccctttaaaactgttctattgaagcaaaagcttgtgggatatgtaaggggatacctcactctacctaccattggaagcaaacatgcgtcagatttctcttattttagaatattcacaggatatttacctacaagattagagggtatcattattcttggatatctcgtgcttcataccgtttttttggcatacggttatgaatacgatcctgaaaatataatattcaagtctcgtagagttcaagttgctcgatatgtggcagacagaagtggtgtactcgcattcgcacactttccattaatagttcttttcgcgggaagaaacaactttctcgagtatatttctggggttaaatatacttccttcattatgtttcacaaatggttgggaagaatgatgtttttggatgctatgattcatggctctgcatatactagttatacggtagcgaataaaacttgggcaacaagtaaaaaccgattatattggcaattcggggtggcagcactttgtttagctggcacaatggttttcttttcctttgcagtattcaggaagtatttttatgaagcctttctttttcttcatatcgtccttggtgcaatgttcttttatgcatgttgggagcatgttgttagtttaagtggcattgagtggatatacactgctattgcgatttggatcgttgaccggattattagaattatcaaagcttcttattttggtttccccaaagcttccctacaactaatcggggatgatctcattcgtttaacagttaaaaaaccggcaaggccatggagggccaaacctgggcaatatgttttcgtttcgtttttacatccactgtacttctggcagtcacatccatttactgttttggattcagtaagcaagaatggtgaactggttattatcctgaaagaaaaaaagggagtaacaagacttgtcaaaaagtatgtgtgtcgcaatggaggtaagacatctatgagactagctatagaaggtccatatggttcttcatctccggtcaataattacaataatgtattgttactcactggaggtaccggtttgcctggacctattgcacatgcaattaaacttggaaagacgtcagcggctgctggaaaacaatctgtaaaattagtgattgcagttagaggattcgacgtactcgaggcttataagccggagttgatgtgtttagaaaatctgaatgtacagcttcacatctacaacacaatggaagtcccatcattaacccctagtgatagtttagatatttctcaacaggatgagaaggctgatgaaaaaggcactgttgtggcaactactttagaaaagtctgccaatccacttggttttgatggtgttgttttccattgcgggcgaccaaatgttaaggaacttctacatgaagcggctgaattgagtggctcattatctgtggtttgctgtggacctcctatttttgttgacaaagtgaggaatgaaaccgcaaaaatagttttagataagtctgcaaaagccattgagtactttgaagagtatcaatgctggtga

SEQ ID NO: 6440 - DNA, 2136 bp, Artificial Sequence
  Description of Artificial Sequence: Synthetic polynucleotide
atgcattggacgtccatcttgagcgctattttgcttttctgcttatctggagcaagagcatctcctgcaaagacagttattcgtaacaaggtgcccttgcttgtcactaatgcctgcacgaggatttttcaaaaagttacttgggagtataccagcaagtctaagcgttcttctccagtatgttcttacgaaccagcgtttcaatctatgctttattgtatctatgaaacgttggatgaaaaaggttattctaataaaaccttagaaaaaacatttagtaccatcaaaaaaaactgtgcaagttatagtgatgctcttcagaacatgactaattctgagttttatgacgttttgaacaacggaacgaggcatatgacgccctatgtcaaaggcagtgcaaacttaacatatccagttgaaatggatacacagttaagaaaagcctactatcatgcattgcatggtttctatgctaacttagatgtcggaaacatatatggtggcattatatgtgcttattttgtcgctatcatggcttttgcaggcgttcttcattgcatgaattacactccctttaaaactgttttattgaagcaaaagcttgtgggatatgtaaggggatacctcactttacctaccattggaagcaaacatgcgtctgatttctcttattttagaatattcacaggatatttacctacaagattagagggtatcattattcttggatatctcgtgcttcataccgtttttttggcatacggttatgaatacgatcctgaaaatataatattcaagtctcgtagagttcaagttgctcgttatgtggcagacagaagtggtgtactcgcattcgcacactttccattaatagttcttttcgcgggaagaaacaactttctcgagtatatttctggggttaaatatacttccttcattatgtttcacaaatggttgggaagaatgatgtttttggatgctatgattcatggctctgcatatactagttatacggtagcgaataaaacttgggcaacaagtaaaaacagattatattggcaattcggggtggcagcactttgtttagctggcacaatggttttcttttcctttgcagtattcaggaagtatttttatgaagcctttctttttcttcatatcgtccttggtgcaatgttcttttatgcatgttgggagcatgttgttagtttaagtggcattgagtggatatacactgctattgcgatttggatcgttgacagaattattagaattatcaaagcttcttattttggtttccccaaagcttccttacaattgatcggggatgatctcattcgtttaacagttaaaaaaccggcaaggccatggagggccaaacctgggcaatatgttttcgtttcttttttacatccattgtacttctggcagtctcatccatttactgttttggattctgtaagcaagaatggtgaattggttattatcttgaaagaaaaaaagggagtaacaagacttgtcaaaaagtatgtgtgtcgcaatggaggtaagacatctatgagattggctatagaaggtccatatggttcttcttctccggtcaataattacaataatgtattgttactcactggaggtaccggtttgcctggacctattgcacatgcaattaaacttggaaagacgtctgcggctgctggaaaacaatctgtaaaattagtgattgcagttagaggattcgacgtactcgaggcttataagccggagttgatgtgtttagaaaatttgaatgtacagcttcacatctacaacacaatggaagtcccatctttaacccctagtgatagtttagatatttctcaacaggatgagaaggctgatgaaaaaggcactgttgtggcaactactttagaaaagtctgccaatccacttggttttgatggtgttgttttccattgcgggagaccaaatgttaaggaacttttacatgaagcggctgaattgagtggctctttatctgtggtttgctgtggacctcctatttttgttgacaaagtgaggaatgaaaccgcaaaaatagttttagataagtctgcaaaagccattgagtactttgaagagtatcaatgctggtga

SEQ ID NO: 6441 - DNA, 1224 bp, Saccharomyces cerevisiae
atgcaaatagtcagaagttgtaactccaataacaaacccctcataccgtcctcaaattggcatatcgctatcagaatgagaggcgatggggttaaagataggagtatagatgtgttatccctcaaacatttcgaatcccagaaagttgttctgcctcaagaccttttcatggataacttcacctggatgttttatgagttcttcaagtgcttcacgtttcgtacctggttgctattattactgctaatgtggttgccaggttttctttcgcagataaagtccatcaatcggatttttccgtttaaactttgtattttagtctcatgcctagtggggatatttttacccaatatttattcattctctcataaaagtgtgttaacgaatcaacttactcagttctccaaagaaattgttgaacatgcaccaggtactgatactcatgattgggaaacagttgcggcaaatctaaattcttacttctatgaaaataaagcttggaatactgagtacttctttttcaatgctgcagagtgtcaaaaagcattcagaaaagttcttctcgaaccattctctgtgaagaaagatgaatcttcgaaaataaaatcatttggggattctgtcccctacatcgaagaggccttgcaagtctattccacagaatttgacaaaaagtggaagttgttcaatactgagaaagtgtggagccctgataacttggaacatgttcagctccccaagaaaacttatcgttataagtttacctgggttctcaagaggattttcaatctctggctttttccagcatttattctgtttctggcttgtatctatgtgtcatgggataagggccatctatttcgtatcttgtgttgtgggggaggttttctccttatggtaagagtttttcaaaatatgaggcccttttccatgcacatggaagacaaaatgcagttcttgtcaacgattataaatgagcaagaaagtggtgcgaatggatgggacgaaattgcaaagaaaatgaacaggtacttgtttgagaaaaaagtctggactagtgaagagtttttctttgatgggattgactgtgaatggttttttaaccacttcttttaccgccttctatctacaaagaaacctatgtttgatagacctctaaacgtggaactatggccatacattaaagaagcgcaattgacccgcaaacaggcgcctcccgtgtag

SEQ ID NO: 6442 - DNA, 1224 bp, Artificial Sequence
  Description of Artificial Sequence: Synthetic polynucleotide
atgcaaatagtcagaagttgtaactccaataacaaacccctcataccgtcctctaattggcatatcgctatcagaatgagaggcgatggggttaaagataggagtatagatgtgttatccctcaaacatttcgaatcccagaaagttgttttacctcaagaccttttcatggataacttcacctggatgttttatgagttcttcaagtgcttcacgtttcgtacctggttgttattattattattgatgtggttgccaggttttctttctcagataaagtccatcaatagaatttttccgtttaaactttgtattttagtctcttgccttgtggggatatttttacccaatatttattctttctctcataaaagtgtgttaacgaatcaacttactcagttctccaaagaaattgttgaacatgcaccaggtactgatactcatgattgggaaacagttgcggcaaatttgaattcttacttctatgaaaataaagcttggaatactgagtacttctttttcaatgctgcagagtgtcaaaaagcattcagaaaagttcttctcgaaccattctctgtgaagaaagatgaatcttctaaaataaaaagttttggggattctgtcccctacatcgaagaggccttgcaagtctattccacagaatttgacaaaaagtggaagttgttcaatactgagaaagtgtggagccctgataacttggaacatgttcagctccccaagaaaacttatcgttataagtttacctgggttctcaagaggattttcaatctctggctttttccagcatttattttatttttggcttgtatctatgtgtcttgggataagggccatttatttcgtatcttgtgttgtgggggaggttttctccttatggtaagagtttttcaaaatatgaggcccttttccatgcacatggaagacaaaatgcagttcttgagcacgattataaatgagcaagaaagtggtgcgaatggatgggacgaaattgcaaagaaaatgaacaggtacttgtttgagaaaaaagtctggactagtgaagagtttttctttgatgggattgactgtgaatggttttttaaccacttcttttaccgccttttatctacaaagaaacctatgtttgatagacctttgaacgtggaattatggccatacattaaagaagcgcaattgacccgcaaacaggcgcctcccgtgtga

SEQ ID NO: 6443 - DNA, 981 bp, Saccharomyces cerevisiae
atgattgttcccacttatggagacgttttggatgccagcaacagaattaaagaatatgtaaataaaacaccggttctcacttcacgaatgcttaatgatcgacttggagcacaaatatactttaaaggtgagaatttccaacgagtgggagcgttcaagtttcgtggagcaatgaatgctgtttcaaaattaagtgatgaaaaaagaagtaagggagtaattgccttctcatcaggaaaccatgcacaggctattgctcttagtgcaaaactattaaatgtacctgcaacaattgttatgcccgaggatgcgcccgcccttaaagttgctgctacagccggttacggagcacatatcataaggtataacaggtatactgaagatcgcgagcagattgggcgtcaactagcagccgaacatggttttgcattgattccgccctacgatcatcctgatgttattgcagggcaaggtacgtcggcaaaagagctattagaagaggttggacaacttgatgcattatttgttcctttgggcggtggtgggctcctttcaggatctgcacttgccgctagaagcctttctccaggctgcaaaatttttggggttgaacctgaagctggtaacgatggacaacaatccttcagatcgggttccattgttcatatcaatacgccaaaaactatcgcagatggcgctcaaacacaacacctcggtgagtacacatttgccattattcgcgaaaatgtcgatgatattttaacggttagcgaccaagagctagtaaaatgcatgcactttcttgcggaacgcatgaaggtggttgttgagcccacagcttgtttgggatttgcaggtgcacttctaaaaaaggaagagctagttgggaagaaagtaggcataatactaagtggaggtaatgtagacatgaagagatatgctactttaatctctgggaaggaagatggcccaacgatttag

SEQ ID NO: 6444 - DNA, 981 bp, Artificial Sequence
  Description of Artificial Sequence: Synthetic polynucleotide
atgattgttcccacttatggagacgttttggatgccagcaacagaattaaagaatatgtaaataaaacaccggttctcacttctagaatgcttaatgatagacttggagcacaaatatactttaaaggtgagaatttccaaagagtgggagcgttcaagtttcgtggagcaatgaatgctgtttccaaattaagtgatgaaaaaagaagtaagggagtaattgccttctcttctggaaaccatgcacaggctattgctcttagtgcaaaattattaaatgtacctgcaacaattgttatgcccgaggatgcgcccgcccttaaagttgctgctacagccggttacggagcacatatcataaggtataacaggtatactgaagatcgcgagcagattgggcgtcaattggcagccgaacatggttttgcattgattccgccctacgatcatcctgatgttattgcagggcaaggtacgtctgcaaaagagttattagaagaggttggacaacttgatgcattatttgttcctttgggcggtggtgggctcctttctggatctgcacttgccgctagaagcctttctccaggctgcaaaatttttggggttgaacctgaagctggtaacgatggacaacaatccttcagatctggttccattgttcatatcaatacgccaaaaactatcgcagatggcgctcaaacacaacacctcggtgagtacacatttgccattattcgcgaaaatgtcgatgatattttaacggttagcgaccaagagttggtaaaatgcatgcactttcttgcggaacgcatgaaggtggttgttgagcccacagcttgtttgggatttgcaggtgcacttttgaaaaaggaagagttagttgggaagaaagtaggcataatattgagtggaggtaatgtagacatgaagagatatgctactttaatctctgggaaggaagatggcccaacgatttga

SEQ ID NO: 6445 - DNA, 1851 bp, Saccharomyces cerevisiae
atgtcgtcgtcaattacagatgagaaaatatctggtgaacagcaacaacctgctggcagaaaactatactataacacaagtacatttgcagagcctcctctagtggacggagaaggtaaccctataaattatgagccggaagtttacaacccggatcacgaaaagctataccataacccatcactgcctgcacaatcaattcaggatacaagagatgatgaattgctggaaagagtttatagccaggatcaaggtgtagagtatgaggaagatgaagaggataagccaaacctaagcgctgcgtccattaaaagttatgctttaacgagatttacgtccttactgcacatccacgagttttcttgggagaatgtcaatcccatacccgaactgcgcaaaatgacatggcagaattggaactatttttttatgggttattttgcgtggttgtctgcggcttgggccttcttttgcgtttcagtatcagtcgctccattggctgaactatatgacagaccaaccaaggacatcacctgggggttgggattggtgttatttgttcgttcagcaggtgctgtcatatttggtttatggacagataagtcttccagaaagtggccgtacattacatgtttgttcttatttgtcattgcacaactctgtactccatggtgtgacacatacgagaaatttctgggcgtaaggtggataaccggtattgctatgggaggaatttacggatgtgcttctgcaacagcgattgaagatgcacctgtgaaagcacgttcgttcctatcaggtctatttttttctgcttacgctatggggttcatatttgctatcattttttacagagcctttggctactttagggatgatggctggaaaatattgttttggtttagtatttttctaccaattctactaattttctggagattgttatggcctgaaacgaaatacttcaccaaggttttgaaagcccgtaaattaatattgagtgacgcagtgaaagctaatggtggcgagcctctaccaaaagccaactttaaacaaaagatggtatccatgaagagaacagttcaaaagtactggttgttgttcgcatatttggttgttttattggtgggtccaaattacttgactcatgcttctcaagacttgttgccaaccatgctgcgtgcccaattaggcctatccaaggatgctgtcactgtcattgtagtggttaccaacatcggtgctatttgtgggggtatgatatttggacagttcatggaagttactggaagaagattaggcctattgattgcatgcacaatgggtggttgcttcacctaccctgcatttatgttgagaagcgaaaaggctatattaggtgccggtttcatgttatatttttgtgtctttggtgtctggggtatcctgcccattcaccttgcagagttggcccctgctgatgcaagggctttggttgccggtttatcttaccagctaggtaatctagcttctgcagcggcttccacgattgagacacagttagctgatagatacccattagaaagagatgcctctggtgctgtgattaaagaagattatgccaaagttatggctatcttgactggttctgttttcatcttcacatttgcttgtgtttttgttggccatgagaaattccatcgtgatttgtcctctcctgttatgaagaaatatataaaccaagtggaagaatacgaagccgatggtctttcgattagtgacattgttgaacaaaagacggaatgtgcttcagtgaagatgattgattcgaacgtctcaaagacatatgaggagcatattgagaccgtttaa

SEQ ID NO: 6446 - DNA, 1851 bp, Artificial Sequence
  Description of Artificial Sequence: Synthetic polynucleotide
atgtcttcttccattacagatgagaaaatatctggtgaacagcaacaacctgctggcagaaaactttactataacacaagtacatttgcagagcctcctttagtggacggagaaggtaaccctataaattatgagccggaagtttacaacccggatcacgaaaagttgtaccataacccatctttgcctgcacaatctattcaggatacaagagatgatgaattgttggaaagagtttatagccaggatcaaggtgtagagtatgaggaagatgaagaggataagccaaacttgagcgctgcgtccattaaaagttatgctttaacgagatttacgtccttattacacatccacgagttttcttgggagaatgtcaatcccatacccgaattacgcaaaatgacatggcagaattggaactatttttttatgggttattttgcgtggttgtctgcggcttgggccttcttttgcgtttctgtaagtgtcgctccattggctgaattgtatgacagaccaaccaaggacatcacctgggggttgggattggtgttatttgttcgttctgcaggtgctgtcatatttggtttatggacagataagtcttccagaaagtggccgtacattacatgtttgttcttatttgtcattgcacaactctgtactccatggtgtgacacatacgagaaatttttgggcgtaaggtggataaccggtattgctatgggaggaatttacggatgtgcttctgcaacagcgattgaagatgcacctgtgaaagcacgttctttcttatctggtttatttttttctgcttacgctatggggttcatatttgctatcattttttacagagcctttggctactttagggatgatggctggaaaatattgttttggtttagtatttttttaccaattttattgattttctggagattgttatggcctgaaacgaaatacttcaccaaggttttgaaagcccgtaaattaatattgagtgacgcagtgaaagctaatggtggcgagcctttaccaaaagccaactttaaacaaaagatggtatccatgaagagaacagttcaaaagtactggttgttgttcgcatatttggttgttttattggtgggtccaaattacttgactcatgcttctcaagacttgttgccaaccatgcttcgtgcccaattaggcttatccaaggatgctgtcactgtcattgtagtggttaccaacatcggtgctatttgtgggggtatgatatttggacagttcatggaagttactggaagaagattaggccttttgattgcatgcacaatgggtggttgcttcacctaccctgcatttatgttgagaagcgaaaaggctatattaggtgccggtttcatgttatatttttgtgtctttggtgtctggggtatcttgcccattcaccttgcagagttggcccctgctgatgcaagggctttggttgccggtttatcttaccagttgggtaatttggcttctgcagcggcttccacgattgagacacagttagctgatagatacccattagaaagagatgcctctggtgctgtgattaaagaagattatgccaaagttatggctatcttgactggttctgttttcatcttcacatttgcttgtgtttttgttggccatgagaaattccatcgtgatttgtcctctcctgttatgaagaaatatataaaccaagtggaagaatacgaagccgatggtctttctattagtgacattgttgaacaaaagacggaatgtgcttctgtgaagatgattgattccaacgtctccaagacatatgaggagcatattgagaccgtttga

SEQ ID NO: 6447 - DNA, 945 bp, Saccharomyces cerevisiae
atgacagccagtttaactaccaagttcttgaacaatacctatgaaaacccatttatgaatgcatccggtgttcattgcatgactacacaagaattagatgaattagcaaactctaaagctggcgcattcattacaaagagtgctacaaccttagaaagagaaggtaaccctgaaccacgttacatttctgtccctctaggcagtatcaactccatgggtttaccaaacgaaggtatcgactactatttgtcctatgtattaaaccgtcaaaagaattatcctgatgcacctgctattttcttctcagttgctggtatgagcattgatgaaaatttaaatttgttgaggaaaatccaagatagcgaattcaacggtattaccgagttaaacttgtcttgtcctaatgtgcctgggaaaccacaagttgcttatgactttgacttgacaaaggaaaccttggaaaaggtttttgcctttttcaaaaaacctcttggtgtcaagttgcctccttattttgattttgcccattttgatatcatggcaaaaatattgaacgagttcccattagcttatgtcaactctatcaatagtataggaaatggtcttttcattgatgtggagaaggagagtgtagtagtgaagccaaagaatggtttcgggggtattggaggtgaatatgttaagccaaccgcgctcgccaatgttcgtgcattttacactcgtttgagacctgaaatcaaagttatcggtacaggtggaattaagtccggtaaggatgcatttgaacatcttctatgtggtgcctctatgctacagattggtacagaattacaaaaagagggcgtcaagatttttgaacgtatcgaaaaagaattaaaagacataatggaagctaagggttatacatccatagatcagttccgtgggaagttgaacagcatttaa

SEQ ID NO: 6448 - DNA, 945 bp, Artificial Sequence
  Description of Artificial Sequence: Synthetic polynucleotide
atgacagccagtttaactaccaagttcttgaacaatacctatgaaaacccatttatgaatgcatccggtgttcattgcatgactacacaagaattagatgaattagcaaactctaaagctggcgcattcattacaaagagtgctacaaccttagaaagagaaggtaaccctgaaccacgttacatttctgtccctttgggcagtatcaactccatgggtttaccaaacgaaggtatcgactactatttgtcctatgtattaaaccgtcaaaagaattatcctgatgcacctgctattttcttctctgttgctggtatgagcattgatgaaaatttaaatttgttgaggaaaatccaagatagcgaattcaacggtattaccgagttaaacttgtcttgtcctaatgtgcctgggaaaccacaagttgcttatgactttgacttgacaaaggaaaccttggaaaaggtttttgcctttttcaaaaaacctcttggtgtcaagttgcctccttattttgattttgcccattttgatatcatggcaaaaatattgaacgagttcccattagcttatgtcaactctatcaatagtataggaaatggtcttttcattgatgtggagaaggagagtgtagtagtgaagccaaagaatggtttcgggggtattggaggtgaatatgttaagccaaccgcgctcgccaatgttcgtgcattttacactcgtttgagacctgaaatcaaagttatcggtacaggtggaattaagtccggtaaggatgcatttgaacatcttttatgtggtgcctctatgttacagattggtacagaattacaaaaagagggcgtcaagatttttgaacgtatcgaaaaagaattaaaagacataatggaagctaagggttatacatccatagatcagttccgtgggaagttgaacagcatttga

SEQ ID NO: 6449 - DNA, 3861 bp, Saccharomyces cerevisiae
atgcagaaaggaaacataagaattgccatcgataagggtggaactttcactgattgtgtggggaatattggtacaggtaaacaagaacatgatactgtcatcaagctcttgtcggtggatcccaaaaactatccagatgctccccttgaaggcataagacgtctcttggaggtgcttgaacacaagacaattcctcgcggtattcctctagacatctctaatgtgagaagtttaagaatggggacaaccctagctacaaactgcgctctagaaagaaatggtgaacgttgtgccttcattactacgaaaggctttaaggattcattgctgattggagaccaaaccaggccagatatcttcaacttaaatataaaaaaggtagtgccattatatgacactgtagttgaaatagatgagagagttactttagaagatttctcggaagacccttattttaccaaatcgtctcctaatgaacaagaaggtatcctggaaggtaatagtggcgaaatggtaagggtcataaagaagccagatgaatcaagcgtaagatctattctgaaagtgctttatgctagcggaatcaagtctattgcgatagcatttttacactcatacacttttccagaccatgagcgaattgttggtaatattgccagggagattgggttttctcatgtttcattatcatctgaagtctctccaatgataaaatttttaccgagggctcacagttctgtcgcagatgcctaccttactccggtaattaaaaagtacttgaatagcatttctgcaggtttgagccacgcagaagatacccacattcaattcatgcagtctgatggtggtttagtggatgggggaaaattttccggtttgaaatctattttatctggtcctgcaggtggcgtaataggttattctagtacatgctatgataaaaataataacatacccttaataggctttgacatgggaggaacatctactgatgtcagtaggtacggcgatgggaggttagaacatgtttttgaaactgttaccgcagggatcatcatacaatctcctcaacttgacatccatactgttgctgctggaggaagttctattttgtcatggaaaaacgggttattcagagtaggccctgattcagcagctgctgatccaggccctgcagcctacagaaagggcgggcctttgaccattacagacgccaacctctttttaggacgtttggttcctgagttcttccccaaaatttttgggcccaatgaggatgaatcacttgacttagaaaccactactttgaaattcagagaattaacagatgtcatcaataaggatctgaattcaaatctaaccatggaagaggttgcctatggatttatcaaagtagctaacgaatgcatggcaagacctgtgagggccattacagaagcaaaaggacatgtagtatctcagcatcggttagtttcctttggcggggctggcgggcaacacgccatagcggttgcagattcattgggcattgacactgttttaattcatagatattcttctatcttgtccgcttatggcattttcttagcagatgttattgaagaaaaccaagagccttgctcttttatcttgggtgagccagagaccatcttgaaagtgaaaaaaagattcttagaactttctaaaaattcaatcaaaaaccttttatctcagtcgttttctcgggaggacatagtcttggaaagatatttaaatctcagatatgaaggtactgaaaccagtttgatgatattacaaaaatatgatgaccaatggaattttagggaatggttctctgaagctcataaaaaagagttcggattctcattcgatgacaaacgaattataattgatgatataaggataagagcaattgggaaatcaggcgttagaaaagaaaaaacggttgatgagcaattgattgaaatttcccatttcaagaaagccgacgtgtcaaaggatgctagttttacccagaaagcatattttgacaacaaatgggtcgacactgcggtcttcaaaattgatgatcttcctgccggaacaattatcgagggcccagccatattggctgacggtacccaaacaaatattattttaccaaacagccaagcaacaattttaaactctcatatatttatcaagatcaaccaaaaggctgcgaagacattatctaaaagcggatatgaacttgatatagatccaatcttattgtctattttcagtcataggtttatggatatcgccctccagatgggtactcaattgaggaaaacttctgtttcaactaacgtcaaagagagattagatttttcatgtgcactattcgactctaaaggaaacttagtcgctaacgctcctcatgtacctgttcacttaggatcaatgtcaacctgcatatcagcacaggcgaagttatgggaaggcaaattaaagcctggtgatgttttaatcacaaaccatccggatattggtggtactcatttaccagacataacagtaataactccttctttctcttcaactggcgaattgatattttatgtggcttcaagagcccatcatgcagatattggaggtattctacccggttcagtgcctccaaattccaaagaattgtacgaagaaggaaccgcaatttattccgaattggttgtcaaagagggaattttccaggaagaattaatttacaagcttttcgtagaagatccaggcaaatacccaggctgctcaggttcaagaagatttagtgataacataagcgatttaaaagcgcaagtcgcagctaacacaaaagggatacagttaattgggtcattaactaaggaatatgatctggctacaatattgaaatacatggctgcaattcagacaaatgcatctgaatccataaaaaaaatgcttgcaaaaatggttgaacattttggcacaacgaagttttctggcgaagatcgcttagatgatggaagcttaattaaactacaagttatcataagacctgaaaaagaggagtatatttttaatttcgatggcacttctccccaagtttatggtaatttaaatgcaccagaggctattactaattctgcgattctttattgtctacggtgtctagtaggcgaagatattcctttaaatcaaggttgtttaaaacccttaacaataaaaattcctgctggttccctcttgagcccccgatccggtgctgctgttgtcggaggcaatgtattaacttcccaaagagtgacagatgtaatcttaaaaacatttaacgtcatggcagattctcaaggtgactgtaacaactttacatttggaactggaggaaattctggtaacaaaaccgataagcagatcaaaggctttggatattatgaaaccatatgtggcggctcgggggctggtgcagattcatggagaggaagtggttggaatggctcagacgctgtacacacgaatatgaccaatacaagaatgacagatactgaggtatttgaaaggagataccccgttctgttgaaagagttctcgatcagaagaggttcaggaggcaaaggtaaatatactggcggaaatggcgtagtaagggatgttcaatttcggaaggctgtaacagcatctatattatcagaacgtcgtgtcattggccctcatggtataaagggaggacaagacggtagtagaggtgagaatttatgggtaagacatagcacaggcgcattaatcaatgtcggcggtaaaaatacgatttacgctcaacccggtgatcgattcatcattaaaacccctggtggtgggggatttggacaatacaaggattaa

SEQ ID NO: 6450 - DNA, 3861 bp, Artificial Sequence
  Description of Artificial Sequence: Synthetic polynucleotide
atgcagaaaggaaacataagaattgccatcgataagggtggaactttcactgattgtgtggggaatattggtacaggtaaacaagaacatgatactgtcatcaagctcttgtctgtggatcccaaaaactatccagatgctccccttgaaggcataagacgtctcttggaggtgcttgaacacaagacaattcctcgcggtattcctttggacatctctaatgtgagaagtttaagaatggggacaaccttggctacaaactgcgctttggaaagaaatggtgaacgttgtgccttcattactacgaaaggctttaaggattctttgttaattggagaccaaaccaggccagatatcttcaacttaaatataaaaaaggtagtgccattatatgacactgtagttgaaatagatgagagagttactttagaagatttctctgaagacccttattttaccaaatcttctcctaatgaacaagaaggtatcttggaaggtaatagtggcgaaatggtaagggtcataaagaagccagatgaaagtagcgtaagatctattttgaaagtgctttatgctagcggaatcaagtctattgcgatagcatttttacactcttacacttttccagaccatgagagaattgttggtaatattgccagggagattgggttttctcatgtttctttatcttctgaagtctctccaatgataaaatttttaccgagggctcacagttctgtcgcagatgcctaccttactccggtaattaaaaagtacttgaatagcatttctgcaggtttgagccacgcagaagatacccacattcaattcatgcagtctgatggtggtttagtggatgggggaaaattttccggtttgaaatctattttatctggtcctgcaggtggcgtaataggttattctagtacatgctatgataaaaataataacatacccttaataggctttgacatgggaggaacatctactgatgtcagtaggtacggcgatgggaggttagaacatgtttttgaaactgttaccgcagggatcatcatacaatctcctcaacttgacatccatactgttgctgctggaggaagttctattttgtcctggaaaaacgggttattcagagtaggccctgattctgcagctgctgatccaggccctgcagcctacagaaagggcgggcctttgaccattacagacgccaacctctttttaggacgtttggttcctgagttcttccccaaaatttttgggcccaatgaggatgaatctcttgacttagaaaccactactttgaaattcagagaattaacagatgtcatcaataaggatttgaatagtaatttgaccatggaagaggttgcctatggatttatcaaagtagctaacgaatgcatggcaagacctgtgagggccattacagaagcaaaaggacatgtagtatctcagcatagattagtttcctttggcggggctggcgggcaacacgccatagcggttgcagattctttgggcattgacactgttttaattcatagatattcttctatcttgtccgcttatggcattttcttagcagatgttattgaagaaaaccaagagccttgctcttttatcttgggtgagccagagaccatcttgaaagtgaaaaaaagattcttagaactttctaaaaattccatcaaaaaccttttatctcagtctttttctagagaggacatagtcttggaaagatatttaaatctcagatatgaaggtactgaaaccagtttgatgatattacaaaaatatgatgaccaatggaattttagggaatggttctctgaagctcataaaaaagagttcggattcagtttcgatgacaaaagaattataattgatgatataaggataagagcaattgggaaatctggcgttagaaaagaaaaaacggttgatgagcaattgattgaaatttcccatttcaagaaagccgacgtgagcaaggatgctagttttacccagaaagcatattttgacaacaaatgggtcgacactgcggtcttcaaaattgatgatcttcctgccggaacaattatcgagggcccagccatattggctgacggtacccaaacaaatattattttaccaaacagccaagcaacaattttaaactctcatatatttatcaagatcaaccaaaaggctgcgaagacattatctaaaagcggatatgaacttgatatagatccaatcttattgtctattttcagtcataggtttatggatatcgccctccagatgggtactcaattgaggaaaacttctgtttccactaacgtcaaagagagattagatttttcttgtgcattattcgactctaaaggaaacttagtcgctaacgctcctcatgtacctgttcacttaggatccatgtctacctgcatatctgcacaggcgaagttatgggaaggcaaattaaagcctggtgatgttttaatcacaaaccatccggatattggtggtactcatttaccagacataacagtaataactccttctttctcttctactggcgaattgatattttatgtggcttccagagcccatcatgcagatattggaggtattttgcccggttctgtgcctccaaattccaaagaattgtacgaagaaggaaccgcaatttattccgaattggttgtcaaagagggaattttccaggaagaattaatttacaagcttttcgtagaagatccaggcaaatacccaggctgctctggttccagaagatttagtgataacataagcgatttaaaagcgcaagtcgcagctaacacaaaagggatacagttaattgggtctttaactaaggaatatgatttggctacaatattgaaatacatggctgcaattcagacaaatgcatctgaatccataaaaaaaatgcttgcaaaaatggttgaacattttggcacaacgaagttttctggcgaagatcgcttagatgatggaagcttaattaaattacaagttatcataagacctgaaaaagaggagtatatttttaatttcgatggcacttctccccaagtttatggtaatttaaatgcaccagaggctattactaattctgcgattctttattgtttgagatgtttggtaggcgaagatattcctttaaatcaaggttgtttaaaacccttaacaataaaaattcctgctggttccctcttgagccccagatccggtgctgctgttgtcggaggcaatgtattaacttcccaaagagtgacagatgtaatcttaaaaacatttaacgtcatggcagattctcaaggtgactgtaacaactttacatttggaactggaggaaattctggtaacaaaaccgataagcagatcaaaggctttggatattatgaaaccatatgtggcggctctggggctggtgcagattcttggagaggaagtggttggaatggctctgacgctgtacacacgaatatgaccaatacaagaatgacagatactgaggtatttgaaaggagataccccgttttattgaaagagttctccatcagaagaggttctggaggcaaaggtaaatatactggcggaaatggcgtagtaagggatgttcaatttagaaaggctgtaacagcatctatattatctgaacgtcgtgtcattggccctcatggtataaagggaggacaagacggtagtagaggtgagaatttatgggtaagacatagcacaggcgcattaatcaatgtcggcggtaaaaatacgatttacgctcaacccggtgatagattcatcattaaaacccctggtggtgggggatttggacaatacaaggattga

SEQ ID NO: 6451 - DNA, 612 bp, Saccharomyces cerevisiae
atggacaaagcatttgacgaaattattggaaatagtcacacagacagctcatctaatcataaggtaacgagataccgcagaagggatttaagaaatgaattaggacctagactgggatttgcgccttcggatgctgcatcaaggtcgaaagatcgcctttatagagagagggaagagcctcctttgcctaagagaattagaatatccaaaatcccactagacgtttctgactacaccctcgatgatatgattaaagagtttggctcgccaatattttcgaaaatttttgacaataaagaggatcgtacatgtatttacgaatttgaagacccagaagttttggaaaagattgtcgagcgttataatggacatgagttacataatgcaaaaattgaagtggagatttaccaaccacagagaaagcattctagaatgaatgcccacaaccgtcgcaaacagacggctcaagaacacggaagaggcaggccagggagccattatcgccaaaagcctaacagagtctccaaaaagaacaagggccgtgagaagaataacactcctacttctgtcgaagctcttgacgctgaattagatgcttacatgaaaggttaa

SEQ ID NO: 6452 - DNA, 612 bp, Artificial Sequence
  Description of Artificial Sequence: Synthetic polynucleotide
atggacaaagcatttgacgaaattattggaaatagtcacacagacagctcttctaatcataaggtaacgagataccgcagaagggatttaagaaatgaattaggacctagattaggatttgcgccttctgatgctgcaagcaggtccaaagatcgcctttatagagagagggaagagcctcctttgcctaagagaattagaatatccaaaatcccattggacgtttctgactacaccctcgatgatatgattaaagagtttggctctccaatattttccaaaatttttgacaataaagaggatcgtacatgtatttacgaatttgaagacccagaagttttggaaaagattgtcgagcgttataatggacatgagttacataatgcaaaaattgaagtggagatttaccaaccacagagaaagcattctagaatgaatgcccacaaccgtcgcaaacagacggctcaagaacacggaagaggcaggccagggagccattatcgccaaaagcctaacagagtctccaaaaagaacaagggccgtgagaagaataacactcctacttctgtcgaagctcttgacgctgaattagatgcttacatgaaaggttga

SEQ ID NO: 6453 - DNA, 2148 bp, Saccharomyces cerevisiae
atgggatatcaattgagtgcaacacttaaagggcacgatcaggacgtcagggatgtggtagctgtggatgattcaaaggttgctagtgtttcgagggatggaacagttcgcttgtggtctaaagatgaccaatggctcggtacggtagtttatacaggacaaggatttttaaatagtgtgtgttatgattccgagaaggagttgttgctttttggaggtaaggatactatgatcaacggtgtgcccttgtttgccacctcaggagaggatcccttgtataccttgattggccaccaagggaacgtttgtagtttatccttccaagatggtgttgtgataagcggtagttgggacaaaaccgcaaaggtttggaaagaaggatcgttggtttacaatttgcaagcacacaatgcctctgtatgggatgccaaagtcgtatccttctcagaaaataaattcttgacagcttccgccgataagacgattaaactgtggcaaaacgataaagtgatcaaaactttcagtgggattcacaatgatgtagtaagacatttagctgtggtggatgatggccattttatcagttgttcaaacgatggcctcatcaagttggttgatatgcatacaggtgacgtactaagaacatatgaaggccatgaaagctttgtttattgcattaaactgctgcccaatggagatattgtaagctgcggcgaagaccgaacagtccgtatatggtcaaaggaaaatggttcgttaaagcaggtaattacacttcctgccatctctatttggtccgttgattgtatgtctaatggtgatattattgtgggaagtagtgataatcttgtgagaatattttcgcaagagaagtcaagatgggcttccgaggatgaaataaatgaactatctacgcaagtggaaaaatccactataagttccaagacaatagaatttgatgagtctaaactatcaccttatgaaattttacaatcgccggggcgcaaagagggtcaaattgtggtagtcaaatcacctcaaggtactatagaagctcatcaattttcaaattcttcatggaaaaaggttggtgatgttgtcggtgcaggtgctactggaaacgacaaaaaaatagaattcgagggtaaaacgtatgactacgtatttgatgtggatattgaagatggaaaacctcccttgaaattgccgattaatgtcagcgacaacccatatacagcagccgacaattttttggctcgttatgaactgccaatgagttatagggatcaagtagtacagttcatactgaagaacactaatggcatatcgctagaccagcccaacgataatgcatcatcttctgcagtatcaccttcaaaaacgagcgtaatgaaggttcttcctgtcaagcagtatcttatcatggaaaattataacccagatactattttcaatggaatagtaaaaataaattcaaatgagaagacctttgatgatgaaattctggcgcaaattggtggcgcactacatgacatagatgaaagctgggagttgctactttcatttgctaacactataagatctaactgggaaattaagactcctgcatacgacatagtacgattgattgtaaaaaaattaccttattcttcagatataaaagattacatcgaagaaggcttgggcaataagaatatcactctaaccatgttaactgtgcgtattttggtaaattgcttcaataatgaaaactggggtgtgaaattactggaatcaaatcaagtttataaatcaatttttgagactatagatactgaattttctcaggcatctgctaaacagtcacagaatttggctattgcagtttccacactaattttcaactattcagctctcgtcacgaaagggaactctgatttagaacttttgcctatcgtagctgacgccatcaacaccaagtatgggccattggaagagtatcaagaatgcgaagaagccgcatataggctaaccgtagcttacggaaatttggctactgttgaacctacattaagacaatttgccaactccgtaacttggcttgcaaacatcaaaaggagctatgggaacgtgccaaggtttaaggatattttcgacgatctctcctaa

SEQ ID NO: 6454 - DNA, 2148 bp, Artificial Sequence
  Description of Artificial Sequence: Synthetic polynucleotide
atgggatatcaattgagtgcaacacttaaagggcacgatcaggacgtcagggatgtggtagctgtggatgattctaaggttgctagtgtttccagggatggaacagttcgcttgtggtctaaagatgaccaatggctcggtacggtagtttatacaggacaaggatttttaaatagtgtgtgttatgattccgagaaggagttgttgctttttggaggtaaggatactatgatcaacggtgtgcccttgtttgccacctctggagaggatcccttgtataccttgattggccaccaagggaacgtttgtagtttatccttccaagatggtgttgtgataagcggtagttgggacaaaaccgcaaaggtttggaaagaaggatctttggtttacaatttgcaagcacacaatgcctctgtatgggatgccaaagtcgtatccttctctgaaaataaattcttgacagcttccgccgataagacgattaaattatggcaaaacgataaagtgatcaaaactttcagtgggattcacaatgatgtagtaagacatttagctgtggtggatgatggccattttatcagttgttctaacgatggcctcatcaagttggttgatatgcatacaggtgacgtattaagaacatatgaaggccatgaaagctttgtttattgcattaaattattgcccaatggagatattgtaagctgcggcgaagacagaacagtccgtatatggtccaaggaaaatggttctttaaagcaggtaattacacttcctgccatctctatttggtccgttgattgtatgtctaatggtgatattattgtgggaagtagtgataatcttgtgagaatattttctcaagagaagtctagatgggcttccgaggatgaaataaatgaattatctacgcaagtggaaaaatccactataagttccaagacaatagaatttgatgagtctaaattatctccttatgaaattttacaatctccggggcgcaaagagggtcaaattgtggtagtcaaatctcctcaaggtactatagaagctcatcaattttctaattcttcttggaaaaaggttggtgatgttgtcggtgcaggtgctactggaaacgacaaaaaaatagaattcgagggtaaaacgtatgactacgtatttgatgtggatattgaagatggaaaacctcccttgaaattgccgattaatgtcagcgacaacccatatacagcagccgacaattttttggctcgttatgaattaccaatgagttatagggatcaagtagtacagttcatattgaagaacactaatggcatatctttggaccagcccaacgataatgcatcttcttctgcagtatctccttccaaaacgagcgtaatgaaggttcttcctgtcaagcagtatcttatcatggaaaattataacccagatactattttcaatggaatagtaaaaataaatagtaatgagaagacctttgatgatgaaattttggcgcaaattggtggcgcattgcatgacatagatgaaagctgggagttgttactttcttttgctaacactataagatctaactgggaaattaagactcctgcatacgacatagtaagattgattgtaaaaaaattaccttattcttctgatataaaagattacatcgaagaaggcttgggcaataagaatatcactttgaccatgttaactgtgcgtattttggtaaattgcttcaataatgaaaactggggtgtgaaattattggaaagtaatcaagtttataaatccatttttgagactatagatactgaattttctcaggcatctgctaaacagtctcagaatttggctattgcagtttccacattaattttcaactattctgctctcgtcacgaaagggaactctgatttagaacttttgcctatcgtagctgacgccatcaacaccaagtatgggccattggaagagtatcaagaatgcgaagaagccgcatataggttgaccgtagcttacggaaatttggctactgttgaacctacattaagacaatttgccaactccgtaacttggcttgcaaacatcaaaaggagctatgggaacgtgccaaggtttaaggatattttcgacgatctctcctga

SEQ ID NO: 6455 - DNA, 1872 bp, Saccharomyces cerevisiae
atgacaggtccaatagtgtacgttcaaaatgcggacggtatcttcttcaagcttgctgagggcaaaggaactaacgatgctgttattcacttggccaatcaagatcaaggtgttcgggtccttggagcagaggaatttcctgtgcaaggtgaagtagtaaagattgcgtccttgatggggttcattaagctaaagttgaacaggtatgccattatcgcaaatactgtggaagagaccggtagattcaatggccacgttttctatagagtgttgcaacattctatcgtatctaccaagtttaactcgagaatcgattctgaagaagccgaatatatcaagctactggagttgcatttgaaaaattccaccttttatttttcatacacatatgatttaacaaattccttacaaagaaatgaaaaggttggtcctgcagcctcctggaaaaccgctgatgaacgattcttttggaaccattacttaactgaagatttgagaaactttgctcatcaagatcctagaattgactcctttatacaacctgttatctatgggtatgccaagacagtggacgccgttttgaatgccacccctatcgttcttggtttgattaccagacgtagtatatttagggcgggcacaagatacttccgtcgtggtgttgacaaagacggtaacgttggcaatttcaatgaaactgagcaaattttactcgctgagaatccagagagtgaaaaaatacacgttttctccttcttacagacaagaggatctgtgccaatatactgggctgaaatcaacaacttgaagtacaagccaaatcttgttcttggagaaaactcattagatgcgacaaaaaagcattttgaccagcaaaaggagttatatggcgacaactacttggttaacctagtcaaccaaaagggccacgaactacccgtgaaagagggctatgaatcagtcgtgcacgcgctaaacgatccgaagattcactacgtgtattttgacttccaccatgaatgtcgtaagatgcaatggcatagagtgaaattgttaattgatcacctggagaaattaggtttatctaacgaagatttcttccacaaggtcatagactctaatggtaacaccgttgaaattgttaatgagcaacattccgttgtaagaacaaactgtatggattgtttggacagaacaaatgtcgttcaatctgttttagcccagtgggttttgcaaaaggagtttgaaagtgccgatgtcgttgctactggaagcacttgggaagacaacgctccattgttaacttcttaccaaaacttatgggctgataatgcagatgcagttagtgtggcatattcgggcactggagctttgaagaccgatttcacaagaaccggtaagcgtacacgtctaggtgcattcaacgattttttgaattcagcatcacgttattaccagaacaattggactgatggtccaagacaggattcatacgatttattccttggtggatttagaccacataccgcttctatcaagtcgccattccccgacagaagaccagtgtatattcagctgatcccaatgatcatttgcgcagccttgaccgttttaggtgctacgatattttttcctaaagatagatttaccagcagtaagaatttgctgtattttgcaggtgcgtcgattgtcttggcgctttcaaccaaattcatgtttaagaacggtattcagtttgtcaactggcctaagttagtagacgttgggttcttggtcgttcatcaaacgcatgataaagaacaacaattcaaaggtttgaaatatgcacagagtcctaaattttccaagccggatcctttaaaaagagattaa

SEQ ID NO: 6456 - DNA, 1872 bp, Artificial Sequence
  Description of Artificial Sequence: Synthetic polynucleotide
atgacaggtccaatagtgtacgttcaaaatgcggacggtatcttcttcaagcttgctgagggcaaaggaactaacgatgctgttattcacttggccaatcaagatcaaggtgttagagtccttggagcagaggaatttcctgtgcaaggtgaagtagtaaagattgcgtccttgatggggttcattaagttgaagttgaacaggtatgccattatcgcaaatactgtggaagagaccggtagattcaatggccacgttttctatagagtgttgcaacattctatcgtatctaccaagtttaactctagaatcgattctgaagaagccgaatatatcaagttattggagttgcatttgaaaaattccaccttttatttttcttacacatatgatttaacaaattccttacaaagaaatgaaaaggttggtcctgcagcctcctggaaaaccgctgatgaaagattcttttggaaccattacttaactgaagatttgagaaactttgctcatcaagatcctagaattgactcctttatacaacctgttatctatgggtatgccaagacagtggacgccgttttgaatgccacccctatcgttcttggtttgattaccagacgtagtatatttagggcgggcacaagatacttccgtcgtggtgttgacaaagacggtaacgttggcaatttcaatgaaactgagcaaattttactcgctgagaatccagagagtgaaaaaatacacgttttctccttcttacagacaagaggatctgtgccaatatactgggctgaaatcaacaacttgaagtacaagccaaatcttgttcttggagaaaactctttagatgcgacaaaaaagcattttgaccagcaaaaggagttatatggcgacaactacttggttaacttggtcaaccaaaagggccacgaattgcccgtgaaagagggctatgaatctgtcgtgcacgcgttgaacgatccgaagattcactacgtgtattttgacttccaccatgaatgtcgtaagatgcaatggcatagagtgaaattgttaattgatcacttagagaaattaggtttatctaacgaagatttcttccacaaggtcatagactctaatggtaacaccgttgaaattgttaatgagcaacattccgttgtaagaacaaactgtatggattgtttggacagaacaaatgtcgttcaatctgttttagcccagtgggttttgcaaaaggagtttgaaagtgccgatgtcgttgctactggaagcacttgggaagacaacgctccattgttaacttcttaccaaaacttatgggctgataatgcagatgcagttagtgtggcatattctggcactggagctttgaagaccgatttcacaagaaccggtaagcgtacacgtttgggtgcattcaacgattttttgaattctgcatctcgttattaccagaacaattggactgatggtccaagacaggattcttacgatttattccttggtggatttagaccacataccgcttctatcaagtctccattccccgacagaagaccagtgtatattcagttaatcccaatgatcatttgcgcagccttgaccgttttaggtgctacgatattttttcctaaagatagatttaccagcagtaagaatttgttatattttgcaggtgcgtccattgtcttggcgctttctaccaaattcatgtttaagaacggtattcagtttgtcaactggcctaagttagtagacgttgggttcttggtcgttcatcaaacgcatgataaagaacaacaattcaaaggtttgaaatatgcacagagtcctaaattttccaagccggatcctttaaaaagagattga

SEQ ID NO: 6457 - DNA, 1455 bp, Saccharomyces cerevisiae
atgtctgtgcacgctgcaacaaacccaatcaataagcatgtggttctaattgacaactacgattcctttacctggaacgtttacgagtacttgtgccaggagggcgccaaagtgagcgtctaccgtaacgatgcaattacagttccagaaattgccgccttgaatcccgacacattgcttatctcgcctggaccaggccacccaaagacagattctggcatttcaagagactgtatccggtactttactgggaaaattcctgtatttggaatctgtatgggccagcaatgcatgtttgacgtatttggtggtgaagttgcctacgctggtgagattgtccacggtaaaacgtccccaatctctcacgacaactgtggaattttcaagaacgtgccgcaaggtattgctgtgacaagataccattcattggccgggacagaatcgtccctaccatcctgcttgaaggttactgcgagtaccgaaaatggaattatcatgggtgtaagacacaagaagtacactgtagaaggtgtgcaatttcatccggaatccatcttgaccgaggaaggtcatctgatgatcaggaacattttaaacgtcagtggaggcacttgggaggaaaacaaatcatctccttcaaattctattttggaccgtatctatgctcggcgtaaaatagacgtcaatgagcagtctaaaatcccaggtttcacctttcaagacttacaatctaactatgatttaggtcttgccccaccgttacaggatttctacacggtgttgtcatcatcccataaaagagccgttgttcttgctgaagtcaagcgtgcctctccatcgaagggacccatttgtttaaaagctgttgctgctgaacaggctctcaaatacgcagaggctggtgcatccgcaatttccgtattgaccgaacctcattggtttcacggttcgttacaggatttagtaaatgtgaggaaaatcctagatttgaaatttcctcccaaggagaggccttgtgttttgagaaaagaatttattttcagcaagtatcaaatactagaagcaagattagctggagctgacactgtccttcttatagtcaagatgctatctcaacccttattgaaggaactgtacagctacagtaaagatttgaacatggaacctctcgttgaggtgaactccaaagaggaattacaaagggctctagaaattggtgctaaagttgtaggtgtcaataatagggacctgcattcattcaacgtagacctaaataccaccagtaacttggtagaatctattccaaaggatgttcttctaattgctctatcgggaattaccaccagggacgatgctgaaaaatacaaaaaagaaggtgtccatggatttttagtgggtgaagccctaatgaaatcaaccgatgtgaagaagttcattcatgaattatgcgaataa

SEQ ID NO: 6458 - DNA, 1455 bp, Artificial Sequence
  Description of Artificial Sequence: Synthetic polynucleotide
atgtctgtgcacgctgcaacaaacccaatcaataagcatgtggttttgattgacaactacgattcctttacctggaacgtttacgagtacttgtgccaggagggcgccaaagtgagcgtctaccgtaacgatgcaattacagttccagaaattgccgccttgaatcccgacacattgcttatctctcctggaccaggccacccaaagacagattctggcatttctagagactgtatcagatactttactgggaaaattcctgtatttggaatctgtatgggccagcaatgcatgtttgacgtatttggtggtgaagttgcctacgctggtgagattgtccacggtaaaacgtccccaatctctcacgacaactgtggaattttcaagaacgtgccgcaaggtattgctgtgacaagataccattctttggccgggacagaatcttccttgccatcctgcttgaaggttactgcgagtaccgaaaatggaattatcatgggtgtaagacacaagaagtacactgtagaaggtgtgcaatttcatccggaatccatcttgaccgaggaaggtcatttaatgatcaggaacattttaaacgtcagtggaggcacttgggaggaaaacaaatcttctccttccaattctattttggaccgtatctatgctcgtcgtaaaatagacgtcaatgagcagtctaaaatcccaggtttcacctttcaagacttacaatctaactatgatttaggtcttgccccaccgttacaggatttctacacggtgttgagttcttcccataaaagagccgttgttcttgctgaagtcaagcgtgcctctccatctaagggacccatttgtttaaaagctgttgctgctgaacaggctctcaaatacgcagaggctggtgcatccgcaatttccgtattgaccgaacctcattggtttcacggttctttacaggatttagtaaatgtgaggaaaatcttagatttgaaatttcctcccaaggagaggccttgtgttttgagaaaagaatttattttcagcaagtatcaaatattggaagcaagattagctggagctgacactgtccttcttatagtcaagatgctttctcaacccttattgaaggaattatacagctacagtaaagatttgaacatggaacctctcgttgaggtgaactccaaagaggaattacaaagggctttggaaattggtgctaaagttgtaggtgtcaataatagggacttgcattctttcaacgtagacttgaataccaccagtaacttggtagaatctattccaaaggatgttcttttgattgctttatctggaattaccaccagggacgatgctgaaaaatacaaaaaagaaggtgtccatggatttttagtgggtgaagccttgatgaaatctaccgatgtgaagaagttcattcatgaattatgcgaatga

SEQ ID NO: 6459 - DNA, 3075 bp, Saccharomyces cerevisiae
atgagcagcaataatagtggtctctctgccgccggagaaatcgatgaaagtctttattctcgtcaactttatgtgttgggtaaggaagcaatgttgaaaatgcaaacctccaacgtattaattctcggcttgaaggggctaggtgttgagatagcgaagaacgttgtgttggcaggtgtcaaatctatgaccgtttttgaccctgagccggttcaattggcagacttatcaacccaattctttttgaccgaaaaggatattggtcaaaagagaggagatgtgaccagagccaaattggcagagttgaacgcatatgtcccggttaatgtgctggattccttagacgatgttacccaattgagtcaattccaggtcgttgtcgctacggacactgtttctttggaagataaggtgaaaatcaacgaattttgccattcctccggtattagattcatttcctcggagacaagagggctgtttggtaacaccttcgtagacctaggtgacgagttcacagtgttggacccaacgggtgaagaacctcgcactggtatggtttcagacatcgagcccgatggaacagtgaccatgctagatgataacagacacgggttggaagacggaaattttgtcaggttctccgaagtagaaggtcttgataagttgaatgatgggaccctttttaaagttgaggttttggggccctttgcattcagaattggttcagtcaaagaatatggcgagtataagaagggcggtatcttcaccgaagtcaaagtaccccgtaaaatctcattcaagtctttgaaacaacaactgtccaatcctgagtttgttttttcggattttgctaaatttgacagagctgctcaattgcatttgggatttcaggctttacatcagtttgccgttagacataatggtgaactgccaagaacaatgaatgacgaagacgccaatgaattaatcaagttggtcaccgatttgtccgttcagcaaccggaggttctgggtgaaggtgtagatgttaatgaagatttaatcaaagagctttcctatcaggcaagaggtgacataccgggtgtcgtagcatttttcggtggccttgtggcacaagaagtgttaaaagcatgttctggtaaatttactccgctaaagcaatttatgtactttgattccttggaatcattgccagatcctaaaaacttcccaagaaatgagaagactactcagccagtaaactctcgttacgataatcaaatcgcggttttcggtttggattttcagaaaaagattgccaattcaaaggtctttcttgtcggatctggtgccattggttgtgagatgttgaaaaattgggcacttttggggcttggttctggctccgacggttacatcgttgttacggataacgattcgatcgaaaagtccaacttaaaccgtcagttcttgtttagaccaaaggatgtcggaaagaacaaatctgaagtagcggcagaggccgtttgtgctatgaaccccgatttgaagggcaagataaatgctaaaattgataaagtggggccagaaactgaggaaatatttaatgactccttttgggaaagcctggattttgtcaccaacgctctagacaatgtcgacgcaagaacatacgtagatcgccgttgtgtgttttatagaaaaccactgttagaatctggtaccctaggtactaaaggtaatactcaagtcatcattccaagattgactgaatcatactcttcttctagagacccaccagaaaagtctatcccattgtgtaccctacgttctttcccaaacaagattgatcacaccattgcctgggccaaatctcttttccaaggttacttcactgattccgccgaaaacgttaatatgtacttgacacaaccgaatttcgttgagcaaacactaaagcaaagcggggatgtcaagggagttctagaatccatctcagattctctatctagtaaaccacacaattttgaagattgtatcaaatgggcaaggttagaatttgaaaaaaaattcaaccatgatatcaagcagttactgttcaacttccccaaggatgccaagacttccaacggtgaaccattttggtccggtgctaagcgtgctccaacaccattagagtttgatatttacaataacgatcacttccattttgtcgtagcaggtgctagtttacgcgcttataattatggtattaaaagtgatgactctaattctaaacccaacgtggacgagtataagtccgtcatcgatcatatgataattccagaatttactccaaatgccaatttgaaaattcaagttaatgacgatgatccggatccaaatgccaacgcggctaatggctcagatgaaattgatcagctggtatcatccctaccagatccttctactttggctggctttaaactggagcctgtagatttcgagaaagacgatgacactaatcatcatattgaatttataacggcttgttctaactgtagagctcaaaactacttcatcgaaactgctgatcgccaaaagaccaaattcatagctggccgtattattcctgccatcgcaacaaccacttctttggttactggtttggtcaatttggaattatataaactgattgacaacaagacagatattgagcaatataagaatggctttgttaatttagctttgccatttttcggtttttcggaaccaattgcttcaccaaagggagaatataacaacaagaaatatgataaaatttgggatagatttgatatcaagggagatattaaattaagtgatttaattgaacattttgaaaaagatgaagggttagaaataacaatgctttcttatggcgtttctcttctttatgcctcatttttccctccaaagaaattgaaagaaagactaaatctaccaataactcaattggttaaattagtgactaagaaagatattccggcacatgtatctacaatgattctcgaaatttgcgcagatgacaaggaaggagaggatgttgaagttcctttcattaccattcatctatga

SEQ ID NO: 6460 - DNA, 3075 bp, Artificial Sequence
  Description of Artificial Sequence: Synthetic polynucleotide
atgagcagcaataatagtggtctctctgccgccggagaaatcgatgaaagtctttattctcgtcaactttatgtgttgggtaaggaagcaatgttgaaaatgcaaacctccaacgtattaattctcggcttgaaggggttaggtgttgagatagcgaagaacgttgtgttggcaggtgtcaaatctatgaccgtttttgaccctgagccggttcaattggcagacttatctacccaattctttttgaccgaaaaggatattggtcaaaagagaggagatgtgaccagagccaaattggcagagttgaacgcatatgtcccggttaatgtgttggattccttagacgatgttacccaattgagtcaattccaggtcgttgtcgctacggacactgtttctttggaagataaggtgaaaatcaacgaattttgccattcctccggtattagattcatttcctctgagacaagagggttgtttggtaacaccttcgtagacttgggtgacgagttcacagtgttggacccaacgggtgaagaacctcgcactggtatggtttctgacatcgagcccgatggaacagtgaccatgcttgatgataacagacacgggttggaagacggaaattttgtcaggttctccgaagtagaaggtcttgataagttgaatgatgggaccctttttaaagttgaggttttggggccctttgcattcagaattggttctgtcaaagaatatggcgagtataagaagggcggtatcttcaccgaagtcaaagtaccccgtaaaatctctttcaagtctttgaaacaacaattatccaatcctgagtttgttttttctgattttgctaaatttgacagagctgctcaattgcatttgggatttcaggctttacatcagtttgccgttagacataatggtgaattaccaagaacaatgaatgacgaagacgccaatgaattaatcaagttggtcaccgatttgtccgttcagcaaccggaggttttaggtgaaggtgtagatgttaatgaagatttaatcaaagagctttcctatcaggcaagaggtgacataccgggtgtcgtagcatttttcggtggccttgtggcacaagaagtgttaaaagcatgttctggtaaatttactccgttgaagcaatttatgtactttgattccttggaatctttgccagatcctaaaaacttcccaagaaatgagaagactactcagccagtaaactctcgttacgataatcaaatcgcggttttcggtttggattttcagaaaaagattgccaattctaaggtctttcttgtcggatctggtgccattggttgtgagatgttgaaaaattgggcacttttggggcttggttctggctccgacggttacatcgttgttacggataacgattctatcgaaaagtccaacttaaaccgtcagttcttgtttagaccaaaggatgtcggaaagaacaaatctgaagtagcggcagaggccgtttgtgctatgaaccccgatttgaagggcaagataaatgctaaaattgataaagtggggccagaaactgaggaaatatttaatgactccttttgggaaagcttagattttgtcaccaacgctttggacaatgtcgacgcaagaacatacgtagatcgccgttgtgtgttttatagaaaaccattattagaatctggtaccttgggtactaaaggtaatactcaagtcatcattccaagattgactgaatcttactcttcttctagagacccaccagaaaagtctatcccattgtgtaccttacgttctttcccaaacaagattgatcacaccattgcctgggccaaatctcttttccaaggttacttcactgattccgccgaaaacgttaatatgtacttgacacaaccgaatttcgttgagcaaacattgaagcaaagcggggatgtcaagggagttttggaatccatcagtgattctttatctagtaaaccacacaattttgaagattgtatcaaatgggcaaggttagaatttgaaaaaaaattcaaccatgatatcaagcagttattattcaacttccccaaggatgccaagacttccaacggtgaaccattttggtccggtgctaagcgtgctccaacaccattagagtttgatatttacaataacgatcacttccattttgtcgtagcaggtgctagtttacgcgcttataattatggtattaaaagtgatgactctaattctaaacccaacgtggacgagtataagtccgtcatcgatcatatgataattccagaatttactccaaatgccaatttgaaaattcaagttaatgacgatgatccggatccaaatgccaacgcggctaatggcagtgatgaaattgatcagttggtatcttccttgccagatccttctactttggctggctttaaattagagcctgtagatttcgagaaagacgatgacactaatcatcatattgaatttataacggcttgttctaactgtagagctcaaaactacttcatcgaaactgctgatcgccaaaagaccaaattcatagctggccgtattattcctgccatcgcaacaaccacttctttggttactggtttggtcaatttggaattatataaattgattgacaacaagacagatattgagcaatataagaatggctttgttaatttagctttgccatttttcggtttttctgaaccaattgcttctccaaagggagaatataacaacaagaaatatgataaaatttgggatagatttgatatcaagggagatattaaattaagtgatttaattgaacattttgaaaaagatgaagggttagaaataacaatgctttcttatggcgtttctcttctttatgcctcttttttccctccaaagaaattgaaagaaagattgaatttaccaataactcaattggttaaattagtgactaagaaagatattccggcacatgtatctacaatgattctcgaaatttgcgcagatgacaaggaaggagaggatgttgaagttcctttcattaccattcatttgtga

SEQ ID NO: 6461 - DNA, 3873 bp, Saccharomyces cerevisiae
atgaactttttaagttttaagactacaaaacactatcacattttcaggtacgtgaacatacggaatgactacaggctgttaatgataatgataataggtaccgtggcaacaggcctagtgccggcaattacttctatcctgacgggcagagtgttcgatctactatcagttttcgtggctaatgggtcacatcaaggtttgtattcccaactagtacagaggtcaatggcagtaatggcacttggtgcggcttctgtgccagtaatgtggctttctctaacaagttggatgcacatcggcgagagacaaggctttagaatacggtcacagatattggaggcatatttggaggaaaagccaatggaatggtacgacaataatgaaaaattgttaggagattttactcaaatcaacagatgtgtggaagagctaagatcaagctccgcagaggcatcagccataactttccagaatttagttgcaatatgtgcgcttctggggacgtcattctactattcttggtcattaactttaattattctttgcagctctccaataatcacattttttgcagtggtgttttccagaatgattcatgtatattcagagaaggagaattctgaaacgagtaaagcagcccaattacttacatggtcgatgaatgccgctcaattagtgagattatattgtacacaacgtctagaaaggaaaaaattcaaggaaatcatactaaattgtaacactttcttcatcaagagttgcttttttgttgctgcaaacgctgggatcttgagatttttgacgttgactatgtttgtacagggattctggtttggttccgcaatgatcaaaaagggcaagctgaacattaacgatgtaatcacttgcttccattcatgcattatgctgggctcgactttaaataatacattacaccaaatagttgttcttcaaaaaggcggagtggctatggaaaaaatcatgactctattaaaagatggatccaagcgaaatcctttaaataaaactgtagcccaccaatttccactagattatgccaccagtgatctaacatttgctaatgtttcgttttcttatccaagcagaccttcggaagcagttttaaagaacgttagtttaaatttctctgcaggacaatttactttcatagtaggaaaatcaggctcaggtaaatctacattatccaacttattattaaggttctacgatggctataatggatcgatatctatcaatggccacaatatccaaacaatcgaccaaaaattgctaattgaaaatatcaccgtcgtagaacagcgttgtaccctatttaatgatactcttagaaaaaatattcttttaggttcaacagattcggtaagaaatgccgattgcagcaccaatgaaaatagacatttaatcaaagatgcctgtcaaatggctcttctggatagatttattctagaccttcccgatggactggaaacattaattgggactgggggtgtcacactaagtggcgggcaacaacaaagagttgctatagcacgtgcattcatcagagatactccaatattattcttagacgaagctgtatcggctctagatattgttcatcgcaacctgttgatgaaggcaattaggcattggaggaaaggaaagactacaatcatattgacgcatgagttgagccaaattgaatctgatgactatttatatttaatgaaggaaggtgaagttgttgaaagcggcacccagtctgaacttctagccgatccgaccactacatttagcacatggtatcacctacagaatgactactctgatgcgaaaactattgtagatacagagactgaagaaaaatctatacacactgtggaaagttttaactctcaattggaaacaccaaaacttggatcatgcttaagtaatctgggatatgatgagacagatcagttgtccttttacgaagcaatctatcaaaaaagatcgaacgttagaacaagaagggttaaagttgaagaggaaaatattgggtatgcactaaaacaacaaaagaacaccgaaagttcaacagggccacaacttctgagcattattcagattatcaaaagaatgattaaaagcataagatacaaaaaaattctaatcttgggactgctatgttctcttatcgcaggcgccacaaatcccgtcttttcatacacattcagtttcttactagaaggaattgtcccatccacggatggaaaaactggctcttcacattatttggcgaaatggtcgcttcttgttcttggtgtggctgcggcagatggtattttcaattttgctaaaggattcctattagattgctgcagtgaatactgggttatggatcttagaaatgaagttatggaaaaactgacgagaaagaatatggactggttttctggtgaaaacaacaaggcttctgaaatttctgctctagtcttgaatgatttgcgagatttgaggtctttggtctctgaatttttgagtgcaatgactagtttcgttaccgtatcaacgattggactaatttgggcgttagtatcgggctggaagttaagtttggtttgtatttcgatgtttccactcataattatattttcagcaatatatggaggcattttacaaaaatgcgaaacagattataagacatctgttgctcagttagaaaactgcctgtaccagattgtcactaacattaaaaccattaagtgcttacaagctgaatttcattttcaattgacctaccatgacttgaagataaaaatgcaacaaattgcctccaaacgcgccattgccacaggatttggtatatctatgacaaacatgattgtcatgtgtatccaagctattatttactactatggcctaaagctggttatgattcacgagtacacctcaaaggaaatgtttacgactttcactttgttattattcactattatgtcatgcactagcctagtaagtcagatacccgatataagtagaggccaacgtgctgccagttggatctataggattcttgatgaaaagcataataccctagaggttgaaaacaataatgctagaacagtgggaatagctggtcacacctaccatggcaaagaaaaaaaaccaatcgtttcaattcaaaatttgacatttgcctatccatctgcacctaccgcctttgtttacaaaaacatgaattttgacatgttttgcggacagacgttaggtatcattggtgaatcaggcacaggaaagtctacacttgtgcttttattaacaaaactttataattgtgaagtaggcaaaattaaaatagacggtacggacgtaaatgactggaatttgacaagtttaagaaaagaaatttcagtggttgagcaaaaacctttattattcaatggaaccatcagagataacctaacttatggtttacaagatgaaatacttgaaattgaaatgtatgatgcattaaaatacgtaggaatccatgactttgtaatttcatcacctcagggcttggatacacgtattgatacaactttactgtcaggtggacaagcgcaaaggctttgcatagccagagcacttctgagaaaatcaaaaattctgattttagatgagtgtacttcagccttggattctgtcagctcctctatcatcaatgagatcgtcaaaaaaggtccacctgctctactaacaatggttataacgcatagtgaacaaatgatgaggtcttgtaactcgattgcagttcttaaagatggtaaagtggttgagcgaggtaacttcgacactttatataataatcgcggggaattattccaaattgtttccaaccaaagcagttaa

SEQ ID NO: 6462 - DNA, 3873 bp, Artificial Sequence
  Description of Artificial Sequence: Synthetic polynucleotide
atgaactttttaagttttaagactacaaaacactatcacattttcaggtacgtgaacataagaaatgactacaggttattaatgataatgataataggtaccgtggcaacaggcttggtgccggcaattacttctatcttaacgggcagagtgttcgatttattaagtgttttcgtggctaatgggtctcatcaaggtttgtattcccaattggtacagaggtctatggcagtaatggcacttggtgcggcttctgtgccagtaatgtggctttctttaacaagttggatgcacatcggcgagagacaaggctttagaataagaagccagatattggaggcatatttggaggaaaagccaatggaatggtacgacaataatgaaaaattgttaggagattttactcaaatcaacagatgtgtggaagagttaagaagcagctccgcagaggcatctgccataactttccagaatttagttgcaatatgtgcgcttttggggacgtccttctactattcttggtctttaactttaattattctttgcagctctccaataatcacattttttgcagtggtgttttccagaatgattcatgtatattctgagaaggagaattctgaaacgagtaaagcagcccaattacttacatggtctatgaatgccgctcaattagtgagattatattgtacacaacgtttagaaaggaaaaaattcaaggaaatcatattgaattgtaacactttcttcatcaagagttgcttttttgttgctgcaaacgctgggatcttgagatttttgacgttgactatgtttgtacagggattctggtttggttccgcaatgatcaaaaagggcaagttgaacattaacgatgtaatcacttgcttccattcttgcattatgcttggctccactttaaataatacattacaccaaatagttgttcttcaaaaaggcggagtggctatggaaaaaatcatgactttattaaaagatggatccaagagaaatcctttaaataaaactgtagcccaccaatttccattagattatgccaccagtgatttaacatttgctaatgtttctttttcttatccaagcagaccttctgaagcagttttaaagaacgttagtttaaatttctctgcaggacaatttactttcatagtaggaaaatctggcagtggtaaatctacattatccaacttattattaaggttctacgatggctataatggatccatatctatcaatggccacaatatccaaacaatcgaccaaaaattgttaattgaaaatatcaccgtcgtagaacagcgttgtaccttatttaatgatactcttagaaaaaatattcttttaggttctacagattctgtaagaaatgccgattgcagcaccaatgaaaatagacatttaatcaaagatgcctgtcaaatggctcttttagatagatttattttggaccttcccgatggattagaaacattaattgggactgggggtgtcacattgagtggcgggcaacaacaaagagttgctatagcacgtgcattcatcagagatactccaatattattcttagacgaagctgtatccgctttagatattgttcatcgcaaccttttgatgaaggcaattaggcattggaggaaaggaaagactacaatcatattgacgcatgagttgagccaaattgaatctgatgactatttatatttaatgaaggaaggtgaagttgttgaaagcggcacccagtctgaacttttagccgatccgaccactacatttagcacatggtatcacttgcagaatgactactctgatgcgaaaactattgtagatacagagactgaagaaaaatctatacacactgtggaaagttttaactctcaattggaaacaccaaaacttggaagttgcttaagtaatttaggatatgatgagacagatcagttgtccttttacgaagcaatctatcaaaaaagatctaacgttagaacaagaagggttaaagttgaagaggaaaatattgggtatgcattgaaacaacaaaagaacaccgaaagttctacagggccacaacttttgagcattattcagattatcaaaagaatgattaaaagcataagatacaaaaaaattttgatcttgggattattatgttctcttatcgcaggcgccacaaatcccgtcttttcttacacattcagtttcttattggaaggaattgtcccatccacggatggaaaaactggctcttctcattatttggcgaaatggagtcttcttgttcttggtgtggctgcggcagatggtattttcaattttgctaaaggattcttattagattgctgcagtgaatactgggttatggatcttagaaatgaagttatggaaaaattaacgagaaagaatatggactggttttctggtgaaaacaacaaggcttctgaaatttctgctttggtcttgaatgatttgagagatttgaggtctttggtctctgaatttttgagtgcaatgactagtttcgttaccgtatctacgattggattgatttgggcgttagtaagtggctggaagttaagtttggtttgtatttccatgtttccactcataattatattttctgcaatatatggaggcattttacaaaaatgcgaaacagattataagacatctgttgctcagttagaaaactgcttataccagattgtcactaacattaaaaccattaagtgcttacaagctgaatttcattttcaattgacctaccatgacttgaagataaaaatgcaacaaattgcctccaaacgcgccattgccacaggatttggtatatctatgacaaacatgattgtcatgtgtatccaagctattatttactactatggcttgaagttggttatgattcacgagtacacctccaaggaaatgtttacgactttcactttgttattattcactattatgagttgcactagcttagtaagtcagatacccgatataagtagaggccaacgtgctgccagttggatctataggattcttgatgaaaagcataataccttagaggttgaaaacaataatgctagaacagtgggaatagctggtcacacctaccatggcaaagaaaaaaaaccaatcgtttctattcaaaatttgacatttgcctatccatctgcacctaccgcctttgtttacaaaaacatgaattttgacatgttttgcggacagacgttaggtatcattggtgaaagtggcacaggaaagtctacacttgtgcttttattaacaaaactttataattgtgaagtaggcaaaattaaaatagacggtacggacgtaaatgactggaatttgacaagtttaagaaaagaaatttctgtggttgagcaaaaacctttattattcaatggaaccatcagagataacttgacttatggtttacaagatgaaatacttgaaattgaaatgtatgatgcattaaaatacgtaggaatccatgactttgtaatttcttctcctcagggcttggatacacgtattgatacaactttattatctggtggacaagcgcaaaggctttgcatagccagagcacttttgagaaaatctaaaattttaattttagatgagtgtacttctgccttggattctgtcagctcctctatcatcaatgagatcgtcaaaaaaggtccacctgctttgttgacaatggttataacgcatagtgaacaaatgatgaggtcttgtaactctattgcagttcttaaagatggtaaagtggttgagagaggtaacttcgacactttatataataatcgcggggaattattccaaattgtttccaaccaaagcagttga

SEQ ID NO: 6463 - DNA, 816 bp, Saccharomyces cerevisiae
atggtgagctatggaagtcatagtagtgaggtttcgaaagttcttaaaacgccgaagtttgtgcttaggtatggaaatgtatccagcaaacaacgttttgccctaaagcggaagataaattacaaactacgtgaaagcaaatatcaagaatacttgaatgaatacaacaccttcgtgctttacgactgggaaaacagtggcgctggtagtcttgtcgattcttcctacaatctcccctctttatggaaggaattcataacagagggcatatctaaaggagcaataaacgacaaactaccgacagtctttatgaagaggaagttgacaaactcagcgttgggtcactgtttgggacttgatttcctgactgatccgagcgagtcagaacatgaatacaggtgcatgtttcagacagttcaggacatcccatctctctcgcaactgatcttattcaacagcatgccaaacgttccagtaagattgaaattgcataccattggtataaatataaatttcggctgcaaacgttccctgataagcaacggtggtgatcaagacactgaaatgagcgaagcagtctcttatatccagcctttattggaagaatcctcgagaatgtaccgcaatttaaactactggaagctgttaaaaatagcacgaaataacaagaaggatgaaccgttggatcagagcacgcgtatcaagtcgcaagttaagcttttactgagtcaattggcgacgaaccgaattacctcaccttccgtcacggatcatgggggtcacaactggctcatattcaccagaagacggttgtaa

SEQ ID NO: 6464 - DNA, 816 bp, Artificial Sequence
  Description of Artificial Sequence: Synthetic polynucleotide
atggtgagctatggaagtcatagtagtgaggtttccaaagttcttaaaacgccgaagtttgtgcttaggtatggaaatgtatccagcaaacaacgttttgccttgaagagaaagataaattacaaattacgtgaaagcaaatatcaagaatacttgaatgaatacaacaccttcgtgctttacgactgggaaaacagtggcgctggtagtcttgtcgattcttcctacaatctcccctctttatggaaggaattcataacagagggcatatctaaaggagcaataaacgacaaattaccgacagtctttatgaagaggaagttgacaaactctgcgttgggtcactgtttgggacttgatttcttgactgatccgagcgagagtgaacatgaatacaggtgcatgtttcagacagttcaggacatcccatctctctctcaattgatcttattcaacagcatgccaaacgttccagtaagattgaaattgcataccattggtataaatataaatttcggctgcaaacgttccttgataagcaacggtggtgatcaagacactgaaatgagcgaagcagtctcttatatccagcctttattggaagaatccagcagaatgtaccgcaatttaaactactggaagcttttaaaaatagcaagaaataacaagaaggatgaaccgttggatcagagcacgcgtatcaagtctcaagttaagcttttattaagtcaattggcgacgaacagaattacctctccttccgtcacggatcatgggggtcacaactggctcatattcaccagaagaagattgtga

SEQ ID NO: 6465 - DNA, 762 bp, Saccharomyces cerevisiae
atgttattagatgaccagctgaagtattgggtcctgttacctatttcgattgtcatggttttgacgggtgtactcaaacagtacatcatgacacttataacgggaagcagtgcaaatgaagcacaaccaagggtaaagttaactgaatggcaatatctacaatgggcacaattattgattggaaacggtgggaacctgtcttccgatgcatttgctgcgaagaaggaatttctagttaaggatctcactgaggaaaggcacctagccaaggccaagcagcaggatggttcgcaagctggagaggttcctaatcccttcaacgatccaagtatgtctaatgctatgatgaacatggctaagggtaatatggccagtttcatccctcaaactattattatgtggtgggtgaaccatttttttgctggatttattcttatgcaactacctttccctttgactgccaaattcaaagagatgttacagaccggtattatctgtcaggacctggatgtgagatgggttagctccatttcatggtattttatttctgtgctcgggctaaatccagtctacaacctgattgggttaaacgatcaggacatgggtattcaggccgggataggtggccctcagggcccccaaggccctccacaatcacaggttgacaaagcaatgcatgcgatggctaacgatttgactatcattcagcatgagacttgtcttgataacgttgagcaaagggttttgaaacagtatatgtaa

SEQ ID NO: 6466 - DNA, 762 bp, Artificial Sequence
  Description of Artificial Sequence: Synthetic polynucleotide
atgttattagatgaccagttgaagtattgggtccttttacctatttccattgtcatggttttgacgggtgtactcaaacagtacatcatgacacttataacgggaagcagtgcaaatgaagcacaaccaagggtaaagttaactgaatggcaatatttacaatgggcacaattattgattggaaacggtgggaacttatcttccgatgcatttgctgcgaagaaggaatttttggttaaggatctcactgaggaaaggcacttggccaaggccaagcagcaggatggttctcaagctggagaggttcctaatcccttcaacgatccaagtatgtctaatgctatgatgaacatggctaagggtaatatggccagtttcatccctcaaactattattatgtggtgggtgaaccatttttttgctggatttattcttatgcaattacctttccctttgactgccaaattcaaagagatgttacagaccggtattatctgtcaggacttggatgtgagatgggttagctccatttcttggtattttatttctgtgctcgggttaaatccagtctacaacttgattgggttaaacgatcaggacatgggtattcaggccgggataggtggccctcagggcccccaaggccctccacaatctcaggttgacaaagcaatgcatgcgatggctaacgatttgactatcattcagcatgagacttgtcttgataacgttgagcaaagggttttgaaacagtatatgtga

SEQ ID NO: 6467 - DNA, 804 bp, Saccharomyces cerevisiae
atgagctgcctggtgttgccattagtaagcgtagggaatataccacaattgagtattgactggctgctgaattcacaagcaaatgaatgggaatatttggaggcgttagattcgaaatacctagtggaatttgtgggaccattagacagaccagaggatggtagcgactcgctatataaagacgctgatatgaagtatagcagcgctttggaagttttctacaataagaagcgaggactttttgccatacagcaacgaacaccactcgtgtccgttaactatctgaataatttcatcgtagagatcatcttgccgttcttgagcaagtataatatatcggaaatatgcatttgggactctctatatgcaatggaggatgaaaatggtgtgattgtacgtccacaggaggtatattcgctcggagagttttatttcgacgatgaagctgagcttttatcgaacctccatctaaacgatcaagagtcgatggtcaataactggttacattttactcctaccagtttccaagacaagatatccgttgatcagccgatcttcaaaatacttttccaaatactgaatgcgtcgcagaggcctaaagccctccgcagcattaagtactgtagttgtttggccaatgagggggacaactcattagattctcaacagttcttacaatggataatctctcaaaaagttatcaaaaacgcgccaccaattgtaaagtttgtcaggcctatatcatggcaaggtgcatacggaatggcggatgcaagagataaatttgtagatttatacaattga

SEQ ID NO: 6468 - DNA, 804 bp, Artificial Sequence
  Description of Artificial Sequence: Synthetic polynucleotide
atgagctgccttgtgttgccattagtaagcgtagggaatataccacaattgagtattgactggttgttgaattctcaagcaaatgaatgggaatatttggaggcgttagattctaaatacttggtggaatttgtgggaccattagacagaccagaggatggtagcgactctttgtataaagacgctgatatgaagtatagcagcgctttggaagttttctacaataagaagagaggactttttgccatacagcaaagaacaccactcgtgtccgttaactatttgaataatttcatcgtagagatcatcttgccgttcttgagcaagtataatatatctgaaatatgcatttgggactctttgtatgcaatggaggatgaaaatggtgtgattgtacgtccacaggaggtatattccctcggagagttttatttcgacgatgaagctgagcttttatctaacctccatttgaacgatcaagagtccatggtcaataactggttacattttactcctaccagtttccaagacaagatatccgttgatcagccgatcttcaaaatacttttccaaatattgaatgcgtctcagaggcctaaagccctccgcagcattaagtactgtagttgtttggccaatgagggggacaactctttagattctcaacagttcttacaatggataatctctcaaaaagttatcaaaaacgcgccaccaattgtaaagtttgtcaggcctatatcttggcaaggtgcatacggaatggcggatgcaagagataaatttgtagatttatacaattga

SEQ ID NO: 6469 - DNA, 3303 bp, Saccharomyces cerevisiae
atgctagaacggattcagcagctggtaaatgcagtgaacgatccacgctcagatgtggccactaagagacaagccatcgagctgctaaatgggattaaatcatcagagaatgcattggaaatctttatatcattggtcatcaacgagaattcaaatgatttgttgaagttttacggactgtccacattgatagaattgatgacggagggcgtgaacgctaatccaaatggtttgaatctggtaaagtttgaaataaccaaatggctcaaatttcaagttttgggcaataagcaaactaagctgcctgactttttaatgaataagatttctgaagtgctgactactttgtttatgttaatgtacagtgattgtaatggaaaccagtggaacagtttttttgacgatctgatgagtctattccaagtggattcggctatttccaatacgagcccgtctaccgatggtaacattcttctaggtcttgaattttttaacaagctctgtttgatgattaattcggagattgctgaccaaagctttattaggtctaaggaatctcagttaaaaaataacaatataaaagattggatgcgtgataacgatatcatgaaattgagtaatgtgtggtttcagtgtttaaaactggacgaacaaattgtgtcacaatgtcccggattgatcaattctaccttggattgtattgggagttttatctcatggatcgatattaatttaattattgatgcaaataattattatctgcaattaatctataaatttttaaatcttaaagaaaccaaaatttcatgttataattgcatactggccatcatctctaaaaaaatgaaaccaatggacaaactggcttttctgaatatgatcaatttgaccaacgaattgacttactatcatcaagccatatcaatgaatccccaaattattacatttgataatttagaagtctgggaaagtttgaccaagttgattacttcctttggcatagaatttactatcattattgaacaagtcaacgatgatcaaaaattggatacattatacaaacaatcggtcatttcaaatgttgattccatattattggagaaaataataccaatacttttggaatttatgaataatgagtttgattcaataacagcaaaaaccttcccattctggtcaaattatctggctttcttgaaaaaatataaagcatcttcaccaaattttgtaccattgcataaggattttctagataatttccaacaaatttgctttaaaagaatgaagttttcagacgacgaggtcacacaggatgattttgaggaattcaacgaaaccgtaagatttaaattaaaaaatttccaggagatcatcgtggtaattgacccaagtctgtttttaaataacatttctcaagaaatttcagcaaacctaatgaattgtaaaaacgaaagctggcaaattttcgagctaactatttatcaaatcttcaatttaagtgaatgtaccaagaacaactatttcggtttgaacaagaatgaaattatgacctcacaaccttcgctaactttagtacgatttttaaatgaattgttaatgatgaaggatttcttattagccattgataacgaacaaatccaaatactattcatggaattaattgtgaaaaactacaatttcatattttcaactagtgctaacacagcaaatgctactgatgatgatgaaaagtatctattaatattgaatattttcatgagctcatttgctatgttcaataaaagagaaaacgtcagactaaggtcatggtatttatttacaagattcttgaagttgacaagaatcaatttgaaaaaaatcctctttgccaacaaaaatttggttaatgaaataactaataagataagtcctctacttcacataaaagtaacatctatcaacgcccaagggacggatgacaatgatacaatttttgataatcagttgtacatatttgagggtattgggtttataatcacattgaataatagcagtcaggagctcactgctgccactgccaacacccccatcgattacgatatattggaccagatattaactccgctatttacacaattagagggttgtattacccaaggagcttcgccagttgtgattctggaatgtcatcacattcttatggctattggtactttagcgagaggtttgcacattggtctcgtccctgagaatcaggtcaacaatatggttgtcaacaaaaaattaatcaatgactctttaatccataaattctctaatatagctgaggttatattagtaacattctcttttttcaataagttcgaaaatatccgcgatgcatctaggtttacctttgccaggttaattccaattttaagtaataaaattttaccatttatcaataaattgattgaattgatcttatcgtccacagatttaaaatcatgggagatgattgattttcttgggttcttatctcaactgattcatatgtttcacacggacacagactgttatcagctgtttaaccagttacttactccgcttatcaacaaagtccattctattatcgaagagattgatgaacaacacgaccaacaatcaagcagtaacaaacctatagacactgcagtcacagccacctccgtaaataagaatatcgtggtcaccgattcgtatagagataaaatactattgaaaaaggcttactgcacatttttacagtcatttactaataattccgtcacttcgatactattgtcagatataaacagagcaatcctgccggtcatattaaacgatttggtcacctatacgccgcaagagatccaggaaacatcaatgatgaaagtgtcactcaatgtattgtgcaattttatcaaatgttttgggaatgggacctgcttggataatgacgacatcaataaagatcccaaccttaaaatagatggtctcaacgaatacttcatcatgaaatgtgtcccaataatctttgaaattccgttcaatccaatatacaagttcaatatcaaagaagggaatttcaaaacaatggcatatgatttggcaagattactgagggagctatttatcgtcagcagcaaccccaccacaaatgagaatgaatgtgtaaaatatttaactcagatctaccttccacaaatccaattaccacaggaattgacgattcagttggttaatatgttaaccacaatgggtcaaaagcaattcgaaaaatggtttgtagataatttcatttctgttttaaagcaaggtcaatag

SEQ ID NO: 6470 - DNA, 3303 bp, Artificial Sequence
  Description of Artificial Sequence: Synthetic polynucleotide
atgttggaaagaattcagcagttggtaaatgcagtgaacgatccacgctctgatgtggccactaagagacaagccatcgagttattgaatgggattaaatcttctgagaatgcattggaaatctttatatctttggtcatcaacgagaatagtaatgatttgttgaagttttacggattatccacattgatagaattgatgacggagggcgtgaacgctaatccaaatggtttgaatttggtaaagtttgaaataaccaaatggctcaaatttcaagttttgggcaataagcaaactaagttacctgactttttaatgaataagatttctgaagtgttgactactttgtttatgttaatgtacagtgattgtaatggaaaccagtggaacagtttttttgacgatttgatgagtttattccaagtggattctgctatttccaatacgagcccgtctaccgatggtaacattcttttgggtcttgaattttttaacaagctctgtttgatgattaattctgagattgctgaccaaagctttattaggtctaaggaatctcagttaaaaaataacaatataaaagattggatgcgtgataacgatatcatgaaattgagtaatgtgtggtttcagtgtttaaaattagacgaacaaattgtgagtcaatgtcccggattgatcaattctaccttggattgtattgggagttttatcagttggatcgatattaatttaattattgatgcaaataattattatttacaattaatctataaatttttaaatcttaaagaaaccaaaattagttgttataattgcatattggccatcatctctaaaaaaatgaaaccaatggacaaattggcttttttgaatatgatcaatttgaccaacgaattgacttactatcatcaagccatatccatgaatccccaaattattacatttgataatttagaagtctgggaaagtttgaccaagttgattacttcctttggcatagaatttactatcattattgaacaagtcaacgatgatcaaaaattggatacattatacaaacaatctgtcatttctaatgttgattccatattattggagaaaataataccaatacttttggaatttatgaataatgagtttgattctataacagcaaaaaccttcccattctggtctaattatttggctttcttgaaaaaatataaagcatcttctccaaattttgtaccattgcataaggattttttggataatttccaacaaatttgctttaaaagaatgaagttttctgacgacgaggtcacacaggatgattttgaggaattcaacgaaaccgtaagatttaaattaaaaaatttccaggagatcatcgtggtaattgacccaagtttatttttaaataacatttctcaagaaatttctgcaaacttgatgaattgtaaaaacgaaagctggcaaattttcgagttaactatttatcaaatcttcaatttaagtgaatgtaccaagaacaactatttcggtttgaacaagaatgaaattatgacctctcaaccttctttgactttagtaagatttttaaatgaattgttaatgatgaaggatttcttattagccattgataacgaacaaatccaaatattattcatggaattaattgtgaaaaactacaatttcatattttccactagtgctaacacagcaaatgctactgatgatgatgaaaagtatcttttaatattgaatattttcatgagctcctttgctatgttcaataaaagagaaaacgtcagattaaggagttggtatttatttacaagattcttgaagttgacaagaatcaatttgaaaaaaatcctctttgccaacaaaaatttggttaatgaaataactaataagataagtcctttacttcacataaaagtaacatctatcaacgcccaagggacggatgacaatgatacaatttttgataatcagttgtacatatttgagggtattgggtttataatcacattgaataatagcagtcaggagctcactgctgccactgccaacacccccatcgattacgatatattggaccagatattaactccgttgtttacacaattagagggttgtattacccaaggagcttctccagttgtgattttggaatgtcatcacattcttatggctattggtactttagcgagaggtttgcacattggtctcgtccctgagaatcaggtcaacaatatggttgtcaacaaaaaattaatcaatgactctttaatccataaattctctaatatagctgaggttatattagtaacattctcttttttcaataagttcgaaaatatccgcgatgcatctaggtttacctttgccaggttaattccaattttaagtaataaaattttaccatttatcaataaattgattgaattgatcttatcttccacagatttaaaaagttgggagatgattgattttcttgggttcttatctcaattgattcatatgtttcacacggacacagactgttatcagttatttaaccagttacttactccgcttatcaacaaagtccattctattatcgaagagattgatgaacaacacgaccaacaaagcagcagtaacaaacctatagacactgcagtcacagccacctccgtaaataagaatatcgtggtcaccgattcttatagagataaaatattattgaaaaaggcttactgcacatttttacagtcttttactaataattccgtcacttccatattattgagtgatataaacagagcaatcttaccggtcatattaaacgatttggtcacctatacgccgcaagagatccaggaaacatctatgatgaaagtgagtctcaatgtattgtgcaattttatcaaatgttttgggaatgggacctgcttggataatgacgacatcaataaagatcccaaccttaaaatagatggtctcaacgaatacttcatcatgaaatgtgtcccaataatctttgaaattccgttcaatccaatatacaagttcaatatcaaagaagggaatttcaaaacaatggcatatgatttggcaagattattgagggagttatttatcgtcagcagcaaccccaccacaaatgagaatgaatgtgtaaaatatttaactcagatctaccttccacaaatccaattaccacaggaattgacgattcagttggttaatatgttaaccacaatgggtcaaaagcaattcgaaaaatggtttgtagataatttcatttctgttttaaagcaaggtcaatga

SEQ ID NO: 6471 - DNA, 1899 bp, Saccharomyces cerevisiae
atggaactcaacgacccttcaattatatcaagcagccagttttcaggtgaattgtctgacagcgatactgcagccgctactcacaaatcgcaacaagccatctcaaatttattccaaaaattagccaaaaagggcagagaagagaagccaatcggtagcgtagaatcttcaactgatagctctaacatttctgttgctacgagcggtaacaataaagaaagcaataaaaaaaaaaataagaaaacggccatgctaaatttcagcagtttgacggaccctataacgaactacaaaccaatggatctgcaatacaagacatatgcatactccatgaatgaactttatcatttgaaaccatctttggcaagtgcttcgtacgaagaagacccacttatttcggaacttgtgaggagtttacccaaaagaaagttttggcgattgcgcatgggacctccagatcaaaagcatgctaataaccatcattttaatgggaacaatggtggaggcagttggaaggctggttacaagaatgggaaaaacgatgagagaagaatgagtagaaccaaaaacatgcagggaggcaaacgaagatctcaacaagatgatgaagaaaaaaagattgaccaagaaatgctggagatggacaagaatcttcaattaggaggtgacgtcggccattcaattgcagattttgaagattggaaggcaaagatgaaagaattagaattgaaaaaactttcaaaatctaaaggaatcagtaactctaccgcaattgctcccagggaaagcgcctctcatgaaacacccaccgatttaagaccggtcattccaaggggccctagttcaataacagattttttgaatttaaagaggcaagataagaaggaagaatcttcacaacaaacacctggtattcctgttggacagccaagcctatccaaaaccagtatagaacaagttaacgaattagaaactaattcagatttgggtaaaagttcatcatctcggttttcatcatttttcaataaatctgccacttcgttgccttcattagataataataatcaagtgccatcgtcaaacgtgtctgtagtaaacaacgatggcaacagtacacctcatcaaagtggttcaagactgatgtcgtttttcaaagaatctagatcgagcactccaaatgcagaatcgcagttgttatcagcctcagacaaagataatggaaagatgcagactcttccgcaattccagcagcaaccgcaacaaatgcaaccaatggcatttacccagcatcctcctaataacaacgcatttttcaatgggctattgaataaaggtaaaagtgaaactagtactcctcctcctccacccccaggactaattgctcatcagggtccacaatttcctgtgatgggtgtaccaccaaattttccacaacgcatgatgccaccgccaccaggtctcgttcaattccagaaagattctaaagatgtaaataagaaggaagacaggcaattaaggcaaaataaaaatccaaacggaacaagaaatagcaagggaaaacaagaggaaacagcaacgccagatctgcctcaacagcaatacatgccaccacccccacctccagggttttttccaatgcatcctaactttcctaacggcccaatgccaccattaccacaggggttcccaatcccaccaaatggtatgttaccggtaacaggacaacagccacagccaccttatccaaatatgatgctacaaggaaatttcccccctaatttccagcaaggttttggtagtaactcccctatgccaattccatctattattaatgccaatggcaaaaatgttacaaaccagttaccaccaggattaaactctaaaaagaatataaaatga

SEQ ID NO: 6472 - DNA, 1899 bp, Artificial Sequence
  Description of Artificial Sequence: Synthetic polynucleotide
atggaactcaacgacccttctattatatctagcagccagttttctggtgaattgtctgacagcgatactgcagccgctactcacaaatctcaacaagccatctctaatttattccaaaaattagccaaaaagggcagagaagagaagccaatcggtagcgtagaatcttctactgatagctctaacatttctgttgctacgagcggtaacaataaagaaagcaataaaaaaaaaaataagaaaacggccatgttgaatttcagcagtttgacggaccctataacgaactacaaaccaatggatttgcaatacaagacatatgcatactccatgaatgaactttatcatttgaaaccatctttggcaagtgcttcttacgaagaagacccacttatttctgaacttgtgaggagtttacccaaaagaaagttttggagattgcgcatgggacctccagatcaaaagcatgctaataaccatcattttaatgggaacaatggtggaggcagttggaaggctggttacaagaatgggaaaaacgatgagagaagaatgagtagaaccaaaaacatgcagggaggcaaaagaagatctcaacaagatgatgaagaaaaaaagattgaccaagaaatgttagagatggacaagaatcttcaattaggaggtgacgtcggccattctattgcagattttgaagattggaaggcaaagatgaaagaattagaattgaaaaaactttctaaatctaaaggaatcagtaactctaccgcaattgctcccagggaaagcgcctctcatgaaacacccaccgatttaagaccggtcattccaaggggccctagtagtataacagattttttgaatttaaagaggcaagataagaaggaagaatcttctcaacaaacacctggtattcctgttggacagccaagcctttccaaaaccagtatagaacaagttaacgaattagaaactaattctgatttgggtaaaagttcttcttctagattttcttcttttttcaataaatctgccacttctttgccttctttagataataataatcaagtgccatcttccaacgtgtctgtagtaaacaacgatggcaacagtacacctcatcaaagtggttccagattaatgagttttttcaaagaatctagaagcagcactccaaatgcagaatctcagttgttatctgccagtgacaaagataatggaaagatgcagactcttccgcaattccagcagcaaccgcaacaaatgcaaccaatggcatttacccagcatcctcctaataacaacgcatttttcaatgggttattgaataaaggtaaaagtgaaactagtactcctcctcctccacccccaggattgattgctcatcagggtccacaatttcctgtgatgggtgtaccaccaaattttccacaacgcatgatgccaccgccaccaggtctcgttcaattccagaaagattctaaagatgtaaataagaaggaagacaggcaattaaggcaaaataaaaatccaaacggaacaagaaatagcaagggaaaacaagaggaaacagcaacgccagatttacctcaacagcaatacatgccaccacccccacctccagggttttttccaatgcatcctaactttcctaacggcccaatgccaccattaccacaggggttcccaatcccaccaaatggtatgttaccggtaacaggacaacagccacagccaccttatccaaatatgatgttacaaggaaatttcccccctaatttccagcaaggttttggtagtaactcccctatgccaattccatctattattaatgccaatggcaaaaatgttacaaaccagttaccaccaggattaaactctaaaaagaatataaaatga

SEQ ID NO: 6473 - DNA, 7425 bp, Saccharomyces cerevisiae
atgaataaatacattaacaaatacaccacgccacctaacttattgtctttacgacaaagggccgaaggcaaacacagaacaagaaagaaacttacacacaaatcgcactcccacgatgatgagatgtcaactacttcaaacacagattccaatcacaatgggcccaatgactctggtagagtgatcactggttctgctggtcatattggtaaaatatcctttgtagattcagaactagatacaacattttctactttaaatttgatttttgataaacttaaaagcgatgtgccacaagaacgagcctctggcgctaatgaattaagcactactttgacctcattagcaagggaagtatctgctgagcaatttcaaaggtttagcaacagtttaaacaataagatatttgaacttattcacgggtttacttcaagtgagaagataggtggtattcttgctgttgatactctgatctcattctacctgagtacagaggagctgccaaaccaaacttcaagactggcgaactatttacgtgttttaattccatccagtgacattgaagttatgagattagcggctaacaccttaggtagattgaccgtgccaggtggtacattaacatcagatttcgtcgaatttgaggtcagaacttgcattgattggcttactctgacagcagataataactcatcgagctctaagttggaatacaggagacatgctgcgctattaatcataaaggcattagcagacaattcaccctatcttttatacccttacgttaactctatcttagacaatatttgggtgccattaagggatgcaaagttaattatacgattagatgccgcagtggcattgggtaaatgtcttactattattcaggatagagaccctgctttgggaaaacagtggtttcaaagattatttcaaggttgtacacatggcttaagtctcaatacgaatgattcagtgcatgctactctgttggtatttcgagaattactcagcttgaaagcaccttatctcagggataaatatgatgatatttacaaatctactatgaagtacaaggaatataaatttgatgttataaggagagaagtttatgctattttacctcttttagctgcttttgaccctgccattttcacaaagaaatatctcgataggataatggttcattatttaagatatttgaagaacatcgatatgaatgctgcaaataattcggataaaccttttatattagtttctataggtgatattgcatttgaagttggttcgagcatttcaccctatatgacacttattctggataatattagggaaggcttaagaacgaaattcaaagttagaaaacaattcgagaaggatttattttattgcattggtaaattagcttgtgctttgggcccagcttttgctaagcacttgaacaaagatcttcttaatttgatgttaaactgtccaatgtccgaccatatgcaggagactttaatgatccttaacgagaaaataccctctttggaatctaccgttaattcgaggatactaaatttactgtcgatatccttatctggtgaaaaatttattcaatcaaaccaatacgattttaataatcaattttccattgaaaaggctcgtaaatcaagaaaccaaagtttcatgaaaaaaactggtgaatctaatgacgatattacagatgcccaaattttgattcagtgttttaaaatgctgcaactaattcatcatcaatattccttgacggagtttgttaggcttataaccatttcttacattgagcatgaggattcgtctgtcagaaaattggcagcattaacgtcgtgtgatttatttatcaaagacgatatatgtaaacaaacatcagttcatgctttacactcggtttctgaagtgctaagtaagctattaatgatcgcaataactgatccggttgcagaaattagattggaaattcttcagcatttggggtcaaattttgatcctcaattggcccaaccagacaatttacgcctacttttcatggcgctgaacgatgagatttttggtattcaattggaagctatcaaaataataggcagattgagttctgtcaaccccgcttatgtagttccttctttgaggaaaactttactggaactattaacgcaattgaagttctcaaatatgccaaaaaaaaaggaggaaagtgcaactctattatgtacgctgataaattccagcgatgaagtagcgaaaccttatattgatcctattctagacgtcattcttcctaaatgccaggatgcttcatctgccgtagcatccaccgctttaaaggttttgggtgaactatctgttgttggaggaaaagaaatgacgcgttacttaaaggaattgatgccattgatcattaacacatttcaggaccaatcaaactcttttaaaagagatgccgccttaacaacattaggacagctggctgcttcctctggttatgttgttggccctttactagactacccagagttacttggcattttgataaatattcttaagactgaaaacaaccctcatatcaggcgtggaactgttcgtttgattggtatattaggcgctcttgatccatataagcacagagaaatagaagtcacatcaaactcaaagagttcagtagagcaaaatgctccttcaatcgacatcgcattgctaatgcaaggggtatctccatccaacgatgaatattaccccactgtagttatccacaatctgatgaagatattgaatgatccatcgttgtcaatccatcacacggctgctattcaagctattatgcatatttttcaaaaccttggtttacgatgtgtctcctttttggatcaaattattccaggtatcattttagtcatgcgttcatgcccgccgtcccaacttgacttttattttcagcaactgggatctctcatctcaattgtcaagcaacatattaggccccatgtcgagaaaatttatggtgtgatcagggagtttttcccgatcattaaactacaaatcacaattatttctgtcatagaatcgatatctaaggctctggaaggtgagtttaaaagatttgttcccgagactctaacctttttccttgatattcttgagaacgaccagtctaataaaaggatcgttccgattcgtatattaaaatctttggttacttttgggccgaatctagaagactattcccatttgattatgcctatcgttgttagaatgactgagtattctgctggaagtctaaagaaaatctccattataactttgggtagattagcaaagaatatcaacctctctgaaatgtcatcaagaattgttcaggcgttggtaagaattttgaataatggggatagagaactaacaaaagcaaccatgaatacgctaagtttgctccttttacaactaggtaccgactttgtggtctttgtgccagtgattaacaaggcgttattgaggaataggattcagcattcagtgtacgatcaactggttaataaattactgaacaatgaatgcttgccaacaaatatcatatttgacaaggagaacgaagtacctgaaaggaaaaattatgaagacgaaatgcaagtaacgaaattaccggtaaaccaaaatatcctaaagaatgcatggtattgttctcaacagaagaccaaagaagattggcaagaatggataagaaggctatctattcagcttctaaaggaatcaccttcagcttgtctacgatcctgttcgagtttagtcagcgtttattatccgttggcgagagaattgtttaatgcttcattctcaagttgctgggttgagcttcaaacgtcataccaagaggatttgattcaagcattatgcaaggctttatcatcctctgaaaacccacccgagatttatcaaatgttgttaaatttagtggaatttatggagcacgatgacaaaccattgcctatcccaatccatacattaggtaagtatgcccaaaaatgtcatgcttttgcgaaggcactacattacaaagaggtagaattcttagaagagccgaaaaattcaacaatcgaggcattgattagcattaataatcaacttcaccaaactgattctgctattggtattttgaagcatgcgcaacaacacaatgaattgcagctgaaggaaacttggtatgaaaaacttcaacgttgggaggatgctcttgcagcatataatgagaaggaggcagcaggagaagattcggttgaagtgatgatgggaaaattaagatcgttatatgcccttggagagtgggaagagctttctaaattggcatctgaaaagtggggcacggcaaaacccgaagtgaagaaggcaatggcgcctttggctgccggcgctgcctggggtttggagcaatgggatgaaatagcccagtatactagcgtcatgaaatcgcagtctccagataaagaattctatgatgcaattttatgtttgcataggaataattttaagaaggcggaagttcacatctttaatgcaagggatcttctagttactgaattgtcagctcttgttaatgaaagctacaatagagcatataatgttgttgttagagcgcagattatagcagagttggaggaaatcatcaaatataagaagttgccacaaaattcagataaacgtctaactatgagagaaacttggaataccagattactgggctgtcaaaaaaatattgatgtgtggcaaagaattctgcgtgtcagatcattggtgataaagccaaaggaggatgctcaagtgaggattaagtttgccaacttatgcagaaaatcgggtaggatggcgctagctaaaaaagtcttaaatacattgcttgaagaaacagatgacccagatcatcctaatactgctaaggcatcccctccagttgtttatgcacaactgaagtacttgtgggctacggggttgcaagatgaggctttgaagcaattaattaatttcacatctagaatggctcatgatttaggtttggatccaaataatatgatagctcaaagcgttcctcaacaaagcaaaagagtccctcgtcacgttgaagattatactaagcttttagctcgttgtttcttgaagcaaggagaatggagagtttgcttacagcctaaatggagattgagcaatccagattcgatcctaggctcctatttgctcgctacacattttgacaacacatggtacaaagcgtggcataactgggcactggccaattttgaagtcatttctatgctaacatctgtctctaaaaagaaacaggaaggaagtgatgcttcctcggtaactgatattaatgagtttgataatggcatgatcggcgtcaatacatttgatgctaaggaagttcattactcttctaatttaatacacaggcacgtaattccagcaattaagggtttttttcattccatttctttatcagaatcaagctctcttcaagatgcattaaggttattaactttatggtttacttttggtggtattccagaagcaacccaagctatgcacgagggtttcaacctaatccaaataggcacatggttagaagtgttgccacagttaatttctagaattcatcaacccaatcaaattgttagtaggtcattactctccctattatctgatctaggtaaggctcatccgcaggcattagtgtaccccttaatggttgcgattaaatccgaatctctctcacgacagaaagcagctttgtccatcatagaaaagatgagaatacatagtccagttttggtcgaccaggctgaacttgtcagccacgaattgatacgtatggcggtgctttggcatgagcaatggtatgagggtctggatgacgccagtaggcagttttttggagaacataataccgaaaaaatgtttgctgctttagagcctctgtacgaaatgctgaagagaggaccggaaactttgagggaaatatcgttccaaaattcttttggtagggacttgaatgacgcttacgaatggctgatgaattacaaaaaatctaaagatgttagtaatttaaaccaagcgtgggacatttactataatgttttcaggaaaattggtaaacagttgccacaattacaaactcttgaactacaacatgtgtcgccaaaactactatctgcgcatgatttggaattggctgtccccgggacccgtgcaagtggtggaaaaccaattgttaaaatatctaaattcgagccagtattttcagtaatctcatccaaacaaagaccgagaaagttttgtatcaagggtagtgatggtaaagattataagtatgtgttgaaaggacatgaagacattagacaggatagcttggtcatgcaattattcggactagttaacacgcttttgcaaaatgacgctgagtgctttagaaggcatctagatatccagcaatatccagcaatcccattatctccgaagtctgggttactgggttgggtaccgaatagtgacacgttccatgtattaattagggagcatagagaagccaaaaaaattcctttaaacattgagcattgggtcatgttacaaatggcacctgattatgacaatttaacgttgttgcagaaagtagaagtcttcacttacgccctaaataatacggagggacaagatctttataaggtgttatggctgaagagtaggtcatcggaaacgtggttggagcgtagaactacttacactcgatcgctagccgtgatgtccatgaccggttatatattggggttaggtgaccgccaccctagtaatttgatgttggatagaatcactgggaaagtcattcatattgattttggtgattgtttcgaggctgctatattaagagaaaaattccccgaaaaagtaccttttagattaactagaatgttaacatatgcaatggaagtgagtggaattgaaggtagcttccgtattacttgtgagaatgttatgaaggtacttagagataacaagggttcattaatggcaatccttgaagcttttgctttcgatcctttgatcaattggggttttgacttaccaacaaagaaaattgaggaagaaacgggcattcaacttcccgtgatgaatgccaatgagctattgagtaatggggctattaccgaagaagaagttcaaagggtggaaaacgagcacaagaatgccattcgaaatgcaagggccatgttggtattgaagcgcattactgacaaattaacggggaacgatataagaaggtttaatgacttggacgttccagaacaagtggataaactaatccaacaagccacatcagtggaaaacctatgccaacattatatcggttggtgtccattctggtag

SEQ ID NO: 6474 - DNA, 7425 bp, Artificial Sequence
  Description of Artificial Sequence: Synthetic polynucleotide
atgaataaatacattaacaaatacaccacgccacctaacttattgtctttaagacaaagggccgaaggcaaacacagaacaagaaagaaacttacacacaaatctcactcccacgatgatgagatgtctactacttctaacacagattccaatcacaatgggcccaatgactctggtagagtgatcactggttctgctggtcatattggtaaaatatcctttgtagattctgaattagatacaacattttctactttaaatttgatttttgataaacttaaaagcgatgtgccacaagaaagagcctctggcgctaatgaattaagcactactttgaccagtttagcaagggaagtatctgctgagcaatttcaaaggtttagcaacagtttaaacaataagatatttgaacttattcacgggtttacttctagtgagaagataggtggtattcttgctgttgatactttgatctctttctacttgagtacagaggagttaccaaaccaaacttccagattagcgaactatttacgtgttttaattccatccagtgacattgaagttatgagattagcggctaacaccttaggtagattgaccgtgccaggtggtacattaacatctgatttcgtcgaatttgaggtcagaacttgcattgattggcttactttgacagcagataataactcttctagctctaagttggaatacaggagacatgctgcgttattaatcataaaggcattagcagacaattctccctatcttttatacccttacgttaactctatcttagacaatatttgggtgccattaagggatgcaaagttaattataagattagatgccgcagtggcattgggtaaatgtcttactattattcaggatagagaccctgctttgggaaaacagtggtttcaaagattatttcaaggttgtacacatggcttaagtctcaatacgaatgattctgtgcatgctactttattggtatttagagaattactcagcttgaaagcaccttatctcagggataaatatgatgatatttacaaatctactatgaagtacaaggaatataaatttgatgttataaggagagaagtttatgctattttacctcttttagctgcttttgaccctgccattttcacaaagaaatatctcgataggataatggttcattatttaagatatttgaagaacatcgatatgaatgctgcaaataattctgataaaccttttatattagtttctataggtgatattgcatttgaagttggttccagcatttctccctatatgacacttattttagataatattagggaaggcttaagaacgaaattcaaagttagaaaacaattcgagaaggatttattttattgcattggtaaattagcttgtgctttgggcccagcttttgctaagcacttgaacaaagatcttcttaatttgatgttaaactgtccaatgtccgaccatatgcaggagactttaatgatccttaacgagaaaataccctctttggaatctaccgttaattctaggatattgaatttattatctatatccttatctggtgaaaaatttattcaaagtaaccaatacgattttaataatcaattttccattgaaaaggctcgtaaatctagaaaccaaagtttcatgaaaaaaactggtgaatctaatgacgatattacagatgcccaaattttgattcagtgttttaaaatgttacaattgattcatcatcaatattccttgacggagtttgttaggcttataaccatttcttacattgagcatgaggattcttctgtcagaaaattggcagcattaacgtcctgtgatttatttatcaaagacgatatatgtaaacaaacatctgttcatgctttacactctgtttctgaagtgttgagtaagcttttaatgatcgcaataactgatccggttgcagaaattagattggaaattcttcagcatttggggtctaattttgatcctcaattggcccaaccagacaatttacgcttacttttcatggcgttgaacgatgagatttttggtattcaattggaagctatcaaaataataggcagattgagttctgtcaaccccgcttatgtagttccttctttgaggaaaactttattggaattattaacgcaattgaagttcagtaatatgccaaaaaaaaaggaggaaagtgcaactttattatgtacgttgataaattccagcgatgaagtagcgaaaccttatattgatcctattttggacgtcattcttcctaaatgccaggatgcttcttctgccgtagcatccaccgctttaaaggttttgggtgaattatctgttgttggaggaaaagaaatgacgcgttacttaaaggaattgatgccattgatcattaacacatttcaggaccaaagtaactcttttaaaagagatgccgccttaacaacattaggacagttagctgcttcctctggttatgttgttggccctttattagactacccagagttacttggcattttgataaatattcttaagactgaaaacaaccctcatatcaggcgtggaactgttcgtttgattggtatattaggcgctcttgatccatataagcacagagaaatagaagtcacaagtaactccaagagttctgtagagcaaaatgctccttccatcgacatcgcattgttgatgcaaggggtatctccatccaacgatgaatattaccccactgtagttatccacaatttaatgaagatattgaatgatccatctttgtccatccatcacacggctgctattcaagctattatgcatatttttcaaaaccttggtttaagatgtgtctcctttttggatcaaattattccaggtatcattttagtcatgcgttcttgcccgccgtcccaacttgacttttattttcagcaattaggatctctcatctctattgtcaagcaacatattaggccccatgtcgagaaaatttatggtgtgatcagggagtttttcccgatcattaaattacaaatcacaattatttctgtcatagaaagtatatctaaggctttggaaggtgagtttaaaagatttgttcccgagactttgacctttttccttgatattcttgagaacgaccagtctaataaaaggatcgttccgattcgtatattaaaatctttggttacttttgggccgaatttggaagactattcccatttgattatgcctatcgttgttagaatgactgagtattctgctggaagtttgaagaaaatctccattataactttgggtagattagcaaagaatatcaacctctctgaaatgtcttctagaattgttcaggcgttggtaagaattttgaataatggggatagagaattaacaaaagcaaccatgaatacgttgagtttgctccttttacaattgggtaccgactttgtggtctttgtgccagtgattaacaaggcgttattgaggaataggattcagcattctgtgtacgatcaattggttaataaattattaaacaatgaatgcttgccaacaaatatcatatttgacaaggagaacgaagtacctgaaaggaaaaattatgaagacgaaatgcaagtaacgaaattaccggtaaaccaaaatatcttgaagaatgcatggtattgttctcaacagaagaccaaagaagattggcaagaatggataagaaggttatctattcagcttttgaaggaatctccttctgcttgtcttcgttcctgtagtagtttagtcagcgtttattatccgttggcgagagaattgtttaatgcttctttctctagttgctgggttgagcttcaaacgtcttaccaagaggatttgattcaagcattatgcaaggctttatcttcctctgaaaacccacccgagatttatcaaatgttgttaaatttagtggaatttatggagcacgatgacaaaccattgcctatcccaatccatacattaggtaagtatgcccaaaaatgtcatgcttttgcgaaggcattgcattacaaagaggtagaattcttagaagagccgaaaaattctacaatcgaggcattgattagcattaataatcaacttcaccaaactgattctgctattggtattttgaagcatgcgcaacaacacaatgaattgcagttgaaggaaacttggtatgaaaaacttcaacgttgggaggatgctcttgcagcatataatgagaaggaggcagcaggagaagattctgttgaagtgatgatgggaaaattaagatctttatatgcccttggagagtgggaagagctttctaaattggcatctgaaaagtggggcacggcaaaacccgaagtgaagaaggcaatggcgcctttggctgccggcgctgcctggggtttggagcaatgggatgaaatagcccagtatactagcgtcatgaaatctcagtctccagataaagaattctatgatgcaattttatgtttgcataggaataattttaagaaggcggaagttcacatctttaatgcaagggatcttttggttactgaattgtctgctcttgttaatgaaagctacaatagagcatataatgttgttgttagagcgcagattatagcagagttggaggaaatcatcaaatataagaagttgccacaaaattctgataaacgtttgactatgagagaaacttggaataccagattattaggctgtcaaaaaaatattgatgtgtggcaaagaattttgcgtgtcagaagtttggtgataaagccaaaggaggatgctcaagtgaggattaagtttgccaacttatgcagaaaatctggtaggatggcgttagctaaaaaagtcttaaatacattgcttgaagaaacagatgacccagatcatcctaatactgctaaggcatcccctccagttgtttatgcacaattgaagtacttgtgggctacggggttgcaagatgaggctttgaagcaattaattaatttcacatctagaatggctcatgatttaggtttggatccaaataatatgatagctcaaagcgttcctcaacaaagcaaaagagtccctcgtcacgttgaagattatactaagcttttagctcgttgtttcttgaagcaaggagaatggagagtttgcttacagcctaaatggagattgagcaatccagattctatcttgggctcctatttgctcgctacacattttgacaacacatggtacaaagcgtggcataactgggcattggccaattttgaagtcatttctatgttaacatctgtctctaaaaagaaacaggaaggaagtgatgcttcctctgtaactgatattaatgagtttgataatggcatgatcggcgtcaatacatttgatgctaaggaagttcattactcttctaatttaatacacaggcacgtaattccagcaattaagggtttttttcattccatttctttatctgaaagtagctctcttcaagatgcattaaggttattaactttatggtttacttttggtggtattccagaagcaacccaagctatgcacgagggtttcaacttgatccaaataggcacatggttagaagtgttgccacagttaatttctagaattcatcaacccaatcaaattgttagtaggtctttactctccttattatctgatttaggtaaggctcatccgcaggcattagtgtaccccttaatggttgcgattaaatccgaatctctctccaggcagaaagcagctttgtccatcatagaaaagatgagaatacatagtccagttttggtcgaccaggctgaacttgtcagccacgaattgatacgtatggcggtgctttggcatgagcaatggtatgagggtttggatgacgccagtaggcagttttttggagaacataataccgaaaaaatgtttgctgctttagagcctttgtacgaaatgttgaagagaggaccggaaactttgagggaaatatctttccaaaattcttttggtagggacttgaatgacgcttacgaatggttaatgaattacaaaaaatctaaagatgttagtaatttaaaccaagcgtgggacatttactataatgttttcaggaaaattggtaaacagttgccacaattacaaactcttgaattacaacatgtgtctccaaaattattatctgcgcatgatttggaattggctgtccccgggacccgtgcaagtggtggaaaaccaattgttaaaatatctaaattcgagccagtatttagcgtaatctcttccaaacaaagaccgagaaagttttgtatcaagggtagtgatggtaaagattataagtatgtgttgaaaggacatgaagacattagacaggatagcttggtcatgcaattattcggattggttaacacgcttttgcaaaatgacgctgagtgctttagaaggcatttggatatccagcaatatccagcaatcccattatctccgaagtctgggttattgggttgggtaccgaatagtgacacgttccatgtattaattagggagcatagagaagccaaaaaaattcctttaaacattgagcattgggtcatgttacaaatggcacctgattatgacaatttaacgttgttgcagaaagtagaagtcttcacttacgccttgaataatacggagggacaagatctttataaggtgttatggttaaagagtaggtccagtgaaacgtggttggagcgtagaactacttacactaggtccttggccgtgatgtccatgaccggttatatattggggttaggtgaccgccaccctagtaatttgatgttggatagaatcactgggaaagtcattcatattgattttggtgattgtttcgaggctgctatattaagagaaaaattccccgaaaaagtaccttttagattaactagaatgttaacatatgcaatggaagtgagtggaattgaaggtagcttccgtattacttgtgagaatgttatgaaggtacttagagataacaagggttctttaatggcaatccttgaagcttttgctttcgatcctttgatcaattggggttttgacttaccaacaaagaaaattgaggaagaaacgggcattcaacttcccgtgatgaatgccaatgagttattgagtaatggggctattaccgaagaagaagttcaaagggtggaaaacgagcacaagaatgccattagaaatgcaagggccatgttggtattgaagcgcattactgacaaattaacggggaacgatataagaaggtttaatgacttggacgttccagaacaagtggataaattaatccaacaagccacatctgtggaaaacttatgccaacattatatcggttggtgtccattctggtga

SEQ ID NO: 6475 - DNA, 3537 bp, Saccharomyces cerevisiae
atgcttcagcgaatatcatctaaacttcacaggcggttcttatctggcctgctgcgtgtcaagcactacccattaaggcgcattctccttccactgattctactgcagatcatcattataacgtttatctggtcaaattcaccgcagcgtaacggacttgggcgggacgctgattaccttctaccaaattacaacgaacttgacagtgatgatgattcctggtatagcatcctgacttcgtctttcaaaaacgatcgcaagatccagttcgctaagacattatacgaaaatttaaaattcggcaccaaccctaaatgggtcaatgaatatactctgcaaaatgacctgctctcggtcaaaatgggccctcgaaagggcagtaagctcgaatccgtggatgagttgaagttttacgacttcgaccctcgtctcacgtggtccgttgtgctgaaccatttgcaaaataatgacgcagatcagccagaaaagttacccttttcatggtacgactggacaaccttccacgagctgaataagctgatttccatagataaaactgttctgccctgcaattttcttttccagtccgctttcgacaaagagtctttagaggccattgagacagagctcggcgaacctttgttcctatacgaaagaccaaagtacgcgcagaaactgtggtacaaggccgctagaaaccaggacagaatcaaagactcaaaggaactaaaaaagcattgttccaagctattcactccagacgggcatggctctcctaagggtttaagatttaatacgcaatttcaaataaaggagctgtatgataaagttagacccgaagtttaccaattgcaggcaagaaactacattttgactacacagtcgcatccactatccatttccatcatcgaatcagataattccacgtatcaagtccccttgcaaactgaaaaatcaaaaaacttggtgcaatccggcctgttgcaggaatatattaatgataacattaattctacgaacaagagaaagaaaaataaacaggacgtagaattcaaccataacaggcttttccaggaattcgtcaataacgaccaagttaactccctatacaaactggaaattgaagaaactgataaattcacttttgataaagatttggtttatttatccccttcggatttcaagttcgatgcctccaaaaaaattgaagagttagaggaacagaagaaactctatccggacaaattttccgctcataatgagaattatctgaacagtttgaagaattccgtaaagacaagccctgcattgcaaagaaagttcttctatgaggctggtgccgtgaagcaatataaaggtatggggttccatcgtgacaagaggttcttcaatgttgatacattaatcaatgataaacaagaataccaggctagattgaactcaatgatcagaacattccaaaagtttactaaagccaacggcatcatatcttggttgtctcacggaacgctgtacggctatctttacaatggaatggctttcccttgggataacgatttcgacttgcaaatgcccattaagcatttacaattgctcagtcaatacttcaaccaatctcttatattggaagacccaagacagggtaatggacgttatttcctagacgtcagcgactccttgacagtaagaattaacggtaacggtaaaaacaatatcgatgcaagattcattgacgtcgacaccggcctttacattgatattaccggtctagctagcacttctgcccctagtagggattacttgaattcttatattgaagagcggttgcaagaggaacatttggatatcaataatatccctgaatcgaacggtgagaccgctactttgcccgacaaagtagatgatgggttagtcaatatggctacactaaacatcactgagctacgtgattacattaccagcgacgaaaataaaaatcataaaagagtccccactgatactgatttgaaagatcttttgaaaaaggaactggaagagttaccaaagtctaagaccattgaaaacaagttgaatcctaaacaaagatattttctcaacgaaaaacttaaactttacaattgtagaaacaaccattttaactcgttcgaggaactatctcccttaatcaatactgttttccatggtgtgccagcgttgattcctcacagacatacctactgcttgcacaatgaatatcatgtacctgatagatatgcatttgatgcttacaaaaatactgcttatttgcccgaatttagattttggttcgactatgacgggttaaagaaatgcagtaatattaattcatggtatccaaacatccccagtattaattcatggaatccgaacctcttgaaagaaatatcgtctacgaaatttgagtcgaaactttttgattccaacaaagtctctgaatactctttcaaaaacctatccatggatgatgttcgcttaatttataaaaatattccaaaagctggctttatcgaggtatttactaacttgtacaattccttcaatgtcactgcatataggcaaaaggaattggaaattcaatactgccaaaacctgacatttattgaaaaaaagaaattattacatcaattgcgcattaatgttgctcctaagttaagctcccctgcaaaggacccatttctttttggttatgaaaaagctatgtggaaggatttatcaaaatctatgaaccagactacattagatcaagttaccaagattgttcatgaagaatatgtcggaaaaattattgatctgtccgaaagtttgaaatacaggaatttttcacttttcaacattacttttgatgaaactggaacaactctagatgataacacagaagattatactcctgctaatactgttgaagtaaatcctgtggattttaaatcaaatttaaactttagtagcaactcctttttggatttaaattcatatggtttagacctttttgcgccaactttatccgacgttaacagaaagggtattcaaatgtttgataaggaccctattattgtatacgaggactatgcttatgccaagttacttgaagaaagaaagcggagggagaagaagaagaaggaggaagaggagaagaagaagaaggaagaagaggaaaagaagaagaaggaagaagaagaaaagaaaaagaaggaagaggaagagaagaaaaagaaggaagaagaagagaagaaaaagaaggaagaagaagaaaagaagaagcaggaggaagaggagaaaaagaagaaggaagaagaagagaagaagaagcaggaagaaggagaaaagatgaagaatgaagatgaagaaaataagaagaatgaagatgaagaaaagaagaagaacgaagaagaggaaaaaaagaagcaggaagagaaaaacaagaagaatgaagatgaagaaaagaagaagcaggaagaggaagaaaagaagaagaacgaagaagaggaaaaaaagaagcaggaggaggggcacagcaattaa

SEQ ID NO: 6476 - DNA, 3537 bp, Artificial Sequence
  Description of Artificial Sequence: Synthetic polynucleotide
atgcttcagaggatatcttctaaacttcacaggagattcttatctggcttattacgtgtcaagcactacccattaaggcgcattctccttccattgattttattgcagatcatcattataacgtttatctggtctaattctccgcagcgtaacggacttgggagagacgctgattaccttttaccaaattacaacgaacttgacagtgatgatgattcctggtatagcatcttgacttcttctttcaaaaacgatcgcaagatccagttcgctaagacattatacgaaaatttaaaattcggcaccaaccctaaatgggtcaatgaatatactttacaaaatgacttactctctgtcaaaatgggccctagaaagggcagtaagctcgaatccgtggatgagttgaagttttacgacttcgaccctcgtctcacgtggtccgttgtgttgaaccatttgcaaaataatgacgcagatcagccagaaaagttacccttttcttggtacgactggacaaccttccacgagttgaataagttgatttccatagataaaactgttttgccctgcaattttcttttccagtccgctttcgacaaagagtctttagaggccattgagacagagctcggcgaacctttgttcttgtacgaaagaccaaagtacgcgcagaaattatggtacaaggccgctagaaaccaggacagaatcaaagactccaaggaattgaaaaagcattgttccaagcttttcactccagacgggcatggctctcctaagggtttaagatttaatacgcaatttcaaataaaggagttgtatgataaagttagacccgaagtttaccaattgcaggcaagaaactacattttgactacacagtctcatccattgtccatttccatcatcgaaagtgataattccacgtatcaagtccccttgcaaactgaaaaatctaaaaacttggtgcaatccggccttttgcaggaatatattaatgataacattaattctacgaacaagagaaagaaaaataaacaggacgtagaattcaaccataacaggcttttccaggaattcgtcaataacgaccaagttaactccttgtacaaattagaaattgaagaaactgataaattcacttttgataaagatttggtttatttatccccttctgatttcaagttcgatgcctccaaaaaaattgaagagttagaggaacagaagaaactctatccggacaaattttccgctcataatgagaattatttgaacagtttgaagaattccgtaaagacaagccctgcattgcaaagaaagttcttctatgaggctggtgccgtgaagcaatataaaggtatggggttccatcgtgacaagaggttcttcaatgttgatacattaatcaatgataaacaagaataccaggctagattgaactccatgatcagaacattccaaaagtttactaaagccaacggcatcatatcttggttgtctcacggaacgttgtacggctatctttacaatggaatggctttcccttgggataacgatttcgacttgcaaatgcccattaagcatttacaattgctcagtcaatacttcaaccaatctcttatattggaagacccaagacagggtaatggacgttatttcttggacgtcagcgactccttgacagtaagaattaacggtaacggtaaaaacaatatcgatgcaagattcattgacgtcgacaccggcctttacattgatattaccggtttagctagcacttctgcccctagtagggattacttgaattcttatattgaagagagattgcaagaggaacatttggatatcaataatatccctgaatctaacggtgagaccgctactttgcccgacaaagtagatgatgggttagtcaatatggctacattgaacatcactgagttgcgtgattacattaccagcgacgaaaataaaaatcataaaagagtccccactgatactgatttgaaagatcttttgaaaaaggaattggaagagttaccaaagtctaagaccattgaaaacaagttgaatcctaaacaaagatattttctcaacgaaaaacttaaactttacaattgtagaaacaaccattttaactctttcgaggaattatctcccttaatcaatactgttttccatggtgtgccagcgttgattcctcacagacatacctactgcttgcacaatgaatatcatgtacctgatagatatgcatttgatgcttacaaaaatactgcttatttgcccgaatttagattttggttcgactatgacgggttaaagaaatgcagtaatattaattcttggtatccaaacatccccagtattaattcttggaatccgaacctcttgaaagaaatatcttctacgaaatttgagagtaaactttttgattccaacaaagtctctgaatactctttcaaaaacctttccatggatgatgttcgcttaatttataaaaatattccaaaagctggctttatcgaggtatttactaacttgtacaattccttcaatgtcactgcatataggcaaaaggaattggaaattcaatactgccaaaacttaacatttattgaaaaaaagaaattattacatcaattgcgcattaatgttgctcctaagttaagctcccctgcaaaggacccatttctttttggttatgaaaaagctatgtggaaggatttatccaaatctatgaaccagactacattagatcaagttaccaagattgttcatgaagaatatgtcggaaaaattattgatttatccgaaagtttgaaatacaggaatttttcccttttcaacattacttttgatgaaactggaacaactttagatgataacacagaagattatactcctgctaatactgttgaagtaaatcctgtggattttaaatctaatttaaactttagtagcaactcctttttggatttaaattcttatggtttagacctttttgcgccaactttatccgacgttaacagaaagggtattcaaatgtttgataaggaccctattattgtatacgaggactatgcttatgccaagttacttgaagaaagaaagagaagggagaagaagaagaaggaggaagaggagaagaagaagaaggaagaagaggaaaagaagaagaaggaagaagaagaaaagaaaaagaaggaagaggaagagaagaaaaagaaggaagaagaagagaagaaaaagaaggaagaagaagaaaagaagaagcaggaggaagaggagaaaaagaagaaggaagaagaagagaagaagaagcaggaagaaggagaaaagatgaagaatgaagatgaagaaaataagaagaatgaagatgaagaaaagaagaagaacgaagaagaggaaaaaaagaagcaggaagagaaaaacaagaagaatgaagatgaagaaaagaagaagcaggaagaggaagaaaagaagaagaacgaagaagaggaaaaaaagaagcaggaggaggggcacagcaattga

SEQ ID NO: 6477 - DNA, 1989 bp, Saccharomyces cerevisiae
atgacagtctcacacaatcattctacgaagatatcccaacaaccaatctcctcggtatcagcatttaagttcttcggaaagaagctgttaagttcaagccatgggaacaagttgaagaaaaaggcgtctctacctccagacttccactctacaagtactaatgacagcgaatcctccagcccaaaactgccgaattcgttgaaaacctctcgccgtgcaaactctttcgctcacacaaccaacagcaagagatctttatcttccgcctcaaccaagatcctacctccggccggctccagcacgtccatctcaagaggaaacagacattcgtccacttcgcgtaatctctcaaactccaagttcagtagcgaacgattagtgtacaatccatacggcgtctcaaccccaagcacgtcactctcgtccgtctctacctccatgaagaaagaccctgatctgggcttctaccttcacgatggggattccaaaatccgcatgctgccgatcccaattgtggacccaaacgagtatctgcccgacgagatgaaggaggcaagcatccagttgagcgataacttcgtctttgatgatgagaataagaccatcggatggggcggttcgtgcgaagtgcgcaagatccgctccaagtaccgcaagaaggacgtatttgctctaaagaagctcaatatgatctataatgaaacgcccgagaaattctacaagcgctgctcaaaggagtttatcatcgcaaagcagctaagtcatcatgttcacatcacaaatactttccttctagtcaaggtgcccaccaccgtctacaccactcgcgggtgggggttcgtcatggagctaggtctacgagatttgttcgcgatgatacaaaaatcgggctggcgcagcgtggccctagcagaaaagttttgtatattcaaacaggtggcgtgtggtgtcaagttttgccacgatcagggcatcgcccaccgtgatttgaaaccggaaaatgtactgctatccccggacggcgtgtgcaagctgacagattttggtatctcagactggtaccacacggatccacacgacctgtccagccctgtcaagaagtgcgcagggatgatcggctcgccgccgtatgctcccccggaggtcatgttctacgactccaagaagcactacgatacggaattgcaacagccgtatgacccacgcgctctagactgttatggcctgggtattatcctcatgaccctcgtcaacaacgtcattccatttttggaatcctgcagcttcgacactggtttccgcgattactgtgacgcttatgaaaactttatccgtcttcacgatcgcgcattccgcaatcgcggcaattaccgcccggggccgggaatggagtatcacttggctagaaatttcaagaacggacatgcatctcgcgtggcatggcggctcgctgacccagaagccgccacccgctacaccatcgacgacctcttcgaagacccatggttccaaggaattgagacttgtgttgatgccaacgacaaatatgtgtgtaagaaacctattatcaaaaccactacgtacgagaatccgcggggtttccatatcgctacagatgttgctgcaaccacacccacctcaaacccattccttaagaaccgagtccccatcaggtcaatggtagatatagccgcccatccttccccaacggccacggttttagcgtcgtcgcctccgccgcctcctccggcgactcatgtgccagccgaggccttatttacacttagggaaaccccgccgccccagctagcaaccctcacgcttagcgaagaacctcccgcaactcccgcaccttccgcaccttccgcaccttccgctcgcgtccgtggccactccccgcacagggtagtgcatcaccatctgaacattgtcaacagcttggtccatagttctagcgcggcgtcttctcaagttccggcttcgacctag

SEQ ID NO: 6478 - DNA, 1989 bp, Artificial Sequence
  Description of Artificial Sequence: Synthetic polynucleotide
atgacagtctcccacaatcattctacgaagatatcccaacaaccaatctcctctgtatctgcatttaagttcttcggaaagaagcttttaagtagtagccatgggaacaagttgaagaaaaaggcgtctttgcctccagacttccactctacaagtactaatgacagcgaatcctccagcccaaaattaccgaattctttgaaaacctctcgccgtgcaaactctttcgctcacacaaccaacagcaagagatctttatcttccgccagcaccaagatcttacctccggccggctccagcacgtccatctccagaggaaacagacattcttccacttctcgtaatctctccaactccaagttcagtagcgaaagattagtgtacaatccatacggcgtctccaccccaagcacgtctctctcttccgtctctacctccatgaagaaagaccctgatttgggcttctaccttcacgatggggattccaaaatccgcatgttaccgatcccaattgtggacccaaacgagtatttacccgacgagatgaaggaggcaagcatccagttgagcgataacttcgtctttgatgatgagaataagaccatcggatggggcggttcttgcgaagtgcgcaagatccgctccaagtaccgcaagaaggacgtatttgctttgaagaagctcaatatgatctataatgaaacgcccgagaaattctacaagcgctgctctaaggagtttatcatcgcaaagcagttgagtcatcatgttcacatcacaaatactttccttttggtcaaggtgcccaccaccgtctacaccactcgcgggtgggggttcgtcatggagttaggtttaagagatttgttcgcgatgatacaaaaatctggctggcgcagcgtggccttggcagaaaagttttgtatattcaaacaggtggcgtgtggtgtcaagttttgccacgatcagggcatcgcccaccgtgatttgaaaccggaaaatgtattattatccccggacggcgtgtgcaagttaacagattttggtatcagtgactggtaccacacggatccacacgacttatccagccctgtcaagaagtgcgcagggatgatcggctctccgccgtatgctcccccggaggtcatgttctacgactccaagaagcactacgatacggaattgcaacagccgtatgacccacgcgctttggactgttatggcttgggtattatcctcatgaccctcgtcaacaacgtcattccatttttggaatcctgcagcttcgacactggtttccgcgattactgtgacgcttatgaaaactttatccgtcttcacgatcgcgcattccgcaatcgcggcaattaccgcccggggccgggaatggagtatcacttggctagaaatttcaagaacggacatgcatctcgcgtggcatggaggctcgctgacccagaagccgccacccgctacaccatcgacgacctcttcgaagacccatggttccaaggaattgagacttgtgttgatgccaacgacaaatatgtgtgtaagaaacctattatcaaaaccactacgtacgagaatccgcgtggtttccatatcgctacagatgttgctgcaaccacacccaccagtaacccattccttaagaacagagtccccatcaggtctatggtagatatagccgcccatccttccccaacggccacggttttagcgtcttctcctccgccgcctcctccggcgactcatgtgccagccgaggccttatttacacttagggaaaccccgccgccccagttagcaaccctcacgcttagcgaagaacctcccgcaactcccgcaccttccgcaccttccgcaccttccgctcgcgtccgtggccactccccgcacagggtagtgcatcaccatttgaacattgtcaacagcttggtccatagttctagcgcggcgtcttctcaagttccggctagcacctga

SEQ ID NO: 6479 - DNA, 3132 bp, Saccharomyces cerevisiae
atgacgacgaccaagaggttgaagtttgagaatctgagaatccaattctccaatgccatagtaggaaactttttaaggttaccgcattcaattataaacgtgttagagtcaaccaactacgctatccaggaattcggtatagcagtccattctcataattcagatatacctattgttcatcttggatgggatggccatgattctggatcgagtgagaatgttgttcttatcaatcctgttttggccacagtatatgatttaaatcaaaagtctccattggtggacttatacatccagcgatatgaccacacacacctggctacggaggtgtatgtcacgccagaaacgagtgatgattgggaaattatcgatgccaatgcgatgaggttccaaaatggtgagattttgcaccaaacccgtatagttaccccaggtgagactttgatttgttatttggaaggaattgttacaaagttcaaaattgacagggtggagccatcaatgaagtctgcgaggatcacagatggttccttggttgttgtggcaccaaaagtcaataaaacacgtttggtgaaggctgagtatggtcatagtaataagacaatactaaaaaatggggctatccaacttttaaagaaggtaatattgaggagtactgtgtgcaaaatggacttccctaaagataacctttttgtcgtatatatcagtgacggggcacaattgccttctcagaagggctacgcttctatcgtaaaatgtagcttaaggcagtccaagaaaagcgattcagataataaatcagttggtatcccttcgaagaagattggggtttttataaaatgtgatagtcagatacccgaaaatcacattgcattaagctctcatctttgggatgcattctttacgcacccaatgaacggagcaaaaatcaaactagagtttctacaaatgaatcaagcaaatataatatccggaagaaatgcaacagtcaatatcaaatattttggcaaggacgttcctaccaagagtggggatcagtattctaagttgttgggcgggagcttattgaccaataacttaatacttccaacagagcaaattataatcgaaataaaaaaaggtgaatccgagcagcagttgtgtaatttgaatgaaatttccaatgaatccgttcaatggaaagtaacccaaatgggtaaagaagaagttaaagatattatcgaaaggcatttgcctaaacattaccacgtcaaagaaactggcgaagtttcgcgcactagtaaagatgaagatgatttcattacggtaaatagtatcaagaaagaaatggtcaattatttgacatcgcctattattgccacaccagctattatattagatggtaagcaagggatcggtaaaacaaggttattaaaagagcttataaatgaagtggaaaaagatcatcacatcttcgttaaatatgcggattgtgaaacattgcacgagacatcaaatttagataaaacccaaaaattaattatggaatggtgttctttttgttattggtatggtccttctttgattgtgttggataacgttgaggctctatttggaaaacctcaagccaatgacggagatccttctaataatggccaatgggataatgcaagcaaacttttgaattttttcatcaatcaggtgacaaagatatttaacaaggataataaacgaatcagagttttattttcaggcaagcagaaaactcaaattaatccgctattgtttgataagcattttgtttcagagacgtggtctttgagagcacctgacaaacatgcaagagcgaagttactggagtattttttctcgaaaaaccagatcatgaaactaaatcgagatttgcaattcagtgatttgtcgttggagacagaaggattttcgccactagatttggaaatattcacagaaaagattttctacgacttgcagttggaaagagattgtgataatgttgtaacaagggaacttttttcgaagtcgcttagtgcgtttacaccatctgcgttgcgtggagtaaagctaacaaaagaaacgaacatcaaatggggggatattggtgctttagcaaatgccaaagatgtccttctagaaaccttagagtggcccacaaaatatgagcctattttcgttaattgtcccctaagattgagatcaggaatcttgctttacggttatcctggttgtggtaaaacgcttctggcgagcgccgtggcacaacaatgtgggttaaactttatctccgttaagggaccagagattttaaacaagtttataggtgccagcgaacaaaacataagagaattgtttgaaagggcacagtccgtcaaaccctgtattctattttttgacgagttcgattctattgcgccaaagagagggcatgactccactggtgtcacagaccgtgtagtcaatcaattattgacccaaatggatggtgccgagggccttgatggtgtatatatactagcagctacaagtagacctgatttgattgatagcgcattgttaagaccgggaagattagacaaaagtgtgatctgtaatataccgactgaatcagagaggttagatatcttgcaagctatcgtcaattcaaaagacaaggatacgggacaaaaaaaatttgcattggagaaaaatgcagacttgaagttgatcgctgaaaagacagctggtttttcgggtgctgatttacaggggctctgctacaatgcttatttgaaatctgtacataggtggctgtctgctgcagaccaatcggaagtggtacccggcaatgataatatagaatacttcagtatcaatgagcacgggcgtagagaagaaaatagactacggctaaagactctattgcagcaagatgtggtgcacgagacaaagacaagcacttcagctgcttctgagctgacagctgtggtcacaataaacgatttattggaagcctgtcaagagacaaaacctagtatttcaacaagtgagttggtcaaattaagggggatttacgataggttccagaaggataggaacggtgagatgcccaatggtgagaattccatcgacattggtagccgactctcccttatgtga

SEQ ID NO: 6480 - DNA, 3132 bp, Artificial Sequence
  Description of Artificial Sequence: Synthetic polynucleotide
atgacgacgaccaagaggttgaagtttgagaatttaagaatccaattctccaatgccatagtaggaaactttttaaggttaccgcattctattataaacgtgttagagtctaccaactacgctatccaggaattcggtatagcagtccattctcataattctgatatacctattgttcatcttggatgggatggccatgattctggaagtagtgagaatgttgttcttatcaatcctgttttggccacagtatatgatttaaatcaaaagtctccattggtggacttatacatccagagatatgaccacacacacttggctacggaggtgtatgtcacgccagaaacgagtgatgattgggaaattatcgatgccaatgcgatgaggttccaaaatggtgagattttgcaccaaacccgtatagttaccccaggtgagactttgatttgttatttggaaggaattgttacaaagttcaaaattgacagggtggagccaagcatgaagtctgcgaggatcacagatggttccttggttgttgtggcaccaaaagtcaataaaacacgtttggtgaaggctgagtatggtcatagtaataagacaatattgaaaaatggggctatccaacttttaaagaaggtaatattgaggagtactgtgtgcaaaatggacttccctaaagataacctttttgtcgtatatatcagtgacggggcacaattgccttctcagaagggctacgcttctatcgtaaaatgtagcttaaggcagtccaagaaaagcgattctgataataaatctgttggtatcccttctaagaagattggggtttttataaaatgtgatagtcagatacccgaaaatcacattgcattaagctctcatctttgggatgcattctttacgcacccaatgaacggagcaaaaatcaaattagagtttttgcaaatgaatcaagcaaatataatatccggaagaaatgcaacagtcaatatcaaatattttggcaaggacgttcctaccaagagtggggatcagtattctaagttgttgggcgggagcttattgaccaataacttaatacttccaacagagcaaattataatcgaaataaaaaaaggtgaatccgagcagcagttgtgtaatttgaatgaaatttccaatgaatccgttcaatggaaagtaacccaaatgggtaaagaagaagttaaagatattatcgaaaggcatttgcctaaacattaccacgtcaaagaaactggcgaagtttctcgcactagtaaagatgaagatgatttcattacggtaaatagtatcaagaaagaaatggtcaattatttgacatctcctattattgccacaccagctattatattagatggtaagcaagggatcggtaaaacaaggttattaaaagagcttataaatgaagtggaaaaagatcatcacatcttcgttaaatatgcggattgtgaaacattgcacgagacaagtaatttagataaaacccaaaaattaattatggaatggtgttctttttgttattggtatggtccttctttgattgtgttggataacgttgaggctttgtttggaaaacctcaagccaatgacggagatccttctaataatggccaatgggataatgcaagcaaacttttgaattttttcatcaatcaggtgacaaagatatttaacaaggataataaaagaatcagagttttattttctggcaagcagaaaactcaaattaatccgttattgtttgataagcattttgtttctgagacgtggtctttgagagcacctgacaaacatgcaagagcgaagttattggagtattttttctccaaaaaccagatcatgaaattgaatagagatttgcaattcagtgatttgtctttggagacagaaggattttctccattagatttggaaatattcacagaaaagattttctacgacttgcagttggaaagagattgtgataatgttgtaacaagggaacttttttccaagtctcttagtgcgtttacaccatctgcgttgcgtggagtaaagttaacaaaagaaacgaacatcaaatggggggatattggtgctttagcaaatgccaaagatgtccttttagaaaccttagagtggcccacaaaatatgagcctattttcgttaattgtcccttgagattgagatctggaatcttgctttacggttatcctggttgtggtaaaacgcttttggcgagcgccgtggcacaacaatgtgggttaaactttatctccgttaagggaccagagattttaaacaagtttataggtgccagcgaacaaaacataagagaattgtttgaaagggcacagtccgtcaaaccctgtattttattttttgacgagttcgattctattgcgccaaagagagggcatgactccactggtgtcacagaccgtgtagtcaatcaattattgacccaaatggatggtgccgagggccttgatggtgtatatatattggcagctacaagtagacctgatttgattgatagcgcattgttaagaccgggaagattagacaaaagtgtgatctgtaatataccgactgaaagtgagaggttagatatcttgcaagctatcgtcaattctaaagacaaggatacgggacaaaaaaaatttgcattggagaaaaatgcagacttgaagttgatcgctgaaaagacagctggtttttctggtgctgatttacaggggctctgctacaatgcttatttgaaatctgtacataggtggttatctgctgcagaccaaagtgaagtggtacccggcaatgataatatagaatacttcagtatcaatgagcacgggcgtagagaagaaaatagattaaggttaaagactttattgcagcaagatgtggtgcacgagacaaagacaagcactagtgctgcttctgagttgacagctgtggtcacaataaacgatttattggaagcctgtcaagagacaaaacctagtatttctacaagtgagttggtcaaattaagggggatttacgataggttccagaaggataggaacggtgagatgcccaatggtgagaattccatcgacattggtagcaggctctcccttatgtga

SEQ ID NO: 6481 - DNA, 603 bp, Saccharomyces cerevisiae
atgagaatctactacatcggtgtatttcgctctggaggagaaaaggctctagagttgagtgaagttaaagacttgtcacaatttggtttctttgaaaggtctagtgttggccagtttatgactttttttgctgaaacggtcgcttctagaactggtgcaggacaaagacaaagtatagaagaaggcaactatattggccacgtttatgccaggagtgagggcatatgtggtgttttgatcaccgacaaagaatatcctgtcagaccagcatacacactattaaacaaaatattggatgaatatttagtcgcacatcctaaggaagagtgggcagatgtgactgagaccaatgatgcattgaaaatgaagcaactggacacttacattagcaaatatcaagatccttcacaggctgacgctatcatgaaagttcaacaagaactggatgagacgaaaatcgttttgcacaaaacgattgagaatgttttacaaagaggtgaaaagttggataatttggtggacaaatcggagtcattaacggcaagttccaaaatgttttataagcaagctaaaaaatccaattcgtgttgcatcatcatgtag

SEQ ID NO: 6482 - DNA, 603 bp, Artificial Sequence
  Description of Artificial Sequence: Synthetic polynucleotide
atgagaatctactacatcggtgtatttcgctctggaggagaaaaggctttggagttgagtgaagttaaagacttgtctcaatttggtttctttgaaaggtctagtgttggccagtttatgactttttttgctgaaacggtcgcttctagaactggtgcaggacaaagacaaagtatagaagaaggcaactatattggccacgtttatgccaggagtgagggcatatgtggtgttttgatcaccgacaaagaatatcctgtcagaccagcatacacattattaaacaaaatattggatgaatatttagtcgcacatcctaaggaagagtgggcagatgtgactgagaccaatgatgcattgaaaatgaagcaattggacacttacattagcaaatatcaagatccttctcaggctgacgctatcatgaaagttcaacaagaattagatgagacgaaaatcgttttgcacaaaacgattgagaatgttttacaaagaggtgaaaagttggataatttggtggacaaaagtgagtctttaacggcaagttccaaaatgttttataagcaagctaaaaaatccaattcttgttgcatcatcatgtga

SEQ ID NO: 6483 - DNA, 1212 bp, Saccharomyces cerevisiae
atgcttcgcaacttagtcgtcaggaatgcgtgcagaaacaggccgtcaattcaagtggcaagggggttatgccgacaccaaacaagacgtctcatggcgtcctcccctcagttcggtaggaactccaatcaggaaaaaacagcgggctttataatggggattctttctatggctggtgctttatattttattgctcctaataggaagcctcttttcgcctcaaggaaggtagaatccgataaaaccgcagaggaagagctttccagtggtggtgagcaatcaccagaaaatgaagatgacaacaacagcaaaagcgatgaaaatggagatgacaacgacagcaaaaacgatgaaactgaagctggccctcaattagggggtgataaaattggtgcttcaaaagtagctgaagatggtgaattggttgttctagcagaagaagacaacaagtcttccgaagataaagatactgatgaatcaaaggtatcaaccaaagatgatgagcaatccaatgaagacaatgccaccgctaacaatcaaaaggatgaaaacataagttctgagaactcggaagaaaatactagtgacaaaacactagacaacaatgctggatcttctgaaaaaaaagatccagaacattcagatgatgaaaaatcgcaacagggacaatctgatgacaagacaactactgaagataataatggagaagaagaatcctcaaaaaaaactgtaagtgactcggaaaattcagctaagcaatctgaatctagcgatgaagagaaagaagaactaagaaaacaagaggaaaagcaaatgggtcctactgaagaagaggttcaacacgaaggtgcttataacccagacactggtgagataaattgggactgtccttgcttgggaggtatggcccatggaccctgtggtgaagagttcaaatctgcattttcttgcttcgtctattctgaagctgaaccaaaaggtatcgactgtgttgaaaagtttcaacatatgcaagactgtttcagaaaataccccgagcattatgcagaacaactaaaggaaacatctgatgatgaggaacctcaagacaaagtaaaggtcaacacaatagaatcagcgccaaatgtttcaagcgcaaaggaaaatgctgcgaaaaaagcagagcaatcagatgtgaaaaaagaaccattgaatgaggaatccaaaccttaa

SEQ ID NO: 6484 - DNA, 1212 bp, Artificial Sequence
  Description of Artificial Sequence: Synthetic polynucleotide
atgcttcgcaacttagtcgtcaggaatgcgtgcagaaacaggccgtctattcaagtggcaagggggttatgcaggcaccaaacaagacgtctcatggcgtcctcccctcagttcggtaggaactccaatcaggaaaaaacagcgggctttataatggggattctttctatggctggtgctttatattttattgctcctaataggaagcctcttttcgcctctaggaaggtagaatccgataaaaccgcagaggaagagctttccagtggtggtgagcaatctccagaaaatgaagatgacaacaacagcaaaagcgatgaaaatggagatgacaacgacagcaaaaacgatgaaactgaagctggccctcaattagggggtgataaaattggtgcttccaaagtagctgaagatggtgaattggttgttttagcagaagaagacaacaagtcttccgaagataaagatactgatgaatccaaggtatctaccaaagatgatgagcaatccaatgaagacaatgccaccgctaacaatcaaaaggatgaaaacataagttctgagaactctgaagaaaatactagtgacaaaacattagacaacaatgctggatcttctgaaaaaaaagatccagaacattctgatgatgaaaaatctcaacagggacaatctgatgacaagacaactactgaagataataatggagaagaagaatcctctaaaaaaactgtaagtgactctgaaaattctgctaagcaatctgaatctagcgatgaagagaaagaagaattgagaaaacaagaggaaaagcaaatgggtcctactgaagaagaggttcaacacgaaggtgcttataacccagacactggtgagataaattgggactgtccttgcttgggaggtatggcccatggaccctgtggtgaagagttcaaatctgcattttcttgcttcgtctattctgaagctgaaccaaaaggtatcgactgtgttgaaaagtttcaacatatgcaagactgtttcagaaaataccccgagcattatgcagaacaattgaaggaaacatctgatgatgaggaacctcaagacaaagtaaaggtcaacacaatagaaagtgcgccaaatgtttccagcgcaaaggaaaatgctgcgaaaaaagcagagcaatctgatgtgaaaaaagaaccattgaatgaggaatccaaaccttga

SEQ ID NO: 6485 - DNA, 1389 bp, Saccharomyces cerevisiae
atgaaaatacaacttgtaagatggcattgttctcgcaatgctctttggaatcgtgctttctactctacgagaaaggccactaagaacgcttcgtcggcgactccagctactatgacatccatggtatctcagaggcaagatcttttcatgacagatccactatctcctggatccatgttctttcttccaaatggtgctaagattttcaacaaattgatagagtttatgaagttacaacaaaagttcaaatttggttttaatgaagttgtgacgcctttgatttacaaaaagactctttgggaaaagtctggtcactgggaaaattatgctgatgacatgtttaaggtggaaactacggatgaagaaaaggaggaatacggtttaaaaccgatgaattgcccaggccattgtctgatcttcggtaaaaaggatagatcgtataacgaacttcccctacgcttctctgatttttcaccactacatagaaatgaagcttctggtgcactgtcgggattgactagactaaggaagttccatcaagacgatggtcatatcttttgcactccttcccaagtgaaatcagaaattttcaactctttaaaattaatcgacatagtttacaacaaaattttcccctttgttaaaggaggttctggagcagagagcaattattttataaacttttctacaagaccggatcacttcattggagacctcaaagtttggaatcatgctgagcaagtactcaaggaaatcttggaagaatcaggcaaaccgtggaaactgaaccctggtgatggtgcgttctatggtccaaagttggatataatggttacggaccatttacgcaaaactcatcaagtcgctactattcagttggactttcagctacctgagaggttcgatttgaaattcaaggatcaagacaactcgtacaagaggccaattatgattcatagagctacttttggttctatcgaaagatttatggctttactgatagattctaatgagggccgttggccgttttggttgaatccttaccaagctgtaattattcccgtcaatacgaaaaatgtgcaacagctagacatgtgcactgccttgcagaaaaaactacgtaatgaactggaagccgacgacatggaaccagttcctttaaatgattggcatttcaatgttgatctcgacataagaaacgaacccgtagggtataggatcaagtcggccattttgaaaaactattcctatttaattatcgtgggtgatgaggaagtacagttacagaaatacaacattcgagaacgtgataatagaaagagtttcgagaaacttacaatgtctcaaatttgggaaaaatttattgagctggaaaaaaactacaagtaa

SEQ ID NO: 6486 - DNA, 1389 bp, Artificial Sequence
  Description of Artificial Sequence: Synthetic polynucleotide
atgaaaatacaacttgtaagatggcattgttctcgcaatgctctttggaatcgtgctttctactctacgagaaaggccactaagaacgcttcttctgcgactccagctactatgacatccatggtatctcagaggcaagatcttttcatgacagatccattatctcctggatccatgttctttcttccaaatggtgctaagattttcaacaaattgatagagtttatgaagttacaacaaaagttcaaatttggttttaatgaagttgtgacgcctttgatttacaaaaagactctttgggaaaagtctggtcactgggaaaattatgctgatgacatgtttaaggtggaaactacggatgaagaaaaggaggaatacggtttaaaaccgatgaattgcccaggccattgtttaatcttcggtaaaaaggatagatcttataacgaacttcccttgcgcttctctgatttttctccattgcatagaaatgaagcttctggtgcattatctggattgactagattaaggaagttccatcaagacgatggtcatatcttttgcactccttcccaagtgaaaagtgaaattttcaactctttaaaattaatcgacatagtttacaacaaaattttcccctttgttaaaggaggttctggagcagagagcaattattttataaacttttctacaagaccggatcacttcattggagacctcaaagtttggaatcatgctgagcaagtactcaaggaaatcttggaagaaagtggcaaaccgtggaaattgaaccctggtgatggtgcgttctatggtccaaagttggatataatggttacggaccatttacgcaaaactcatcaagtcgctactattcagttggactttcagttgcctgagaggttcgatttgaaattcaaggatcaagacaactcttacaagaggccaattatgattcatagagctacttttggttctatcgaaagatttatggctttattgatagattctaatgagggccgttggccgttttggttgaatccttaccaagctgtaattattcccgtcaatacgaaaaatgtgcaacagttagacatgtgcactgccttgcagaaaaaattacgtaatgaattggaagccgacgacatggaaccagttcctttaaatgattggcatttcaatgttgatctcgacataagaaacgaacccgtagggtataggatcaagtctgccattttgaaaaactattcctatttaattatcgtgggtgatgaggaagtacagttacagaaatacaacattagagaacgtgataatagaaagagtttcgagaaacttacaatgtctcaaatttgggaaaaatttattgagttagaaaaaaactacaagtga

SEQ ID NO: 6487 - DNA, 1017 bp, Saccharomyces cerevisiae
atggataagaattcagttaacaaagatagtgaagaaaaagacgaaagacacaagattgaggttgtagacgatacaaatcctgacttcatcactgcagattcggaactgacacaagatctgcctgatgatgtagaggttattgacttggtccatctaaaaatcaaatcgttagaagatttgaacctttataggttcaagaatttgaaacaattatgtctcagacagaacctgatcgaaagcataagcgaagtggaagttttaccccatgacaagattgttgaccttgatttttacgataacaaaattaaacatatctcctctaatgttaataagctcaccaaattaacgtctctagacctgtcgtttaacaagatcaagcacatcaaaaatctagaaaatttgactgatctggagaatttatacttcgtgcagaacagcatttccaaaattgaaaatctgtccactttgaaatcactgaaaaacttagaattaggtggtaataaggttcattctattgaacccgattccttcgaaggtctgtcaaacttggaagaaatttggttgggtaaaaattccataccaagacttattaacttacatcctttaaagaatttgaagatattgtccatccaatctaataaattaaaaaaaattgaaaatctagaagagttgaccaatcttgaagagctctatctgtcacataatttcatcaccaagattgaaggtctagagaaaaacctaaaactaactactttggacgtgacctccaacaaaattacctccctggaaaacttgaaccacctgtcaaatttaactgacatatgggcctcctttaacaagatagatcaatcctttgagagcttgggtgaaaacctgtccgccctatcacgcttggagaccatttatctggagggaaaccctattcaactggaaaataagacttcgtatagaagaaaactgactatgaacttacctccatccctacagaagattgatgcgacatatataagaggctga

SEQ ID NO: 6488 - DNA, 1017 bp, Artificial Sequence
  Description of Artificial Sequence: Synthetic polynucleotide
atggataagaattctgttaacaaagatagtgaagaaaaagacgaaagacacaagattgaggttgtagacgatacaaatcctgacttcatcactgcagattctgaattaacacaagatttacctgatgatgtagaggttattgacttggtccatttgaaaatcaaatctttagaagatttgaacctttataggttcaagaatttgaaacaattatgtctcagacagaacttgatcgaaagcataagcgaagtggaagttttaccccatgacaagattgttgaccttgatttttacgataacaaaattaaacatatctcctctaatgttaataagctcaccaaattaacgtctttggacctttcttttaacaagatcaagcacatcaaaaatttggaaaatttgactgatttagagaatttatacttcgtgcagaacagcatttccaaaattgaaaatttatccactttgaaatctttgaaaaacttagaattaggtggtaataaggttcattctattgaacccgattccttcgaaggtttatctaacttggaagaaatttggttgggtaaaaattccataccaagacttattaacttacatcctttaaagaatttgaagatattgtccatccaatctaataaattaaaaaaaattgaaaatttggaagagttgaccaatcttgaagagctctatttatctcataatttcatcaccaagattgaaggtttagagaaaaacttgaaattaactactttggacgtgacctccaacaaaattacctccttagaaaacttgaaccacttatccaatttaactgacatatgggcctcctttaacaagatagatcaatcctttgagagcttgggtgaaaacctttccgccttgtcccgcttggagaccatttatttggagggaaaccctattcaattggaaaataagacttcttatagaagaaaattaactatgaacttacctccatccttacagaagattgatgcgacatatataagaggctga

SEQ ID NO: 6489 - DNA, 378 bp, Saccharomyces cerevisiae
atgtttagatccgtttgccgcatttcttcccgcgtggcaccttctgcgtaccgcactataatgggccgttccgttatgtccaacaccatactcgcacaaagattttattctgcaaacttgagcaaagatcaggtttctcaaagggtcattgatgttatcaaggcgtttgataagaactctcccaacattgccaacaagcaaatctccagcgatacccaatttcacaaggatttggggttggactccttggacactgtcgagctgctcgtagctattgaagaagaatttgatattgaaatccctgacaaagtggctgatgagttgagaagtgttggtgaaacggtcgattatatcgcttccaatcccgacgcaaactaa

SEQ ID NO: 6490 - DNA, 378 bp, Artificial Sequence
  Description of Artificial Sequence: Synthetic polynucleotide
atgtttagatccgtttgccgcatttcttcccgcgtggcaccttctgcgtaccgcactataatgggccgttccgttatgtccaacaccatactcgcacaaagattttattctgcaaacttgagcaaagatcaggtttctcaaagggtcattgatgttatcaaggcgtttgataagaactctcccaacattgccaacaagcaaatctccagcgatacccaatttcacaaggatttggggttggactccttggacactgtcgagttactcgtagctattgaagaagaatttgatattgaaatccctgacaaagtggctgatgagttgagaagtgttggtgaaacggtcgattatatcgcttccaatcccgacgcaaactga

SEQ ID NO: 6491 - DNA, 1605 bp, Saccharomyces cerevisiae
atggaagttgcaccggccttatcgactactcagtcggacgtggcgtttcagaaggtggagacacatgaaattgacaggtcttcatacttggggccatgttataatagcgatgagcttatgcaacttatctcggcttattacaatgtcgagcctctcgtgggttatctggaacagcacccggagtaccaaaacgtgaccttgcagtttcctgacgatttaatcaaggactcctcgttgatagtaaggctgctgcaatcgaaatttccccatgggaagataaagttttgggttttagctgacacagcgtacagtgcatgctgtgtagacgaggtcgctgctgaacacgtacatgcagaagtcgtggtacattttggtgacgcatgtttgaacgccatccaaaacttgcccgtggtttactcattcggaactccatttttggatttggcactggtggtggagaactttcagagggcattcccagacttatcctccaaaatttgtttgatggcaaacgcacccttctctaagcatttgtcacagctgtacaatattttgaagggcgacctgcactacacaaatatcatatattcccaagtgaacacctctgcggtagaagaaaaattcgtaaccatacttgacacctttcacgttcccgaagacgtagaccaggtgggtgtgttcgaaaaaaatagcgtgctgtttggtcagcacgacaaagcagacaacatctcgcccgaggactatcatcttttccatttgaccaccccacaggatccgagattactgtatttgtctactgtgtttcaatctgttcatattttcgatccggctttacctggcatggtaacggggccatttccctctctaatgaggcgttacaagtacatgcatgtggcaagaacagcgggatgtataggtattctggtcaacacgctgtcgctacgtaatacaagagaaactatcaacgagctggtcaagcttatcaaaactcgtgagaaaaaacactatttatttgttgtcggaaagccaaatgtggccaagctagcaaactttgaagatattgatatttggtgcattctcggttgtagccaaagcggtatcatcgttgatcaattcaacgagttttacaagcccattattacaccttatgaattaaacttggccttgagcgaagaggtcacatggaccgggaaatgggttgtggacttcagagacgccattgatgaaatcgagcagaatttgggcggacaagataccatctctgccagcacaacttccgatgaaccggagtttgatgtagttaggggaagatatactagcacatcaagaccactgcgagcgctaacgcacctggagttagaggcggccgacgacgacgattccaaacaactgactacaagacataccgcctcaggtgccgtcattaaaggtactgtatccacttcagcatcagcactgcagaatcgttcgtggaaaggtctaggaagcgatttcgactctactgaggttgataatactggagcggatatcgaagaaggtatttccggtgtcgcacgtggttatggatttgatcgcgaagacgctatgaaaaaggaaaacaaatga

SEQ ID NO: 6492 - DNA, 1605 bp, Artificial Sequence
  Description of Artificial Sequence: Synthetic polynucleotide
atggaagttgcaccggccttatctactactcagagtgacgtggcgtttcagaaggtggagacacatgaaattgacaggtcttcctacttggggccatgttataatagcgatgagcttatgcaacttatctctgcttattacaatgtcgagcctctcgtgggttatttggaacagcacccggagtaccaaaacgtgaccttgcagtttcctgacgatttaatcaaggactcctctttgatagtaaggttattacaaagtaaatttccccatgggaagataaagttttgggttttagctgacacagcgtacagtgcatgctgtgtagacgaggtcgctgctgaacacgtacatgcagaagtcgtggtacattttggtgacgcatgtttgaacgccatccaaaacttgcccgtggtttactctttcggaactccatttttggatttggcattggtggtggagaactttcagagggcattcccagacttatcctccaaaatttgtttgatggcaaacgcacccttctctaagcatttgtctcagttatacaatattttgaagggcgacttgcactacacaaatatcatatattcccaagtgaacacctctgcggtagaagaaaaattcgtaaccatacttgacacctttcacgttcccgaagacgtagaccaggtgggtgtgttcgaaaaaaatagcgtgctttttggtcagcacgacaaagcagacaacatctcccccgaggactatcatcttttccatttgaccaccccacaggatccgagattattatatttgtctactgtgtttcaatctgttcatattttcgatccggctttacctggcatggtaacggggccatttccctctttgatgaggcgttacaagtacatgcatgtggcaagaacagcgggatgtataggtattttagtcaacacgttaagtttacgtaatacaagagaaactatcaacgagttggtcaagcttatcaaaactcgtgagaaaaaacactatttatttgttgtcggaaagccaaatgtggccaagttagcaaactttgaagatattgatatttggtgcattctcggttgtagccaaagcggtatcatcgttgatcaattcaacgagttttacaagcccattattacaccttatgaattaaacttggccttgagcgaagaggtcacatggaccgggaaatgggttgtggacttcagagacgccattgatgaaatcgagcagaatttgggcggacaagataccatctctgccagcacaacttccgatgaaccggagtttgatgtagttaggggaagatatactagcacatctagaccattaagagcgttgacgcacttagagttagaggcggccgacgacgacgattccaaacaattgactacaagacataccgcctctggtgccgtcattaaaggtactgtatccacttctgcatctgcattacagaatcgttcttggaaaggtttgggaagcgatttcgactctactgaggttgataatactggagcggatatcgaagaaggtatttccggtgtcgcacgtggttatggatttgatcgcgaagacgctatgaaaaaggaaaacaaatga

SEQ ID NO: 6493 - DNA, 528 bp, Saccharomyces cerevisiae
atgggtgctgctccttccaaaattgtggatggtcttttagaagatacaaattttgatagagatgaaattgaaaggttaaggaagagattcatgaaattagatagagatagctcagggtctattgataaaaatgaatttatgagcattcctggcgtttcgtcaaaccctcttgctggacgtataatggaggttttcgatgctgataatagtggggacgtggattttcaagagttcatcacaggattatccattttcagtgggcgtgggtccaaggacgaaaagttaagattcgccttcaaaatctacgacattgacaaggacggtttcatatccaatggtgagttgttcatcgtgttgaagattatggtaggttctaatctggacgatgaacagctgcaacagatagtagataggacgatagtggaaaacgatagcgacggcgacggacgtttaagtttcgaggagtttaagaatgctatcgaaaccacagaagtggccaagagtctgacattgcaatacgatgtgtaa

SEQ ID NO: 6494 - DNA, 528 bp, Artificial Sequence
  Description of Artificial Sequence: Synthetic polynucleotide
atgggtgctgctccttccaaaattgtggatggtcttttagaagatacaaattttgatagagatgaaattgaaaggttaaggaagagattcatgaaattagatagagatagcagtgggtctattgataaaaatgaatttatgagcattcctggcgtttcttccaaccctcttgctggacgtataatggaggttttcgatgctgataatagtggggacgtggattttcaagagttcatcacaggattatccattttcagtgggcgtgggtccaaggacgaaaagttaagattcgccttcaaaatctacgacattgacaaggacggtttcatatccaatggtgagttgttcatcgtgttgaagattatggtaggttctaatttggacgatgaacagttacaacagatagtagataggacgatagtggaaaacgatagcgacggcgacggacgtttaagtttcgaggagtttaagaatgctatcgaaaccacagaagtggccaagagtttgacattgcaatacgatgtgtga

SEQ ID NO: 6495 - DNA, 1200 bp, Saccharomyces cerevisiae
atgtttaagaaatacaaaaatcaagacttggacatggcattttggtggaagaaaaaccccaagaccccttccgattatgccaggttgatcatcgaacaactaaataaattcagctcaccctcgctgactcaggataacaaacgaaaggtacaagaagagtgcacaaaatatctaattggcactaaacattttattgtcggtgatacggatcctcacccaactccggaagccattgacgagctttatactgccatgcatcgtgccgacgtgttctatgaactgctacttcattttgtggatttggaattcgaagcaaggagagaatgcatgcttatattctctatatgccttggatactctaaggataataaattcgtcacagtagattatttagtctcgcaaccaaagaccatatctttaatgttgaggactgcggaagttgctctacaacaaaagggttgccaagatatctttttaacggtagggaatatgattattgaatgtatcaaatacgaacaactttgtaggattatattaaaggaccctcaactatggaaattctttgagtttgcgaaactgggtaatttcgaaatcagtacggaatctttacaaatattaagtgccgcatttactgcacatcctaaattagtgtctaaggaattcttcagtaatgagattaatatcataagattcattaaatgtattaacaagttaatggctcatggaagctacgtaacgaaaaggcagagcactaaactgttggcctcattaattgtgataagatctaacaacgcgttgatgaatatatatatcaactccccagaaaacttaaagctcataatgactttaatgactgacaaatctaaaaacttacaacttgaagctttcaacgtattcaaggtgatggtagcaaacccaaggaagtcaaaacctgtttttgacattcttgttaaaaacagagataaactattgacgtattttaaaactttcggtttagattctcaggattctacttttcttgatgaaagagaattcatcgttcaagaaattgattccttgccgcgtataatttcgtccacaacagaagtttctaataataatgcatcctcaagtaacgtcgccagtataacttctccatcatcagtaatgaacaatcaatcatccatcttaacacattcaacttcacctgattcaagataa

SEQ ID NO: 6496 - DNA, 1200 bp, Artificial Sequence
  Description of Artificial Sequence: Synthetic polynucleotide
atgtttaagaaatacaaaaatcaagacttggacatggcattttggtggaagaaaaaccccaagaccccttccgattatgccaggttgatcatcgaacaattgaataaattcagctctccctctttgactcaggataacaaaagaaaggtacaagaagagtgcacaaaatatttgattggcactaaacattttattgtcggtgatacggatcctcacccaactccggaagccattgacgagctttatactgccatgcatcgtgccgacgtgttctatgaattattacttcattttgtggatttggaattcgaagcaaggagagaatgcatgcttatattctctatatgccttggatactctaaggataataaattcgtcacagtagattatttagtctctcaaccaaagaccatatctttaatgttgaggactgcggaagttgctttacaacaaaagggttgccaagatatctttttaacggtagggaatatgattattgaatgtatcaaatacgaacaactttgtaggattatattaaaggaccctcaattatggaaattctttgagtttgcgaaattgggtaatttcgaaatcagtacggaatctttacaaatattaagtgccgcatttactgcacatcctaaattagtgtctaaggaattcttcagtaatgagattaatatcataagattcattaaatgtattaacaagttaatggctcatggaagctacgtaacgaaaaggcagagcactaaacttttggcctctttaattgtgataagatctaacaacgcgttgatgaatatatatatcaactccccagaaaacttaaagctcataatgactttaatgactgacaaatctaaaaacttacaacttgaagctttcaacgtattcaaggtgatggtagcaaacccaaggaagagtaaacctgtttttgacattcttgttaaaaacagagataaacttttgacgtattttaaaactttcggtttagattctcaggattctacttttcttgatgaaagagaattcatcgttcaagaaattgattccttgccgcgtataatttcttccacaacagaagtttctaataataatgcatcctccagtaacgtcgccagtataacttctccatcttctgtaatgaacaatcaatcttccatcttaacacattctacttctcctgattccagatga

SEQ ID NO: 6497 - DNA, 2562 bp, Saccharomyces cerevisiae
atgatctcaacagcttctgcattttatcagaagcatagagtaaatttactgcgttcttcatacataatattgttgctagccacgctttacaattcaaattccagttctagtaacaacaaaactgataagaaggattctgagtcaacggttttagaaaataagaaaattgaagagggaaaagaaaccgcagtagatagagaggaagatgaaagtagcaaagaagagttaacgatagtctccaaacatagcacagattcagaagatggtgcaataataattgataaagaaagcaagactaatcataaggggggagagcgaaaaggaaaggtagattttttgttcaaacttttgcttcatgataagaagtgcctcattttatttattacacaggctattcttctgaacatcagaacattgctgtctcttcgtgtggctactttagatggtcaattagtgtccacactagtaagagctcaatacgcaaacttcacaaagatattgttggggaaatggatgatccttggaattcccgccagttttattaattcactgatcagttacacgacaaaactttgtgctgtcactattaataggaaagtttcagactttctactctcaaagtatctatctaatcaccatactttctattccgtagcttctgctgaatctgtttcagaaattcaggataatttgacaaaagatatttacacattttcaatgaactcgtcattattactgaatcagctattaaagccaatgctggatttgatcctctgttcattcaaattattaacctcaaacactagtgttatgggtgaaggaactttggcactgggcttaattgtctacgcctccaattcattactaaaattgattcaaccgaatttcactaggttaactatggcaagcgcatctttggaaagttggttcagatctttacactcgaatctacattcaagcaatgaagaaattgcactgctaagagggcaaaagagggaactagaaaacgttgattattcattttaccgtttggtgctatttttaaacagagaaataaaggcaagagctatttatgatgttgctactgcatttgtcattaaatatacttggggcgcagctggcttggtactatgctcgattccaatatttttcaaaaacaaacctagtgaagacaccttacagcttaaggaacccgggaatgatatgacggctgatttcatcacaaatagaagattattagtcactgcatctagctctatcggaagatttgtggaactgaagagaaatatacaacaattacgcggtatcagattgagattgaacaagttcaatgatttgttggatgctaataaaggtgatgacgaaaaagaaccaagagatgaaaggtgtatagtggaatatgatgattcaaggataaagtttgaaaatattcctttaataacacctgccaatcaagttctagtaccggagctaagttttgatctgaagcatggaaatcatctactaattattgggcccaacggttgcggtaaatcttcattatttcgtattctaggcgggctttggccgataagggcgactcccaataaaaatcatcaatccaagttaataatgccgcgtagaactgtggatagagattgcgcaatattttatttaccccaaaggccgtatatgggcaataggtcgacattcagggaacagattatttatccagacagtattgaacaattcaaagaaagatatcacaatgattatgatctaggcgatgcagatttaataaaaattctgcaattattagatttggaggatttagtcactgaaaatatgtcacttctgctggcgcaaaggacttccaaaaatgattcacagcagttgtcgacggaagacaatcagtcaccatgcgccattaaagttcgtgatgcattcagtatagtaagaaattggtccgaagaattaacaattggtgtccaacaaaggttagctatggcaaggatgtactatcataaacccaagtttgctgtgctcgacgaatgtacatctgcagtagccccagaaatggaacaaaggatgtacgaaaatgcgcaaaattttggtatctcgttaatatcagtttgccacaggacaagtttatggcattttcataactatctgttaaaatttgatggtaaaggcggataccaatttggaccgtttaacccgaaggaaaggttatgtaatgaagaaaaacttcttgaactaaatgccatcttggatcaacaggtgccactttgggagcggaagttgaaagatctgacaattgctaaagaatccaacatcattcgtaaatcagaaactaacctgaatctttttgaaaagatcgaagatccaaaaacgtccaaatctaatgcattgtttaatgcaaataaagggcagcgaatcacatcacctacagggcaggagactagtaagagattaccactattttcccaaccatctagttcagcatcatcaaatttactaagaaacaataaaagcttgaacaaaaaagttaaaacaaaaaaggaagaaggaaaggagaggtaa

SEQ ID NO: 6498 - DNA, 2562 bp, Artificial Sequence
  Description of Artificial Sequence: Synthetic polynucleotide
atgatcagtacagcttctgcattttatcagaagcatagagtaaatttattacgttcttcctacataatattgttgttagccacgctttacaatagtaattccagttctagtaacaacaaaactgataagaaggattctgagtctacggttttagaaaataagaaaattgaagagggaaaagaaaccgcagtagatagagaggaagatgaaagtagcaaagaagagttaacgatagtctccaaacatagcacagattctgaagatggtgcaataataattgataaagaaagcaagactaatcataaggggggagagagaaaaggaaaggtagattttttgttcaaacttttgcttcatgataagaagtgcctcattttatttattacacaggctattcttttgaacatcagaacattgttatctcttcgtgtggctactttagatggtcaattagtgtccacattggtaagagctcaatacgcaaacttcacaaagatattgttggggaaatggatgatccttggaattcccgccagttttattaattctttgatcagttacacgacaaaactttgtgctgtcactattaataggaaagtttctgactttttactctctaagtatttatctaatcaccatactttctattccgtagcttctgctgaatctgtttctgaaattcaggataatttgacaaaagatatttacacattttccatgaactcttctttattattgaatcagcttttaaagccaatgcttgatttgatcctctgttctttcaaattattaaccagtaacactagtgttatgggtgaaggaactttggcattgggcttaattgtctacgcctccaattctttattgaaattgattcaaccgaatttcactaggttaactatggcaagcgcatctttggaaagttggttcagatctttacactctaatttacattctagcaatgaagaaattgcattattaagagggcaaaagagggaattggaaaacgttgattattctttttaccgtttggtgctttttttaaacagagaaataaaggcaagagctatttatgatgttgctactgcatttgtcattaaatatacttggggcgcagctggcttggtattgtgctccattccaatatttttcaaaaacaaacctagtgaagacaccttacagcttaaggaacccgggaatgatatgacggctgatttcatcacaaatagaagattattagtcactgcatctagctctatcggaagatttgtggaattgaagagaaatatacaacaattacgcggtatcagattgagattgaacaagttcaatgatttgttggatgctaataaaggtgatgacgaaaaagaaccaagagatgaaaggtgtatagtggaatatgatgatagtaggataaagtttgaaaatattcctttaataacacctgccaatcaagttttggtaccggagttgagttttgatttgaagcatggaaatcatttattgattattgggcccaacggttgcggtaaatcttctttatttcgtattttgggcgggctttggccgataagggcgactcccaataaaaatcatcaatccaagttaataatgccgcgtagaactgtggatagagattgcgcaatattttatttaccccaaaggccgtatatgggcaataggtctacattcagggaacagattatttatccagacagtattgaacaattcaaagaaagatatcacaatgattatgatttgggcgatgcagatttaataaaaattttacaattattagatttggaggatttagtcactgaaaatatgtctcttttgttagcgcaaaggacttccaaaaatgattctcagcagttgagcacggaagacaatcagtctccatgcgccattaaagttcgtgatgcattcagtatagtaagaaattggtccgaagaattaacaattggtgtccaacaaaggttagctatggcaaggatgtactatcataaacccaagtttgctgtgctcgacgaatgtacatctgcagtagccccagaaatggaacaaaggatgtacgaaaatgcgcaaaattttggtatctctttaatatctgtttgccacaggacaagtttatggcattttcataactatcttttaaaatttgatggtaaaggcggataccaatttggaccgtttaacccgaaggaaaggttatgtaatgaagaaaaacttcttgaattgaatgccatcttggatcaacaggtgccactttgggagagaaagttgaaagatttaacaattgctaaagaatccaacatcattcgtaaaagtgaaactaacttgaatctttttgaaaagatcgaagatccaaaaacgtccaaatctaatgcattgtttaatgcaaataaagggcagagaatcacatctcctacagggcaggagactagtaagagattaccattattttcccaaccatctagttctgcatcttccaatttattaagaaacaataaaagcttgaacaaaaaagttaaaacaaaaaaggaagaaggaaaggagaggtga

SEQ ID NO: 6499 - DNA, 2253 bp, Saccharomyces cerevisiae
atgaggatcgaaaagcaccgtacccccctgtcgaagggaattatttggacgatattgtctgtgtgccttttattcatgttcaccacactgatattggttattgtagccactgctggctccaccgccaactacaaacccttaacgaatatatacatcggtgaagccgatatcaaacacatcaatgtaagcaaggtgatcccgcagataggccctattttgacaatattagggtccgctttgacggctccgaacagctccttggatgatatttttggcgccatgaaaaatattgctgatactcccgcgctgacgccgctattgacgcttttgtctaatgctgacaacaccacagtaaccatcgaatcattgaccgaattggctcccttagcgatcagcggcaatcctgcttctagcacgaggcagttgacagagattaatgggctgctgaagtattcagacaacgcaactgaaacactagatggcctctcaaggttagtttctgcttcgctgtcttccgcaagctctaactcttccagtgactcaactactttggttctggacttattaaaagactccgataacccacagaattccacagatgcattgctaactctgaataatctgacaatgtcagaaaaggcgcaattgttaccggtattcaggctattcgctttctccacgaaccaaacagctacaatgacggctctggcgaccttgatgaacactactatttcatcttctttagcccaaacactattaactcagttacaaaacacaatttcaaacggaggttccctaaataacacgtttagtactttgcaaccactagtgccgcaggcaagcgcccccgcatttgatgcagtggaattgctgctaaaccagaccacctctacaaatcagacattgagcactctatctgatttgctggaacaaaacctcactcagtcatcatctgcaaaaaaggcgtttgctgccttaacccaattgatggaaaattcggacaactcgacaatggttgtcacttcggtccaatctctagctgcggtgacaaatacaactcaatctactcaacagctaattggattagatgatgtgataagctcctcgagtaacaccaacgaaactttgtccatcttgtccgaattacaatcgggcctatccggtaattcaagctccgtacagtacattccatatctcttcagtcttttaggggcatccactgatcctaaaacaacattttcatctttagtgacgctgacttcctgggctcaagaaaaccctcagaccttcttgcccattttagatatattagcggatgccaaatccgtccaaccgatttccgcagaagaattgaacgccatgacgccgaatatactagagtatctgaaaattccgatttactatcgcttatccattttcacgctatgccatgctaacctggaaaacaagatcctagattgtaactccccacatgctgtacaaaacttggattttagatcgattatttatgacgcattagtcacatcagacttccaaccatatctgaacgccctgaatattagcgccaacgatctttacctagaagggaaacttttacacagagagcaccaatatgtgccagcagtgaggtctgttttggctttgaacctcttagcgatcatcttttccttctttaccatgatttttattatattactgtactttaacagatatatgttcaaacaaccattatggctcattgccctagctctacacgtttgcgttggtgtagccactgtattggcagccattatcatatccgttatgattgccattataaagagcggtacggcagatgataaatatggtgttgtgtttaaagccggtcccgcctatacagggctgatatggacagcatttgcgttgtcttttatcgccacaggattgataatttatacgtggtggaggaacagacggagtggtcgttacatgtccggatctgtgacgaataggaaaggcgaaatttacacgtatggggatggttctgccatttctgcagaccgtttcggcgaccataacttgggtgatgatgatgatgctgatttcgaaaaacaggtgaatcgtaatgaaataaccgctatcgacaacagtagttctgccaataatacagatgtcacaggtagtacgagtaatagaacagagctaagtcaccccgacgtgacaccaaaagattcaaatggacctgttaacaataatgcacatttggtagcataa

SEQ ID NO: 6500 - DNA, 2253 bp, Artificial Sequence
  Description of Artificial Sequence: Synthetic polynucleotide
atgaggatcgaaaagcaccgtacccccttatccaagggaattatttggacgatattgtctgtgtgccttttattcatgttcaccacattaatattggttattgtagccactgctggctccaccgccaactacaaacccttaacgaatatatacatcggtgaagccgatatcaaacacatcaatgtaagcaaggtgatcccgcagataggccctattttgacaatattagggtccgctttgacggctccgaacagctccttggatgatatttttggcgccatgaaaaatattgctgatactcccgcgttgacgccgttattgacgcttttgtctaatgctgacaacaccacagtaaccatcgaatctttgaccgaattggctcccttagcgatcagcggcaatcctgcttctagcacgaggcagttgacagagattaatgggttgttgaagtattctgacaacgcaactgaaacattagatggcctctccaggttagtttctgcttctttatcttccgcaagctctaactcttccagtgactctactactttggttttggacttattaaaagactccgataacccacagaattccacagatgcattgttgactttgaataatttgacaatgtctgaaaaggcgcaattgttaccggtattcaggttgttcgctttctccacgaaccaaacagctacaatgacggctttggcgaccttgatgaacactactatttcttcttctttagcccaaacattattaactcagttacaaaacacaatttccaacggaggttccttgaataacacgtttagtactttgcaaccattggtgccgcaggcaagcgcccccgcatttgatgcagtggaattgttattaaaccagaccacctctacaaatcagacattgagcactttatctgatttgttggaacaaaacctcactcagtcttcttctgcaaaaaaggcgtttgctgccttaacccaattgatggaaaatagtgacaactccacaatggttgtcactagtgtccaatctttggctgcggtgacaaatacaactcaatctactcaacagttgattggattagatgatgtgataagctcctccagtaacaccaacgaaactttgtccatcttgtccgaattacaaagtggcttatccggtaatagtagctccgtacagtacattccatatctcttcagtcttttaggggcatccactgatcctaaaacaacattttcttctttagtgacgttgacttcctgggctcaagaaaaccctcagaccttcttgcccattttagatatattagcggatgccaaatccgtccaaccgatttccgcagaagaattgaacgccatgacgccgaatatattggagtatttgaaaattccgatttactatcgcttatccattttcacgttatgccatgctaacttggaaaacaagatcttagattgtaactccccacatgctgtacaaaacttggattttagatctattatttatgacgcattagtcacaagtgacttccaaccatatttgaacgccttgaatattagcgccaacgatctttacttggaagggaaacttttacacagagagcaccaatatgtgccagcagtgaggtctgttttggctttgaacctcttagcgatcatcttttccttctttaccatgatttttattatattattgtactttaacagatatatgttcaaacaaccattatggctcattgccttagctttacacgtttgcgttggtgtagccactgtattggcagccattatcatatccgttatgattgccattataaagagcggtacggcagatgataaatatggtgttgtgtttaaagccggtcccgcctatacagggttgatatggacagcatttgcgttgtcttttatcgccacaggattgataatttatacgtggtggaggaacagaagaagtggtcgttacatgtccggatctgtgacgaataggaaaggcgaaatttacacgtatggggatggttctgccatttctgcagaccgtttcggcgaccataacttgggtgatgatgatgatgctgatttcgaaaaacaggtgaatcgtaatgaaataaccgctatcgacaacagtagttctgccaataatacagatgtcacaggtagtacgagtaatagaacagagttgagtcaccccgacgtgacaccaaaagattctaatggacctgttaacaataatgcacatttggtagcatga

SEQ ID NO: 6501 - DNA, 555 bp, Saccharomyces cerevisiae
atgaacaccaatagtaatactatggtaatgaatgacgcaaatcaagcacaaataacggccacatttacgaagaagatattagcgcatttggatgatccggactccaacaaattggcccaattcgtacagctttttaatccaaacaactgcagaataatatttaatgctacccccttcgcgcaagcaacagtttttctgcaaatgtggcaaaaccaggtcgtacaaacacaacatgccctaacaggagtagactatcacgctattccgggatccggcacgttgatatgcaacgtcaattgcaaagtcagattcgacgaaagcggcagagacaagatggggcaagacgcgactgttcccattcaaccaaataacactgggaacagaaatcgacccaacgatatgaacaagccaagacctctatggggtccatattttggcatttccctgcagctgatcatcgacgaccgcatatttagaaatgattttaatggtgtaatatcggggtttaactataacatggtttacaaacccgaggattctctgctaaaaatttag

SEQ ID NO: 6502 - DNA, 555 bp, Artificial Sequence
  Description of Artificial Sequence: Synthetic polynucleotide
atgaacaccaatagtaatactatggtaatgaatgacgcaaatcaagcacaaataacggccacatttacgaagaagatattagcgcatttggatgatccggactccaacaaattggcccaattcgtacagctttttaatccaaacaactgcagaataatatttaatgctacccccttcgcgcaagcaacagtttttttgcaaatgtggcaaaaccaggtcgtacaaacacaacatgccttaacaggagtagactatcacgctattccgggatccggcacgttgatatgcaacgtcaattgcaaagtcagattcgacgaaagcggcagagacaagatggggcaagacgcgactgttcccattcaaccaaataacactgggaacagaaataggcccaacgatatgaacaagccaagacctttatggggtccatattttggcatttccttacagttaatcatcgacgaccgcatatttagaaatgattttaatggtgtaataagcgggtttaactataacatggtttacaaacccgaggattctttattgaaaatttga

SEQ ID NO: 6503 - DNA, 1767 bp, Saccharomyces cerevisiae
atgtcaagcttatacatcaaaacaccactgcatgcattatctgctggtccggattctcatgcaaatagctcctattatgacaatcttttattgccttcattttccaatttatccagtaatatcagcaggaacaatatcacaaccgataacaatataaattcagcaagtcctaggaagtattcgtttcattcgctcaatgtgtcgccaattctttccccaatatctttggctaacgaaatacttggaaaaaaatcaaatactgcaccagcatcgccacatcatatggattacaatccaatttcctcattaacaccaggcaattcaccagaattcaacaaggcaagcttatctcagattagttttacaaatccattgaactatgggtctggcttaggtttttcctctaattcacaacctcgactaccattgttagacaggctatcgtccgtctctttatctaagagaccggagcgcccacaacaaagcctaccatcactaaggcatctgcaattattacccagtcctcttttacaagaaaacgcagcacgcttccctgatacatcaaaacgtacatctaattggaaaactgatcttacccattggtgtaaggatacaaactatcaagactatgttaaaatacgcgaagaagtggctcatttcaagccattaagtatacccaacttaactaataatcaaaataatgatagtttcaattacggcaaggaattggaatcgactaggtcgtccaagttccattccccgtctaaggaatcatttgatcgtaccaaactaattccttcgattctagaagctaaagatcaatttaaagatctttccaacaatgcatggagtattactcctcccgtcacaccgccgatgagtccaccaaccaatagaaccatggagcgcacgacgcttagaggagtagaggcctctttttttgaggggaaatccagcaataacgattcaatattcaatccaattattagtgaaaaattggttcaagaagttaaacatcaaagacaattacgtggaaattcatttcccatgccaaatgccagtcacaaaaagacgaacagtttcaaagctttgcaaataaaaaaattgcttgcgaatagagacattctatcgaacaattccaaatctaatgtaaggaaaccatctaagaacaaaatctcaaagcaagcatcaaatgttttcggtaacactgcaagacaattggtgatgaaactcgacaacgctagttacagttctgtctctgcatcttcatctccatctccctccacaccgacgaaaagtggcaagatgagatcaagatcatcctcacctgtgcgtcccaaggcatacactccaagcccaaggtcacccaattatcatagatttgctctcgactctccccctcaaagccctcgaagatcatcaaattcaagcataacgaaaaagggaagtagaaggtccagtggctcatcacccactcgtcacaccacaagagtgtgcgtgtcgtgtcattcgagtgattcgccctgttggaggccatcgtggtcgccaagaaagcaagatcagctatgtaactcttgtggtcttcgatataaaaaaacacatacaagatgtttgaacgatttatgtcgtaagatccccacaaagggtgaaataaacattatgaaatccaatggaatagacaaagaattcgtccccgaacgcaactgcgaaattgaagggtaccgttgcttattttgtaattacataactgagacagtagagaattga

SEQ ID NO: 6504 - DNA, 1767 bp, Artificial Sequence
  Description of Artificial Sequence: Synthetic polynucleotide
atgtctagcttatacatcaaaacaccattgcatgcattatctgctggtccggattctcatgcaaatagctcctattatgacaatcttttattgccttctttttccaatttatccagtaatatcagcaggaacaatatcacaaccgataacaatataaattctgcaagtcctaggaagtattcttttcattctctcaatgtgtctccaattctttccccaatatctttggctaacgaaatacttggaaaaaaatctaatactgcaccagcatctccacatcatatggattacaatccaatttcctctttaacaccaggcaattctccagaattcaacaaggcaagcttatctcagattagttttacaaatccattgaactatgggtctggcttaggtttttcctctaattctcaacctcgtttgccattgttagacaggctttcctccgtctctttatctaagagaccggagcgcccacaacaaagcttgccatctttgaggcatttacaattattacccagtcctcttttacaagaaaacgcagcacgcttccctgatacaagtaaacgtacatctaattggaaaactgatcttacccattggtgtaaggatacaaactatcaagactatgttaaaatacgcgaagaagtggctcatttcaagccattaagtatacccaacttaactaataatcaaaataatgatagtttcaattacggcaaggaattggaatctactaggtcttccaagttccattccccgtctaaggaaagttttgatcgtaccaaattgattccttctattttggaagctaaagatcaatttaaagatctttccaacaatgcatggagtattactcctcccgtcacaccgccgatgagtccaccaaccaatagaaccatggagcgcacgacgcttagaggagtagaggcctctttttttgaggggaaatccagcaataacgattctatattcaatccaattattagtgaaaaattggttcaagaagttaaacatcaaagacaattacgtggaaattcttttcccatgccaaatgccagtcacaaaaagacgaacagtttcaaagctttgcaaataaaaaaattgcttgcgaatagagacattttatctaacaattccaaatctaatgtaaggaaaccatctaagaacaaaatctccaagcaagcatctaatgttttcggtaacactgcaagacaattggtgatgaaactcgacaacgctagttacagttctgtctctgcatcttcttctccatctccctccacaccgacgaaaagtggcaagatgagatctagaagttcctcccctgtgcgtcccaaggcatacactccaagcccaaggtctcccaattatcatagatttgctctcgactctccccctcaaagccctagaagaagtagtaatagtagcataacgaaaaagggaagtagaaggtccagtggctcttctcccactcgtcacaccacaagagtgtgcgtgagctgtcattctagtgattctccctgttggaggccatcttggtctccaagaaagcaagatcagttgtgtaactcttgtggtcttcgttataaaaaaacacatacaagatgtttgaacgatttatgtcgtaagatccccacaaagggtgaaataaacattatgaaatccaatggaatagacaaagaattcgtccccgaacgcaactgcgaaattgaagggtaccgttgcttattttgtaattacataactgagacagtagagaattga

SEQ ID NO: 6505 - DNA, 1401 bp, Saccharomyces cerevisiae
atgtctagtactcaagtaggaaatgctctatctagttccactactactttagtggacttgtctaattctacggttacccaaaagaagcaatattataaagatggcgagacgctgcacaatcttttgcttgaactaaagaataaccaagatttggaacttttaccgcatgaacaagcgcatcctaaaatatttcaagcgctcaaggctcgtattggtagaattaataatgaaacgtgcgaccccggtgaggagaactcgtttttcatatgcgatttgggagaagtcaagagattattcaacaactgggtgaaggagcttcctagaattaagccattttatgccgtcaaatgtaatcctgataccaaggttttgtcattattagcagagttgggcgttaatttcgattgcgcttccaaagtggaaattgacagagtattatcgatgaacatctcgccggatagaattgtttacgctaatccttgtaaagtagcatctttcattagatatgcagcttcaaaaaatgtaatgaagtctacttttgacaatgtagaagaattgcataaaatcaaaaagtttcatcctgagtctcagttgttattaagaatcgctaccgatgactctaccgctcaatgtcgactttccaccaaatatggctgtgaaatggaaaacgtagacgttttattaaaggctataaaggaactaggtttaaacctggctggtgtttctttccacgtcggttcaggcgcttctgattttacaagcttatacaaagccgttagagatgcaagaacggtatttgacaaagctgctaacgaatacgggttgccccctttgaagattttggatgtaggtggtggatttcaatttgaatccttcaaagaatcaactgctgttttgcgtctagcgctagaggaatttttccctgtaggttgtggtgttgatataattgcagagcctggcagatactttgtagctacagcgttcactttggcatctcatgtgattgcgaagagaaaactgtctgagaatgaagcaatgatttacactaacgatggtgtatacgggaacatgaattgtattttattcgatcatcaagagccccatccaagaaccctttatcataatttggaatttcattacgacgattttgaatccactactgcggtcctcgactctatcaacaaaacaagatctgagtatccatataaagtttccatctggggacccacatgtgatggtttggattgtattgccaaagagtattacatgaagcatgatgttatagtcggtgattggttttattttcctgccctgggtgcctacacatcatcggcggctactcaattcaacggctttgagcagactgcggatatagtatacatagactctgaactcgattga

SEQ ID NO: 6506 - DNA, 1401 bp, Artificial Sequence
  Description of Artificial Sequence: Synthetic polynucleotide
atgtctagtactcaagtaggaaatgctttatctagttccactactactttagtggacttgtctaattctacggttacccaaaagaagcaatattataaagatggcgagacgttgcacaatcttttgcttgaattgaagaataaccaagatttggaacttttaccgcatgaacaagcgcatcctaaaatatttcaagcgctcaaggctcgtattggtagaattaataatgaaacgtgcgaccccggtgaggagaactcttttttcatatgcgatttgggagaagtcaagagattattcaacaactgggtgaaggagcttcctagaattaagccattttatgccgtcaaatgtaatcctgataccaaggttttgtctttattagcagagttgggcgttaatttcgattgcgcttccaaagtggaaattgacagagtattatctatgaacatctctccggatagaattgtttacgctaatccttgtaaagtagcatctttcattagatatgcagcttccaaaaatgtaatgaagtctacttttgacaatgtagaagaattgcataaaatcaaaaagtttcatcctgagtctcagttgttattaagaatcgctaccgatgactctaccgctcaatgtaggctttccaccaaatatggctgtgaaatggaaaacgtagacgttttattaaaggctataaaggaattgggtttaaacttggctggtgtttctttccacgtcggttctggcgcttctgattttacaagcttatacaaagccgttagagatgcaagaacggtatttgacaaagctgctaacgaatacgggttgccccctttgaagattttggatgtaggtggtggatttcaatttgaatccttcaaagaatctactgctgttttgcgtttggcgctcgaggaatttttccctgtaggttgtggtgttgatataattgcagagcctggcagatactttgtagctacagcgttcactttggcatctcatgtgattgcgaagagaaaattatctgagaatgaagcaatgatttacactaacgatggtgtatacgggaacatgaattgtattttattcgatcatcaagagccccatccaagaaccctttatcataatttggaatttcattacgacgattttgaatccactactgcggtcctcgactctatcaacaaaacaagatctgagtatccatataaagtttccatctggggacccacatgtgatggtttggattgtattgccaaagagtattacatgaagcatgatgttatagtcggtgattggttttattttcctgcccttggtgcctacacatcttctgcggctactcaattcaacggctttgagcagactgcggatatagtatacatagactctgaactcgattga

SEQ ID NO: 6507 - DNA, 213 bp, Saccharomyces cerevisiae
atgtattcaaagatcttgctataccgtagtaacgttctgttcatgaactttttctctgtttttgtatgtacaattggtactttatttttggttttcgcagatgtctatgttcttgcgtcggcatttttccaaagtaaaaaggaaaaagagacaaagtttaagcatttacactaccaaaaaagatcttgtttctttctagcaaatatacactaa

SEQ ID NO: 6508 - DNA, 213 bp, Artificial Sequence
  Description of Artificial Sequence: Synthetic polynucleotide
atgtattccaagatcttgttgtaccgtagtaacgttttgttcatgaactttttctctgtttttgtatgtacaattggtactttatttttggttttcgcagatgtctatgttcttgcgtctgcatttttccaaagtaaaaaggaaaaagagacaaagtttaagcatttacactaccaaaaaagatcttgtttctttttggcaaatatacactga

SEQ ID NO: 6509 - DNA, 921 bp, Saccharomyces cerevisiae
atgatgaaaaaaaaaccaaagtgccaaattgcaaggaccaaaccatcggtcgaaaacgtcataccatataaccaattcaagaagacgcagccgcgattcaacggcaacttttctgcactgaataatgaagaatacataatactctttggcggaggtcgggacctgatactaggctccctgacaccttgttcgagctctcatttgtccaatcaagccaacccacaagacaccagtgagtatggcacagacctgtttatactcaacagctgcattatcatttggttcaatggcttgggatatgggctggaaattccctacagcagcgttttgtaccatgcatcaagacggctaccagatggtagggaagggcttcaattagaaattttgctgactttggaaagagacgaagtgttggacatgctctaccaaagcctcgcgccacaggcctgcgaattcgacggcgaagaagcacatgccttcaccgtgcgcagcgtggaattgactatcaggcccaaatattcaatatacgatcgccattataacaacgaaatcgaaacccttttcaccttcgaaaacttcggcgtgaacaggggcgatgacctggtaaacaattgtaacgaagcactagccgtatgcatggacctgcacggtgaggacgtacaagatcaagaccaggaacaataccaagatccaagcatggcgtttgagggtgcgcaagatctcaacgccacgtattctgggcttggagacacccttcacgggccgcccgtgtatcagaacgacgggctggcagacgatctggatggcgacctcgttatggacaacgtggtctctaggggtggtccagaagcaagtatgtctatggagttctacgcaaatcaaaatcttgctggcagaaagaactccagagacaatgaatga

SEQ ID NO: 6510 - DNA, 921 bp, Artificial Sequence
  Description of Artificial Sequence: Synthetic polynucleotide
atgatgaaaaaaaaaccaaagtgccaaattgcaaggaccaaaccaagtgtcgaaaacgtcataccatataaccaattcaagaagacgcagccgcgcttcaacggcaacttttctgcattgaataatgaagaatacataatactctttggcggaggtagagacttgatattgggctccttaacaccttgtagcagctctcatttgtccaatcaagccaacccacaagacaccagtgagtatggcacagacttatttatactcaacagctgcattatcatttggttcaatggcttgggatatgggttggaaattccctacagcagcgttttgtaccatgcatctagaagattaccagatggtagggaagggcttcaattagaaattttgttgactttggaaagagacgaagtgttggacatgctctaccaaagcctcgcgccacaggcctgcgaattcgacggcgaagaagcacatgccttcaccgtgcgcagcgtggaattgactatcaggcccaaatattctatatacgatcgccattataacaacgaaatcgaaacccttttcaccttcgaaaacttcggcgtgaacaggggcgatgacttggtaaacaattgtaacgaagcattggccgtatgcatggacttgcacggtgaggacgtacaagatcaagaccaggaacaataccaagatccaagcatggcgtttgagggtgcgcaagatctcaacgccacgtattctgggcttggagacacccttcacgggccgcccgtgtatcagaacgacgggttagcagacgatttggatggcgacctcgttatggacaacgtggtctctaggggtggtccagaagcaagtatgtctatggagttctacgcaaatcaaaatcttgctggcagaaagaactccagagacaatgaatga

SEQ ID NO: 6511 - DNA, 6156 bp, Saccharomyces cerevisiae
atggacgcttactccacaagaccattaaccctatctcacggttctttagagcacgtgcttctggtaccaaccgcttcatttttcattgcttcgcaattacaagaacaatttaataaaattttgcccgaacccactgaagggtttgctgcagatgacgagcctaccacacctgctgaactagtggggaaattccttggctacgtatcttctctagtcgaaccttccaaggtcggtcaattcgatcaggtcttgaacctttgcttaacagaatttgaaaactgttatttagaaggcaatgacattcacgccttggctgctaaactattacaggaaaacgacacaactttagtgaagactaaagaactaattaaaaattatattaccgccagaataatggctaagagaccatttgacaaaaaatccaactctgctctttttagggccgtcggcgagggtaacgcacaattggtagccattttcggtggtcaaggtaacaccgacgactactttgaagaattgcgtgatctatatcaaacttatcatgtcttagtgggagatttaatcaagttctccgctgaaactttaagtgaactgattagaactactttagatgctgaaaaagtctttactcaaggtttaaacatattggaatggttggagaacccttcaaataccccagacaaggactatttactttccattccaatttcatgccccttaattggtgtcattcaattggctcactacgtagttactgccaagcttttgggtttcactccaggtgagttaagatcttacttaaaaggtgctacaggtcactctcaaggtttggttactgctgtcgccatagctgagacggattcctgggaatccttcttcgtctccgtaagaaaagcaattactgtattattcttcatcggtgttcgttgttacgaagcatacccaaacacttccctaccaccatccatcttggaagattccttggaaaacaatgaaggtgttccatctccaatgttgtccatttccaatctaactcaagaacaagttcaagactatgtaaataagactaactctcatttgccagctggtaaacaagttgaaatttctctagtcaatggtgcgaagaatctagtcgtatcgggcccaccacaatcattatatggtttaaacttgactttaagaaaggccaaggccccatctggactggatcaatcaagaatcccattcagcgaaagaaaattgaagttctccaataggttcttacctgttgcatcaccattccattcccatctattggttccagcttcagatttgattaacaaagacttagtcaaaaacaatgtcagctttaacgctaaagatattcaaatccccgtttacgacacttttgatggttcagatctaagagtcctttcaggttccatttccgagagaatcgtcgactgcatcattagattacctgtcaaatgggaaactactacacaattcaaagccacccacatattagactttggtccaggtggagcttccggtttaggtgttttaacccatcgtaataaagatggtactggtgttcgtgttatcgttgccggtactctcgacattaacccagatgatgattacggattcaagcaagaaatctttgatgttactagtaatggtttgaagaaaaatccaaactggttggaagaataccatccaaaattaattaagaacaaatcaggcaaaatttttgtcgaaacaaaattttctaaattaatcggtagaccacctttattggttcctggtatgacaccatgtactgtttctccagatttcgtagctgctaccacaaatgctggttataccattgagttggccggtggtggttacttttccgcagcaggtatgaccgccgctattgattctgtggtttctcagatagaaaagggtagtaccttcggtatcaacttgatctacgtcaatccatttatgttacaatggggtattccattaatcaaggaactaagaagcaaaggttatccaattcaattcttgaccattggtgctggtgtcccatcattggaagttgctagtgaatacatagagacattaggtttgaagtacttgggtttgaaaccaggttccattgatgctatttcgcaagttataaacattgctaaagcacatccaaacttcccaatagctttacaatggaccggtggtagaggtggtggtcatcattctttcgaagatgcccacactccaatgttacaaatgtactccaagattagaagacatccaaacattatgttgatattcggttctggtttcggttctgctgatgacacttacccatacttaaccggtgaatggtccacaaaattcgattatccaccaatgccattcgatggtttcctatttggttcgagggtcatgattgctaaggaagttaaaacttctcctgatgctaagaagtgtattgctgcttgtactggtgttcctgatgataaatgggaacaaacctacaagaagccaactggtggtattgtcactgttcgctctgaaatgggtgaaccaattcacaaaattgccactcgtggtgttatgctatggaaggaattcgacgaaaccatcttcaacttaccaaagaataagttggtaccaactttggaagcaaagagagattacattatctcaagattgaacgccgatttccaaaaaccatggtttgctaccgtcaacggtcaagcccgtgacctagccacaatgacatacgaagaagttgcaaagagattggtggaattaatgttcatcagatctaccaactcttggtttgatgtcacatggagaacctttactggtgatttcctacgtcgtgtcgaagaacgtttcactaaaagtaagacattgtctttaatccaatcctattctctactagacaagcctgatgaagctattgaaaaagtatttaatgcttatcctgccgctagggaacagttcttgaatgcgcaagatattgatcactttttgagcatgtgtcaaaatccaatgcaaaaaccagtgccttttgttccagttttggatcgtagattcgagatttttttcaaaaaagattcgttatggcaatctgagcacttggaagccgtcgtcgaccaagacgttcaaagaacatgtatcctacatggacctgttgcagcacaattcactaaagtcatcgatgaaccaattaagagcattatggatggtattcacgatggtcacatcaaaaagttactacatcaatattacggtgacgatgagtcaaagattccagcagttgagtactttggtggtgaaagccctgtagacgtacaaagtcaagttgattcttcctctgtatctgaagactcagctgtttttaaggcaacatcctctactgatgaagaaagctggtttaaggctttggcgggatccgaaattaactggagacatgcaagtttcttatgttcctttatcactcaagataaaatgtttgtttctaacccaattagaaaagttttcaagccaagccaaggaatggttgttgagatttccaacggcaatacttcttcaaagactgttgtcactctttcagaacctgttcaaggtgaattgaaaccaactgttattttgaagttgttgaaggagaacataatccaaatggaaatgattgagaacagaactatggatggtaagcccgtcagcttgccattgttgtacaacttcaacccagataatggttttgctccaatctctgaagttatggaggacagaaaccaaagaattaaggaaatgtactggaaattatggattgatgagcctttcaatttggactttgacccaagagatgtcattaagggcaaagatttcgagatcaccgctaaagaagtttatgactttacacacgctgttggaaacaattgtgaagacttcgtttctagacctgatagaacgatgttggccccaatggactttgctattgttgtcggatggagagccatcatcaaggccattttccctaatacggtcgatggtgacttattgaagttggttcatttgtctaacggctacaagatgattcctggcgctaagccactgcaagttggtgatgttgtttcaactactgctgttattgaatctgtcgtcaaccaacctacaggaaagattgtcgatgtggtaggtacattatcgagaaatggcaagcctgtcatggaagtcacctcctcattcttctacagaggcaactatactgactttgaaaacactttccaaaagactgttgaacctgtttatcaaatgcacatcaaaacttctaaagatatagctgtcttgcgctctaaggagtggttccaattggacgatgaagacttcgatctgttaaacaaaactttgactttcgaaactgaaactgaagttactttcaagaatgctaacatcttctcttcagtgaaatgttttggcccaattaaagttgaattgccaaccaaagaaaccgtggagatcggtattgtcgattacgaagccggtgcctctcacggtaaccctgttgttgatttcttgaagagaaacggttccacattggaacaaaaggtcaatctagaaaatcctattccaattgcagtacttgattcgtacactccaagtaccaacgaaccatacgctagagtttctggtgatttgaatccaattcacgtttcacgtcattttgcctcttacgcaaacttgccaggtactatcacgcacggtatgttttcttctgcttccgtccgtgctttgattgaaaactgggctgctgacagtgtttcatccagggtacgtggctacacttgtcaatttgttgacatggttttgcctaacactgctttgaaaacatcgattcaacatgttggtatgatcaatggtagaaaattgataaagtttgaaactagaaatgaagatgacgttgtagttttgactggtgaagccgaaattgaacaacctgttactaccttcgttttcactggtcaaggttcacaagaacaaggtatgggtatggacttatacaaaacttctaaagctgctcaagatgtttggaatagagctgacaaccatttcaaggacacttatggtttctctatcttagacattgtcattaacaacccagttaacttaacaattcacttcggtggtgaaaagggtaagaggatcagagaaaactattctgctatgatctttgagactatcgtggatggaaaattgaagactgaaaaaattttcaaggaaattaatgagcacagtacttcttacacatttagatctgaaaaaggtttattgtctgctactcaatttacacaaccagctttaactttgatggaaaaagctgctttcgaagacttgaaatctaaaggtttgatcccagccgatgctacttttgctggtcactctttaggtgagtatgctgctttggcctctttggctgatgttatgtctatcgaatctttagttgaagttgtgttctacagaggtatgactatgcaagttgctgttccaagagatgagttgggcagatccaactatggtatgattgccattaacccaggtagagtcgctgcatcattctctcaagaagctttgcaatatgttgttgagagagttggtaagagaaccggctggttggttgaaatcgtcaactacaacgttgaaaaccaacaatatgttgcagctggtgatctaagagctttagacaccgttaccaatgttctaaacttcatcaaattacaaaaaattgatattattgaactacaaaagtccttatctttggaagaagttgaaggtcatttgtttgagatcattgacgaagcttccaagaaatctgctgtcaagcctcgcccacttaaattggagagaggttttgcttgtatcccattagttggtatttctgttcctttccattccacctacttgatgaatggtgttaaaccattcaagagtttcttgaagaagaatatcataaaagaaaatgtgaaggttgctagattggccggaaagtacattccaaacttgactgcaaaaccattccaggttactaaggaatatttccaggacgtttatgatttgactggctccgaacctatcaaggaaatcatcgacaactgggaaaagtatgaacaatcctaa

SEQ ID NO: 6512 - DNA, 6156 bp, Artificial Sequence
  Description of Artificial Sequence: Synthetic polynucleotide
atggacgcttactccacaagaccattaaccctttctcacggttctttagagcacgtgcttttggtaccaaccgcttcttttttcattgcttctcaattacaagaacaatttaataaaattttgcccgaacccactgaagggtttgctgcagatgacgagcctaccacacctgctgaattagtggggaaattccttggctacgtatcttctttggtcgaaccttccaaggtcggtcaattcgatcaggtcttgaacctttgcttaacagaatttgaaaactgttatttagaaggcaatgacattcacgccttggctgctaaattattacaggaaaacgacacaactttagtgaagactaaagaattgattaaaaattatattaccgccagaataatggctaagagaccatttgacaaaaaatccaactctgctctttttagggccgtcggcgagggtaacgcacaattggtagccattttcggtggtcaaggtaacaccgacgactactttgaagaattgcgtgatttatatcaaacttatcatgtcttagtgggagatttaatcaagttctccgctgaaactttaagtgaattgattagaactactttagatgctgaaaaagtctttactcaaggtttaaacatattggaatggttggagaacccttccaataccccagacaaggactatttactttccattccaatttcttgccccttaattggtgtcattcaattggctcactacgtagttactgccaagcttttgggtttcactccaggtgagttaagatcttacttaaaaggtgctacaggtcactctcaaggtttggttactgctgtcgccatagctgagacggattcctgggaatccttcttcgtctccgtaagaaaagcaattactgtattattcttcatcggtgttcgttgttacgaagcatacccaaacacttccttgccaccatccatcttggaagattccttggaaaacaatgaaggtgttccatctccaatgttgtccatttccaatttaactcaagaacaagttcaagactatgtaaataagactaactctcatttgccagctggtaaacaagttgaaatttctttggtcaatggtgcgaagaatttggtcgtaagtggcccaccacaatctttatatggtttaaacttgactttaagaaaggccaaggccccatctggattagatcaatctagaatcccattcagcgaaagaaaattgaagttctccaataggttcttacctgttgcatctccattccattcccatcttttggttccagcttctgatttgattaacaaagacttagtcaaaaacaatgtcagctttaacgctaaagatattcaaatccccgtttacgacacttttgatggttctgatttgagagtcctttctggttccatttccgagagaatcgtcgactgcatcattagattacctgtcaaatgggaaactactacacaattcaaagccacccacatattagactttggtccaggtggagcttccggtttaggtgttttaacccatcgtaataaagatggtactggtgttcgtgttatcgttgccggtactctcgacattaacccagatgatgattacggattcaagcaagaaatctttgatgttactagtaatggtttgaagaaaaatccaaactggttggaagaataccatccaaaattaattaagaacaaatctggcaaaatttttgtcgaaacaaaattttctaaattaatcggtagaccacctttattggttcctggtatgacaccatgtactgtttctccagatttcgtagctgctaccacaaatgctggttataccattgagttggccggtggtggttacttttccgcagcaggtatgaccgccgctattgattctgtggtttctcagatagaaaagggtagtaccttcggtatcaacttgatctacgtcaatccatttatgttacaatggggtattccattaatcaaggaattgagaagcaaaggttatccaattcaattcttgaccattggtgctggtgtcccatctttggaagttgctagtgaatacatagagacattaggtttgaagtacttgggtttgaaaccaggttccattgatgctatttctcaagttataaacattgctaaagcacatccaaacttcccaatagctttacaatggaccggtggtagaggtggtggtcatcattctttcgaagatgcccacactccaatgttacaaatgtactccaagattagaagacatccaaacattatgttgatattcggttctggtttcggttctgctgatgacacttacccatacttaaccggtgaatggtccacaaaattcgattatccaccaatgccattcgatggtttcttatttggttctagggtcatgattgctaaggaagttaaaacttctcctgatgctaagaagtgtattgctgcttgtactggtgttcctgatgataaatgggaacaaacctacaagaagccaactggtggtattgtcactgttcgctctgaaatgggtgaaccaattcacaaaattgccactcgtggtgttatgttatggaaggaattcgacgaaaccatcttcaacttaccaaagaataagttggtaccaactttggaagcaaagagagattacattatctccagattgaacgccgatttccaaaaaccatggtttgctaccgtcaacggtcaagcccgtgacttggccacaatgacatacgaagaagttgcaaagagattggtggaattaatgttcatcagatctaccaactcttggtttgatgtcacatggagaacctttactggtgatttcttgcgtcgtgtcgaagaacgtttcactaaaagtaagacattgtctttaatccaatcctattctttattagacaagcctgatgaagctattgaaaaagtatttaatgcttatcctgccgctagggaacagttcttgaatgcgcaagatattgatcactttttgagcatgtgtcaaaatccaatgcaaaaaccagtgccttttgttccagttttggatcgtagattcgagatttttttcaaaaaagattctttatggcaatctgagcacttggaagccgtcgtcgaccaagacgttcaaagaacatgtatcttgcatggacctgttgcagcacaattcactaaagtcatcgatgaaccaattaagagcattatggatggtattcacgatggtcacatcaaaaagttattacatcaatattacggtgacgatgagtctaagattccagcagttgagtactttggtggtgaaagccctgtagacgtacaaagtcaagttgattcttcctctgtatctgaagactctgctgtttttaaggcaacatcctctactgatgaagaaagctggtttaaggctttggcgggatccgaaattaactggagacatgcaagtttcttatgttcctttatcactcaagataaaatgtttgtttctaacccaattagaaaagttttcaagccaagccaaggaatggttgttgagatttccaacggcaatacttcttccaagactgttgtcactctttctgaacctgttcaaggtgaattgaaaccaactgttattttgaagttgttgaaggagaacataatccaaatggaaatgattgagaacagaactatggatggtaagcccgtcagcttgccattgttgtacaacttcaacccagataatggttttgctccaatctctgaagttatggaggacagaaaccaaagaattaaggaaatgtactggaaattatggattgatgagcctttcaatttggactttgacccaagagatgtcattaagggcaaagatttcgagatcaccgctaaagaagtttatgactttacacacgctgttggaaacaattgtgaagacttcgtttctagacctgatagaacgatgttggccccaatggactttgctattgttgtcggatggagagccatcatcaaggccattttccctaatacggtcgatggtgacttattgaagttggttcatttgtctaacggctacaagatgattcctggcgctaagccattgcaagttggtgatgttgtttccactactgctgttattgaatctgtcgtcaaccaacctacaggaaagattgtcgatgtggtaggtacattatctagaaatggcaagcctgtcatggaagtcacctccagtttcttctacagaggcaactatactgactttgaaaacactttccaaaagactgttgaacctgtttatcaaatgcacatcaaaacttctaaagatatagctgtcttgcgctctaaggagtggttccaattggacgatgaagacttcgatttattaaacaaaactttgactttcgaaactgaaactgaagttactttcaagaatgctaacatcttctcttctgtgaaatgttttggcccaattaaagttgaattgccaaccaaagaaaccgtggagatcggtattgtcgattacgaagccggtgcctctcacggtaaccctgttgttgatttcttgaagagaaacggttccacattggaacaaaaggtcaatttggaaaatcctattccaattgcagtacttgattcttacactccaagtaccaacgaaccatacgctagagtttctggtgatttgaatccaattcacgtttctcgtcattttgcctcttacgcaaacttgccaggtactatcacgcacggtatgttttcttctgcttccgtccgtgctttgattgaaaactgggctgctgacagtgtttcttccagggtacgtggctacacttgtcaatttgttgacatggttttgcctaacactgctttgaaaacatccattcaacatgttggtatgatcaatggtagaaaattgataaagtttgaaactagaaatgaagatgacgttgtagttttgactggtgaagccgaaattgaacaacctgttactaccttcgttttcactggtcaaggttctcaagaacaaggtatgggtatggacttatacaaaacttctaaagctgctcaagatgtttggaatagagctgacaaccatttcaaggacacttatggtttctctatcttagacattgtcattaacaacccagttaacttaacaattcacttcggtggtgaaaagggtaagaggatcagagaaaactattctgctatgatctttgagactatcgtggatggaaaattgaagactgaaaaaattttcaaggaaattaatgagcacagtacttcttacacatttagatctgaaaaaggtttattgtctgctactcaatttacacaaccagctttaactttgatggaaaaagctgctttcgaagacttgaaatctaaaggtttgatcccagccgatgctacttttgctggtcactctttaggtgagtatgctgctttggcctctttggctgatgttatgtctatcgaatctttagttgaagttgtgttctacagaggtatgactatgcaagttgctgttccaagagatgagttgggcagatccaactatggtatgattgccattaacccaggtagagtcgctgcatctttctctcaagaagctttgcaatatgttgttgagagagttggtaagagaaccggctggttggttgaaatcgtcaactacaacgttgaaaaccaacaatatgttgcagctggtgatttgagagctttagacaccgttaccaatgttttgaacttcatcaaattacaaaaaattgatattattgaattacaaaagtccttatctttggaagaagttgaaggtcatttgtttgagatcattgacgaagcttccaagaaatctgctgtcaagcctcgcccacttaaattggagagaggttttgcttgtatcccattagttggtatttctgttcctttccattccacctacttgatgaatggtgttaaaccattcaagagtttcttgaagaagaatatcataaaagaaaatgtgaaggttgctagattggccggaaagtacattccaaacttgactgcaaaaccattccaggttactaaggaatatttccaggacgtttatgatttgactggctccgaacctatcaaggaaatcatcgacaactgggaaaagtatgaacaatcctga

SEQ ID NO: 6513 - DNA, 1284 bp, Saccharomyces cerevisiae
atgcgtaagtgtaaaatttttgttggtaactctcacccagagttgggtaatatggtttgccaaagattaggtatcgaaccagctccatgtacattaaaaaaatttgcaaatggtgaaacgtcagttcaaatcggtgtatctgttcgtgacgaagatgtgtatgtcattcaatctggttctccatccataaatgatgacattatggaactgttgattttagtttctgcctgtaggggcggatctgctaggaaaattacagcagtcattcctcaatttccttactctaaacaatgtaaaatgaagagacacagaggcgctattactgcaaggatgttggccaatctgttggtcatggctggcgctgatcatgttgtgtctatggaccttcatgcttctcaaatgcaggggtttttcaccaaaccagtcgataacctatacgggggccctagtttagcgaaatggattagagaaaatgttgaagactatgaagatgcagtagttgtctctaagaatccaggtggtactaaaagagttacagccctggcggattctttgaagatcaactttgctatgatccatactgatcgtcgtcgttctaaggatctgtattctcaaaacaaggatttgcaacaactaaagttgagaaagcaatcaatgttgaggaaaaatagaccgatcatcagacaaggtgaccatccaaatgaggaggaaaacattattttaagtaacggtattcaaactgctaggatccgtaacggccacgttatcggtgacgatgaggcagacgatgatgaagacgctatcttagaatctgacagcgaattgcattctattgatggcttagactcgcatggcttgggcggtacatatgatgctgtcgactccgaagacgaagaggaaatcccagttctctatagggaacaactgattacattggtcggaaacgtccgtggtcgctctgccatcattctagatgatatgattgatagacctgggtcatttattagcgctgctgaacatttggtgcaaaattgtggtgccaaaaaggtttatgttgttgctactcacggtatattcactggagactgtttggaagaacttgaaaagtccgatgccattgacacaattgtggtcacaaatacatatccgatttctggcgaacgcatagctgggtccaagaaattggttactatcgatgtttctccaattttcgcagaatgtatccgtcgtgatcattatggtgagagtatttccgttttatttgactctttggcagctctgtaa

SEQ ID NO: 6514 - DNA, 1284 bp, Artificial Sequence
  Description of Artificial Sequence: Synthetic polynucleotide
atgcgtaagtgtaaaatttttgttggtaactctcacccagagttgggtaatatggtttgccaaagattaggtatcgaaccagctccatgtacattaaaaaaatttgcaaatggtgaaacgtctgttcaaatcggtgtatctgttcgtgacgaagatgtgtatgtcattcaatctggttctccatccataaatgatgacattatggaattattgattttagtttctgcctgtaggggcggatctgctaggaaaattacagcagtcattcctcaatttccttactctaaacaatgtaaaatgaagagacacagaggcgctattactgcaaggatgttggccaatttattggtcatggctggcgctgatcatgttgtgtctatggaccttcatgcttctcaaatgcaggggtttttcaccaaaccagtcgataacctttacgggggccctagtttagcgaaatggattagagaaaatgttgaagactatgaagatgcagtagttgtctctaagaatccaggtggtactaaaagagttacagccttagcggattctttgaagatcaactttgctatgatccatactgatcgtcgtcgttctaaggatttatattctcaaaacaaggatttgcaacaattgaagttgagaaagcaatctatgttgaggaaaaatagaccgatcatcagacaaggtgaccatccaaatgaggaggaaaacattattttaagtaacggtattcaaactgctaggatccgtaacggccacgttatcggtgacgatgaggcagacgatgatgaagacgctatcttagaatctgacagcgaattgcattctattgatggcttagactctcatggcttgggcggtacatatgatgctgtcgactccgaagacgaagaggaaatcccagttctctatagggaacaattgattacattggtcggaaacgtccgtggtcgctctgccatcattttagatgatatgattgatagacctgggtcttttattagcgctgctgaacatttggtgcaaaattgtggtgccaaaaaggtttatgttgttgctactcacggtatattcactggagactgtttggaagaacttgaaaagtccgatgccattgacacaattgtggtcacaaatacatatccgatttctggcgaacgcatagctgggtccaagaaattggttactatcgatgtttctccaattttcgcagaatgtatccgtcgtgatcattatggtgagagtatttccgttttatttgactctttggcagctttgtga

SEQ ID NO: 6515 - DNA, 555 bp, Saccharomyces cerevisiae
atggctagatacggtgctacttccactaaccctgctaaatccgcttctgctcgtggttcctacttgcgtgtttctttcaagaacaccagagaaactgctcaagctattaacggttgggaattgaccaaggctcaaaaatacttggaacaagttttggaccaccaaagagctattcctttcagaagatttaactcttccatcggtagaactgctcaaggtaaggaatttggtgtcaccaaggctagatggccagctaagtctgttaagttcgttcaaggtttgttgcaaaacgccgctgccaacgctgaagctaaaggtttggatgctactaaattgtacgtttctcatatccaagttaaccaagctccaaagcaaagaagaagaacttacagagctcacggtagaatcaacaagtacgaatcttctccatcccacattgaattagttgtcactgaaaaggaagaagctgtcgccaaggctgctgaaaagaaggtcgttagattgacttctagacaaagaggtagaatcgccgcccaaaagcgtattgctgcttaa

SEQ ID NO: 6516 - DNA, 555 bp, Artificial Sequence
  Description of Artificial Sequence: Synthetic polynucleotide
atggctagatacggtgctacttccactaaccctgctaaatccgcttctgctcgtggttcctacttgcgtgtttctttcaagaacaccagagaaactgctcaagctattaacggttgggaattgaccaaggctcaaaaatacttggaacaagttttggaccaccaaagagctattcctttcagaagatttaactcttccatcggtagaactgctcaaggtaaggaatttggtgtcaccaaggctagatggccagctaagtctgttaagttcgttcaaggtttgttgcaaaacgccgctgccaacgctgaagctaaaggtttggatgctactaaattgtacgtttctcatatccaagttaaccaagctccaaagcaaagaagaagaacttacagagctcacggtagaatcaacaagtacgaatcttctccatcccacattgaattagttgtcactgaaaaggaagaagctgtcgccaaggctgctgaaaagaaggtcgttagattgacttctagacaaagaggtagaatcgccgcccaaaagcgtattgctgcttga

SEQ ID NO: 6517 - DNA, 2040 bp, Saccharomyces cerevisiae
atggatacgtcagtatattctcatgcattggatatttgggccaaggcagatttaacgaatcttcaaagagaattggatgctgatgttatagagattaaggataaagaaaccctgtccttgaattcaagaaagtcattagccactgagactaaaaaatttaaaaaactcgaacctgaggaaaaattgaacaatgtgaataaaataattaagcagtaccaacgtgaaattgataatttgacacagagatcaaaattctctgaaaaggttctttttgacgtatacgaaaagctttcagaggctcctgatccacagccgctactacaaagttcgttggaaaaattgggcaaaattgatgactcgaaggaacttaaggaaaaaataagctacctagaagataagctagccaaatatgcagattatgagactttgaaatcaaggttactggacctagagcaaagctctgcaaaaacattggcaaaaagactgactgcgaaaactcaagaaatcaattctacctgggaggaaaaaggaagaaattggaaagagagagaagcagatctattgaaacaattaacaaatgtacaggagcaaaacaaggcactagaggccaaaatatctaaaaatatagatatagaaggtaatggaaacgaagatggtgaccaagaaaacaatcaaaaagaagtatctacaaggattgctgaatataatctagtaacacaggagttggaaactacgcaggctagaatatatcagttagagaaaagaaatgaggaactaagtggtgctcttgcaaaggcaactagtgaagcagaaaaagaaactgagttacatgcaaaggaactaaaacttaaccagctggaaagcgaaaatgcattgttgagtgcatcctatgagcaggaacggaaatcaacatcacatgcaataaatgagttaaaagaacaattaaatagcgttgtggcggaatcggaatcttacaagtcggagctagaaactgttagaagaaaactaaacaattattctgattacaataagataaaagaagaactttctgcattgaaaaaaattgagtttggggtaaacgaagatgattctgataatgacattcgctctgaagacaagaatgataatactttcgaaagttccttactatctgcaaataagaagctccaggctactttggcggaataccgctcaaaaagtacggctcaagaggaagaacgaaacgaattgaaaaaatctgtggaccaattgaagcagcaaatagctactctcaaagaagcaaatgaaaaattagagacggacctagaaaaagtagagaacgtcagtcctcacttcaacgagactgcaagtatgatgtctggtgtaacaagacaaatgaacaatcgtacgtcccataaaatgtccccaacgagttctattattggtattccagaagatggggaactttctggaaaccaatcaaccattttaccaatagttactaaacaaagagacagatttcgttcgagaaatatggatctggaaaagcaactaagacaaggaaactcagaaaagggtaagcttaaactagaaatttcgaagctaaaaggcgacaatacgaagctttatgaacggattaggtatctgcaatcctataataataacaacgctcccgttaatcaaagtacagagcgtattgacgtggaatcccaatactcaagggtgtatgatgaatcgttgcatccaatggcaaattttagacagaacgaattaaaccactacaaaaacaagaaattatcagctttagagaagttattttccagttttgcaaaagtcattttacaaaataaaatgacaaggatggtattcctcttttactgtatcggtttacacggactcgtattcatgatgagcatgtatgtgattaatattagcggctacatgacacctgaggttggtatagtacaatcggcaaagtcttcttcaaatctcaacggaggacttgggggagcagaaaaagtagctgcaggcgttggttcagttcatggcataaatcgatag

SEQ ID NO: 6518 - DNA, 2040 bp, Artificial Sequence
  Description of Artificial Sequence: Synthetic polynucleotide
atggatacgtctgtatattctcatgcattggatatttgggccaaggcagatttaacgaatcttcaaagagaattggatgctgatgttatagagattaaggataaagaaaccttatccttgaattctagaaagtctttagccactgagactaaaaaatttaaaaaactcgaacctgaggaaaaattgaacaatgtgaataaaataattaagcagtaccaacgtgaaattgataatttgacacagagaagtaaattctctgaaaaggttctttttgacgtatacgaaaagctttctgaggctcctgatccacagccgttgttgcaaagttctttggaaaaattgggcaaaattgatgactccaaggaacttaaggaaaaaataagctacttggaagataagttggccaaatatgcagattatgagactttgaaatctaggttattagacttggagcaaagctctgcaaaaacattggcaaaaagattaactgcgaaaactcaagaaatcaattctacctgggaggaaaaaggaagaaattggaaagagagagaagcagatttattgaaacaattaacaaatgtacaggagcaaaacaaggcattagaggccaaaatatctaaaaatatagatatagaaggtaatggaaacgaagatggtgaccaagaaaacaatcaaaaagaagtatctacaaggattgctgaatataatttggtaacacaggagttggaaactacgcaggctagaatatatcagttagagaaaagaaatgaggaattaagtggtgctcttgcaaaggcaactagtgaagcagaaaaagaaactgagttacatgcaaaggaattgaaacttaaccagttagaaagcgaaaatgcattgttgagtgcatcctatgagcaggaaagaaaatctacatctcatgcaataaatgagttaaaagaacaattaaatagcgttgtggcggaaagtgaatcttacaagagtgagttagaaactgttagaagaaaattgaacaattattctgattacaataagataaaagaagaactttctgcattgaaaaaaattgagtttggggtaaacgaagatgattctgataatgacattcgctctgaagacaagaatgataatactttcgaaagttccttattatctgcaaataagaagctccaggctactttggcggaataccgctctaaaagtacggctcaagaggaagaaagaaacgaattgaaaaaatctgtggaccaattgaagcagcaaatagctactctcaaagaagcaaatgaaaaattagagacggacttggaaaaagtagagaacgtcagtcctcacttcaacgagactgcaagtatgatgtctggtgtaacaagacaaatgaacaatcgtacgtcccataaaatgtccccaacgagttctattattggtattccagaagatggggaactttctggaaaccaatccaccattttaccaatagttactaaacaaagagacagatttcgttccagaaatatggatttggaaaagcaattgagacaaggaaactctgaaaagggtaagcttaaattagaaatttccaagttgaaaggcgacaatacgaagctttatgaaagaattaggtatttacaatcctataataataacaacgctcccgttaatcaaagtacagagcgtattgacgtggaatcccaatactctagggtgtatgatgaatctttgcatccaatggcaaattttagacagaacgaattaaaccactacaaaaacaagaaattatctgctttagagaagttattttccagttttgcaaaagtcattttacaaaataaaatgacaaggatggtattcctcttttactgtatcggtttacacggactcgtattcatgatgagcatgtatgtgattaatattagcggctacatgacacctgaggttggtatagtacaaagtgcaaagtcttcttccaatctcaacggaggacttgggggagcagaaaaagtagctgcaggcgttggttctgttcatggcataaatagatga

SEQ ID NO: 6519 - DNA, 1413 bp, Saccharomyces cerevisiae
atgtcatacaagtcagcaataatagggctttgtttgctagctgtgatactattagctccccctttagcatggcattcacataccaagaatattccagcaatcattttgataacatggcttcttacaatgaatttaacgtgtattgtagatgcggcaatatggagtgacgacgatttcctcacgagatgggatggtaaaggttggtgtgatattgtcatcaagttgcaggttggtgcgaatattggcatatcatgtgccgttaccaacatcatttacaacttgcatacaattttgaaggcagatagtgttttaccggatctttcatcatggacgaaaatcgtcaaggaccttgtgattagcttgttcacacctgtcatggtcatgggattttcatatctgttacaagtatttagatatggtatcgctcgttacaacggttgccaaaacttattgtctccgacatggattaccactgttttgtataccatgtggatgcttatatggtcatttgtgggcgctgtttatgccaccttagtactgttcgtgttttataaaaaacgcaaggacgttagggatattttacactgtaccaattcaggtttaaacctgacaaggttcgcaaggctgttgatattctgtttcattattattttagtcatgttccctttttctgtttacacctttgttcaagatttacagcaggtagaaggacactatacttttaaaaatacccattccagcaccatctggaataccattattaaatttgaccctggcagaccaatttataatatatggctttatgttttgatgtcttacctagtatttctaatctttggcttaggttctgatgctttgcatatgtactctaaattcctgcgttccatcaaactaggatttgtacttgacatgtggaaaagattcattgataagaataaggaaaaacgagtaggcatattgctaaacaagctgtcctcacgcaaagagagccgtaacccattttctacagactctgagaactatatctccacgtgtacagaaaactattctccctgtgtaggtacaccaatatcacaagcgcatttctatgtcgactataggattccagatgatcctagaaaatctcaaaataaaagcaaaaaatatttgtttgctgataaagaaacagatgatattcttgatgaaatagacctaaaagaaagtaggcacatcccttacgtcacgcaaggacagagctttgacgacgaaatatcacttggaggattctcaaaagttactctcgattattcagaaaagcttcataattctgcaagctccaattttgaaggggaaagtctttgctactctccagcttcaaaagaagagaattcaagctcaaacgaacatagttcagaaaatactgcaggcccttaa

SEQ ID NO: 6520 - DNA, 1413 bp, Artificial Sequence
  Description of Artificial Sequence: Synthetic polynucleotide
atgagttacaagtctgcaataatagggctttgtttgttggctgtgatattattagctccccctttagcatggcattctcataccaagaatattccagcaatcattttgataacatggcttcttacaatgaatttaacgtgtattgtagatgcggcaatatggagtgacgacgatttcctcacgagatgggatggtaaaggttggtgtgatattgtcatcaagttgcaggttggtgcgaatattggcatatcttgtgccgttaccaacatcatttacaacttgcatacaattttgaaggcagatagtgttttaccggatctttcttcttggacgaaaatcgtcaaggaccttgtgattagcttgttcacacctgtcatggtcatgggattttcttatcttttacaagtatttagatatggtatcgctcgttacaacggttgccaaaacttattgtctccgacatggattaccactgttttgtataccatgtggatgcttatatggtcttttgtgggcgctgtttatgccaccttagtattattcgtgttttataaaaaacgcaaggacgttagggatattttacactgtaccaattctggtttaaacttaacaaggttcgcaaggttattgatattctgtttcattattattttagtcatgttccctttttctgtttacacctttgttcaagatttacagcaggtagaaggacactatacttttaaaaatacccattccagcaccatctggaataccattattaaatttgaccctggcagaccaatttataatatatggctttatgttttgatgtcttacttggtatttttgatctttggcttaggttctgatgctttgcatatgtactctaaattcttgcgttccatcaaattaggatttgtacttgacatgtggaaaagattcattgataagaataaggaaaaaagagtaggcatattgttgaacaagttatcctctcgcaaagagagccgtaacccattttctacagactctgagaactatatctccacgtgtacagaaaactattctccctgtgtaggtacaccaatatctcaagcgcatttctatgtcgactataggattccagatgatcctagaaaatctcaaaataaaagcaaaaaatatttgtttgctgataaagaaacagatgatattcttgatgaaatagacttgaaagaaagtaggcacatcccttacgtcacgcaaggacagagctttgacgacgaaatatctcttggaggattctccaaagttactctcgattattctgaaaagcttcataattctgcaagctccaattttgaaggggaaagtctttgctactctccagcttccaaagaagagaatagtagcagtaacgaacatagttctgaaaatactgcaggcccttga

SEQ ID NO: 6521 - DNA, 2487 bp, Saccharomyces cerevisiae
atgttgggtaatttactgagaaataagacgagttcgtctggttttgagaagagctcagagcattccgatttttcctccgtagttcccaatgtccctgtatactgcaaagcggcaagcacaggaactactaagaccgctgctggagctcttttagatactgcagtcaatgtggaaaagccttcggaaatgctatcaacgacttctccgcccattttagatcatatatcggatgacttaaaactgaagcttttcggctcgagggatattccttatagtcgtcctatcgatacgttacaaaacaacggaggtcttggtactgataaaatcacgtctattaacgaaaaaacgtatgcattcaggattttgatcattgaggaagcgggtcaaatggcgtgtaggaacaactaccgtgatatcttcgattacactacgtcaaagatttcaaattcgatggagcagatacggccgagtgaattgaaggaatatatatttggttctcccgtaagatcttccgatttgacgcagtgcgacaagataaggacgattcctaactcggatttggtactcataactagaattttctattacacacaccaatacaaccgcatcgcaattagcttatgcataccgaggatattgttgcccgtagttgcagagtcgtggtcttccatttcatcatggttgacccagactcaaaaaatgctcattggtttcttgactaaaaaccgtattatgcaagaaaatactggcaattacagcaataattcagtcataaaattgtcaaatattgacatcaggacgcattatcccaaggaaattgaaataatggtgcaaactttacaaaaaagagtcataccaggtttacgttctatgtctgagattcctaggcttttcctttaccctgagacatttaaagaattcgttcacgtttggttcaaaagtatatttaattggattgaaatcaaagatggaccgaaactaggcttccttcctctcctaatggcaatgattatatctgattacaggcacactataagagaactaaagacatccaagatcgtaatcctgtcaggaaacatggtggttgctaacaagttactgttcatcttatcggctttattggagccaaagtacaagggacaaataacgatacggcgggaaaacataagatcggattcgtccgctgtatcaagaaataagtctaacaataattttgtcgataagcctgagacggaattgagcacactgacttcaacagacaaccttttgagtcgcacagaaaataatagcaatcataattacaacaacagtaatgtgagctctaacagcattggatcacccaatttccattctttgaggaaaggatggcaaatacccaatcggaggaactcgaacacttcagtatctgtgtcttctagtgagtctttagcggaagttattcagccatcttccttcaaaagtgggagtagttcattgcattatctatcgtcttctatctcaagccaacctggttcgtacggttcttggttcaacaaaaggccaacaatttctcagttctttcaaccaagcccttctttaaaacacaacgagtcgtgggagaggctgcaaacaactgctggaaatatgcaaaggacttcaagttcgtcttctttgcagcaagcaacctccaggttatcactaaccactccgcaacaatcaccgtctatcagcgaatatgatgagtatccttggatgggcacacctggctctcctaatgttggagatgtgtctcacgcacccccattggttaagaatatatcatataaatttccactaaagaacgttgagttgaaaagagattgccaaaggatctctcaggatgatcttttggatgaggcttttgaaagaatatgtcagccctctttggctgaccttaattccacttacgaaatttttccaggtaactcttcttatgcggatattttgactactgattctgatattgatgatggcttgatgaataaacctctggaactattgccgaaatatacaatgtatttaacccattttaacaattttttccagttgcaagcatgtcctgctggtcaagaatcagagagcagaataacaaattctatgaagattgacctgttaaaggcggattacacaagaagtctattagtatcgttacgttcaagggacattagggatgtcgcattgaaaagagagtttactggcaataacaacaataacagcaaccagaatatctatgatgagaattttgtcggaaaaaggaagtacgtgttgaaacagaagaccagaaaaatcttttcctgtggcaagattggcaagctaagtactagtttggaaaactgcgttaattttgttgaaaatagtataaagagtgcaatgatgttatatgatgataatggaatagatagtgagcttcgcgattcagaagctttacggattttttcatctcttgttcattattgtaatgcaggttaa

SEQ ID NO: 6522 - DNA, 2487 bp, Artificial Sequence
  Description of Artificial Sequence: Synthetic polynucleotide
atgttgggtaatttattaagaaataagacgagttcttctggttttgagaagagctctgagcattccgatttttcctccgtagttcccaatgtccctgtatactgcaaagcggcaagcacaggaactactaagaccgctgctggagctcttttagatactgcagtcaatgtggaaaagccttctgaaatgctttctacgacttctccgcccattttagatcatatatctgatgacttaaaattgaagcttttcggctccagggatattccttatagtcgtcctatcgatacgttacaaaacaacggaggtcttggtactgataaaatcacgtctattaacgaaaaaacgtatgcattcaggattttgatcattgaggaagcgggtcaaatggcgtgtaggaacaactaccgtgatatcttcgattacactacgtccaagatttctaattctatggagcagataagaccgagtgaattgaaggaatatatatttggttctcccgtaagatcttccgatttgacgcagtgcgacaagataaggacgattcctaacagtgatttggtactcataactagaattttctattacacacaccaatacaaccgcatcgcaattagcttatgcataccgaggatattgttgcccgtagttgcagagagttggtcttccatttcttcttggttgacccagactcaaaaaatgctcattggtttcttgactaaaaaccgtattatgcaagaaaatactggcaattacagcaataattctgtcataaaattgagcaatattgacatcaggacgcattatcccaaggaaattgaaataatggtgcaaactttacaaaaaagagtcataccaggtttacgttctatgtctgagattcctaggcttttcctttaccctgagacatttaaagaattcgttcacgtttggttcaaaagtatatttaattggattgaaatcaaagatggaccgaaattgggcttccttcctctcttaatggcaatgattatatctgattacaggcacactataagagaattgaagacatccaagatcgtaatcttatctggaaacatggtggttgctaacaagttattattcatcttatctgctttattggagccaaagtacaagggacaaataacgataagaagagaaaacataagaagtgattcttccgctgtatctagaaataagtctaacaataattttgtcgataagcctgagacggaattgagcacattgacttctacagacaaccttttgagtcgcacagaaaataatagcaatcataattacaacaacagtaatgtgagctctaacagcattggaagtcccaatttccattctttgaggaaaggatggcaaatacccaatagaaggaactccaacacttctgtatctgtgtcttctagtgagtctttagcggaagttattcagccatcttccttcaaaagtgggagtagttctttgcattatttatcttcttctatcagtagccaacctggttcttacggttcttggttcaacaaaaggccaacaatttctcagttctttcaaccaagcccttctttaaaacacaacgagagttgggagaggttacaaacaactgctggaaatatgcaaaggacttctagttcttcttctttgcagcaagcaacctccaggttaagtttaaccactccgcaacaatctccgtctatcagcgaatatgatgagtatccttggatgggcacacctggctctcctaatgttggagatgtgtctcacgcacccccattggttaagaatatatcttataaatttccattgaagaacgttgagttgaaaagagattgccaaaggatctctcaggatgatcttttggatgaggcttttgaaagaatatgtcagccctctttggctgaccttaattccacttacgaaatttttccaggtaactcttcttatgcggatattttgactactgattctgatattgatgatggcttgatgaataaacctttggaattattgccgaaatatacaatgtatttaacccattttaacaattttttccagttgcaagcatgtcctgctggtcaagaaagtgagagcagaataacaaattctatgaagattgacttattaaaggcggattacacaagaagtttgttagtatctttacgttctagggacattagggatgtcgcattgaaaagagagtttactggcaataacaacaataacagcaaccagaatatctatgatgagaattttgtcggaaaaaggaagtacgtgttgaaacagaagaccagaaaaatcttttcctgtggcaagattggcaagttgagtactagtttggaaaactgcgttaattttgttgaaaatagtataaagagtgcaatgatgttatatgatgataatggaatagatagtgagcttcgcgattctgaagctttaagaattttttcttctcttgttcattattgtaatgcaggttga

SEQ ID NO: 6523 - DNA, 1512 bp, Saccharomyces cerevisiae
atggaaaaaattcccaggtggttgttgttttctcttatatcgtcggtgctgtgcatacttggggccctgtgtgtgccgttgttatcggttgccttcgatagcaagcgcaatagccaatctaagttggtcaactatggtctttctctaagtgccggatctatgatcactacttcactatacatgctattgcctcggatcgaaaaatcaaaccggttcaaggtttttcctggattgcttttgggtatttgcctcagttttttcttaaactacctagtccacgctttcgccagcgaatcgttggtacactgtgctgatagcggtgaccatgctacaggttcacatatacactccaaatcacattcgcattcgcactcacactcacatgcggattcgcattcgaattttagcaacgatcatgatttagaaaatgctccctctgagcatggttatgcaacatcttcttccagtgtttctgaaaatgacccgttgattacaaaggatagcgatagaccccaaatgaaaaagaaaatgtccctaattgacttattaaccagaaggaaatcagaaggcgagtgttgtgacctaaacaagtgcactccgctcttgcaatcagagcagccagaatatattgcatgtgtcccaccagtgataaagtcttctcaaagtgaaagaaacgtgccacatggatgcgagggatcagaagataatggacaatccgatgacaaggatcatcgtggccttgtatgcgtggaaaataatatcggttacgatcttgaaaacctatcgttgtaccgtaagaattttctttcgagccgccatcatcattcctctgaatcgcccgaaaattatggttccaaccagttgtcgcactctttttcgtcacctttgggaaatgatgtaactgagaatccggccgcattggcagacacacaataccatcccgaaaatggttcattatacccccaccatcatcacttagagacccctttttccaaattactgtctattggtatgcaaacttgtctagtccttgcattacacaaatttcccgaagggtttattattttttacactaacaggtcagattcgtcaaagtccttgggattttccatttttttaagtttgacgatccataattttgtcgaaggatttgcaatgacgttaccattctacactgttttcgaatctaaatgggttgccattttgattactgccgttctcggtggtggatctcaaccattaggtgcattgataggttatttcatctttaaaggtagtactccaagggatcacgaacccaacatggattttttactgagcgttactgcagggttcctattagtaattggtttacaaatgttccaaactggtatcggatttagcgatggacatcatcatcatcaaggagaaggtgatgaagaaatgaaacagtcccatagctcaggcacaacttgcttgaaatggtgctgcactggcgttttgctaattctagcgagtgcccttttcacttga

SEQ ID NO: 6524 - DNA, 1512 bp, Artificial Sequence
  Description of Artificial Sequence: Synthetic polynucleotide
atggaaaaaattcccaggtggttgttgttttctcttatatcttctgtgctttgcatacttggggccctttgtgtgccgttgttaagtgttgccttcgatagcaagcgcaatagccaatctaagttggtcaactatggtctttctttgagtgccggatctatgatcactacttctttgtacatgcttttgcctagaatcgaaaaaagtaacagattcaaggtttttcctggattgcttttgggtatttgcctcagttttttcttaaactacttagtccacgctttcgccagcgaatctttggtacactgtgctgatagcggtgaccatgctacaggttctcatatacactccaaatctcattctcattctcactctcactctcatgcggattctcattctaattttagcaacgatcatgatttagaaaatgctccctctgagcatggttatgcaacatcttcttccagtgtttctgaaaatgacccgttgattacaaaggatagcgatagaccccaaatgaaaaagaaaatgtccttgattgacttattaaccagaaggaaaagtgaaggcgagtgttgtgacttgaacaagtgcactccgctcttgcaaagtgagcagccagaatatattgcatgtgtcccaccagtgataaagtcttctcaaagtgaaagaaacgtgccacatggatgcgagggatctgaagataatggacaatccgatgacaaggatcatcgtggccttgtatgcgtggaaaataatatcggttacgatcttgaaaacttatctttgtaccgtaagaattttctttctagccgccatcatcattcctctgaaagtcccgaaaattatggttccaaccagttgtctcactctttttcttctcctttgggaaatgatgtaactgagaatccggccgcattggcagacacacaataccatcccgaaaatggttctttatacccccaccatcatcacttagagacccctttttccaaattattatctattggtatgcaaacttgtttggtccttgcattacacaaatttcccgaagggtttattattttttacactaacaggtctgattcttccaagtccttgggattttccatttttttaagtttgacgatccataattttgtcgaaggatttgcaatgacgttaccattctacactgttttcgaatctaaatgggttgccattttgattactgccgttctcggtggtggatctcaaccattaggtgcattgataggttatttcatctttaaaggtagtactccaagggatcacgaacccaacatggattttttattaagcgttactgcagggttcttattagtaattggtttacaaatgttccaaactggtatcggatttagcgatggacatcatcatcatcaaggagaaggtgatgaagaaatgaaacagtcccatagcagtggcacaacttgcttgaaatggtgctgcactggcgttttgttaattttggcgagtgcccttttcacttga

SEQ ID NO: 6525 - DNA, 1857 bp, Saccharomyces cerevisiae
atgccagagtatacgctactggctgataatataagggagaatatcgttcatttcgatccgaatggtttgtttgataacttgcacaccattgttcatgaagatgacagtcaagagaacgaggaggccgagcatttcaattatgatcaggtgttggataaatcgttattgtcaagaggttctattgtcggtctcggtttaggactaatgagtcccgttttaggaatgtgcactagtatggccattgggctaattaatggtggtccgttaactataatgctaggttttttaatcagtggagtgtgtatatggttttcgtcgctttctcttggtgagattgtttcaaaatttccgatggaactgcatgttgggagtgccatgttggccccggagaaattgaaattagtatgttcgtggtacactggctggttaatgctcatagggaattggactatgagtaccagtattacttttgcaggcgctcaacttaccatttctttgattctgatgacgaactccaacctaatatccgaggcacacttgattttttacacagtcattgtattttacttagttgtgactgttgtaggcctcgtgaatttgaaatttgcaagatttattgaaacaataaacaaagtctgtgtttattggatcatatatgccattatatttattgatattcttctactagtattccacaaaggtaaatttcgatctttgaagtacgcgctatttcactttgataataatctatcagggtataaaagcgcatttctttccttcatcattggattccaacagtctaatttcacgttacaaggtttcagtatgttacctgctttagctgacgaagtcaaagttcctgagaaggatattccacgtggtatgtcgaatgcggtattgttatccgcgttctctggagtcatttttcttataccaataatgttaatcctgccagataatgatttgctttttaccaatcataaggttctaccaatagtgaacatttttacaaaatcgactgattcggtggtcttgtctttttttttagtgctcctaattttaggaaacttactgttttccggaattggctcgattactacatcttctcgtgcggtatatagttttagtcgtgaccaggctataccatactacgataaatggacctacgtcgaaccggattctcagtcaaaagtccccaagaattctgttgtattgagtatgataatatcatactttttaggtctgctagctttgatttcaacggccgcatttaatgcttttataggcgctgcagtgctctgtctttgttctgcgactttcattccgttagtcttggtgctgtttacgagaagaagagctatccgaagcgcgccagtaaaaatcaggtataagtttggttggttcatcaacattgtttctattgtgtggctcttgttatctatggtttctgtttgcctaccaacgcaagtgcctgtaactttcaaaacaatgaattatgctttaatggtgtacgtattctgcattttagttatcactggtctttatttcaaatgggggaagtataattttagattacccttggcagatgacatcaaggctccaattcccagtgatgcggaagaaactgtttttgaactagaggatagcaatgttgaacatactctaaactcgggaaccacagtgaaagagtctgtagaaaataattctgaagaaggtttcatcaaggtgcatcctaaaagtagtacagaaaatccctttgaggaaaatgaggaaaacgtgataaccgattatggtgatgagcaccatacagcagaacaagaatttgatcttgccgatgatcgtagatatgatatatga

SEQ ID NO: 6526 - DNA, 1857 bp, Artificial Sequence
  Description of Artificial Sequence: Synthetic polynucleotide
atgccagagtatacgttattagctgataatataagggagaatatcgttcatttcgatccgaatggtttgtttgataacttgcacaccattgttcatgaagatgacagtcaagagaacgaggaggccgagcatttcaattatgatcaggtgttggataaatctttattgtccagaggttctattgtcggtctcggtttaggattaatgagtcccgttttaggaatgtgcactagtatggccattgggttgattaatggtggtccgttaactataatgttgggttttttaatcagtggagtgtgtatatggttttcttctctttctcttggtgagattgtttccaaatttccgatggaattacatgttgggagtgccatgttggccccggagaaattgaaattagtatgttcttggtacactggctggttaatgctcatagggaattggactatgagtaccagtattacttttgcaggcgctcaacttaccatttctttgattttgatgacgaactccaacttgatatccgaggcacacttgattttttacacagtcattgtattttacttagttgtgactgttgtaggcctcgtgaatttgaaatttgcaagatttattgaaacaataaacaaagtctgtgtttattggatcatatatgccattatatttattgatattcttttattggtattccacaaaggtaaatttagatctttgaagtacgcgttatttcactttgataataatttaagtgggtataaaagcgcatttctttccttcatcattggattccaacagtctaatttcacgttacaaggtttcagtatgttacctgctttagctgacgaagtcaaagttcctgagaaggatattccacgtggtatgagtaatgcggtattgttatccgcgttctctggagtcatttttcttataccaataatgttaatcttgccagataatgatttgctttttaccaatcataaggttttgccaatagtgaacatttttacaaaatctactgattctgtggtcttgtctttttttttagtgctcttgattttaggaaacttacttttttccggaattggctccattactacatcttctcgtgcggtatatagttttagtcgtgaccaggctataccatactacgataaatggacctacgtcgaaccggattctcagtccaaagtccccaagaattctgttgtattgagtatgataatatcttactttttaggtttattagctttgatttctacggccgcatttaatgcttttataggcgctgcagtgctctgtctttgttctgcgactttcattccgttagtcttggtgctttttacgagaagaagagctatcagaagcgcgccagtaaaaatcaggtataagtttggttggttcatcaacattgtttctattgtgtggctcttgttatctatggtttctgtttgcttaccaacgcaagtgcctgtaactttcaaaacaatgaattatgctttaatggtgtacgtattctgcattttagttatcactggtctttatttcaaatgggggaagtataattttagattacccttggcagatgacatcaaggctccaattcccagtgatgcggaagaaactgtttttgaattagaggatagcaatgttgaacatactttgaactctggaaccacagtgaaagagtctgtagaaaataattctgaagaaggtttcatcaaggtgcatcctaaaagtagtacagaaaatccctttgaggaaaatgaggaaaacgtgataaccgattatggtgatgagcaccatacagcagaacaagaatttgatcttgccgatgatcgtagatatgatatatga

SEQ ID NO: 6527 - DNA, 3027 bp, Saccharomyces cerevisiae
atggaaggtgacgatttattcgatgagtttggaaatttgatcggagttgatccttttgactcggatgaagaagaaagtgtgctggatgagcaagaacaatatcaaaccaatacgtttgaggggagcggcaacaacaatgagattgagagcagacaacttacctcgttaggaagtaaaaaggaacttggaatttccttagagcacccttatggtaaggaagtggaagtattaatggaaactaagaacacacagtcaccacagactccactggtagagccggttacagaacgaacaaagttgcaagagcatacaatttttacacaattaaaaaaaaacattccgaagactagatataatcgagactatatgttatcaatggctaacattccggagaggataataaatgttggtgtcattggacctcttcactcaggtaagacctctttgatggatctcctagtaatcgactcacacaaacgcataccagatatgtctaagaatgtagaacttggatggaaaccgctaagatacctggataatttgaaacaagagattgaccggggtctttccattaaacttaatggttccactctactctgcaccgatttagaatccaagtctagaatgataaactttttggatgcaccagggcatgttaattttatggatgaaacggcagtcgcacttgcagcaagtgatttggttttaatcgtgatagatgttgtagaaggtgttacatttgtggtagagcaattgataaaacaaagtattaaaaataatgtagcaatgtgttttgttataaataaactcgacagattgattctagatttaaagttgccaccaatggacgcatacttgaagttaaatcatataattgcaaatatcaattcctttacgaagggaaacgtgttttcaccaatagacaataacataatatttgcgtctacaaagctgggcttcacattcactatcaaggaatttgtttcttattattacgcccactccataccttcttctaagatagacgactttaccacaaggctatggggtagcgtatattaccataaaggtaatttcaggacaaaaccatttgaaaatgtagagaagtacccgactttcgttgaatttatcctcatcccgctttataaaatattttcctacgctttatctatggagaaagataaattaaagaatttgttaaggtctaactttagagttaatttaagtcaagaggccctccagtacgatccgcaaccttttttaaaacacgttctacagttaatatttaggcaacaaaccggtcttgtagatgcgataaccagatgttatcaaccatttgaattattcgacaataagacagctcatctttcaattccaggaaaatctacaccagaaggcactctttgggctcatgtactgaaaactgtggattacggtggagcagagtggtcccttgtacggatatactctggacttttgaagagaggggatacagtacgtatacttgatacatcacaatctgaatctcgccaaaaaagacagttgcatgatatctcaaagacggaaacctccaacgaagatgaagatgaagatgacgaaacgccttcatgtgaggtcgaagaaattggcttattaggtggcagatatgtctatccggttcatgaagcacacaaaggacagatagtattaataaaaggtatttcaagtgcatatattaaatccgcgacgttgtactctgtaaagagtaaggaggacatgaaacagctaaaatttttcaaacctttagattatattaccgaggcagttttcaaaattgttcttcaacctttactgccaagggaattacccaagttattggatgccctgaacaaaatttcgaaatactacccaggcgttattattaaagttgaggaatctggagaacatgtaatactaggaaatggagagctgtatatggactgtttgttgtatgatctaagagcgagttatgcaaagatagaaattaaaatatctgatcctttaactgttttttctgaaagttgctcaaatgaatcgttcgcttcaatacctgtaagtaattcgatatctcgccttggtgaggaaaatttaccaggtctgtcgattagtgtagccgctgaaccaatggactctaaaatgattcaggatttgagcaggaacacattgggaaagggtcaaaactgcttggatattgacggaataatggacaacccaaggaaactatccaaaatattgagaaccgagtatgggtgggattcgttggcatcaagaaacgtttggtctttttataatggcaacgtgttgattaatgacactttgccagatgaaatcagtcctgaattattatccaaatataaggaacaaataatacaaggattttactgggctgtaaaagaggggcctttggcagaagaaccaatttatggtgtacagtataaattgttatcgatctcagtaccttccgacgtaaacattgacgttatgaaaagtcaaattattccgctaatgaaaaaagcctgttacgttggcttactgacagcaatcccaattttattggaacccatctatgaagttgacatcacggtccacgcccccttgctgccaatagtagaggaacttatgaagaagagacgtggaagcaggatatacaaaacaataaaagtggcagggacaccattgttggaggttcgtggacaagttccggttattgaatctgcaggattcgagacagatttgagattatctacgaatggtcttggtatgtgtcagctgtacttttggcacaagatatggaggaaggttcctggtgatgttttggataaagatgcgtttattccaaaattgaaacccgcacctatcaacagtttaagtcgtgatttcgtgatgaaaacaagaaggcggaagggtatttctacaggtggatttatgtcaaatgatggtcctacgcttgaaaagtatataagcgctgaattatacgctcaattaagagaaaatggcttagtaccgtga

SEQ ID NO: 6528 - DNA, 3027 bp, Artificial Sequence
  Description of Artificial Sequence: Synthetic polynucleotide
atggaaggtgacgatttattcgatgagtttggaaatttgatcggagttgatccttttgacagtgatgaagaagaaagtgtgttggatgagcaagaacaatatcaaaccaatacgtttgaggggagcggcaacaacaatgagattgagagcagacaacttaccagtttaggaagtaaaaaggaacttggaatttccttagagcacccttatggtaaggaagtggaagtattaatggaaactaagaacacacagtctccacagactccattagtagagccggttacagaaagaacaaagttgcaagagcatacaatttttacacaattaaaaaaaaacattccgaagactagatataatagagactatatgttatctatggctaacattccggagaggataataaatgttggtgtcattggacctcttcactctggtaagacctctttgatggatctcttagtaatcgactctcacaaacgcataccagatatgtctaagaatgtagaacttggatggaaaccgttaagatacttggataatttgaaacaagagattgaccgtggtctttccattaaacttaatggttccactttactctgcaccgatttagaatccaagtctagaatgataaactttttggatgcaccagggcatgttaattttatggatgaaacggcagtcgcacttgcagcaagtgatttggttttaatcgtgatagatgttgtagaaggtgttacatttgtggtagagcaattgataaaacaaagtattaaaaataatgtagcaatgtgttttgttataaataaactcgacagattgattttagatttaaagttgccaccaatggacgcatacttgaagttaaatcatataattgcaaatatcaattcctttacgaagggaaacgtgttttctccaatagacaataacataatatttgcgtctacaaagttgggcttcacattcactatcaaggaatttgtttcttattattacgcccactccataccttcttctaagatagacgactttaccacaaggctttggggtagcgtatattaccataaaggtaatttcaggacaaaaccatttgaaaatgtagagaagtacccgactttcgttgaatttatcctcatcccgctttataaaatattttcctacgctttatctatggagaaagataaattaaagaatttgttaaggtctaactttagagttaatttaagtcaagaggccctccagtacgatccgcaaccttttttaaaacacgttttacagttaatatttaggcaacaaaccggtcttgtagatgcgataaccagatgttatcaaccatttgaattattcgacaataagacagctcatctttctattccaggaaaatctacaccagaaggcactctttgggctcatgtattgaaaactgtggattacggtggagcagagtggtcccttgtaagaatatactctggacttttgaagagaggggatacagtacgtatacttgatacatctcaatctgaatctcgccaaaaaagacagttgcatgatatctccaagacggaaacctccaacgaagatgaagatgaagatgacgaaacgccttcttgtgaggtcgaagaaattggcttattaggtggcagatatgtctatccggttcatgaagcacacaaaggacagatagtattaataaaaggtatttccagtgcatatattaaatccgcgacgttgtactctgtaaagagtaaggaggacatgaaacagttgaaatttttcaaacctttagattatattaccgaggcagttttcaaaattgttcttcaacctttattaccaagggaattacccaagttattggatgccttgaacaaaatttccaaatactacccaggcgttattattaaagttgaggaatctggagaacatgtaatattaggaaatggagagttgtatatggactgtttgttgtatgatttgagagcgagttatgcaaagatagaaattaaaatatctgatcctttaactgttttttctgaaagttgctccaatgaatctttcgcttctatacctgtaagtaattctatatctcgccttggtgaggaaaatttaccaggtttatccattagtgtagccgctgaaccaatggactctaaaatgattcaggatttgagcaggaacacattgggaaagggtcaaaactgcttggatattgacggaataatggacaacccaaggaaactttccaaaatattgagaaccgagtatgggtgggattctttggcatctagaaacgtttggtctttttataatggcaacgtgttgattaatgacactttgccagatgaaatcagtcctgaattattatccaaatataaggaacaaataatacaaggattttactgggctgtaaaagaggggcctttggcagaagaaccaatttatggtgtacagtataaattgttatctatctctgtaccttccgacgtaaacattgacgttatgaaaagtcaaattattccgttaatgaaaaaagcctgttacgttggcttattaacagcaatcccaattttattggaacccatctatgaagttgacatcacggtccacgcccccttgttaccaatagtagaggaacttatgaagaagagacgtggaagcaggatatacaaaacaataaaagtggcagggacaccattgttggaggttcgtggacaagttccggttattgaatctgcaggattcgagacagatttgagattatctacgaatggtcttggtatgtgtcagttatacttttggcacaagatatggaggaaggttcctggtgatgttttggataaagatgcgtttattccaaaattgaaacccgcacctatcaacagtttaagtcgtgatttcgtgatgaaaacaagaaggcgtaagggtatttctacaggtggatttatgagtaatgatggtcctacgcttgaaaagtatataagcgctgaattatacgctcaattaagagaaaatggcttagtaccgtga

SEQ ID NO: 6529 - DNA, 1284 bp, Saccharomyces cerevisiae
atggctaaaggtttcaagttgaaggagttgctttcgcatcaaaaggaaattgaaaaagctgaaaagcttgaaaatgacctaaagaaaaagaaatcccaagaattgaagaaagaagaaccaactatcgttacagcttctaatttgaaaaagcttgagaagaaagaaaagaaggccgatgttaagaaggaagttgctgcagatactgaagaatatcaaagccaagccctttctaaaaaagagaaaagaaagttgaaaaaagaattgaaaaaaatgcaagaacaggacgctaccgaagctcaaaagcatatgtctggcgatgaagatgaatctggcgacgatagagaggaagaagaagaagaagaagaagaagaagaaggaagactggatcttgagaaattggccaaaagtgactctgagtctgaagatgattctgagtctgaaaatgattctgaagaggatgaggatgtcgttgctaaagaagaaagcgaggaaaaggaagagcaagaagaagaacaagacgttccattgtcagacgtggaatttgattctgatgcagatgtcgttccacatcataaactaaccgtcaacaacacaaaagcgatgaaacatgccttagaaagggtacaattgccatggaaaaaacattcattccaagagcaccaaagcgttacatcagaaactaatacggatgaacatattaaggacatatacgatgatactgaaagggaattagcattttacaagcaatcactggacgctgttttagtagcacgtgacgaattgaaacgactaaaagtacccttcaaaagaccattggattattttgctgaaatggtgaaaagtgatgaacatatggacaagattaagggtaagttgattgaagaagccagtgacaagaaggcacgtgaagaagctagaagacaaaggcaattgaagaaatttggtaagcaagtccaaaacgctaccttacagaaacgtcaattggagaaaagagaaacactggaaaagatcaaatctttgaagaacaaaagaaagcacaacgagatcgatcactccgagttcaacgtcggtgtagaggaagaagttgaaggaaaaaggttcgatagaggcaggcctaacggaaagagagccgcaaaaaacgctaagtatggccaaggaggcatgaagagattcaagaggaagaatgatgctacctcttctgctgatgtcagcggcttttcttccagaaaaatgaaggggaagaccaatagaccaggaaagagtagacgtgccagaagattctaa

SEQ ID NO: 6530 - DNA, 1284 bp, Artificial Sequence
  Description of Artificial Sequence: Synthetic polynucleotide
atggctaaaggtttcaagttgaaggagttgctttctcatcaaaaggaaattgaaaaagctgaaaagcttgaaaatgacttgaagaaaaagaaatcccaagaattgaagaaagaagaaccaactatcgttacagcttctaatttgaaaaagcttgagaagaaagaaaagaaggccgatgttaagaaggaagttgctgcagatactgaagaatatcaaagccaagccctttctaaaaaagagaaaagaaagttgaaaaaagaattgaaaaaaatgcaagaacaggacgctaccgaagctcaaaagcatatgtctggcgatgaagatgaatctggcgacgatagagaggaagaagaagaagaagaagaagaagaagaaggaagattagatcttgagaaattggccaaaagtgactctgagtctgaagatgattctgagtctgaaaatgattctgaagaggatgaggatgtcgttgctaaagaagaaagcgaggaaaaggaagagcaagaagaagaacaagacgttccattgagtgacgtggaatttgattctgatgcagatgtcgttccacatcataaattgaccgtcaacaacacaaaagcgatgaaacatgccttagaaagggtacaattgccatggaaaaaacattctttccaagagcaccaaagcgttacaagtgaaactaatacggatgaacatattaaggacatatacgatgatactgaaagggaattagcattttacaagcaaagtttggacgctgttttagtagcacgtgacgaattgaaaagattgaaagtacccttcaaaagaccattggattattttgctgaaatggtgaaaagtgatgaacatatggacaagattaagggtaagttgattgaagaagccagtgacaagaaggcacgtgaagaagctagaagacaaaggcaattgaagaaatttggtaagcaagtccaaaacgctaccttacagaaacgtcaattggagaaaagagaaacattagaaaagatcaaatctttgaagaacaaaagaaagcacaacgagatcgatcactccgagttcaacgtcggtgtagaggaagaagttgaaggaaaaaggttcgatagaggcaggcctaacggaaagagagccgcaaaaaacgctaagtatggccaaggaggcatgaagagattcaagaggaagaatgatgctacctcttctgctgatgtcagcggcttttcttccagaaaaatgaaggggaagaccaatagaccaggaaagagtagacgtgccagaagattctga

SEQ ID NO: 6531 - DNA, 2787 bp, Saccharomyces cerevisiae
atgtttacgtcgcagcgacagcttcgacaaaatgggagtccgatgtcatcatcacgttcatcacaacattcctctggtacagcgtcgccgatatcagactctccagcatcgaatcgcagctatggaagagatctacgaggcttaatgggaattgatatacctgctaacgaaccagcttttaacagggccaatagcagtgatacaatctatttcaggcctaagaagatttacaaaatggaacatgagcacccatcacgatctactttagtacaactgcagacaagatcgcagccggacgatgtcgcaagtagtcaagtaaaccctgaaggcggaaccgacgatctagagctgggcgatccgtgtggcaatcaatctttatacactataggggcggagtacgttccagatttagactttacaaagctagtgaatgagtggcaaaagtccaccgaggatttgtatgagttcagaagcagtgccactccgcaggtacaaatcaaagacagtggaaagggaaactacgaactttggagctcaccggatgcaatattgactcaaaacaaacttcgaagagatagtttttcgcaagagaacagtgattcgttaagtccagaagattctattttatcaagaaatttgcattctaaggtcaaacccatccctctgcccagaaacagccagcaaatatttacacccctgtccaacttagaagcggaaaggagatcctcatatacaactagtagcaacaacaatagcataacacagaataataaattctcttttgcgaagttaaagtattcacttccaactcaaagttctgcagttcctgcgtcgttcgattcaaatgcttcgtcactaaattttcttccgactactacattatcgaccttatcagagctacaaataagccccaacgatatgatggatttgattcagaagcttcccagaaattttttgaacttgccgtatactcaaaggaaaaaggtgattatcgagcatgcaccatctcatgactacaaggccatgatgtccctagttaagaagtttatgttaacatcttctagaagtaacttttctctcgctgggtttgccaataatgcttcagtttcgcaggccacggctaatgatgataacatcaatagtaggaacacgcccaataatagcaatgacacctacgtaaatacgcgtccacttcaaagatctaggcacggttccattgcatcccaatttttaagttctttttcaccttcgatgacgtcaatagctaaaatgaattcgaacccattgagtggaagcgcaggtggcagtgcgagaccagacgataagggtatggaaatactaggtcatcggttgggtaaaatcataggtttcggcgcatgggggatcatacgggaatgctttgatattgaaactggtgttggtagagtgataaaaattgtgaagttcaaaggacaccaaaatatcaagaaacatgtgctgagagaagtagccatatggaggactttgaagcataacagaatactcccccttttagattggaagcttgatgacaactatgcaatgtattgtttaacggaaagaattaacgatggtaccttatacgacttggtaatatcttgggacgaattcaaacgttcgaagataccatttgcagagagatgcagattgaccatttttttaagcttacaactattatctgcattaaagtacatgcattccaaaacgattgttcatggtgacatcaaattagaaaactgtctgttacaaaaagaaggtaaaaaatcggattggaaggttttcctatgcgattttggaatgagttgccacttcgatgagaagcatgtttatcgtaacgatacttttgatgaaaacttgagtagtggcaacagccatagaaagagaaaaagtattgaacaaactaatttgataaagtatcccacaaccaattttttacctgacgaccgaactaatgattttgacgctagtgaaaacttaaaataccaatttgaaaatcgaaagcatcaaccgtttacaccaaaaggaatggttagctccagttcacattcattaaagcatctcaatcaaccatcctcttcttcttcttctaatctatttcacaagccagcctctcaacctcaaccacagcatcggagtccctttcatgggaggcacaagacaaccgatttttcaaacctggaacccgaaccttctaaatatatcggatctctgccttacgcttcgccagaacttctaagatactcagatgcaagacgttcaaaatcagttgaaatgcatatttatgattcaccagactcctctcaatcggaaattagcgcagcatcatcatcttcctctaatttatcttctctatcatcctctacaaaggcgtccgcagtcacgaattccggtgtaactacaagttcaccgtctggttcatcgactgattttccatgtattgtttctcctttaggaccagcatccgatatttgggccttgggagtaatgctatatacaatgttagtaggaaaattaccctttaatcatgagttcgaacctaggttacgctctctgattaaagtaggcgaatttgaccgattttctttagctcaggtctgtaaatttgacaggaaaaaaaatgaaggaacgattggtcaaggcttgtatgacacagtcattggatgtttgacgattgacttggataagaggtggaaattgaaaaggattgaagaagtccttcaaaacgaaatgaacctaagcgaggccattcacgataataatggctcatga

SEQ ID NO: 6532 - DNA, 2787 bp, Artificial Sequence
  Description of Artificial Sequence: Synthetic polynucleotide
atgtttacgagccagagacagcttagacaaaatgggagtccgatgtcttcttctcgttcttctcaacattcctctggtacagcgtccccgatatctgactctccagcatctaatcgcagctatggaagagatttaagaggcttaatgggaattgatatacctgctaacgaaccagcttttaacagggccaatagcagtgatacaatctatttcaggcctaagaagatttacaaaatggaacatgagcacccaagtagatctactttagtacaattgcagacaagaagccagccggacgatgtcgcaagtagtcaagtaaaccctgaaggcggaaccgacgatttagagttgggcgatccgtgtggcaatcaatctttatacactataggggcggagtacgttccagatttagactttacaaagttagtgaatgagtggcaaaagtccaccgaggatttgtatgagttcagaagcagtgccactccgcaggtacaaatcaaagacagtggaaagggaaactacgaactttggagctctccggatgcaatattgactcaaaacaaacttagaagagatagtttttctcaagagaacagtgattctttaagtccagaagattctattttatctagaaatttgcattctaaggtcaaacccatccctttgcccagaaacagccagcaaatatttacacccttgtccaacttagaagcggaaaggagatccagctatacaactagtagcaacaacaatagcataacacagaataataaattctcttttgcgaagttaaagtattctcttccaactcaaagttctgcagttcctgcgtctttcgattctaatgcttcttctttgaattttcttccgactactacattatctaccttatctgagttacaaataagccccaacgatatgatggatttgattcagaagcttcccagaaattttttgaacttgccgtatactcaaaggaaaaaggtgattatcgagcatgcaccatctcatgactacaaggccatgatgtccttggttaagaagtttatgttaacatcttctagaagtaacttttctctcgctgggtttgccaataatgcttctgtttctcaggccacggctaatgatgataacatcaatagtaggaacacgcccaataatagcaatgacacctacgtaaatacgcgtccacttcaaagatctaggcacggttccattgcatcccaatttttaagttctttttctccttctatgacgtctatagctaaaatgaatagcaacccattgagtggaagcgcaggtggcagtgcgagaccagacgataagggtatggaaatattaggtcatagattgggtaaaatcataggtttcggcgcatgggggatcataagagaatgctttgatattgaaactggtgttggtagagtgataaaaattgtgaagttcaaaggacaccaaaatatcaagaaacatgtgttgagagaagtagccatatggaggactttgaagcataacagaatactcccccttttagattggaagcttgatgacaactatgcaatgtattgtttaacggaaagaattaacgatggtaccttatacgacttggtaatatcttgggacgaattcaaacgttccaagataccatttgcagagagatgcagattgaccatttttttaagcttacaattattatctgcattaaagtacatgcattccaaaacgattgttcatggtgacatcaaattagaaaactgtcttttacaaaaagaaggtaaaaaatctgattggaaggttttcttgtgcgattttggaatgagttgccacttcgatgagaagcatgtttatcgtaacgatacttttgatgaaaacttgagtagtggcaacagccatagaaagagaaaaagtattgaacaaactaatttgataaagtatcccacaaccaattttttacctgacgacagaactaatgattttgacgctagtgaaaacttaaaataccaatttgaaaatagaaagcatcaaccgtttacaccaaaaggaatggttagctccagttctcattctttaaagcatctcaatcaaccatcctcttcttcttcttctaatttatttcacaagccagcctctcaacctcaaccacagcatagaagtccctttcatgggaggcacaagacaaccgatttttccaacttggaacccgaaccttctaaatatatcggatctttgccttacgcttctccagaacttttgagatactctgatgcaagacgttctaaatctgttgaaatgcatatttatgattctccagactcctctcaaagtgaaattagcgcagcatcttcttcttcctctaatttatcttctttatcttcctctacaaaggcgtccgcagtcacgaattccggtgtaactacaagttctccgtctggttcttctactgattttccatgtattgtttctcctttaggaccagcatccgatatttgggccttgggagtaatgctttatacaatgttagtaggaaaattaccctttaatcatgagttcgaacctaggttacgctctttgattaaagtaggcgaatttgacagattttctttagctcaggtctgtaaatttgacaggaaaaaaaatgaaggaacgattggtcaaggcttgtatgacacagtcattggatgtttgacgattgacttggataagaggtggaaattgaaaaggattgaagaagtccttcaaaacgaaatgaacttgagcgaggccattcacgataataatggctcttga

SEQ ID NO: 6533 - DNA, 417 bp, Saccharomyces cerevisiae
atgatatttctaaaatctgtcatcaaggtaatcgacaattcaggtgcacaattagcagaatgtattaaagtaataaggaaagggtcccccaagagtcctgcaatggttggagacagaatagtctgtgttatacagaaagcaaagcccttgactcaaaacattacggggacagccaacaccaaccgtgtcaaaaaaggtgatatttgtcacgcaattgtcgtaaggtctaaacagcgtaacatgtgcagaaaggatggctccaccgttgcattcggagatactgcttgcgttttgattaataaaaataccggtgaacctctggggacaagaattatggctaatgatggttgtgtagatagaacactgaaagacaagggatacaataagatatgctctttggcaagtagggtcatataa

SEQ ID NO: 6534 - DNA, 417 bp, Artificial Sequence
  Description of Artificial Sequence: Synthetic polynucleotide
atgatatttttgaaatctgtcatcaaggtaatcgacaattctggtgcacaattagcagaatgtattaaagtaataaggaaagggtcccccaagagtcctgcaatggttggagacagaatagtctgtgttatacagaaagcaaagcccttgactcaaaacattacggggacagccaacaccaaccgtgtcaaaaaaggtgatatttgtcacgcaattgtcgtaaggtctaaacagcgtaacatgtgcagaaaggatggctccaccgttgcattcggagatactgcttgcgttttgattaataaaaataccggtgaacctttagggacaagaattatggctaatgatggttgtgtagatagaacattaaaagacaagggatacaataagatatgctctttggcaagtagggtcatatga

SEQ ID NO: 6535 - DNA, 2175 bp, Saccharomyces cerevisiae
atggtaatgcaggaggagaagaagcggcaacaacctgtgacaagaagagtaaggtcattttctgagtcctttaaaaaccttttcaggccgcctcgttcaagagattcaagtcctattaatgtcacccgaattccttatcgatcgtcttctacctcacccaagagaagctctgagccaccaagacgatcaaccgtatccgcacaaattttagatccaaaaaattctccaatacgccagcgtagttatacattgaagtgttgcaccccgggcctgtcacatccatttagacagacaggaagtggtgctagtaatagtcctaccagacatcgctctatatctggggaagaacaggaaattgttaacagtttaccagaatacaaaagatctgcttctcatacttttcatggcatacggcgtccacgttcaagaagttcatctgtttcgtcatgtgacagttcaaatggaacgacaagttcatcagacagtcaatgggctatggattctttactagatgattcagacaatgacctcacaccttatcgtggctcgaacaaagatatactgaaaagtaaagaccgggcgccgtataattacatagatgactacaataagaaggctttacgcagagcaacatcatatccaaatcctctcccctccaagcaattctataatgaaaggttatacaccaggaggtcacatccagatgaagaaagtttggagagcttgcctcgatttgcaggagcagatgtgcaatgtataattgagcaaaatggcttcaaagtttacgaagacggaagtcatgaacataatataaagttatcaggggtaattgcgaaattagagaaaggtaactccttaccggcacatcgacagggatcattatctagaccaagattaggtattactctttctggtctattcaaacatcataaaaatgaatgcgatattgaaaacgctttatctcttctgccaaacgtagaaaaatctcagacaaaccatgagaaaagaaccggtcaaagtcctaacgatagcaaccgcagctcgcccacgcaaggaagggaagattatctaaaaatagtgaatcccgacgcatcattgggcagtgatgagttgaagttgattaattcattatcaagcagaattcataaaagtttacaaaattatttgcaagaaaaaaatctaaaaccggctgagtgtatcggcgagcaagcacctacttttcaagataattatggccatcctgttggtctcgttggcgctggagcttacggtgaagttaagctgtgtgccagactacggaatgaaaaggactcccccccatttgaaacatatcatgatagcaaatacatatactatgctgtgaaagaattgaaacccaaaccagacagtgatttagagaagttctgtacaaagatcacctctgagtttattattgggcattccttgagccactaccacaaaaatggtaaaaaaccagcccccaatattctaaacgtatttgatattctagaagacagttcttcgtttattgaagtaatggaattttgccctgctggtgacctttatggtatgctggtcggtaagtcgaaattaaagggccgattacatccgttagaagccgattgtttcatgaagcaactgcttcatggtgttaagttcatgcatgatcatggtatcgctcattgtgatttaaaacctgaaaatattctcttttatccgcatggtctattgaaaatatgtgacttcggtacaagttctgtatttcaaaccgcttgggaaaggagggttcatgctcaaaagggtataattggatcagagccttacgtagctccagaagagtttgttgatggggagtattacgatccaagactgattgactgttggagttgtggcgttgtttatataacaatgatattggggcattatctttggaaagtagcttcgagagaaaaagatatgtcttatgatgaattttacaaggaaatgcagcgtaaaaaccagtttagggtattcgaagaattaaagcacgtaaactcagagttggccacaaatagaaaaatcgcattatatcgcatctttcaatgggaaccaagaaaaaggatttctgttggcaaacttttagatatgcagtggatgaaaagtacgaattgctgcctaatatatgattccacataa

SEQ ID NO: 6536 - DNA, 2175 bp, Artificial Sequence
  Description of Artificial Sequence: Synthetic polynucleotide
atggtaatgcaggaggagaagaagagacaacaacctgtgacaagaagagtaaggtctttttctgagtcctttaaaaaccttttcaggccgcctcgttccagagattctagtcctattaatgtcaccagaattccttatagatcttcttctaccagccccaagagaagctctgagccaccaagaagatctaccgtatccgcacaaattttagatccaaaaaattctccaatacgccagcgtagttatacattgaagtgttgcaccccgggcttatctcatccatttagacagacaggaagtggtgctagtaatagtcctaccagacatcgctctatatctggggaagaacaggaaattgttaacagtttaccagaatacaaaagatctgcttctcatacttttcatggcatacgtcgtccacgttccagaagttcttctgtttcttcttgtgacagtagtaatggaacgacaagttcttctgacagtcaatgggctatggattctttattagatgattctgacaatgacctcacaccttatcgtggctctaacaaagatatattgaaaagtaaagacagggcgccgtataattacatagatgactacaataagaaggctttacgcagagcaacatcttatccaaatcctctcccctccaagcaattctataatgaaaggttatacaccaggaggagccatccagatgaagaaagtttggagagcttgcctagatttgcaggagcagatgtgcaatgtataattgagcaaaatggcttcaaagtttacgaagacggaagtcatgaacataatataaagttaagtggggtaattgcgaaattagagaaaggtaactccttaccggcacatagacagggatctttatctagaccaagattaggtattactctttctggtcttttcaaacatcataaaaatgaatgcgatattgaaaacgctttatctcttttaccaaacgtagaaaaatctcagacaaaccatgagaaaagaaccggtcaaagtcctaacgatagcaaccgcagctctcccacgcaaggaagggaagattatttgaaaatagtgaatcccgacgcaagtttgggcagtgatgagttgaagttgattaattctttatccagcagaattcataaaagtttacaaaattatttgcaagaaaaaaatttgaaaccggctgagtgtatcggcgagcaagcacctacttttcaagataattatggccatcctgttggtctcgttggcgctggagcttacggtgaagttaagttatgtgccagattaagaaatgaaaaggactcccccccatttgaaacatatcatgatagcaaatacatatactatgctgtgaaagaattgaaacccaaaccagacagtgatttagagaagttctgtacaaagatcacctctgagtttattattgggcattccttgagccactaccacaaaaatggtaaaaaaccagcccccaatattttgaacgtatttgatattttggaagacagttcttcttttattgaagtaatggaattttgccctgctggtgacctttatggtatgcttgtcggtaagagtaaattaaagggcagattacatccgttagaagccgattgtttcatgaagcaattacttcatggtgttaagttcatgcatgatcatggtatcgctcattgtgatttaaaacctgaaaatattctcttttatccgcatggtttattgaaaatatgtgacttcggtacaagttctgtatttcaaaccgcttgggaaaggagggttcatgctcaaaagggtataattggatctgagccttacgtagctccagaagagtttgttgatggggagtattacgatccaagattgattgactgttggagttgtggcgttgtttatataacaatgatattggggcattatctttggaaagtagcttccagagaaaaagatatgtcttatgatgaattttacaaggaaatgcagcgtaaaaaccagtttagggtattcgaagaattaaagcacgtaaacagtgagttggccacaaatagaaaaatcgcattatatcgcatctttcaatgggaaccaagaaaaaggatttctgttggcaaacttttagatatgcagtggatgaaaagtacgaattgctgcttaatatatgattccacatga

SEQ ID NO: 6537 - DNA, 414 bp, Saccharomyces cerevisiae
atgtctaaggttgcacaacagttaaaatttttgaataaaattagcgccactaccagactaccgcagattctagtcgatcctaaaaaatactcaggtcttagattgacttttcaaacgaaaaaccacaatggacatatgggtgccagagttttttggcataactacctacccactttgcagttctataatccaagaatgaagtttgacgtgataaggataaagaacgaagacaagcaaaaaagcgttccatgcaaactggagattttatctcatgaaggctccgttgtagagactattgatatgcgtaataaaatgcatgaagatataatgaaagacttacttgacaaaatagagcacgttcctcttcctgaaaatgagatcataagagttggaccgcaagaaagtattatataa

SEQ ID NO: 6538 - DNA, 414 bp, Artificial Sequence
  Description of Artificial Sequence: Synthetic polynucleotide
atgtctaaggttgcacaacagttaaaatttttgaataaaattagcgccactaccagattaccgcagattttagtcgatcctaaaaaatactctggtcttagattgacttttcaaacgaaaaaccacaatggacatatgggtgccagagttttttggcataactacttgcccactttgcagttctataatccaagaatgaagtttgacgtgataaggataaagaacgaagacaagcaaaaaagcgttccatgcaaattagagattttatctcatgaaggctccgttgtagagactattgatatgcgtaataaaatgcatgaagatataatgaaagacttacttgacaaaatagagcacgttcctcttcctgaaaatgagatcataagagttggaccgcaagaaagtattatatga

SEQ ID NO: 6539 - DNA, 1197 bp, Saccharomyces cerevisiae
atgtatgttgatccgatgaacaacaatgaaatcaggaaattaagcattactgccaagacagaaacaactccagataacgttggacaagacattcctgtaaacgcacattcggtgcatgaggaatgttcttccaacacacccgtggagataaatggaagaaacagcggaaagttgaaagaagaagcgtctgcaggtatttgtttggttaaaaaaccaatgctacaatatagagatacctcaggaaagtattccctaagtgactttcagattttaagaactttgggaactggctcatttgggagagttcacctaattcgttccaatcacaatgggaggttttacgctttgaagacattgaaaaagcacactatagtgaagctgaagcaggttgaacacaccaatgacgaacgccgaatgctttcaattgtttcacatccattcatcattcgaatgtggggaacgttccaagattctcagcaagttttcatggtaatggactacattgaaggtggtgaattattttctttactacgtaaatctcaaagatttcccaacccagtagccaaattttatgccgcagaggtatgcttagcgttggaatatttgcacagtaaggatataatatatagagacttgaaaccagaaaatatccttctagataaaaacggccatatcaagataaccgactttggcttcgcaaaatacgttcccgatgtcacatacacattatgtggcacaccagattacatagcgccggaagtggtcagtacaaaaccgtataataaatcagtggattggtggagttttggtgtgctaatctatgaaatgcttgccggatacactccattttacaattcgaacaccatgaaaacttacgaaaatatactgaacgccgaattgaagttcccaccatttttccatccagacgcgcaggacttattgaagaagctaattaccagagacttaagtgaaaggttgggtaacttacaaaatggaagtgaagatgtcaagaaccatccgtggtttaacgaagtgatatgggagaaattgttagcaagatacatagaaacgccgtacgaaccaccaatccaacagggccaaggtgacacttctcaatttgacagataccctgaagaggaattcaactatggaattcaaggggaggatccatatatggatttaatgaaagaattttaa

SEQ ID NO: 6540 - DNA, 1197 bp, Artificial Sequence
  Description of Artificial Sequence: Synthetic polynucleotide
atgtatgttgatccgatgaacaacaatgaaatcaggaaattaagcattactgccaagacagaaacaactccagataacgttggacaagacattcctgtaaacgcacattctgtgcatgaggaatgttcttccaacacacccgtggagataaatggaagaaacagcggaaagttgaaagaagaagcgtctgcaggtatttgtttggttaaaaaaccaatgttacaatatagagatacctctggaaagtattccttgagtgactttcagattttaagaactttgggaactggctcttttgggagagttcacttgattcgttccaatcacaatgggaggttttacgctttgaagacattgaaaaagcacactatagtgaagttgaagcaggttgaacacaccaatgacgaacgcaggatgctttctattgtttctcatccattcatcattagaatgtggggaacgttccaagattctcagcaagttttcatggtaatggactacattgaaggtggtgaattattttctttattacgtaaatctcaaagatttcccaacccagtagccaaattttatgccgcagaggtatgcttagcgttggaatatttgcacagtaaggatataatatatagagacttgaaaccagaaaatatccttttagataaaaacggccatatcaagataaccgactttggcttcgcaaaatacgttcccgatgtcacatacacattatgtggcacaccagattacatagcgccggaagtggtcagtacaaaaccgtataataaatctgtggattggtggagttttggtgtgttaatctatgaaatgcttgccggatacactccattttacaatagcaacaccatgaaaacttacgaaaatatattaaacgccgaattgaagttcccaccatttttccatccagacgcgcaggacttattgaagaagttgattaccagagacttaagtgaaaggttgggtaacttacaaaatggaagtgaagatgtcaagaaccatccgtggtttaacgaagtgatatgggagaaattgttagcaagatacatagaaacgccgtacgaaccaccaatccaacagggccaaggtgacacttctcaatttgacagataccctgaagaggaattcaactatggaattcaaggggaggatccatatatggatttaatgaaagaattttga

SEQ ID NO: 6541 - DNA, 2760 bp, Saccharomyces cerevisiae
atgtggaacaaaaccagaacgacgcttctggctgttggtgtcttatttcatttattttacctatggtctatttttgatatctatttcatttcaccgctcgttcatggtatgagcccatatcaaagtactccaacccctcctgcaaagagattgtttttgattgtcggtgatggtttacgtgcagataccacttttgataaagtcactcatccagtatccggaaaaacagaatttctggcaccttttattagatctttggtaatgaataatgccacctacggtatatcacataccagaatgccaactgaatcccgtcctggtcatgttgctatgattgctgggttttacgaagatgttagtgccgtcacaaaaggttggaagtcaaaccctgtcaatttcgatagttttttcaaccaatctactcatacttattcattcggttcacctgacattttacctatgttcaaagatggcgcttctgacccaaataaagttgacacttggatgtatgatcatactttcgaggattttacgcaatcttccatcgagctggatgcttttgtctttagacacttggatcaattattccacaattccacactgaactcaacattggattatgaaattaggcaagacggtaatgtattctttctacatctactaggttgcgatactgccggacattcttatagaccatattctgccgagtattatgacaatgtcaaatatattgatgatcaaatccctatccttatagacaaagtcaacaagttttttgcggacgacaaaaccgcatttatttttacagcagatcatggtatgagtgcatttggatcacatggtgacggtcatcctaacaacacaaggacccctcttgttgcttggggtgcgggtttgaataaaccagtacataatccttttccggtatccgacaactatactgaaaattgggagctttcgagcattaaaagaaatgatgtcaagcaagcagatattgcttctttaatgtcatacttgattggtgtgaactatcctaaaaattcagttggtgagttaccaatagcatatatcgatggaaaagaaagtgacaagcttgccgcattgtacaacaacgcaagaagcattttagagcagtacttagtcaagcaagatgaggtaatagactctcaatttttttataaggaatacttcaagtttgttgaaaagtctcattcacattacttagaagagatagaaaccttaattcagcgtatatctgaaggagaaaactatttggaacaagaagcaatcacccttacagaggaattaatgcagataacattggaaggtttacattatttgacaacctataattggagattcattagaactattgttacatttgggtttgttgggtggatctttttttcttttataatatttttgaaatcattcatattagagaatgtaattgatgaccaaaaagcgtcaccattaagccatgcagtatttggttccataggaattttactaaattggattttgttctaccaacattctccgttcaatttttacatgtaccttcttttcccattatacttttggagctatatttttacaaatagatccgtactacgttcaggtatcaaggaattcttcaaaggtacctctccttggaaaagagttttaataacaatctctattatatcagtttatgagggaattgtatatggatttttccatagatggacgtttacgctaattacaaatatattggcgttttacccgtttatttgtggggtgagagagctatccgtgaatatattgtggatcataactagtgttcttttatctacatttaccttatttgacgctgttaaaattgaggacttgaaccagatacatctagcagggttattaatcattctcagtgccttttatgctctttacaaaatacattccaggataaattcctacacgcgtgctatatttgccattcaaatttccttggtggctgccatgttggcggttactcatcgttcagttatctctttacagctaagacaagggttaccaagagagtcacaggtcgctggatggataattttttttgtatctctttttgtaatgccaattttacattataggaagcccaacaatgattacaaagtgagattattgatcatttatttaaccttcgcaccatcctttatcattttgactatatcattcgaatcccttttctacttcttgttcactagttacatggtacaatggattgaaattgagaacaaaatcaaagaaatgaagacccaaaaagatgaaaattggttacaagtgctaagagtttcagtaatcgggttctttttacttcaagtcgcattctttggaactggtaacgtcgcttcaatctcttcattttcattggagtctgtttgtagattgttgccaatttttgatcctttcctgatgggcgcattattgatgttgaaattgataattccctacgggctattgtccacatgcctaggtatactgaatttaaaacttaacttcaaggactacacaatctcatcattaattatttccatgagtgatattctgtcgttgaattttttctaccttttaagaacggaggggtcgtggttggatattggcataaccatttccaactattgtttggcgatcctatcatctttgttcatgcttattttggaagtactcggtcatgtgttgctaaaaaatgtcatcatacaggataaaaccaaaaaaacacaatag

SEQ ID NO: 6542 - DNA, 2760 bp, Artificial Sequence
  Description of Artificial Sequence: Synthetic polynucleotide
atgtggaacaaaaccagaacgacgcttttagctgttggtgtcttatttcatttattttacttatggtctatttttgatatctatttcatttctccgctcgttcatggtatgagcccatatcaaagtactccaacccctcctgcaaagagattgtttttgattgtcggtgatggtttacgtgcagataccacttttgataaagtcactcatccagtatccggaaaaacagaatttttggcaccttttattagatctttggtaatgaataatgccacctacggtatatctcataccagaatgccaactgaatcccgtcctggtcatgttgctatgattgctgggttttacgaagatgttagtgccgtcacaaaaggttggaagtctaaccctgtcaatttcgatagttttttcaaccaatctactcatacttattctttcggttctcctgacattttacctatgttcaaagatggcgcttctgacccaaataaagttgacacttggatgtatgatcatactttcgaggattttacgcaatcttccatcgagttagatgcttttgtctttagacacttggatcaattattccacaattccacattgaactccacattggattatgaaattaggcaagacggtaatgtattctttttacatttattgggttgcgatactgccggacattcttatagaccatattctgccgagtattatgacaatgtcaaatatattgatgatcaaatccctatccttatagacaaagtcaacaagttttttgcggacgacaaaaccgcatttatttttacagcagatcatggtatgagtgcatttggatctcatggtgacggtcatcctaacaacacaaggacccctcttgttgcttggggtgcgggtttgaataaaccagtacataatccttttccggtatccgacaactatactgaaaattgggagctttctagcattaaaagaaatgatgtcaagcaagcagatattgcttctttaatgagttacttgattggtgtgaactatcctaaaaattctgttggtgagttaccaatagcatatatcgatggaaaagaaagtgacaagcttgccgcattgtacaacaacgcaagaagcattttagagcagtacttagtcaagcaagatgaggtaatagactctcaatttttttataaggaatacttcaagtttgttgaaaagtctcattctcattacttagaagagatagaaaccttaattcagcgtatatctgaaggagaaaactatttggaacaagaagcaatcacccttacagaggaattaatgcagataacattggaaggtttacattatttgacaacctataattggagattcattagaactattgttacatttgggtttgttgggtggatctttttttcttttataatatttttgaaatctttcatattagagaatgtaattgatgaccaaaaagcgtctccattaagccatgcagtatttggttccataggaattttattgaattggattttgttctaccaacattctccgttcaatttttacatgtaccttcttttcccattatacttttggagctatatttttacaaatagatccgtattacgttctggtatcaaggaattcttcaaaggtacctctccttggaaaagagttttaataacaatctctattatatctgtttatgagggaattgtatatggatttttccatagatggacgtttacgttgattacaaatatattggcgttttacccgtttatttgtggggtgagagagctttccgtgaatatattgtggatcataactagtgttcttttatctacatttaccttatttgacgctgttaaaattgaggacttgaaccagatacatttagcagggttattaatcattctcagtgccttttatgctctttacaaaatacattccaggataaattcctacacgcgtgctatatttgccattcaaatttccttggtggctgccatgttggcggttactcatcgttctgttatctctttacagttaagacaagggttaccaagagagagccaggtcgctggatggataattttttttgtatctctttttgtaatgccaattttacattataggaagcccaacaatgattacaaagtgagattattgatcatttatttaaccttcgcaccatcctttatcattttgactatatctttcgaatcccttttctacttcttgttcactagttacatggtacaatggattgaaattgagaacaaaatcaaagaaatgaagacccaaaaagatgaaaattggttacaagtgttgagagtttctgtaatcgggttctttttacttcaagtcgcattctttggaactggtaacgtcgcttctatctcttctttttctttggagtctgtttgtagattgttgccaatttttgatcctttcttaatgggcgcattattgatgttgaaattgataattccctacgggttattgtccacatgcttgggtatattgaatttaaaacttaacttcaaggactacacaatctcttctttaattatttccatgagtgatattttatctttgaattttttctaccttttaagaacggaggggtcctggttggatattggcataaccatttccaactattgtttggcgatcttatcttctttgttcatgcttattttggaagtactcggtcatgtgttgttgaaaaatgtcatcatacaggataaaaccaaaaaaacacaatga

SEQ ID NO: 6543 - DNA, 1026 bp, Saccharomyces cerevisiae
atgcaatacaaaaaatcattagttgcctccgccttagttgctacatctttagctgcctatgctccaaaggacccgtggtccactttaactccatcagctacttacaagggtggtataactgattactcttctactttcggtattgctgttgaaccaattgccactactgcttcctccaaggctaagagagccgctgctatctctcaaattggtgacggtcaaatccaagccactaccaaaaccactgctgctgctgtttctcaaattggtgacggtcaaatccaagccactactaaaaccaaagctgctgctgtctctcaaattggtgacggccaaatccaagccaccaccaagactacctcagctaagactaccgctgcagccgtctcccaaattggtgacggtcaaattcaagccactactaaaaccaaagctgctgctgtctctcaaattggtgacggtcaaatccaagccactaccaaaacaactgctgcagctgtctctcaaattggtgacggtcaaatccaagccactactaaaaccactgctgctgctgtttctcaaattggtgacggtcaaatccaagccaccaccaatactactgttgctccagtctcccaaatcactgatggccaaatccaagccacaactttaacttctgcaaccattataccatctccagctccagctccaattactaatggcactgacccagtaactgctgaaacatgtaaaagcagtggcactttagaaatgaacttaaagggtggtatcctgactgacggtaaaggtagaattggttctatcgttgccaacagacaattccaattcgatggtcctccaccacaagctggtgctatctatgctgctggttggtccatcaccccagaaggtaacttggccatcggtgaccaggatactttttaccaatgtttgtcaggaaacttctacaacttatacgatgagcacattggaactcaatgtaatgcagtccacctacaagctatcgatttgctcaactgttaa

SEQ ID NO: 6544 - DNA, 1026 bp, Artificial Sequence
  Description of Artificial Sequence: Synthetic polynucleotide
atgcaatacaaaaaatctttagttgcctccgccttagttgctacatctttagctgcctatgctccaaaggacccgtggtccactttaactccatctgctacttacaagggtggtataactgattactcttctactttcggtattgctgttgaaccaattgccactactgcttcctccaaggctaagagagccgctgctatctctcaaattggtgacggtcaaatccaagccactaccaaaaccactgctgctgctgtttctcaaattggtgacggtcaaatccaagccactactaaaaccaaagctgctgctgtctctcaaattggtgacggccaaatccaagccaccaccaagactaccagtgctaagactaccgctgcagccgtctcccaaattggtgacggtcaaattcaagccactactaaaaccaaagctgctgctgtctctcaaattggtgacggtcaaatccaagccactaccaaaacaactgctgcagctgtctctcaaattggtgacggtcaaatccaagccactactaaaaccactgctgctgctgtttctcaaattggtgacggtcaaatccaagccaccaccaatactactgttgctccagtctcccaaatcactgatggccaaatccaagccacaactttaacttctgcaaccattataccatctccagctccagctccaattactaatggcactgacccagtaactgctgaaacatgtaaaagcagtggcactttagaaatgaacttaaagggtggtatcttgactgacggtaaaggtagaattggttctatcgttgccaacagacaattccaattcgatggtcctccaccacaagctggtgctatctatgctgctggttggtccatcaccccagaaggtaacttggccatcggtgaccaggatactttttaccaatgtttgagtggaaacttctacaacttatacgatgagcacattggaactcaatgtaatgcagtccacttgcaagctatcgatttgctcaactgttga

SEQ ID NO: 6545 - DNA, 978 bp, Saccharomyces cerevisiae
atgcaatataaaaagccattagtcgtctccgctttagctgctacatctttagctgcctatgctccaaaggacccgtggtccactttaactccatcagctacttacaagggtggtataacagattactcttcgagtttcggtattgctattgaagccgtggctaccagtgcttcctccgtcgcctcatctaaagcaaagagagccgcctctcagataggtgatggtcaagtacaggctgccactactactgctgctgtttctaagaaatccaccgctgctgctgtttctcaaataactgacggtcaagttcaagctgctaagtctactgccgctgctgtttcccaaataactgacggtcaagttcaagctgctaagtctactgccgctgccgtttctcaaataactgacggtcaagttcaagctgctaagtctactgccgctgccgtttctcaaataactgatggtcaagttcaagctgccaagtctactgctgccgctgcctctcagatttctgacggccaagttcaggccactacctctactaaggctgctgcatcccaaattacagatgggcagatacaagcatctaaaactaccagtggcgctagtcaagtaagtgatggccaagtccaggctactgctgaagtgaaagacgctaacgatccagtcgatgttgtttcctgtaataacaatagtaccttgtcaatgagtttaagcaagggtatcttaaccgataggaagggtagaattggctctatcgttgccaacagacagttccaattcgatggtcctccaccacaagctggtgctatctatgctgctggttggtccatcaccccagaaggtaacttagctcttggtgaccaggatactttttaccaatgtttgtctggtgacttctataacttgtatgataagcacattggttctcagtgccatgaagtttatttgcaagctatagatttaattgactgttga

SEQ ID NO: 6546 - DNA, 978 bp, Artificial Sequence
  Description of Artificial Sequence: Synthetic polynucleotide
atgcaatataaaaagccattagtcgtctccgctttagctgctacatctttagctgcctatgctccaaaggacccgtggtccactttaactccatctgctacttacaagggtggtataacagattactcttccagtttcggtattgctattgaagccgtggctaccagtgcttcctccgtcgcctcttctaaagcaaagagagccgcctctcagataggtgatggtcaagtacaggctgccactactactgctgctgtttctaagaaatccaccgctgctgctgtttctcaaataactgacggtcaagttcaagctgctaagtctactgccgctgctgtttcccaaataactgacggtcaagttcaagctgctaagtctactgccgctgccgtttctcaaataactgacggtcaagttcaagctgctaagtctactgccgctgccgtttctcaaataactgatggtcaagttcaagctgccaagtctactgctgccgctgcctctcagatttctgacggccaagttcaggccactacctctactaaggctgctgcatcccaaattacagatgggcagatacaagcatctaaaactaccagtggcgctagtcaagtaagtgatggccaagtccaggctactgctgaagtgaaagacgctaacgatccagtcgatgttgtttcctgtaataacaatagtaccttgtccatgagtttaagcaagggtatcttaaccgataggaagggtagaattggctctatcgttgccaacagacagttccaattcgatggtcctccaccacaagctggtgctatctatgctgctggttggtccatcaccccagaaggtaacttagctcttggtgaccaggatactttttaccaatgtttgtctggtgacttctataacttgtatgataagcacattggttctcagtgccatgaagtttatttgcaagctatagatttaattgactgttga

SEQ ID NO: 6547 - DNA, 1209 bp, Saccharomyces cerevisiae
atgatgaaaagattacaccccttgagaattcaagttcatctgaaatctgattacccactgtttactttcgagcaattactctctacaaatgggataagaagaggccaaactgcgagaatttctttgaaagattacatagagtggcaaaatttcccaaacataatgaaaagagaaaatttttttacgcaaaggaagcctgtaactacaaccgcaaaagaagaacccttttcatttgataacattcttgactgtgagccacaatttagcaaatgccttgccaaatggctactggttaattacaaattaaatgactatccttattacgatcttaacattgtgaatatttacacggatttaccccaagcaattcagatttgcaaaaatttaatgtcatatctcaagtctactttatctgataacatgttccagaaaataaaatatttcatggtacctctatacaagtgtgacaaaataccttcgaagctcttagacggaatacctggatcagtcagtttggtacaagattatccggtttccccatattttttacagaaaaaatttcacatagaggatccaatccaaattttgatgcttaatgatgttataaaatacacaacccacgatttagtaaggtactcttcagatgacaaagggtggcaacagtgctttgtggatatcaataagaatggacaaaaatccaagagctttgatagcgccattgactactcatgtgaacttgcattagaacaaatgttcaatgatcgatcccatgtaagtcctggtaaagaactttatatccccactaaattaattgagatattgatgacaatcaagaataatattccagaacatagacttttcattgtagacaccccgcaaagatcgagcccaacaataatatcgttattaaagagtttaataagcccacggccgacgggatctagccagatagtacagccatattcggattcaatattttcagacaaacggagtggaagaatatgcttcatgacggacttcttacagttacagaacatttataatggtattaacagttcttctagtagctgcgaagtcgaagacgttgctgattttgttgaaaaatggattagcccaagtgagagaagcacactttcgtcgcagaatggaaataggcctcaactagaagacataaaaaatagctctttggcggtgctacactccacgtga

SEQ ID NO: 6548 - DNA, 1209 bp, Artificial Sequence
  Description of Artificial Sequence: Synthetic polynucleotide
atgatgaaaagattacaccccttgagaattcaagttcatttgaaatctgattacccattatttactttcgagcaattactctctacaaatgggataagaagaggccaaactgcgagaatttctttgaaagattacatagagtggcaaaatttcccaaacataatgaaaagagaaaatttttttacgcaaaggaagcctgtaactacaaccgcaaaagaagaacccttttcttttgataacattcttgactgtgagccacaatttagcaaatgccttgccaaatggttgttggttaattacaaattaaatgactatccttattacgatcttaacattgtgaatatttacacggatttaccccaagcaattcagatttgcaaaaatttaatgtcttatctcaagtctactttatctgataacatgttccagaaaataaaatatttcatggtacctttgtacaagtgtgacaaaataccttctaagctcttagacggaatacctggatctgtcagtttggtacaagattatccggtttccccatattttttacagaaaaaatttcacatagaggatccaatccaaattttgatgcttaatgatgttataaaatacacaacccacgatttagtaaggtactcttctgatgacaaagggtggcaacagtgctttgtggatatcaataagaatggacaaaaatccaagagctttgatagcgccattgactactcttgtgaacttgcattagaacaaatgttcaatgatagatcccatgtaagtcctggtaaagaactttatatccccactaaattaattgagatattgatgacaatcaagaataatattccagaacatagacttttcattgtagacaccccgcaaagaagcagcccaacaataatatctttattaaagagtttaataagcccaagaccgacgggatctagccagatagtacagccatattctgattctatattttctgacaaaagaagtggaagaatatgcttcatgacggacttcttacagttacagaacatttataatggtattaacagttcttctagtagctgcgaagtcgaagacgttgctgattttgttgaaaaatggattagcccaagtgagagaagcacactttcttctcagaatggaaataggcctcaattggaagacataaaaaatagctctttggcggtgttacactccacgtga

SEQ ID NO: 6549 - DNA, 1302 bp, Saccharomyces cerevisiae
atggcgactgacaccgagaggtgtattttccgtgcattcggccaagattttatcctaaataaacattttcatttgacaggtaagattggtcggggctcacacagccttatttgttcttcaacttacacagaatcgaacgaggaaactcacgtggctatcagaaaaataccaaacgcgtttggcaataaactatcttgcaagagaactcttcgtgaattgaaactactaagacatttaagagggcacccaaatatagtgtggctcttcgatactgatatagtattttacccaaatggggcactaaatggcgtttatttatatgaagaactaatggaatgtgacctttctcaaattataaggtccgaacaacgcctggaagacgcacactttcaaagcttcatatatcagatactgtgtgctctgaaatacatacattctgctaatgttttacattgtgacctgaaaccaaaaaacttacttgttaatagtgattgccaactaaaaatttgtaattttgggctatcgtgtagttattcagaaaaccacaaggttaacgacggcttcattaagggttatataacctcgatatggtataaagcaccagaaattttgctgaattatcaagaatgcacaaaagctgtcgatatttggtcaacaggctgtatcttggccgaactacttggtaggaaaccaatgtttgaagggaaggattatgtagatcatttgaatcatattctacaaatacttggaacaccacctgaggaaacattgcaggaaattgcctctcaaaaggtgtataattatatctttcagttcggtaatatcccgggaagatcgtttgaaagcatactacctggtgctaatccagaagcgcttgaattgctaaagaaaatgctagaatttgatcctaaaaaaaggattactgtagaggatgcactagagcatccatatttgtcaatgtggcatgatatagatgaggaattctcatgtcaaaagacctttagattcgaattcgagcatatcgaaagtatggcggaattaggaaacgaagttataaaggaagtatttgatttcaggaaagttgttagaaaacatcctattagcggtgattccccatcatcatcactatctttagaggatgccattcctcaagaagttgtacaggtccatccttctaggaaagttttacccagttatagtcctgaattttcctatgtaagccaacttccatcactaactacaacccagccatatcaaaaccttatgggaataagctctaattcatttcagggtgttaactaa

SEQ ID NO: 6550 - DNA, 1302 bp, Artificial Sequence
  Description of Artificial Sequence: Synthetic polynucleotide
atggcgactgacaccgagaggtgtattttccgtgcattcggccaagattttatcttgaataaacattttcatttgacaggtaagattggtcgtggctctcacagccttatttgttcttctacttacacagaatctaacgaggaaactcacgtggctatcagaaaaataccaaacgcgtttggcaataaattatcttgcaagagaactcttcgtgaattgaaattattaagacatttaagagggcacccaaatatagtgtggctcttcgatactgatatagtattttacccaaatggggcattgaatggcgtttatttatatgaagaattgatggaatgtgacctttctcaaattataaggtccgaacaacgcttagaagacgcacactttcaaagcttcatatatcagatattatgtgctttgaaatacatacattctgctaatgttttacattgtgacttgaaaccaaaaaacttacttgttaatagtgattgccaattgaaaatttgtaattttgggctttcctgtagttattctgaaaaccacaaggttaacgacggcttcattaagggttatataaccagtatatggtataaagcaccagaaattttgttgaattatcaagaatgcacaaaagctgtcgatatttggtctacaggctgtatcttggccgaattgcttggtaggaaaccaatgtttgaagggaaggattatgtagatcatttgaatcatattttacaaatacttggaacaccacctgaggaaacattgcaggaaattgcctctcaaaaggtgtataattatatctttcagttcggtaatatcccgggaagatcttttgaaagcatattacctggtgctaatccagaagcgcttgaattgttgaagaaaatgttggaatttgatcctaaaaaaaggattactgtagaggatgcattagagcatccatatttgtccatgtggcatgatatagatgaggaattctcttgtcaaaagacctttagattcgaattcgagcatatcgaaagtatggcggaattaggaaacgaagttataaaggaagtatttgatttcaggaaagttgttagaaaacatcctattagcggtgattccccatcttcttctttatctttagaggatgccattcctcaagaagttgtacaggtccatccttctaggaaagttttacccagttatagtcctgaattttcctatgtaagccaacttccatctttgactacaacccagccatatcaaaaccttatgggaataagctctaattcttttcagggtgttaactga

SEQ ID NO: 6551 - DNA, 438 bp, Saccharomyces cerevisiae
atgggtaaaagaaagaagtcaacaagaaagcctaccaagagactggtccaaaaattagatacgaaattcaattgtttattttgtaatcatgaaaaatcagtttcatgcactctggacaaaaaaaatagtataggaactttatcgtgcaagatttgtgggcagtcgttccaaacgcgcataaattcattatcacagcctgttgatgtatatagtgattggtttgacgccgtcgaagaagtcaattctggccgtggaagtgacacagatgatggtgacgaaggttctgatagtgattacgaaagtgattcagagcaagatgctaaaacgcaaaatgatggcgaaatagattctgatgaagaggaggtagactcggacgaggagaggataggccaagttaaaagaggcagaggcgccttggtagatagtgacgatgaataa

SEQ ID NO: 6552 - DNA, 438 bp, Artificial Sequence
  Description of Artificial Sequence: Synthetic polynucleotide
atgggtaaaagaaagaagagtacaagaaagcctaccaagagattggtccaaaaattagatacgaaattcaattgtttattttgtaatcatgaaaaatctgtttcttgcactttggacaaaaaaaatagtataggaactttaagttgcaagatttgtgggcagtctttccaaacgcgcataaattctttatctcagcctgttgatgtatatagtgattggtttgacgccgtcgaagaagtcaattctggccgtggaagtgacacagatgatggtgacgaaggttctgatagtgattacgaaagtgattctgagcaagatgctaaaacgcaaaatgatggcgaaatagattctgatgaagaggaggtagacagtgacgaggagaggataggccaagttaaaagaggcagaggcgccttggtagatagtgacgatgaatga

SEQ ID NO: 6553 - DNA, 636 bp, Saccharomyces cerevisiae
atgggtaatattataacggatacgataattataacctcggataagtgcgacattgttgataatgataatgttgaaagaatccaggtttggctatccaagaatatcttaaggaagtttcaaatcaatgaaaatgaaccactacagttgattattttgaaaaggtttaaaagaatactgttgatctgccccagtcatgatatatctcagcatgttatggatgcgtctcgtgctttagaaatggaaaattttaacttcagctactccttgcaagacggacaaaggaatttaactaaacaatacttgaaggtaccagagagtgaaaaaatgttcctgatatcgcccccagcatcaccacctcccgaattcgatttcagcaaatgtgaggatgcgccacaaaggcatatacaaagtcatatacaacaggaccagcagcagcggttggaagctagccaactattgcctaataatccagacaaaaataacaatggtactttcacgttattgaaatcaaaggtgggcgcaattaccattgatagatgtcccacgaacgatggaaatggacagatgcaattagcggaccacgttaaaaccgctttcccaccaaaatctatattcgatactgatgacgatgattaa

SEQ ID NO: 6554 - DNA, 636 bp, Artificial Sequence
  Description of Artificial Sequence: Synthetic polynucleotide
atgggtaatattataacggatacgataattataacctctgataagtgcgacattgttgataatgataatgttgaaagaatccaggtttggttatccaagaatatcttaaggaagtttcaaatcaatgaaaatgaaccattacagttgattattttgaaaaggtttaaaagaatattattgatctgccccagtcatgatatatctcagcatgttatggatgcgtctcgtgctttagaaatggaaaattttaacttcagctactccttgcaagacggacaaaggaatttaactaaacaatacttgaaggtaccagagagtgaaaaaatgttcttgatatctcccccagcatctccacctcccgaattcgatttcagcaaatgtgaggatgcgccacaaaggcatatacaaagtcatatacaacaggaccagcagcagcgtttggaagctagccaattattgcctaataatccagacaaaaataacaatggtactttcacgttattgaaatccaaggtgggcgcaattaccattgatagatgtcccacgaacgatggaaatggacagatgcaattagcggaccacgttaaaaccgctttcccaccaaaatctatattcgatactgatgacgatgattga

SEQ ID NO: 6555 - DNA, 2859 bp, Saccharomyces cerevisiae
atgccaattgttcggtggctattattgaaaagcgcagttagaggttcttctctaataggcaaagctcacccttgtttaaggtctattgctgcacaccctaggtatttatctaatgtgtactcaccaccagcaggcgtcagtagatcactgcgcatcaatgtaatgtggaagcagagtaaattaactcccccaagatttgtgaagatcatgaatagacgccctctgttcacagaaactagtcacgcctgtgcgaagtgccaaaaaacgtcacaattactaaataaaaccccaaatcgtgaaattcttcctgataatgtcgttcctttacactacgatttaaccgtggaacctgatttcaaaacattcaaatttgaaggctcagtcaaaattgagctaaaaattaataatcctgcaattgatacggtaacattgaacaccgtcgataccgacatccattctgcaaaaatcggtgatgtcacatcttccgagattatctctgaagaggagcaacaagtcaccacatttgcgtttcctaaagggaccatgtcttctttcaagggtaatgcatttttggatataaaatttactggtattttaaatgataatatggctggcttttacagagccaaatatgaggacaagttaacaggtgagacaaaatacatggctactactcagatggaacctactgatgctagaagggccttcccatgttttgatgagcctaacttgaaagcctcttttgctattactttagtttcagacccatctttgacacacctatccaatatggacgtcaagaacgaatacgtaaaggatggaaaaaaggtcactttgttcaatacgacccctaaaatgtcaacttaccttgttgcttttattgttgctgaattgaagtacgttgaatccaagaactttcgtattcctgtcagagtttacgccaccccaggtaacgaaaaacatggtcagtttgccgcggatttgactgccaagactttggcattttttgaaaaaacttttggcatccaatatcctctacctaaaatggacaatgttgctgttcacgaattttctgcaggagctatggaaaattgggggttagtcacttatagagtggttgatctactactagacaaagataactctacattagatcgtattcaaagagtggctgaggtagttcaacatgaattagctcaccaatggtttggtaacttagttactatggactggtgggaaggcttatggctaaatgaaggttttgctacttggatgtcatggtattcatgtaatgagtttcaaccagaatggaaagtttgggaacagtatgttactgataccttacaacatgcattaagccttgactctttaaggtcctctcatccgatcgaagtacctgtaaaaaaagctgacgaaattaaccaaatctttgatgccatctcttactcaaagggtgcttctttattaaggatgatttcgaaatggttaggtgaagaaacttttattaaaggtgtatcccaatacctgaataaatttaaatacggtaatgcgaagactgaagacctatgggatgctttagcggacgcctccggtaaagacgttcgttctgtgatgaacatctggactaaaaaagttggtttcccagtcatttcagttagcgaagatggtaacggtaaaataacatttcgccaaaaccgttacttaagcacagctgatgtcaagcccgacgaggacaaaaccatctatcctgtatttttggctttgaagactaaaaatggagttgacagttccgttgtattgagtgaaagaagcaaaactattgaattagaagatcctacctttttcaaagttaacagcgaacaatccggaatttatataacatcctacaccgatgaaagatgggcaaaactgggtcaacaagctgacttattgtctgttgaggaccgtgtcggtctggttgctgatgtcaagacactatctgcttctggctacacttcaactactaattttttgaacttagtctccaaatggaataatgaaaagtcatttgtcgtctgggaccaaataatcaacagcatatcttcaatgaaatctacttggttattcgaaccaaaggaaacccaggatgcgcttgataacttcacgaagcaactaataagcggtatgacacaccacttgggttgggaattcaaatcttctgattcgttctccactcaacgtttgaaagtgaccatgtttggtgctgcttgtgccgcaagggacgcagacgttgaaaaagctgctctaaaaatgtttactgattattgcagcggtaataaggaagccatcccagcattgattaaaccaattgtatttaacactgtggcaagagttggtggtgcagaaaactatgaaaaagtttacaaaatctacttagatccaatctctaacgatgaaaaattagccgcattaagatctttaggcagatttaaagaacctaaattattagaaagaaccttaggatatttgtttgatggcactgtcttaaaccaagacatttatattccaatgcaaggaatgagagctcatcaagaaggtgtagaggctttgtggaattgggttaaaaagaactgggacgaactcgtaaagagactacctcctggtctttcaatgctaggctccgtcgtcacattaggtacctctggctttacatcaatgcaaaaaatagatgagattaagaaattctttgccactaaatccacgaaaggtttcgatcaaagtttggctcaatcactggacactattacttcgaaagcgcagtgggttaacagagaccgtgatgtcgtcaacaagtatttgaaggaaaatggttactattaa

SEQ ID NO: 6556 - DNA, 2859 bp, Artificial Sequence
  Description of Artificial Sequence: Synthetic polynucleotide
atgccaattgttcgttggttgttattgaaaagcgcagttagaggttcttctttgataggcaaagctcacccttgtttaaggtctattgctgcacaccctaggtatttatctaatgtgtactctccaccagcaggcgtcagtagatctttacgcatcaatgtaatgtggaagcagagtaaattaactcccccaagatttgtgaagatcatgaatagacgccctcttttcacagaaactagtcacgcctgtgcgaagtgccaaaaaacgtctcaattattgaataaaaccccaaatcgtgaaattcttcctgataatgtcgttcctttacactacgatttaaccgtggaacctgatttcaaaacattcaaatttgaaggctctgtcaaaattgagttgaaaattaataatcctgcaattgatacggtaacattgaacaccgtcgataccgacatccattctgcaaaaatcggtgatgtcacatcttccgagattatctctgaagaggagcaacaagtcaccacatttgcgtttcctaaagggaccatgtcttctttcaagggtaatgcatttttggatataaaatttactggtattttaaatgataatatggctggcttttacagagccaaatatgaggacaagttaacaggtgagacaaaatacatggctactactcagatggaacctactgatgctagaagggccttcccatgttttgatgagcctaacttgaaagcctcttttgctattactttagtttctgacccatctttgacacacttatccaatatggacgtcaagaacgaatacgtaaaggatggaaaaaaggtcactttgttcaatacgacccctaaaatgtctacttaccttgttgcttttattgttgctgaattgaagtacgttgaatccaagaactttcgtattcctgtcagagtttacgccaccccaggtaacgaaaaacatggtcagtttgccgcggatttgactgccaagactttggcattttttgaaaaaacttttggcatccaatatcctttgcctaaaatggacaatgttgctgttcacgaattttctgcaggagctatggaaaattgggggttagtcacttatagagtggttgatttattattagacaaagataactctacattagatcgtattcaaagagtggctgaggtagttcaacatgaattagctcaccaatggtttggtaacttagttactatggactggtgggaaggcttatggttaaatgaaggttttgctacttggatgtcttggtattcttgtaatgagtttcaaccagaatggaaagtttgggaacagtatgttactgataccttacaacatgcattaagccttgactctttaaggtcctctcatccgatcgaagtacctgtaaaaaaagctgacgaaattaaccaaatctttgatgccatctcttactccaagggtgcttctttattaaggatgatttccaaatggttaggtgaagaaacttttattaaaggtgtatcccaatacttgaataaatttaaatacggtaatgcgaagactgaagacttatgggatgctttagcggacgcctccggtaaagacgttcgttctgtgatgaacatctggactaaaaaagttggtttcccagtcatttctgttagcgaagatggtaacggtaaaataacatttcgccaaaaccgttacttaagcacagctgatgtcaagcccgacgaggacaaaaccatctatcctgtatttttggctttgaagactaaaaatggagttgacagttccgttgtattgagtgaaagaagcaaaactattgaattagaagatcctacctttttcaaagttaacagcgaacaatccggaatttatataacatcctacaccgatgaaagatgggcaaaattgggtcaacaagctgacttattgtctgttgaggaccgtgtcggtttagttgctgatgtcaagacattatctgcttctggctacacttctactactaattttttgaacttagtctccaaatggaataatgaaaagagctttgtcgtctgggaccaaataatcaacagcatatcttctatgaaatctacttggttattcgaaccaaaggaaacccaggatgcgcttgataacttcacgaagcaattgataagcggtatgacacaccacttgggttgggaattcaaatcttctgattctttctccactcaacgtttgaaagtgaccatgtttggtgctgcttgtgccgcaagggacgcagacgttgaaaaagctgctttgaaaatgtttactgattattgcagcggtaataaggaagccatcccagcattgattaaaccaattgtatttaacactgtggcaagagttggtggtgcagaaaactatgaaaaagtttacaaaatctacttagatccaatctctaacgatgaaaaattagccgcattaagatctttaggcagatttaaagaacctaaattattagaaagaaccttaggatatttgtttgatggcactgtcttaaaccaagacatttatattccaatgcaaggaatgagagctcatcaagaaggtgtagaggctttgtggaattgggttaaaaagaactgggacgaactcgtaaagagattacctcctggtctttctatgcttggctccgtcgtcacattaggtacctctggctttacatctatgcaaaaaatagatgagattaagaaattctttgccactaaatccacgaaaggtttcgatcaaagtttggctcaaagtttggacactattacttctaaagcgcagtgggttaacagagaccgtgatgtcgtcaacaagtatttgaaggaaaatggttactattga

SEQ ID NO: 6557 - DNA, 249 bp, Saccharomyces cerevisiae
atggttttagttcaagatttattgcacccaactgcagcttctgaagcaagaaagcacaaattaaagacattagtccaaggtccaagatcgtacttcctagacgttaagtgcccaggttgtttgaacatcactacagttttctcacacgcccaaactgcagttacctgcgaatcctgctcaacaattttgtgcaccccaactggtggtaaggcaaagctttctgagggtacatctttcagaagaaagtaa

SEQ ID NO: 6558 - DNA, 249 bp, Artificial Sequence
  Description of Artificial Sequence: Synthetic polynucleotide
atggttttagttcaagatttattgcacccaactgcagcttctgaagcaagaaagcacaaattaaagacattagtccaaggtccaagatcttacttcttggacgttaagtgcccaggttgtttgaacatcactacagttttctctcacgcccaaactgcagttacctgcgaatcctgctccacaattttgtgcaccccaactggtggtaaggcaaagctttctgagggtacatctttcagaagaaagtga

SEQ ID NO: 6559 - DNA, 1887 bp, Saccharomyces cerevisiae
atgatgaaaagatgcttcagtatcctaccacaaaatgtccggttcagctcaaagttcacaagtttaaacttaccaaagttagatttggcggattttatagactcaaataaaagaggaatcaatgttcttccgtcgtacagagatgaaaccgctagcaccactcaagcaactaattctaaagagctcagattactttccaaaacacttcagggccagtcgtaccgggaccaattagagttgaatcctgatgtaagcaaagcaatcaacaataatattatggctgtacatattcccaataatcttagaagggttgctacaaattattacaaagagattcaggaaccaaattcattacatcgtccctgtagaaccaaaatggaagtggatgcacatatagcgtccatttttttacaaaattatggttctattttccaaagtctgaaagaattacaaaaaagggtaggtcctgataattttaaacctcaaagaatccttgatgttggatatggcccagcgactggtatagttgccttgaatgatattttaggcccaaattatagacctgatctaaaagatgccgttattttagggaatgcggagatgcaagaaagagccaaaatcattttgagcagacaacttaacgaggtggtcgatactgtagaagaaaatgtgtctacagagaaagagcaggaaacagatagacggaacaaaaactttcaagaggatgaacatattggagaagtgatgacaaaaaagataaacattatgactaacttgcggtcttctattcccgcatctaaggaatatgacctcataatattaacgcatcaacttcttcatgacgggaatcaatttccaattcaggtggatgaaaatattgagcactacttaaatattctagcgcctggaggccacattgttattattgaacgaggcaacccaatgggattcgagattatagccagggcaaggcaaattacgcttagacctgaaaactttccagatgaattcggaaaaataccaagaccttggtctaggggagtaacagtcagaggcaaaaaagatgctgaattaggaaacatttccagtaattattttctgaaggtgattgcaccttgtccacatcaaaggaaatgtcccttacaggttggaaatcctaacttttatactcataaagagggtaaagacttaaagttctgcaattttcaaaaaagcatcaagcgtcccaaattcagtatagagttaaagaagggtaaacttctcgctacttcatgggatggttctcaaggaaatgcgtcgaggctaaaaggaacgggaagaagaaatggtcgtgactatgaaattttaaactactcctatttaatattcgagagatcacataaggacgaaaatacgttgaaagaaattaagaaattacggaatgaaaatgtgaacggcaaatatgacattggatcactgggtgatgacacgcaaaattcctggcctagaattatcaatgatcctgtcaaacgtaaaggtcatgttatgatggatttatgtgcgccatcaggagaacttgaaaaatggacggtttcgcggtcgttttctaaacaaatataccacgatgccagaaagagtaagaaaggtgatttatgggcctcagcggccaaaacacagattaaagggctgggagacttgaatgttaagaagttccacaagctagaaaaggagagaatcaagcagttgaaaaaggaagaacgtcaaaaagctagaaaggctatggaatcttataatgaattggaggactctcttcaatttgatgatcatcagttctcaaactttgaggtaatgaagaaattgtccacttttcacggcaacgattttttacaacatgtaaatagaaaatag

SEQ ID NO: 6560 - DNA, 1887 bp, Artificial Sequence
  Description of Artificial Sequence: Synthetic polynucleotide
atgatgaaaagatgcttcagtatcttgccacaaaatgtcagattcagctctaagttcacaagtttaaacttaccaaagttagatttggcggattttatagactctaataaaagaggaatcaatgttcttccgagctacagagatgaaaccgctagcaccactcaagcaactaattctaaagagctcagattactttccaaaacacttcagggccagtcttacagagaccaattagagttgaatcctgatgtaagcaaagcaatcaacaataatattatggctgtacatattcccaataatcttagaagggttgctacaaattattacaaagagattcaggaaccaaattctttacatcgtccctgtagaaccaaaatggaagtggatgcacatatagcgtccatttttttacaaaattatggttctattttccaaagtttgaaagaattacaaaaaagggtaggtcctgataattttaaacctcaaagaatccttgatgttggatatggcccagcgactggtatagttgccttgaatgatattttaggcccaaattatagacctgatttgaaagatgccgttattttagggaatgcggagatgcaagaaagagccaaaatcattttgagcagacaacttaacgaggtggtcgatactgtagaagaaaatgtgtctacagagaaagagcaggaaacagatagaagaaacaaaaactttcaagaggatgaacatattggagaagtgatgacaaaaaagataaacattatgactaacttgagatcttctattcccgcatctaaggaatatgacctcataatattaacgcatcaacttcttcatgacgggaatcaatttccaattcaggtggatgaaaatattgagcactacttaaatattttggcgcctggaggccacattgttattattgaaagaggcaacccaatgggattcgagattatagccagggcaaggcaaattacgcttagacctgaaaactttccagatgaattcggaaaaataccaagaccttggtctaggggagtaacagtcagaggcaaaaaagatgctgaattaggaaacatttccagtaattattttttgaaggtgattgcaccttgtccacatcaaaggaaatgtcccttacaggttggaaatcctaacttttatactcataaagagggtaaagacttaaagttctgcaattttcaaaaaagcatcaagcgtcccaaattcagtatagagttaaagaagggtaaacttctcgctacttcttgggatggttctcaaggaaatgcgtccaggttgaaaggaacgggaagaagaaatggtcgtgactatgaaattttaaactactcctatttaatattcgagagaagccataaggacgaaaatacgttgaaagaaattaagaaattaagaaatgaaaatgtgaacggcaaatatgacattggatctttgggtgatgacacgcaaaattcctggcctagaattatcaatgatcctgtcaaacgtaaaggtcatgttatgatggatttatgtgcgccatctggagaacttgaaaaatggacggtttctaggtctttttctaaacaaatataccacgatgccagaaagagtaagaaaggtgatttatgggcctctgcggccaaaacacagattaaagggttgggagacttgaatgttaagaagttccacaagttggaaaaggagagaatcaagcagttgaaaaaggaagaacgtcaaaaagctagaaaggctatggaatcttataatgaattggaggactctcttcaatttgatgatcatcagttcagtaactttgaggtaatgaagaaattgtccacttttcacggcaacgattttttacaacatgtaaatagaaaatga

SEQ ID NO: 6561 - DNA, 735 bp, Saccharomyces cerevisiae
atgcttagtaatacacttattattgcctgtttattggtgatagggacaaccatagcgctaatagcagtgcaaaaggcatcctccaagacagggatcaagcaaaaaagttatcaaccatctattatcattgcaggtcctcaaaattctggaaaaacgagcttgcttacgctgctaaccacagattcagtaagaccaactgttgtttctcaagaaccgttatcagcagcggattacgatggttccggcgtcacgttagtggacttcccaggccatgtcaagttgcgttataaactctcagattatttgaaaacaagagccaaatttgttaaagggttgatatttatggtagactcaacagttgatcctaagaaattaacaacaacagctgagttcttggtagacatattatcaattactgaatctagttgcgaaaatggtattgatatcttaattgcatgcaataaaagcgaattgttcactgcaagaccaccatcaaagatcaaggatgctttagaaagcgaaattcaaaaggttattgaaagaaggaaaaaatcgttgaacgaggttgaaagaaaaattaacgaagaagattatgcagagaatacactagacgttttacagtctaccgacgggttcaaatttgcaaatttggaagcatctgtagttgcttttgagggcagtattaataaaagaaaaatttcccaatggcgcgaatggatagatgaaaaactgtaa

SEQ ID NO: 6562 - DNA, 735 bp, Artificial Sequence
  Description of Artificial Sequence: Synthetic polynucleotide
atgcttagtaatacacttattattgcctgtttattggtgatagggacaaccatagcgttaatagcagtgcaaaaggcatcctccaagacagggatcaagcaaaaaagttatcaaccatctattatcattgcaggtcctcaaaattctggaaaaacgagcttgcttacgttattaaccacagattctgtaagaccaactgttgtttctcaagaaccgttaagtgcagcggattacgatggttccggcgtcacgttagtggacttcccaggccatgtcaagttgcgttataaactctctgattatttgaaaacaagagccaaatttgttaaagggttgatatttatggtagactctacagttgatcctaagaaattaacaacaacagctgagttcttggtagacatattatccattactgaatctagttgcgaaaatggtattgatatcttaattgcatgcaataaaagcgaattgttcactgcaagaccaccatctaagatcaaggatgctttagaaagcgaaattcaaaaggttattgaaagaaggaaaaaatctttgaacgaggttgaaagaaaaattaacgaagaagattatgcagagaatacattagacgttttacagtctaccgacgggttcaaatttgcaaatttggaagcatctgtagttgcttttgagggcagtattaataaaagaaaaatttcccaatggcgcgaatggatagatgaaaaattgtga

SEQ ID NO: 6563 - DNA, 744 bp, Saccharomyces cerevisiae
atgccaaagttagttttagttagacacggtcaatccgaatggaacgaaaagaacttattcaccggttgggttgatgttaaattgtctgccaagggtcaacaagaagccgctagagccggtgaattgttgaaggaaaagaaggtctacccagacgtcttgtacacttccaagttgtccagagctatccaaactgctaacattgctttggaaaaggctgacagattatggattccagtcaacagatcctggagattgaacgaaagacattacggtgacttacaaggtaaggacaaggctgaaactttgaagaagttcggtgaagaaaaattcaacacctacagaagatccttcgatgttccacctcccccaatcgacgcttcttctccattctctcaaaagggtgatgaaagatacaagtacgttgacccaaatgtcttgccagaaactgaatctttggctttggtcattgacagattgttgccatactggcaagatgtcattgccaaggacttgttgagtggtaagaccgtcatgatcgccgctcacggtaactccttgagaggtttggttaagcacttggaaggtatctctgatgctgacattgctaagttgaacatcccaactggtattccattggtcttcgaattggacgaaaacttgaagccatctaagccatcttactacttggacccagaagctgccgctgctggtgccgctgctgttgccaaccaaggtaagaaataa

SEQ ID NO: 6564 - DNA, 744 bp, Artificial Sequence
  Description of Artificial Sequence: Synthetic polynucleotide
atgccaaagttagttttagttagacacggtcaatccgaatggaacgaaaagaacttattcaccggttgggttgatgttaaattgtctgccaagggtcaacaagaagccgctagagccggtgaattgttgaaggaaaagaaggtctacccagacgtcttgtacacttccaagttgtccagagctatccaaactgctaacattgctttggaaaaggctgacagattatggattccagtcaacagatcctggagattgaacgaaagacattacggtgacttacaaggtaaggacaaggctgaaactttgaagaagttcggtgaagaaaaattcaacacctacagaagatccttcgatgttccacctcccccaatcgacgcttcttctccattctctcaaaagggtgatgaaagatacaagtacgttgacccaaatgtcttgccagaaactgaatctttggctttggtcattgacagattgttgccatactggcaagatgtcattgccaaggacttgttgagtggtaagaccgtcatgatcgccgctcacggtaactccttgagaggtttggttaagcacttggaaggtatctctgatgctgacattgctaagttgaacatcccaactggtattccattggtcttcgaattggacgaaaacttgaagccatctaagccatcttactacttggacccagaagctgccgctgctggtgccgctgctgttgccaaccaaggtaagaaatga

SEQ ID NO: 6565 - DNA, 1014 bp, Saccharomyces cerevisiae
atgttagcagaattgtctcatagagaattgataaagttggcgcagaaaagatgtataccacctttattgccaaagtttcataagggacagtctggtgggagagtttgcattattggaggatgcgaagattatacaggggcaccgtatttcagcgccaatgctacagccttgatgggctgtgatttgacacatgtcatctgcgaatacaacgctggtacggtcattaaatcgtacaccccaaacctaatggttcatccataccttcgtatgagtaacaccaaattagacgttgatatggacgaacaaaggaagaaaatcaattccttattggatagaatccacgttgtggtaattggacccggcttgggtagggaccccctaatgttaaaatccattaaggatatcataagatatatacttgaaaaacatgagggcaagatcccgttagtaattgatgctgatggactgttcttagtaactcaagatagcgaagtcaaagaaatgctgaaaagctaccccaaaggtagagtgatcttgacgcccaatgtggtagaattcaaaagactatgtgatgccataggcaagaagggagactctcactccgagatgggcagcttgatcgcccaggaattgaattgtattgtggtggagaaaggtcagtcagataagatattctcacccgatagtgaaaaagacatgttgacgaacagcgaagagggcagcaacaagagggtaggaggccaaggtgatactttgacaggagctatatcatgcatgcttgcatttagtcgtgcaatgtatgactttaagatttgtgagcaggaagaaaagggagaatcttctaacgataaacccttgaaaaactgggtagactacgctatgttgagttgctacgcaggctgcacaattacacgagaatgctcccgcctaggatttaaggctaagggacgtgcaatgcagacgacagatctaaatgaccgtgtcggtgaagtgttcgccaaacttttcggttaa

SEQ ID NO: 6566 - DNA, 1014 bp, Artificial Sequence
  Description of Artificial Sequence: Synthetic polynucleotide
atgttagcagaattgtctcatagagaattgataaagttggcgcagaaaagatgtataccacctttattgccaaagtttcataagggacagtctggtgggagagtttgcattattggaggatgcgaagattatacaggggcaccgtatttcagcgccaatgctacagccttgatgggctgtgatttgacacatgtcatctgcgaatacaacgctggtacggtcattaaatcttacaccccaaacttgatggttcatccataccttcgtatgagtaacaccaaattagacgttgatatggacgaacaaaggaagaaaatcaattccttattggatagaatccacgttgtggtaattggacccggcttgggtagggaccccttgatgttaaaatccattaaggatatcataagatatatacttgaaaaacatgagggcaagatcccgttagtaattgatgctgatggattattcttagtaactcaagatagcgaagtcaaagaaatgttgaaaagctaccccaaaggtagagtgatcttgacgcccaatgtggtagaattcaaaagattatgtgatgccataggcaagaagggagactctcactccgagatgggcagcttgatcgcccaggaattgaattgtattgtggtggagaaaggtcagagcgataagatattctctcccgatagtgaaaaagacatgttgacgaacagcgaagagggcagcaacaagagggtaggaggccaaggtgatactttgacaggagctatatcttgcatgcttgcatttagtcgtgcaatgtatgactttaagatttgtgagcaggaagaaaagggagaatcttctaacgataaacccttgaaaaactgggtagactacgctatgttgagttgctacgcaggctgcacaattacaagagaatgctcccgccttggatttaaggctaagggacgtgcaatgcagacgacagatttgaatgaccgtgtcggtgaagtgttcgccaaacttttcggttga

SEQ ID NO: 6567 - DNA, 909 bp, Saccharomyces cerevisiae
atgttttccagattatccagatctcactcaaaagcattaccgattgctctaggtacagttgctatagcagctgctaccgcattctattttgcaaaccgtaaccaacattcctttgtcttcaatgaatctaataaagtgttcaaaggtgatgacaaatggatcgacttgccaatatctaaaatagaggaggaatcccacgacaccagaaggtttacttttaagctgcctaccgaagactcagaaatggggttggtcctagcatctgctctgtttgctaaatttgtcacaccaaagggatccaatgtggtgagaccatacactcctgtgagtgatctttcccagaagggtcacttccagctggtcgtcaagcattatgaaggtggtaaaatgacctcacatttatttggtcttaaaccaaatgacaccgtttctttcaagggtcctattatgaaatggaagtggcaacctaatcagttcaagtcaatcaccttgttaggtgccggtaccggtatcaaccctctgtaccaattagctcatcatatagttgaaaacccaaacgacaagaccaaagttaacttgctatatgggaacaagactcctcaggacattttactaaggaaggaactggatgcgttgaaggaaaagtatcctgacaagttcaatgttacttactttgttgacgacaagcaagatgaccaagactttgatggtgaaattagtttcatctccaaagattttattcaggagcatgttccaggtccaaaggaaagcacacatttgtttgtctgcggtcccccaccatttatgaacgcttactcaggtgagaagaagtcacctaaggaccaaggtgaattgatcggtatcttgaacaatttgggctactccaaggaccaagttttcaaattttaa

SEQ ID NO: 6568 - DNA, 909 bp, Artificial Sequence
  Description of Artificial Sequence: Synthetic polynucleotide
atgttttccagattatccagatctcactctaaagcattaccgattgctttgggtacagttgctatagcagctgctaccgcattctattttgcaaaccgtaaccaacattcctttgtcttcaatgaatctaataaagtgttcaaaggtgatgacaaatggatcgacttgccaatatctaaaatagaggaggaatcccacgacaccagaaggtttacttttaagttacctaccgaagactctgaaatggggttggtcttggcatctgctttgtttgctaaatttgtcacaccaaagggatccaatgtggtgagaccatacactcctgtgagtgatctttcccagaagggtcacttccagttggtcgtcaagcattatgaaggtggtaaaatgaccagtcatttatttggtcttaaaccaaatgacaccgtttctttcaagggtcctattatgaaatggaagtggcaacctaatcagttcaagtctatcaccttgttaggtgccggtaccggtatcaaccctttgtaccaattagctcatcatatagttgaaaacccaaacgacaagaccaaagttaacttgttatatgggaacaagactcctcaggacattttattgaggaaggaattagatgcgttgaaggaaaagtatcctgacaagttcaatgttacttactttgttgacgacaagcaagatgaccaagactttgatggtgaaattagtttcatctccaaagattttattcaggagcatgttccaggtccaaaggaaagcacacatttgtttgtctgcggtcccccaccatttatgaacgcttactctggtgagaagaagtctcctaaggaccaaggtgaattgatcggtatcttgaacaatttgggctactccaaggaccaagttttcaaattttga

SEQ ID NO: 6569 - DNA, 1218 bp, Saccharomyces cerevisiae
atgactaaattgcgaattgctgtacaagggtgctgtcatggtcagctaaaccaaatttataaagaagtgtcacgaatccatgcgaagactcccatcgatctattaattattcttggagattttcaaagtattcgtgatggtcaggattttaagtcaatagccataccaccaaaatatcaaagactcggtgatttcatatcatactacaataatgagattgaagccccagtccctactatttttattggcggtaatcatgaatcgatgagacatttaatgcttctgccacatggtggttatgtagcaaagaacattttttatatgggatactctaacgttatatggtttaaaggcataaggataggttcattgagcgggatatggaaagagtgggatttcaataagcaacgaccagattggaatgacctagaaaataacaattggaaagctaacataagaaatctgtatcatgtaagaatttctgatattgctcctctttttatgatcaagcatcgtattgatattatgctgagccacgattggcccaatggagtcgtttatcatggcgatactaagcacttgttgaagcttaagcctttttttgagcaagatattaaagagggaaaactaggcagcccagtgacctggcaactactaagagatttgcggcctcaatggtggttgagcgcccatttgcatgtcaggttcatggcctccattaagcataataaaagaagccacgaaccgcctaataagtcaacttcaaagacaaaaaaaaacaataatgaaatagatttggatttatccagtgacgaggacgaaaggtctggtattatgaattgccaagaagagaatgagtatgattccaaatacggcgagacacggttcttggcgttggacaagtgcctgccaagaagacgttggttagaaattctggaaatagaaccggatacatcgcatgcttcgtggaaggacgagaatcaccgtatgttctgggatcctgaatttatcaataatttggtaatttgtcaaaaaaataagaatctcctaagcaataaaccgtttaatagcgtcaattggatagaactgtctcaatctaatagagaggaaggaagggatattgattgggaaaattatgccattcctgcatacaccttagatattcagaaagatgaagtacgacaaactaaagcatttatctctaaattcatgacttga

SEQ ID NO: 6570 - DNA, 1218 bp, Artificial Sequence
  Description of Artificial Sequence: Synthetic polynucleotide
atgactaaattgagaattgctgtacaagggtgctgtcatggtcagttgaaccaaatttataaagaagtgtccagaatccatgcgaagactcccatcgatttattaattattcttggagattttcaaagtattcgtgatggtcaggattttaagagtatagccataccaccaaaatatcaaagactcggtgatttcatatcttactacaataatgagattgaagccccagtccctactatttttattggcggtaatcatgaaagtatgagacatttaatgcttttaccacatggtggttatgtagcaaagaacattttttatatgggatactctaacgttatatggtttaaaggcataaggataggttctttgagcgggatatggaaagagtgggatttcaataagcaaagaccagattggaatgacttggaaaataacaattggaaagctaacataagaaatttatatcatgtaagaatttctgatattgctcctctttttatgatcaagcatcgtattgatattatgttaagccacgattggcccaatggagtcgtttatcatggcgatactaagcacttgttgaagcttaagcctttttttgagcaagatattaaagagggaaaattgggcagcccagtgacctggcaattattaagagatttgagacctcaatggtggttgagcgcccatttgcatgtcaggttcatggcctccattaagcataataaaagaagccacgaaccgcctaataagtctacttctaagacaaaaaaaaacaataatgaaatagatttggatttatccagtgacgaggacgaaaggtctggtattatgaattgccaagaagagaatgagtatgattccaaatacggcgagacaagattcttggcgttggacaagtgcttaccaagaagacgttggttagaaattttggaaatagaaccggatacatctcatgcttcttggaaggacgagaatcaccgtatgttctgggatcctgaatttatcaataatttggtaatttgtcaaaaaaataagaatctcttgagcaataaaccgtttaatagcgtcaattggatagaattatctcaatctaatagagaggaaggaagggatattgattgggaaaattatgccattcctgcatacaccttagatattcagaaagatgaagtaaggcaaactaaagcatttatctctaaattcatgacttga

SEQ ID NO: 6571 - DNA, 1923 bp, Saccharomyces cerevisiae
atgctatcgctaaaaaaatcagcgctctccaagttgactttgctcagaaacacaagaacatttacatcgtcagctttggtgcgccaaacgcagggctctgtaaacggttccgcgtccagatctgcagacgggaagtaccacataatagatcacgagtatgactgtgtggtaatcggtgccggtggtgccggccttagagcggcctttggtcttgccgaggcgggctacaagactgcttgtatatccaagcttttccccaccagatcccacactgttgctgctcagggtggtatcaatgccgctctgggaaatatgcacaaggataactggaaatggcatatgtacgatactgtgaaaggatctgattggctaggtgaccaggactccatccattacatgaccagggaagcgcccaaatcgatcattgaactggaacactatggtgttcctttttcaagaactgaaaacggtaagatctaccaaagagcctttggtggtcagaccaaggagtacggtaagggtgctcaggcctatagaacatgcgctgtcgcagacaggacaggacatgctcttttacacacgctttatggccaagctttaagacatgacacacatttctttattgagtactttgccctcgatctgttgacccataatggcgaggtcgttggtgtcatcgcttataatcaggaagacggtaccatccacagattcagagcacacaagaccattattgccactggtggctatggtagagcatacttctcttgtacctctgctcacacatgtacgggtgacggtaatgccatggtttcgcgtgctggtttccccttgcaagatttagagtttgttcaattccatccttcaggtatatatgggtctggttgcttaatcactgaaggtgctcgtggtgaaggtggttttttggttaattctgaaggtgaaagattcatggaacgttacgctcctacggccaaggatctagcttgtagagatgtcgtttccagagcaatcaccatggagatcagagaaggcagaggtgttggtaagaaaaaggaccacatgtacttacaattgagccatctacctccggaagttctaaaggaaagattgccaggtatctctgaaacagcagccatttttgctggtgtagacgtcaccaaggaacctattcccattattcctaccgtccactataacatgggtggtattcccacgaagtggaatggtgaggcattaaccattgatgaagaaactggcgaagacaaggttattcccggtttaatggcttgtggtgaagccgcttgtgtttctgtccatggtgccaatagattaggtgccaattccttgttggatcttgttgtctttggtcgtgctgttgcccatacggttgctgacactttacagcctgggttgccacacaaaccactaccttctgatttgggtaaagaatccatcgcaaacttggataaactaagaaatgctaatggttcaagatctacggcagaaattagaatgaatatgaaacaaactatgcaaaaggatgtttccgtctttagaacacaatcatctttagatgaaggtgttcggaacattactgcagtagagaagacctttgatgatgtgaagacgaccgatagatcaatgatctggaattctgacttggttgaaactctggagctacagaacttattaacctgtgcctcccaaacagctgtttccgctgctaatagaaaggaatcccgtggtgctcatgcaagagaggattatccaaatagagatgacgaacattggatgaagcatacattatcctggcaaaaggacgtcgctgccccagtgactttgaaatacagaagggttatcgatcacactttggacgaaaaggaatgtccttccgtacctccaactgtaagagcctactaa

SEQ ID NO: 6572 - DNA, 1923 bp, Artificial Sequence
  Description of Artificial Sequence: Synthetic polynucleotide
atgctttctttgaaaaaatctgcgctctccaagttgactttgctcagaaacacaagaacatttacatcttctgctttggtgcgccaaacgcagggctctgtaaacggttccgcgtccagatctgcagacgggaagtaccacataatagatcacgagtatgactgtgtggtaatcggtgccggtggtgccggccttagagcggcctttggtcttgccgaggcgggctacaagactgcttgtatatccaagcttttccccaccagatcccacactgttgctgctcagggtggtatcaatgccgctttaggaaatatgcacaaggataactggaaatggcatatgtacgatactgtgaaaggatctgattggttaggtgaccaggactccatccattacatgaccagggaagcgcccaaatctatcattgaattggaacactatggtgttcctttttccagaactgaaaacggtaagatctaccaaagagcctttggtggtcagaccaaggagtacggtaagggtgctcaggcctatagaacatgcgctgtcgcagacaggacaggacatgctcttttacacacgctttatggccaagctttaagacatgacacacatttctttattgagtactttgccctcgatttattgacccataatggcgaggtcgttggtgtcatcgcttataatcaggaagacggtaccatccacagattcagagcacacaagaccattattgccactggtggctatggtagagcatacttctcttgtacctctgctcacacatgtacgggtgacggtaatgccatggtttctcgtgctggtttccccttgcaagatttagagtttgttcaattccatccttctggtatatatgggtctggttgcttaatcactgaaggtgctcgtggtgaaggtggttttttggttaattctgaaggtgaaagattcatggaacgttacgctcctacggccaaggatttggcttgtagagatgtcgtttccagagcaatcaccatggagatcagagaaggcagaggtgttggtaagaaaaaggaccacatgtacttacaattgagccatttacctccggaagttttgaaggaaagattgccaggtatctctgaaacagcagccatttttgctggtgtagacgtcaccaaggaacctattcccattattcctaccgtccactataacatgggtggtattcccacgaagtggaatggtgaggcattaaccattgatgaagaaactggcgaagacaaggttattcccggtttaatggcttgtggtgaagccgcttgtgtttctgtccatggtgccaatagattaggtgccaattccttgttggatcttgttgtctttggtcgtgctgttgcccatacggttgctgacactttacagcctgggttgccacacaaaccattgccttctgatttgggtaaagaatccatcgcaaacttggataaattgagaaatgctaatggttccagatctacggcagaaattagaatgaatatgaaacaaactatgcaaaaggatgtttccgtctttagaacacaatcttctttagatgaaggtgttagaaacattactgcagtagagaagacctttgatgatgtgaagacgaccgatagaagtatgatctggaattctgacttggttgaaactttagagttacagaacttattaacctgtgcctcccaaacagctgtttccgctgctaatagaaaggaatcccgtggtgctcatgcaagagaggattatccaaatagagatgacgaacattggatgaagcatacattatcctggcaaaaggacgtcgctgccccagtgactttgaaatacagaagggttatcgatcacactttggacgaaaaggaatgtccttccgtacctccaactgtaagagcctactga

SEQ ID NO: 6573 - DNA, 2079 bp, Saccharomyces cerevisiae
atgaatggaaaagaggtttcaagtggctctggaagaacgcagagcaacaacaacaaaaaaaataacaacggaggcagtacaggaatctcgcatgcgtctggctcacctttaacggacggcaacggtggcaatagcaacggtaatagtagaagtagaagcagaagtagaaaatctagtggaactacaggtggtttgctaaaaaagccgccgctgcttgtgaacaatgaagcggtgcatgctagcgtacccgacgcgtcgcacacttcctgtaacaatggcacgcttgaagtgagcataaataaccctgagccacatgtggtagatgccgtggcacgccacttgataagaaacccgagtaacagcctacaattgcaaggcggagacattacaagagatctgtataagtggacaaacgaccatccttcatcaccatcgcagtatcagtacccaagtcaacctgcactttccacctcaataccttcacaagcgccctcattctcgaatcgtaaaaggtctatgagcttttctgccgcttctatagcatcttcctctcaccttaacaacaactcggaggcgaatgggaatcctctagcggcaataggcctggcgcccgcaccgatgacgcacgaagaaatcagggctcctggtggattcagaagatcttttataatacagaagcgcaggaaacataacgttgatgcgcccataccgaattttttcaccaggaactttattgaatttttgaccttgtatggccacttcgctggtgaagatttatcggaagaagaggaggaggaggaagaaactgaagaggagccagaggaggaagctttggaaacggaaagcacccagctagtttctcgtgaacacgggcgccatcctcacaaatcatctacggtaaaggcggtgctgctcttgttaaagtcatttgttgggacaggtgtgcttttcctaccaaaggctttccataacggtggttggggatttagcgccctttgtctactctcgtgtgccctcatttcttatggatgtttcgtatcattgattaccaccaaggacaaagtaggcgtagatgggtacggtgacatgggtcgtatactatatgggcccaaaatgaaatttgccattctttcgtctatcgccttgtcacaaatcgggttttctgctgcatacactgttttcactgcaactaatttgcaggtcttttctgaaaatttcttccatttgaaaccgggcagcatcagtctagccacctatatctttgcacaagtactcatctttgtcccactatctttgacaagaaacatagccaagttaagtgggaccgcgttaatagcagatctatttattctactgggattggtttatgtttacgtttactccatttattatattgctgttaatggtgtcgcatccgatacaatgcttatgttcaataaagcggactggtcgttgttcatcggtaccgccatattcacctttgaaggtataggcctacttatccccattcaggagtcaatgaaacacccgaagcatttccggccatcgttgtccgcggtgatgtgtatcgtggcagtgattttcatatcatgtggtctcttatgctatgccgcttttggatctgacgtgaaaactgttgttttattgaattttccgcaggacacttcctatactctcactgttcaattactgtatgcattagccattttgttatccacgccgttgcagctatttcccgcgatacgtattttggaaaactggacttttccctcaaatgcatctggtaaatacaacccgaaagtcaaatggttgaaaaactatttccgttgcgctattgtcgtcctgacatctatcctcgcttgggtaggcgccaacgatttggacaaatttgtatcactggtaggctccttcgcgtgtatcccattgatctacatatacccgccattgttgcactataaggcgtccatcttatctggaacctcgagagccaggcttcttttagatttaatcgtcatagtatttggagttgctgtcatggcctacacgtcatggcagacgattaaaatgtggagccagtaa

SEQ ID NO: 6574 - DNA, 2079 bp, Artificial Sequence
  Description of Artificial Sequence: Synthetic polynucleotide
atgaatggaaaagaggtttctagtggctctggaagaacgcagagcaacaacaacaaaaaaaataacaacggaggcagtacaggaatctctcatgcgtctggctctcctttaacggacggcaacggtggcaatagcaacggtaatagtagaagtagaagcagaagtagaaaatctagtggaactacaggtggtttgttgaaaaagccgccgttacttgtgaacaatgaagcggtgcatgctagcgtacccgacgcgtcccacacttcctgtaacaatggcacgcttgaagtgagcataaataaccctgagccacatgtggtagatgccgtggcacgccacttgataagaaacccgagtaacagcttacaattgcaaggcggagacattacaagagatttatataagtggacaaacgaccatccttcttctccatctcagtatcagtacccaagtcaacctgcactttccaccagtataccttctcaagcgccctctttcagtaatcgtaaaaggtctatgagcttttctgccgcttctatagcatcttcctctcaccttaacaacaacagtgaggcgaatgggaatcctttagcggcaataggcttggcgcccgcaccgatgacgcacgaagaaatcagggctcctggtggattcagaagatcttttataatacagaagcgcaggaaacataacgttgatgcgcccataccgaattttttcaccaggaactttattgaatttttgaccttgtatggccacttcgctggtgaagatttatctgaagaagaggaggaggaggaagaaactgaagaggagccagaggaggaagctttggaaacggaaagcacccagttggtttctcgtgaacacgggcgccatcctcacaaatcttctacggtaaaggcggtgcttctcttgttaaagagctttgttgggacaggtgtgcttttcttaccaaaggctttccataacggtggttggggatttagcgccctttgtttactctcctgtgccctcatttcttatggatgtttcgtatctttgattaccaccaaggacaaagtaggcgtagatgggtacggtgacatgggtcgtatactttatgggcccaaaatgaaatttgccattctttcttctatcgccttgtctcaaatcgggttttctgctgcatacactgttttcactgcaactaatttgcaggtcttttctgaaaatttcttccatttgaaaccgggcagcatcagtttggccacctatatctttgcacaagtactcatctttgtcccattatctttgacaagaaacatagccaagttaagtgggaccgcgttaatagcagatttatttattttattaggattggtttatgtttacgtttactccatttattatattgctgttaatggtgtcgcatccgatacaatgcttatgttcaataaagcggactggtctttgttcatcggtaccgccatattcacctttgaaggtataggccttcttatccccattcaggagtccatgaaacacccgaagcatttcagaccatctttgtccgcggtgatgtgtatcgtggcagtgattttcatatcttgtggtctcttatgctatgccgcttttggatctgacgtgaaaactgttgttttattgaattttccgcaggacacttcctatactctcactgttcaattattatatgcattagccattttgttatccacgccgttgcagttatttcccgcgatacgtattttggaaaactggacttttccctccaatgcatctggtaaatacaacccgaaagtcaaatggttgaaaaactatttccgttgcgctattgtcgtcttaacatctatcctcgcttgggtaggcgccaacgatttggacaaatttgtatctttagtaggctccttcgcgtgtatcccattgatctacatatacccgccattgttgcactataaggcgtccatcttatctggaacctccagagccaggcttcttttagatttaatcgtcatagtatttggagttgctgtcatggcctacacgagctggcagacgattaaaatgtggagccagtga

SEQ ID NO: 6575 - DNA, 1404 bp, Saccharomyces cerevisiae
atgccaccaaaagaagactgggaaaaatacaaggcacctttggaagacgatgataaaaaacctgatgatgacaagatcgtacccttaacagaaggtgacattcaagtcttaaaatcatacggtgcagctccatacgcagccaaattaaagcaaactgagaatgacttaaaagacattgaagcgagaatcaaagaaaaggccggtgtgaaagaaagcgatacagggttagcaccctcccatctatgggatattatgggtgataggcagagactgggcgaagaacatcccttacaagtcgctcgttgcacgaagatcattaaggggaatggtgaaagtgacgaaactacgacagataataataacagcggcaatagcaatagtaatagcaatcaacagtctactgatgcagacgaagacgatgaagatgccaagtacgtgataaatcttaagcaaattgccaaatttgtcgtcggattaggtgaacgtgtttctccaacagatatagaagaaggtatgcgtgtaggtgtcgataggtcgaaatataatattgaacttccattgcctccaaggattgacccatcagttactatgatgaccgttgaagaaaagcctgacgttacttatagcgatgtcggtggctgtaaagaccaaattgaaaagctgagagaagttgtcgagctgcccttattatctccagaaagatttgctactcttggtattgatccaccaaagggtatcttattatatgggccacctggtactggtaagacattatgtgctcgtgctgttgctaatagaactgatgcaacttttattagggtcattgggtctgagctagtgcaaaaatatgtcggtgaaggtgctcgtatggttagagaattatttgaaatggctcgtaccaaaaaggcttgcattatattcttcgatgaaatcgacgctgttggtggtgctcgttttgatgatggtgctggtggtgataatgaagttcaaagaactatgttagaactgattacacagttagacgggtttgaccctcgtggtaacattaaagtgatgtttgccaccaataggcccaacactttagatccagctttattgagacccggtagaattgatcgtaaggtagagttttcattacctgacttggaaggtcgtgcaaatatcttccgtattcactctaaatcaatgagtgtggaacgtggcatcagatgggaacttatctccagactgtgtccaaactctaccggtgcagaattaagatctgtttgcacagaagccggtatgtttgccattagagcaagaagaaaggtggctactgaaaaggatttcctgaaggctgttgataaagttattagcggatacaagaagtttagttccacatcgcgttatatgcaatataattga

SEQ ID NO: 6576 - DNA, 1404 bp, Artificial Sequence
  Description of Artificial Sequence: Synthetic polynucleotide
atgccaccaaaagaagactgggaaaaatacaaggcacctttggaagacgatgataaaaaacctgatgatgacaagatcgtacccttaacagaaggtgacattcaagtcttaaaatcttacggtgcagctccatacgcagccaaattaaagcaaactgagaatgacttaaaagacattgaagcgagaatcaaagaaaaggccggtgtgaaagaaagcgatacagggttagcaccctcccatctttgggatattatgggtgataggcagagattgggcgaagaacatcccttacaagtcgctcgttgcacgaagatcattaaggggaatggtgaaagtgacgaaactacgacagataataataacagcggcaatagcaatagtaatagcaatcaacagtctactgatgcagacgaagacgatgaagatgccaagtacgtgataaatcttaagcaaattgccaaatttgtcgtcggattaggtgaacgtgtttctccaacagatatagaagaaggtatgcgtgtaggtgtcgataggtccaaatataatattgaacttccattgcctccaaggattgacccatctgttactatgatgaccgttgaagaaaagcctgacgttacttatagcgatgtcggtggctgtaaagaccaaattgaaaagttgagagaagttgtcgagttgcccttattatctccagaaagatttgctactcttggtattgatccaccaaagggtatcttattatatgggccacctggtactggtaagacattatgtgctcgtgctgttgctaatagaactgatgcaacttttattagggtcattgggtctgagttggtgcaaaaatatgtcggtgaaggtgctcgtatggttagagaattatttgaaatggctcgtaccaaaaaggcttgcattatattcttcgatgaaatcgacgctgttggtggtgctcgttttgatgatggtgctggtggtgataatgaagttcaaagaactatgttagaattgattacacagttagacgggtttgaccctcgtggtaacattaaagtgatgtttgccaccaataggcccaacactttagatccagctttattgagacccggtagaattgatcgtaaggtagagttttctttacctgacttggaaggtcgtgcaaatatcttccgtattcactctaaatctatgagtgtggaacgtggcatcagatgggaacttatctccagattatgtccaaactctaccggtgcagaattaagatctgtttgcacagaagccggtatgtttgccattagagcaagaagaaaggtggctactgaaaaggatttcttgaaggctgttgataaagttattagcggatacaagaagtttagttccacatctcgttatatgcaatataattga

SEQ ID NO: 6577 - DNA, 639 bp, Saccharomyces cerevisiae
atgtttatcctttcaaaaatcgctgacttggtacgaatcccgcccgatcaattccatcgcgatacaatatcggcaatcacacatcagttaaataataagttcgccaacaagattattcccaatgtcggtctatgtattacgatttacgacttattaaccgtcgaggaaggccaattgaagccaggcgatggatcatcctatattaacgttacatttcgagccgttgttttcaaaccgtttctaggtgagatagtaactggatggatttctaaatgtacagcagaaggcataaaagtttcactgttaggtatatttgatgacatttttatcccacaaaatatgttattcgaagggtgctattatacccctgaagaaagtgcatggatttggcccatggatgaagagacgaaactatatttcgatgtaaatgaaaaaattagattcagaatcgaaagagaagtttttgttgatgtgaagccaaaatcacccaaagaacgagaattggaggaaagagctcaattagagaatgagattgagggtaagaatgaagaaactcctcaaaacgaaaaacctccagcatatgccctattaggtagttgtcaaactgatggcatgggactcgttagttggtgggaatga

SEQ ID NO: 6578 - DNA, 639 bp, Artificial Sequence
  Description of Artificial Sequence: Synthetic polynucleotide
atgtttatcctttctaaaatcgctgacttggtaagaatcccgcccgatcaattccatcgcgatacaatatctgcaatcacacatcagttaaataataagttcgccaacaagattattcccaatgtcggtttgtgtattacgatttacgacttattaaccgtcgaggaaggccaattgaagccaggcgatggatcttcctatattaacgttacatttagagccgttgttttcaaaccgtttttaggtgagatagtaactggatggatttctaaatgtacagcagaaggcataaaagtttctttattaggtatatttgatgacatttttatcccacaaaatatgttattcgaagggtgctattatacccctgaagaaagtgcatggatttggcccatggatgaagagacgaaactttatttcgatgtaaatgaaaaaattagattcagaatcgaaagagaagtttttgttgatgtgaagccaaaaagtcccaaagaaagagaattggaggaaagagctcaattagagaatgagattgagggtaagaatgaagaaactcctcaaaacgaaaaacctccagcatatgccttattaggtagttgtcaaactgatggcatgggactcgttagttggtgggaatga

SEQ ID NO: 6579 - DNA, 1392 bp, Saccharomyces cerevisiae
atgtcgaagaaatttagctctaaaaactcccaaaggtacgtggtggtacacagaccccatgatgatccttcattttatgatacagatgcctctgcgcacgttttggttcctgtctccaatccaaataaaacttctccagaagcagatcttcgaaaaaaagacgtgagttcaacaaaaccaaagggtaggagggctcatgtgggagaagcagctttatatggtattaattttgatgattctgaatacgattatactcaacatttgaagccaataggtctcgaccctgaaaactccatctttatagcatccaaaggcaatgaacagaaggtcgaaaaaaaaaacattgaagatttattcatcgaacctaagtatagacgtgatgaaattgagaaggatgacgcgctacctgtgtttcaaagagggatggcaaagccagaatatttactacaccaacaagataccaccgatgaaattagaggtttcaaacctgatatgaatcctgcattaagagaggtgcttgaagctttagaagatgaagcatatgttgttaatgatgatgttgtggttgaagacatcagcaaaaagacacaacttcaaggcgataactatggagaagaagaaaaggaagatgacattttcgcacaattactagggagcggtgaagcaaaagatgaagacgaattcgaggatgagtttgatgagtgggatattgataatgtagaaaattttgaagatgaaaactacgttaaggaaatggcgcaatttgataacatcgaaaacctggaggacttggaaaatatcgattatcaagctgatgttcgaagatttcaaaaagataactctatactagaaaagcataactcggatgatgaattttctaatgcaggtttagacagtgtaaatccctctgaagaggaagatgtgctgggcgaattgccctctatccaagacaaaagcaagacggggaagaagaaaagaaagagccgtcaaaaaaagggtgccatgtcagatgtatctggattttccatgagttcaagtgccattgcgcgtacagagacgatgacagtactggatgatcagtacgatcaaatcatcaatggttacgaaaattatgaggaagaactagaagaggacgaagaacaaaattaccaaccatttgacatgtcagcagaaagatctgattttgagtcaatgcttgatgactttttggacaattacgaactggagagtggtggccgtaaactggctaagaaagataaagaaattgaaaggctgaaggaagctgctgatgaagtaagcaaaggtaaactgtctcagagaagaaatcgtgaaaggcaagagaaaaagaaacttgagaaggtcaccaatacactaagcagcttaaaattttag

SEQ ID NO: 6580 - DNA, 1392 bp, Artificial Sequence
  Description of Artificial Sequence: Synthetic polynucleotide
atgtccaagaaatttagctctaaaaactcccaaaggtacgtggtggtacacagaccccatgatgatccttctttttatgatacagatgcctctgcgcacgttttggttcctgtctccaatccaaataaaacttctccagaagcagatcttagaaaaaaagacgtgagttctacaaaaccaaagggtaggagggctcatgtgggagaagcagctttatatggtattaattttgatgattctgaatacgattatactcaacatttgaagccaataggtctcgaccctgaaaactccatctttatagcatccaaaggcaatgaacagaaggtcgaaaaaaaaaacattgaagatttattcatcgaacctaagtatagacgtgatgaaattgagaaggatgacgcgttacctgtgtttcaaagagggatggcaaagccagaatatttattacaccaacaagataccaccgatgaaattagaggtttcaaacctgatatgaatcctgcattaagagaggtgcttgaagctttagaagatgaagcatatgttgttaatgatgatgttgtggttgaagacatcagcaaaaagacacaacttcaaggcgataactatggagaagaagaaaaggaagatgacattttcgcacaattattagggagcggtgaagcaaaagatgaagacgaattcgaggatgagtttgatgagtgggatattgataatgtagaaaattttgaagatgaaaactacgttaaggaaatggcgcaatttgataacatcgaaaacttggaggacttggaaaatatcgattatcaagctgatgttagaagatttcaaaaagataactctatattggaaaagcataacagtgatgatgaattttctaatgcaggtttagacagtgtaaatccctctgaagaggaagatgtgttaggcgaattgccctctatccaagacaaaagcaagacggggaagaagaaaagaaagagccgtcaaaaaaagggtgccatgagtgatgtatctggattttccatgagtagtagtgccattgcgcgtacagagacgatgacagtattggatgatcagtacgatcaaatcatcaatggttacgaaaattatgaggaagaattggaagaggacgaagaacaaaattaccaaccatttgacatgtctgcagaaagatctgattttgagtccatgcttgatgactttttggacaattacgaattagagagtggtggccgtaaattggctaagaaagataaagaaattgaaaggttaaaggaagctgctgatgaagtaagcaaaggtaaattatctcagagaagaaatcgtgaaaggcaagagaaaaagaaacttgagaaggtcaccaatacattgagcagcttaaaattttga

SEQ ID NO: 6581 - DNA, 660 bp, Saccharomyces cerevisiae
atgtctaacgaaattgaattactgcagaagcaagtctctgaattacaagacttagtgaagaagcaaagtctgattatctctaagacaggagagcgtgtgctggaattgcagttagataaacaaaagcacgacgtaactgattttgattcgaaattctctaaatctatctcgaagaaatcaggatccgctactcaattcgatgccactgattttgccacaaatgaagatctagtggaattagtcaaagaactacagggtgagctaaatttcatcgaggaaaggtctatcagaagacttgttaactctttgaaaaaagatgatgatgacgttatagcgccactgcctaatgcagatggtgatattcctgctatttcagacggagtgttccctaagtcgttgaaagaatttaaagacatcccagacttaaaactggtaagacttgctaaattctacgaaagattgccaccaactctaaaggaacaagaagattttgaaaacttcctggaaggtaaggtggaagcctttcacattaatgagaccactgatgaagagatttctaaggagttggaaaagttctccaaagatgagctagatgatgcatttaatgatgttgcccgctatctaggtctctcccttagaagaggaaccgaaatatggtaa

SEQ ID NO: 6582 - DNA, 660 bp, Artificial Sequence
  Description of Artificial Sequence: Synthetic polynucleotide
atgtctaacgaaattgaattattgcagaagcaagtctctgaattacaagacttagtgaagaagcaaagtttgattatctctaagacaggagagcgtgtgttggaattgcagttagataaacaaaagcacgacgtaactgattttgattctaaattctctaaatctatctccaagaaaagtggatccgctactcaattcgatgccactgattttgccacaaatgaagatttggtggaattagtcaaagaattacagggtgagttgaatttcatcgaggaaaggtctatcagaagacttgttaactctttgaaaaaagatgatgatgacgttatagcgccattgcctaatgcagatggtgatattcctgctatttctgacggagtgttccctaagtctttgaaagaatttaaagacatcccagacttaaaattagtaagacttgctaaattctacgaaagattgccaccaactttgaaggaacaagaagattttgaaaacttcttggaaggtaaggtggaagcctttcacattaatgagaccactgatgaagagatttctaaggagttggaaaagttctccaaagatgagttagatgatgcatttaatgatgttgcccgctatttgggtctctcccttagaagaggaaccgaaatatggtga

SEQ ID NO: 6583 - DNA, 597 bp, Saccharomyces cerevisiae
atgtctgcaatgatggtcaagttaggactgaataagtcggctctattactgaaaccctccgccttttcaagagcagctgccttgagctcctcgaggaggctgctttttaatacagctagaacaaacttcctttctacctcaccattgaagaatgtggccagtgaaatgaacaccaaagcggcaattgctgaagaacaaatattaaacaagcaaagagcaaagagacctatttctccacatctgaccatttaccagccacaattaacttggtacctgtcttctcttcaccgtatttcgttggtgcttatgggactaggtttctacttgtttactatactcttcggagtctctggtttattaggtcttggattgactaccgaaaaggtttctaattggtaccatcagaagttttccaagattaccgaatggtccatcaagggttcctttgcttacttatttgcaattcactatggtggcgccattagacacttgatctgggataccgctaaggaattgacattgaaaggcgtttacagaactggttacgctctcattggtttcaccgccgttctcggtacttatttattaactttatga

SEQ ID NO: 6584 - DNA, 597 bp, Artificial Sequence
  Description of Artificial Sequence: Synthetic polynucleotide
atgtctgcaatgatggtcaagttaggattgaataagtctgctttattattgaaaccctccgccttttccagagcagctgccttgagctccagcaggaggttactttttaatacagctagaacaaacttcctttctacctctccattgaagaatgtggccagtgaaatgaacaccaaagcggcaattgctgaagaacaaatattaaacaagcaaagagcaaagagacctatttctccacatttgaccatttaccagccacaattaacttggtacttgtcttctcttcaccgtatttctttggtgcttatgggattaggtttctacttgtttactatactcttcggagtctctggtttattaggtcttggattgactaccgaaaaggtttctaattggtaccatcagaagttttccaagattaccgaatggtccatcaagggttcctttgcttacttatttgcaattcactatggtggcgccattagacacttgatctgggataccgctaaggaattgacattgaaaggcgtttacagaactggttacgctctcattggtttcaccgccgttctcggtacttatttattaactttatga

SEQ ID NO: 6585 - DNA, 1647 bp, Saccharomyces cerevisiae
atgtacttcccctttttaggcagattatcgataacagattacattatagtcgtcttggtatacatagaaagcattatttcatcagtccttaaacttataccacaaccaatgattaaccttttcgaatggctaataaatttctcaacgtcctccgatgacaataccatcgaagaaaagttaaggtcagctccaactatccatgaaatgtgtgcaatttttgatatatctgtcgaggatcatttggtaagaactgaagacaattatatcttgacactgcatagaatcccaccgatttctaaaaacagatttaacaataaagtggtatacttacatcacggtcttttgatgtgttctgatgtttggtgttgcaatattgaaagacataaaaacttaccgtttgtattgcatgatttaggttacgacgtctggatgggaaataatagaggtaataaatattcaactgcccacttgaacaaaccaccaaaatcgaacaagttttgggatttttctatcgacgaatttgcgttctttgacattccaaactcaattgaattcatcttagatataacaaaagtggacaaggtcatctgcatcggattctctcaaggctctgctcaaatgtttgctgcattttcgttgagtgaaaaattgaatcgaaaagtctcccattttatagccatagcacccgctatgactccaaaggggttgcacaacagaattgtcgataccttggccaaatcatcgcccggctttatgtatcttttctttggtaggaaaattgtgttaccttcagctgtcatttggcaaagaactttacatccaacacttttcaatttgtgtatcgatatcgcaaacaagatactgttcaattggaagtcgtttaacattctaccgagacaaaagattgcttcttacgcaaaactttattcaacgaccagtgtaaaatccattgttcactggttccaaatattaagatctcagaaatttcaaatgtttgaagagtctgataacatgctaaattccttaactaggccttaccaaattgctaattttcctactagaacaaatatcaagattcccattcttttaatttatggtggcatagattctttagttgatattgatgtgatgaaaaaaaatctacccttcaactccgtctttgatgttaaagttgacaattatgaacacctggatttgatttggggcaaagatgccgataccttggtcattgctaaagtcttgaggtttattgaattttttaaccctggtaatgtttcagtgaagactaaccagttactaccatcagcaagtctggttgaggaattaccaagcacgacatggaagacaactcatccaacgcatggtctcagttatagaactcactcggcagaccgttctccgttgtctgtacaagctgatgaagcggatgaggtccacaatgctgacaattcaaggttcttaagacgagtgttttctactagtgccatagacgaggacaacgaaaatgagcaccaggatgatacagaagatcaaatccataaggagcagcaaagacggttaagtgcctatctggaatcatccaaagatttacgacaactagatgccaactcttcgacaactgcgctggatgctctaaataaagaatga

SEQ ID NO: 6586 - DNA, 1647 bp, Artificial Sequence
  Description of Artificial Sequence: Synthetic polynucleotide
atgtacttcccctttttaggcagattatctataacagattacattatagtcgtcttggtatacatagaaagcattatttcttctgtccttaaacttataccacaaccaatgattaaccttttcgaatggttgataaatttcagtacgtcctccgatgacaataccatcgaagaaaagttaaggtctgctccaactatccatgaaatgtgtgcaatttttgatatatctgtcgaggatcatttggtaagaactgaagacaattatatcttgacattgcatagaatcccaccgatttctaaaaacagatttaacaataaagtggtatacttacatcacggtcttttgatgtgttctgatgtttggtgttgcaatattgaaagacataaaaacttaccgtttgtattgcatgatttaggttacgacgtctggatgggaaataatagaggtaataaatattctactgcccacttgaacaaaccaccaaaaagtaacaagttttgggatttttctatcgacgaatttgcgttctttgacattccaaactctattgaattcatcttagatataacaaaagtggacaaggtcatctgcatcggattctctcaaggctctgctcaaatgtttgctgcattttctttgagtgaaaaattgaatagaaaagtctcccattttatagccatagcacccgctatgactccaaaggggttgcacaacagaattgtcgataccttggccaaaagctctcccggctttatgtatcttttctttggtaggaaaattgtgttaccttctgctgtcatttggcaaagaactttacatccaacacttttcaatttgtgtatcgatatcgcaaacaagatattattcaattggaagagctttaacattttaccgagacaaaagattgcttcttacgcaaaactttattctacgaccagtgtaaaatccattgttcactggttccaaatattaagatctcagaaatttcaaatgtttgaagagtctgataacatgttgaattccttaactaggccttaccaaattgctaattttcctactagaacaaatatcaagattcccattcttttaatttatggtggcatagattctttagttgatattgatgtgatgaaaaaaaatttgcccttcaactccgtctttgatgttaaagttgacaattatgaacacttggatttgatttggggcaaagatgccgataccttggtcattgctaaagtcttgaggtttattgaattttttaaccctggtaatgtttctgtgaagactaaccagttattaccatctgcaagtttggttgaggaattaccaagcacgacatggaagacaactcatccaacgcatggtctcagttatagaactcactctgcagaccgttctccgttgtctgtacaagctgatgaagcggatgaggtccacaatgctgacaattctaggttcttaagaagagtgttttctactagtgccatagacgaggacaacgaaaatgagcaccaggatgatacagaagatcaaatccataaggagcagcaaagaagattaagtgcctatttggaatcttccaaagatttaagacaattggatgccaactcttctacaactgcgttggatgctttgaataaagaatga

SEQ ID NO: 6587 - DNA, 1587 bp, Saccharomyces cerevisiae
atgtcctacaataatggcaatacttattcaaagagttatagcagaaataataagagacccttgttcggaaagaggtcgccaaatcctcagtccctagcgagaccaccgccaccaaagagaatacggactgatagtggttaccagtcgaatatggacaatatatcttctcatagggtaaattcaaatgaccaaccaggccacacgaaaagtcgtggtaacaataatttatctcgctataacgatacatcctttcaaacaagttccagatatcaaggttcaagatacaacaataataatacgtcgtatgaaaataggcctaaaagcataaaaagggatgaaacaaaggctgaattcctgtctcatttgccaaaggggcccaaatctgttgagaaatcaagatataataattcatccaatactagtaatgatataaaaaatggctatcatgcttcaaaatactataaccacaaaggccaggaagggcggtctgtcatagctaagaaagttccagtttcggttctaacgcagcaaaggagcacgtcagtttacctaaggataatgcaagtcggagaaggaacatatggtaaagtttacaaggcaaaaaacacgaatacagagaagttagtagcgctgaaaaaattgagattacaaggagagagggaaggctttcccataacctctatacgagagattaaactactacaaagttttgatcatccaaatgtctctactataaaagaaataatggtcgaatctcaaaaaactgtatatatgatatttgaatatgctgacaacgacttaagtggattactattaaataaggaagtccaaatttctcactcacaatgcaaacatctcttcaaacaattgctattaggaatggaatatttacatgataataagattttacaccgtgatgttaaaggctcaaacatcttaatcgataaccaggggaatctaaaaataacagattttggactagcgaggaaaatgaattcgcgagctgattacactaaccgtgtcattacgttgtggtacagaccaccagaactattgttgggaactacaaattatggaacagaagttgacatgtggggttgtggctgcctcctggtggaattattcaataaaactgcaattttccagggctctaatgaattagagcaaatagaatcaattttcaagattatgggaactcctacaataaatagctggccaacgctttacgatatgccgtggttttttatgattatgccacagcaaactaccaagtatgtcaacaatttttctgagaaatttaaaagcgttttaccatcttcaaaatgtctgcaattggcgattaatttgttatgttatgatcagacgaaaaggtttagtgcaaccgaagctttacaaagcgactatttcaaggaagaaccaaagcctgaacctttagttcttgatggattggtaagttgccacgaatatgaagtcaaattggcaagaaaacaaaagcgtcctaacatactatccaccaacacaaacaataagggtaatggtaatagtaataataataataataataataatgacgatgatgataaataa

SEQ ID NO: 6588 - DNA, 1587 bp, Artificial Sequence
  Description of Artificial Sequence: Synthetic polynucleotide
atgtcctacaataatggcaatacttattccaagagttatagcagaaataataagagacccttgttcggaaagaggtctccaaatcctcagtccttagcgagaccaccgccaccaaagagaataagaactgatagtggttaccagtctaatatggacaatatatcttctcatagggtaaatagtaatgaccaaccaggccacacgaaaagtcgtggtaacaataatttatctcgctataacgatacatcctttcaaacaagttccagatatcaaggttccagatacaacaataataatacgtcctatgaaaataggcctaaaagcataaaaagggatgaaacaaaggctgaattcttatctcatttgccaaaggggcccaaatctgttgagaaatctagatataataattcttccaatactagtaatgatataaaaaatggctatcatgcttccaaatactataaccacaaaggccaggaagggaggtctgtcatagctaagaaagttccagtttctgttttgacgcagcaaaggagcacgtctgtttacttgaggataatgcaagtcggagaaggaacatatggtaaagtttacaaggcaaaaaacacgaatacagagaagttagtagcgttgaaaaaattgagattacaaggagagagggaaggctttcccataacctctataagagagattaaattattacaaagttttgatcatccaaatgtctctactataaaagaaataatggtcgaatctcaaaaaactgtatatatgatatttgaatatgctgacaacgacttaagtggattattattaaataaggaagtccaaatttctcactctcaatgcaaacatctcttcaaacaattgttattaggaatggaatatttacatgataataagattttacaccgtgatgttaaaggctctaacatcttaatcgataaccaggggaatttgaaaataacagattttggattagcgaggaaaatgaattctagagctgattacactaaccgtgtcattacgttgtggtacagaccaccagaattattgttgggaactacaaattatggaacagaagttgacatgtggggttgtggctgcctcttggtggaattattcaataaaactgcaattttccagggctctaatgaattagagcaaatagaaagtattttcaagattatgggaactcctacaataaatagctggccaacgctttacgatatgccgtggttttttatgattatgccacagcaaactaccaagtatgtcaacaatttttctgagaaatttaaaagcgttttaccatcttctaaatgtttgcaattggcgattaatttgttatgttatgatcagacgaaaaggtttagtgcaaccgaagctttacaaagcgactatttcaaggaagaaccaaagcctgaacctttagttcttgatggattggtaagttgccacgaatatgaagtcaaattggcaagaaaacaaaagcgtcctaacatattatccaccaacacaaacaataagggtaatggtaatagtaataataataataataataataatgacgatgatgataaatga

SEQ ID NO: 6589 - DNA, 210 bp, Saccharomyces cerevisiae
atgaacgctaacaaacaaaggcagtataatcagcttgcacacgaacttagagagcttcaaacgaatttacaggaaacgacaaaacaactagatatcatgtcgaaacaatgtaacgaaaacttggtaggccaattgggtaaggtacatggaagttggttgataggtagttacatttattatatggagcagatgcttggaaaaacgcaataa

SEQ ID NO: 6590 - DNA, 210 bp, Artificial Sequence
  Description of Artificial Sequence: Synthetic polynucleotide
atgaacgctaacaaacaaaggcagtataatcagcttgcacacgaacttagagagcttcaaacgaatttacaggaaacgacaaaacaattggatatcatgtccaaacaatgtaacgaaaacttggtaggccaattgggtaaggtacatggaagttggttgataggtagttacatttattatatggagcagatgcttggaaaaacgcaatga

SEQ ID NO: 6591 - DNA, 396 bp, Saccharomyces cerevisiae
atgtttggcccattcaaattaacaagccccgtcgctggtggcctactatggaaaattccatggagaatgtccacacatcaaaaaacccgtcaaagggaaagattaagaaacgttgatcaagtcataaagcaattaactttaggtctccacgtccaaagatgtcaggataaaggtcttacttatcaagaagccatggagagcaaaaagaaatacaagccaagaagtaaatcgttaaggttgttaaacaaaccatcagtctttccaaaggagaatcaaatgtcttctaaagataaatattggacttttgataaaaaagctgttggttataggaagggtattcataaggtgcccaagtggacgaagatttccattagaaaggccccaaaattcttttga

SEQ ID NO: 6592 - DNA, 396 bp, Artificial Sequence
  Description of Artificial Sequence: Synthetic polynucleotide
atgtttggcccattcaaattaacaagccccgtcgctggtggcttattatggaaaattccatggagaatgtccacacatcaaaaaacccgtcaaagggaaagattaagaaacgttgatcaagtcataaagcaattaactttaggtctccacgtccaaagatgtcaggataaaggtcttacttatcaagaagccatggagagcaaaaagaaatacaagccaagaagtaaatctttaaggttgttaaacaaaccaagtgtctttccaaaggagaatcaaatgtcttctaaagataaatattggacttttgataaaaaagctgttggttataggaagggtattcataaggtgcccaagtggacgaagatttccattagaaaggccccaaaattcttttga

SEQ ID NO: 6593 - DNA, 336 bp, Saccharomyces cerevisiae
atggagcaaaacaaagatccgcagatgatctcgaaacatagttctaggctacctatatgggtgctaagtcctcgcgaagaacaacaggctcgcaagaacttgaagacggaaacatacaaaaaatgtgcaaattttgttcaagcaatggcagattgtgctaaggcaaatggaatgaaagtttttcccacttgtgataagcaacgagatgaaatgaaatcgtgcctcctgttttatcaaacagatgagaaatatttagatggtgaaagggataaaattgttttagaaaaaatcaacaagcttgaaaagttatgtcaaaaacaaagctctacaaaataa

SEQ ID NO: 6594 - DNA, 336 bp, Artificial Sequence
  Description of Artificial Sequence: Synthetic polynucleotide
atggagcaaaacaaagatccgcagatgatctccaaacatagttctaggttgcctatatgggtgttgagtcctcgcgaagaacaacaggctcgcaagaacttgaagacggaaacatacaaaaaatgtgcaaattttgttcaagcaatggcagattgtgctaaggcaaatggaatgaaagtttttcccacttgtgataagcaaagagatgaaatgaaaagttgcctcttattttatcaaacagatgagaaatatttagatggtgaaagggataaaattgttttagaaaaaatcaacaagcttgaaaagttatgtcaaaaacaaagctctacaaaatga

SEQ ID NO: 6595 - DNA, 2181 bp, Saccharomyces cerevisiae
atgccaccattggataaaagaatcaagaagtttctaaaagactccattagaattgcgccaaaaatatccggtaagggtgaactaagtgaattaagaactggattagtatctcaatacccacagactcggaaagatgcaataaagaaaacgatccagcaaatgacgttgggaaaagatgtctcttcgctgttcccagacgtcttgaaaaacattgccacaattgacgttgaacaaaaaaaactggtttatctttatgtgatgaattatgctgagacgcatcccgaattatgtattcttgccgttaacacattcattactgatgcacaagatccaaatcccttaattcgctgcatggcaatcagaacgatgtcaatgataagagttgacaaaatcctggaatacattgaaacaccactccgccgtaccttgcatgatgataatgcatatgttagaaaaaccgcagtgatatgtgtcgcaaaacttttccaattaaacaaggatttatgcgttgagttgggtgtcgtcgaagatttggtcaatgccctagatgactcaaatcctttagtcattgcaaacgcaacagcagcattaattgaaattcacaatatggatatggatgccgttgatctttcaagtttgatccagtcccacgtttcacaattcttattagctttgaacgaatgtacggaatgggctagaattatcatactaggaactctttcggaatattcggcaaaagattctttagaggcacaagatatcattgatcgagtaactgcgcatttacaacacgttaatccagccgttgttttagctacaataaaggtaatcgtaaggaacttgcctcaaattgaatattcctcgaacagtctgataatgaaaagattatcatctgcttttgtatcactgatgtctacgccgcctgaaatgcaatatgttgctttgaaaaatattaggatcatattggagaaatatccagagctgttaaccaaagaattgagaatattttatgtcaagttcaacgatcctctttacgtcaagttagagaagatcgatatccttgtaagactagtcgatccttccaacttgaaacaatgtactttgttgttgacagaattaaaggaatacgcaatggaatatgaacctgagtttgtttcaagagctattcaagctttgtcccagttgggtattaaatatgcacaagaatcattcgtcagtaaagtcttggatattctcctagaattgttagaaagacaagacacaataaaagacgactgctgtatatcattatgtgatttattaagacattgccccggaaacgataagatggccaaacaagtttgtgcagtatttaatacttggtcaaatccagaggtgttattacaatcagatattgcgaagtgcaactatgtctggttgctaggacagcatcccaacaatttctcagatttggagtcaaaaatcaatatttttatagagaactttgttcaagaggaagctttaacacagatgtctttactaatgacaatagtcagactacatgctactttaacgggtagtatgctacaaagcgtcctagaattggccacacaacagacacatgaattagatgtgcgagatatggctatgatgtattggagatgcctttcgatgccaaataatgaaagtttggttaatgatctatgtcaaaataaacttccaatgatctccaatacactggagaagttttcaccagaagtgctagagaaactattaatggaattgggtactataagttccatttatttcaagcccgactcaaataggagaaaaggcaaaaagtatgttcaaaatatagttaaaggaaaacatatagaggaattagaaagcatggcaaaaaatgaaatttctagcaaggctaacgatgatgtgctattggattttgatgaaagagatgatgtaacaaatacaaatgcaggaatgctgaatactttaacaactttaggcgatttggatgatttatttgatttcggaccatctgaggatgccacacaaataaatacaaatgataccaaggctgtacaagggttgaaggagctgaaactaggtggcgactcaaacggtatatcttctggtggtaaaaacaatcccgatgtttcgggcggcaatatagtgtcacaggatctcctcgatttattctga

SEQ ID NO: 6596 - DNA, 2181 bp, Artificial Sequence
  Description of Artificial Sequence: Synthetic polynucleotide
atgccaccattggataaaagaatcaagaagtttttgaaagactccattagaattgcgccaaaaatatccggtaagggtgaattaagtgaattaagaactggattagtatctcaatacccacagactagaaaagatgcaataaagaaaacgatccagcaaatgacgttgggaaaagatgtctcttctttattcccagacgtcttgaaaaacattgccacaattgacgttgaacaaaaaaaattggtttatctttatgtgatgaattatgctgagacgcatcccgaattatgtattcttgccgttaacacattcattactgatgcacaagatccaaatcccttaattcgctgcatggcaatcagaacgatgtccatgataagagttgacaaaatcttggaatacattgaaacaccactccgccgtaccttgcatgatgataatgcatatgttagaaaaaccgcagtgatatgtgtcgcaaaacttttccaattaaacaaggatttatgcgttgagttgggtgtcgtcgaagatttggtcaatgccttggatgactctaatcctttagtcattgcaaacgcaacagcagcattaattgaaattcacaatatggatatggatgccgttgatctttccagtttgatccagtcccacgtttctcaattcttattagctttgaacgaatgtacggaatgggctagaattatcatattaggaactctttctgaatattctgcaaaagattctttagaggcacaagatatcattgatagagtaactgcgcatttacaacacgttaatccagccgttgttttagctacaataaaggtaatcgtaaggaacttgcctcaaattgaatattccagtaacagtttgataatgaaaagattatcttctgcttttgtatctttgatgtctacgccgcctgaaatgcaatatgttgctttgaaaaatattaggatcatattggagaaatatccagagttattaaccaaagaattgagaatattttatgtcaagttcaacgatcctctttacgtcaagttagagaagatcgatatccttgtaagattggtcgatccttccaacttgaaacaatgtactttgttgttgacagaattaaaggaatacgcaatggaatatgaacctgagtttgtttctagagctattcaagctttgtcccagttgggtattaaatatgcacaagaatctttcgtcagtaaagtcttggatattctcttggaattgttagaaagacaagacacaataaaagacgactgctgtatatctttatgtgatttattaagacattgccccggaaacgataagatggccaaacaagtttgtgcagtatttaatacttggtctaatccagaggtgttattacaatctgatattgcgaagtgcaactatgtctggttgttgggacagcatcccaacaatttcagtgatttggagagtaaaatcaatatttttatagagaactttgttcaagaggaagctttaacacagatgtctttattgatgacaatagtcagattacatgctactttaacgggtagtatgttacaaagcgtcttggaattggccacacaacagacacatgaattagatgtgagagatatggctatgatgtattggagatgcctttctatgccaaataatgaaagtttggttaatgatttatgtcaaaataaacttccaatgatctccaatacattagagaagttttctccagaagtgttggagaaattattaatggaattgggtactataagttccatttatttcaagcccgactctaataggagaaaaggcaaaaagtatgttcaaaatatagttaaaggaaaacatatagaggaattagaaagcatggcaaaaaatgaaatttctagcaaggctaacgatgatgtgttattggattttgatgaaagagatgatgtaacaaatacaaatgcaggaatgttgaatactttaacaactttaggcgatttggatgatttatttgatttcggaccatctgaggatgccacacaaataaatacaaatgataccaaggctgtacaagggttgaaggagttgaaattgggtggcgactccaacggtatatcttctggtggtaaaaacaatcccgatgtttctggcggcaatatagtgtcccaggatctcctcgatttattctga

SEQ ID NO: 6597 - DNA, 2319 bp, Saccharomyces cerevisiae
atgcttcgcacgataatattgaaagccgggtccaatgcctccataccgtcaccttcccgccaaaataagttactcaggttcttcgccacagccggcgcagtctctaggaccagtccaggaagcattaagaagattttcgacgacaattcatattggagaaatattaatggtcaggatgctaataatagcaagatctcacaatatctttttaaaaaaaataaaaccggacttttcaagaacccttatttgacttctccagatggtttgcgtaagtttagccaggtttctttgcagcaagcacaagaacttctcgacaaaatgaggaatgattttagcgagagtggtaaattaacctatattatgaacctggacagattaagcgatacgctatgtcgagttattgatttgtgcgagtttattaggtcaacacatccagatgatgcatttgttagggcagcacaagattgccatgaacaaatgtttgaattcatgaatgtcttgaacactgatgtttccttatgtaacatactaaagtcggttttaaacaatccagaagtgtcttcgaagttaagcgcagaagaacttaaagttggtaaaatattattggatgattttgaaaagtcaggaatctatatgaatccagatgttagagaaaagtttatccagttatctcaggaaatcagtttagtaggtcaagaattcatcaaccatacagactatcctggttcaaattctgtgaagataccatgtaaagatctggataatagtaaagtgagtacatttctattgaagcaattaaataaagatgtaaaagggcaaaattataaagtacctacatttgggtatgcagcttatgcattattaaaaagttgtgaaaatgagatggtaagaaaaaagttgtggaccgctcttcacagttgttctgacaaacaggttaaaagattgagtcacttaatcaaactaagggcaatcttggctaatttaatgcacaaaacaagttacgcagagtatcaattggaaggtaaaatggcaaagaatccgaaagatgttcaagattttattttgacgttaatgaacaatactatagagaagacagcaaatgaattgaaatttatagctgaactcaaggccaaagatcttaagaagccgttgactacaaacacggacgaaatattgaagctcgtgagaccatgggatagggattactatactggcaaatatttccagctcaacccgtcaaactctcccaatgccaaagaaataagctattattttacattaggaaatgtcattcagggcttgtcagatttgtttcagcaaatatatggtattagattagagccagcaattactgatgagggagaaacatggtccccagacgtgagaagattgaatgtgatatctgaagaggaaggaatcatcggcataatttattgtgatttattcgaacgaaatggcaagacttcaaatccggctcatttcacagtttgttgctctaggcaaatatatcccagtgaaactgatttctcaaccatccaagtcggtgagaatccagacggtacctactttcaattacctgttatttctttggtgtgtaatttttctccaatactaatcgcttctaaaaaaagtctttgttttttgcagcttagtgaagttgaaacgctcttccatgaaatgggacatgcaatgcactcaatgttagggagaactcatatgcaaaacataagtggtacaagatgtgctactgattttgtagagttaccaagtatcctgatggagcacttcgctaaggatatacgaattctgacaaagattggcaaacattacgggactggagaaacaattcaggctgatatgttacagcgcttcatgaaaagcactaacttccttcaaaattgtgaaacatactctcaagcaaagatggctatgctggatcaatcatttcatgatgaaaaaatcatttctgatattgataactttgacgttgtggaaaactatcaagcactagaacgacgtttaaaggtcctagtggacgatcagagtaattggtgtggaagattcggccatttatttggatacggggcaacttattacagctacttatttgataggacgatagcttctaaaatctggtacgcccttttcgaggatgatccgtacagtcgaaaaaatggtgataaatttaaaaagcatttactaaaatggggagggctaaaagacccttggaaatgtatcgctgatgttttagaatgccccatgctagagaaaggcggtagcgatgcgatggaatttatagcacagtctcacaagtcttag

SEQ ID NO: 6598 - DNA, 2319 bp, Artificial Sequence
  Description of Artificial Sequence: Synthetic polynucleotide
atgcttcgcacgataatattgaaagccgggtccaatgcctccataccgtctccttcccgccaaaataagttactcaggttcttcgccacagccggcgcagtctctaggaccagtccaggaagcattaagaagattttcgacgacaattcttattggagaaatattaatggtcaggatgctaataatagcaagatctctcaatatctttttaaaaaaaataaaaccggacttttcaagaacccttatttgacttctccagatggtttgcgtaagtttagccaggtttctttgcagcaagcacaagaacttctcgacaaaatgaggaatgattttagcgagagtggtaaattaacctatattatgaacttggacagattaagcgatacgttgtgtcgtgttattgatttgtgcgagtttattaggtctacacatccagatgatgcatttgttagggcagcacaagattgccatgaacaaatgtttgaattcatgaatgtcttgaacactgatgtttccttatgtaacatattgaagtctgttttaaacaatccagaagtgtcttccaagttaagcgcagaagaacttaaagttggtaaaatattattggatgattttgaaaagagtggaatctatatgaatccagatgttagagaaaagtttatccagttatctcaggaaatcagtttagtaggtcaagaattcatcaaccatacagactatcctggtagtaattctgtgaagataccatgtaaagatttggataatagtaaagtgagtacatttttattgaagcaattaaataaagatgtaaaagggcaaaattataaagtacctacatttgggtatgcagcttatgcattattaaaaagttgtgaaaatgagatggtaagaaaaaagttgtggaccgctcttcacagttgttctgacaaacaggttaaaagattgagtcacttaatcaaattgagggcaatcttggctaatttaatgcacaaaacaagttacgcagagtatcaattggaaggtaaaatggcaaagaatccgaaagatgttcaagattttattttgacgttaatgaacaatactatagagaagacagcaaatgaattgaaatttatagctgaactcaaggccaaagatcttaagaagccgttgactacaaacacggacgaaatattgaagctcgtgagaccatgggatagggattactatactggcaaatatttccagctcaacccgtctaactctcccaatgccaaagaaataagctattattttacattaggaaatgtcattcagggcttgagtgatttgtttcagcaaatatatggtattagattagagccagcaattactgatgagggagaaacatggtccccagacgtgagaagattgaatgtgatatctgaagaggaaggaatcatcggcataatttattgtgatttattcgaaagaaatggcaagacttccaatccggctcatttcacagtttgttgctctaggcaaatatatcccagtgaaactgatttctccaccatccaagtcggtgagaatccagacggtacctactttcaattacctgttatttctttggtgtgtaatttttctccaatattgatcgcttctaaaaaaagtctttgttttttgcagcttagtgaagttgaaacgctcttccatgaaatgggacatgcaatgcactccatgttagggagaactcatatgcaaaacataagtggtacaagatgtgctactgattttgtagagttaccaagtatcttgatggagcacttcgctaaggatataagaattttaacaaagattggcaaacattacgggactggagaaacaattcaggctgatatgttacagcgcttcatgaaaagcactaacttccttcaaaattgtgaaacatactctcaagcaaagatggctatgcttgatcaaagttttcatgatgaaaaaatcatttctgatattgataactttgacgttgtggaaaactatcaagcattggaaagacgtttaaaggtcttggtggacgatcagagtaattggtgtggaagattcggccatttatttggatacggggcaacttattacagctacttatttgataggacgatagcttctaaaatctggtacgcccttttcgaggatgatccgtacagtagaaaaaatggtgataaatttaaaaagcatttattgaaatggggagggttgaaagacccttggaaatgtatcgctgatgttttagaatgccccatgttagagaaaggcggtagcgatgcgatggaatttatagcacagtctcacaagtcttga

SEQ ID NO: 6599 - DNA, 1392 bp, Saccharomyces cerevisiae
atgtggaaataccttcatagatcagtcaaaaatgaagggaccgtagaacggctcactaacctcaacttatttaccaatcaccgtttcaagttttattctacattaaaggaacaaagtttttggagaataccattcaaaagaaggagcaaattacagaaatgggtgttatcgacaggcatcgtaagtttcatcgcttttaacatatggtgggtttattggccacatcatacttttcccaaacccgttgctaaaatattaaggaaggggttacattcagaaattaagaaagaaggtgcgaactaccaaaaaagccttgagtactacctcgaagctttagaagaatgtaaagccgaaaacgtggatctactttcggatgaatataccggtattgaaatcaaaatcggagaaatgtatgagaaattacatatgtataatgatgctacagctttatatggagacatgctgaaaaagttctataatgaactaagcaaaactactgataagtcaacgaagagaaaattctttttgttgaaaagagaccttcaaattttggtaaggttcaatgaaataaataaagactctgaaactaatgcaacgttattgataatgcaccttttattagctcaacgagaatttttggagaactcaccggagttcaaaaatgttctttccaaatcagaacttttaaacaaccaacagcttgactggaagaatttcaagggtctaccatttattggtaaatccaaacctgactaccaaatgcatttaaactctaaaagaaaacaggagttgaagataaaggaacctgaaagcgaacaatgcgttttcatgaaagaacttctgactgcaagagatttatatactcgttactgtctcaatcggagtaatctttctggggccttgaatagcaaaataacaacactagaatggatgttactagcggatagtcctctggacgacatcttgcttgcccaggcagagctcgggtcgattttttatctaaattcagagaagttcgaaggaagtctatacgctattgataatgaaccgtacaaaaaatcagaacctttagaacttattcggtccaggttacaagaaaaccagaattcctgcttacagtactcggctgactgctataaaagtattatcagctttgccaatgaaaatcaatatccaaaagttgcaatggaaagcgaaatggatcagagaatacttaaggcattatcccttgctcactacggtattggtgtgataaatttgcataagggacgcttgagggcatctaagaaggaacttaaaaaggctattcgtatttcagagatgattagatttaatgaactcattgaggaagctcaacgtgaacttaaaaaggttgatggtacgcctatataa

SEQ ID NO: 6600 - DNA, 1392 bp, Artificial Sequence
  Description of Artificial Sequence: Synthetic polynucleotide
atgtggaaataccttcatagatctgtcaaaaatgaagggaccgtagaaaggctcactaacctcaacttatttaccaatcaccgtttcaagttttattctacattaaaggaacaaagtttttggagaataccattcaaaagaaggagcaaattacagaaatgggtgttatctacaggcatcgtaagtttcatcgcttttaacatatggtgggtttattggccacatcatacttttcccaaacccgttgctaaaatattaaggaaggggttacattctgaaattaagaaagaaggtgcgaactaccaaaaaagccttgagtactacctcgaagctttagaagaatgtaaagccgaaaacgtggatttactttctgatgaatataccggtattgaaatcaaaatcggagaaatgtatgagaaattacatatgtataatgatgctacagctttatatggagacatgttgaaaaagttctataatgaattgagcaaaactactgataagtctacgaagagaaaattctttttgttgaaaagagaccttcaaattttggtaaggttcaatgaaataaataaagactctgaaactaatgcaacgttattgataatgcaccttttattagctcaaagagaatttttggagaactctccggagttcaaaaatgttctttccaaaagtgaacttttaaacaaccaacagcttgactggaagaatttcaagggtttgccatttattggtaaatccaaacctgactaccaaatgcatttaaactctaaaagaaaacaggagttgaagataaaggaacctgaaagcgaacaatgcgttttcatgaaagaacttttgactgcaagagatttatatactcgttactgtctcaatagaagtaatctttctggggccttgaatagcaaaataacaacattagaatggatgttattggcggatagtcctttggacgacatcttgcttgcccaggcagagctcgggtctattttttatttgaattctgagaagttcgaaggaagtttatacgctattgataatgaaccgtacaaaaaaagtgaacctttagaacttattagatccaggttacaagaaaaccagaattcctgcttacagtactctgctgactgctataaaagtattatcagctttgccaatgaaaatcaatatccaaaagttgcaatggaaagcgaaatggatcagagaatacttaaggcattatcccttgctcactacggtattggtgtgataaatttgcataagggacgcttgagggcatctaagaaggaacttaaaaaggctattcgtatttctgagatgattagatttaatgaactcattgaggaagctcaacgtgaacttaaaaaggttgatggtacgcctatatga

SEQ ID NO: 6601 - DNA, 1293 bp, Saccharomyces cerevisiae
atggatgatataagcggaaggcaaactttacctcgaataaaccgtttgttggagcacgtgggaaatccccaagatagtttgtcaatcctacatatagcgggaacaaatggtaaggagacagtatctaaatttttgacatccatattgcagcatccggggcaacagcggcaaagggtcttgattggtaggtatactacatcttccttgctaaacgccaaagaagaggatattagcattaataatgaagccatttccttgatagagtattctaggatcgagaaggaacttatagaagcagatagttctttgaaattacagtgcaacaacctcgaactgctaacaagcgtagctctcgtatacttcgctaagaaaaattgccaatggtgcataatagaaactggtttagctggaaaacaggaccctggaagtataattgctggtcaaagtagagtctgttgcgccattactaacgtgggcattagcgatgaagcttttttatgcaagtttttgtctcaaattactgaaagttccacaaataaagcaatttttctattagacggttctaatgacgaatttgtacgaaatacgataacgaaacggtgccatgatgttggatgtccattagaaatcaccgacccttctcttagggattacaatgtacacacagacacatggggcactcttgaagttcgcctgccatacagtgaagaagaatatcaaatatttaatttgagagttgcgatagcggttttagactttttgagcaaggaaaaaaaggtttgtatttcaaaggatcaactatcccaaggtttaatatctgtggattggccaagaagtttacatcgcttggattactgttatgaatctactagtggaaagaaaatcgcattactattagacaacgcaaataatgcgaaggcagctcgaaatttagcctgccatttaaggaccacgtacggtgatacgccattaacatttgtcattgctataacaactgggaaaaaggtgtctcccttacttgatccgctaatacgtccacaagattatgttattgtgactagatttgggtcagtggttggaatgccgtggatccaatccctagaaccggtgaatcttctcgcatttatcaaaaaccggtatacgagaaatgttaacatgcagccggatcttcaaagtgtctggaccttccttgaaacaagtgggttaaagacgattgttcctgttatcgtatgtggatcactgtatatctgcaaagagctattgcgcttacacaactgtcacttgccagtatag

SEQ ID NO: 6602 - DNA, 1293 bp, Artificial Sequence
  Description of Artificial Sequence: Synthetic polynucleotide
atggatgatataagcggaaggcaaactttacctagaataaaccgtttgttggagcacgtgggaaatccccaagatagtttgtccatcttgcatatagcgggaacaaatggtaaggagacagtatctaaatttttgacatccatattgcagcatccggggcaacagagacaaagggtcttgattggtaggtatactacatcttccttgttgaacgccaaagaagaggatattagcattaataatgaagccatttccttgatagagtattctaggatcgagaaggaacttatagaagcagatagttctttgaaattacagtgcaacaacctcgaattattaacaagcgtagctctcgtatacttcgctaagaaaaattgccaatggtgcataatagaaactggtttagctggaaaacaggaccctggaagtataattgctggtcaaagtagagtctgttgcgccattactaacgtgggcattagcgatgaagcttttttatgcaagtttttgtctcaaattactgaaagttccacaaataaagcaatttttttattagacggttctaatgacgaatttgtaagaaatacgataacgaaaagatgccatgatgttggatgtccattagaaatcaccgacccttctcttagggattacaatgtacacacagacacatggggcactcttgaagttcgcttgccatacagtgaagaagaatatcaaatatttaatttgagagttgcgatagcggttttagactttttgagcaaggaaaaaaaggtttgtatttccaaggatcaattatcccaaggtttaatatctgtggattggccaagaagtttacatcgcttggattactgttatgaatctactagtggaaagaaaatcgcattattattagacaacgcaaataatgcgaaggcagctagaaatttagcctgccatttaaggaccacgtacggtgatacgccattaacatttgtcattgctataacaactgggaaaaaggtgtctcccttacttgatccgttgatacgtccacaagattatgttattgtgactagatttgggtctgtggttggaatgccgtggatccaatccttagaaccggtgaatcttctcgcatttatcaaaaacagatatacgagaaatgttaacatgcagccggatcttcaaagtgtctggaccttccttgaaacaagtgggttaaagacgattgttcctgttatcgtatgtggatctttgtatatctgcaaagagttattgcgcttacacaactgtcacttgccagtatga

SEQ ID NO: 6603 - DNA, 741 bp, Saccharomyces cerevisiae
atgagcaaagacaaagatatcaaagtcactcctggaacttgtgaattagttgaacaaatactcgccttactctcccggtatctctcatcttatattcacgtgctgaacaagttcatcagtcatttgcgaagggtagctacgctacgattcgagagaactactttgattaaatttgttaagaaattgagattttacaacgattgtgtgttaagctataatgcatcagagtttatcaatgaaggtaaaaacgaattagacccagaggcggattcgtttgacaaggtaattttaccaatagcttcaatgtttgttaaatgtgttgaaacgtttgacttactgaactattatctaacgcagtcattacaaaaggaaattttatctaaaactttgaacgaggacctaacgctaacagcagagtccatattagccattgacgatacctacaatcatttcgtgaaattttctcaatggatgattgagtctttgcgtataggcagcaacctgctagatttagaagttgttcaatttgccattaaatgcgcagatgaggacggaacgaatatcggagaaactgataatatcttcttgcaggagattcttcctgtcaactccgaagaagaatttcagaccttgtcagctgcgtggcactccattttagatggtaagctgagcgccttggacgaagaatttgatgttgtcgctactaaatggcatgacaaatttggtaaattgaaaaactga

SEQ ID NO: 6604 - DNA, 741 bp, Artificial Sequence
  Description of Artificial Sequence: Synthetic polynucleotide
atgagcaaagacaaagatatcaaagtcactcctggaacttgtgaattagttgaacaaatactcgccttactctccagatatctctcttcttatattcacgtgttgaacaagttcatcagtcatttgagaagggtagctacgcttcgtttcgagagaactactttgattaaatttgttaagaaattgagattttacaacgattgtgtgttaagctataatgcaagtgagtttatcaatgaaggtaaaaacgaattagacccagaggcggattcttttgacaaggtaattttaccaatagcttccatgtttgttaaatgtgttgaaacgtttgacttattaaactattatttgacgcagtctttacaaaaggaaattttatctaaaactttgaacgaggacttaacgttgacagcagagtccatattagccattgacgatacctacaatcatttcgtgaaattttctcaatggatgattgagtctttgcgtataggcagcaacttattagatttagaagttgttcaatttgccattaaatgcgcagatgaggacggaacgaatatcggagaaactgataatatcttcttgcaggagattcttcctgtcaactccgaagaagaatttcagaccttgtctgctgcgtggcactccattttagatggtaagttgagcgccttggacgaagaatttgatgttgtcgctactaaatggcatgacaaatttggtaaattgaaaaactga

SEQ ID NO: 6605 - DNA, 3819 bp, Saccharomyces cerevisiae
atggctgtcataaaaaagggagcacgcagaaaggacgttaaggagcccaagaagagatctgcaaaaatcaaaaaggctacatttgatgcaaataaaaagaaagaagtaggtatttctgatttgacacttttgtcaaaaatatctgatgaatctatcaatgaaaatttgaaaaaaagatttaagaatggaattatttatacctatattggccatgtgttaattagtgtaaatccgttccgcgatttgggaatatatacaaatgccgttttagagtcatataaaggaaaaaatagacttgaagttccaccacacgtgtttgctattgcggaatctatgtactacaatctcaaatcatacaatgaaaatcagtgtgttattatttctggtgagtctggtgccggtaagacagaagcagccaaacgtattatgcaatatattgcagctgcatctaatagccattcagaatcgattgggaagatcaaagatatggttcttgctactaatccacttctcgagtcattcggttgtgctaaaactctgcggaacaacaattcttcaaggcacgggaagtatctagaaattaaattcaactcacaatttgaaccttgcgcaggtaatatcacaaattatttgctagagaaacaaagagttgttggtcaaattaagaacgaaagaaactttcatattttttaccaattcactaagggagcatctgatacatataaacagatgttcggtgtgcaaatgcctgagcaatatatttacactgctgcggctggctgtactactgcagatacaattgatgacgtaaaagattacgaaggcacgttagaggctatgagaaccattggtttagtccaggaagaacaagaccaaatttttaggatgctggcggcaattctgtggattggtaacatttcctttatagaaaatgaagagggcaatgctcaggtaggagatacctcagtgactgattttgtcgcttatttgttgcaggttgatgcttcgttactggtaaaatgtttagtggaaagaatcatgcaaaccagtcatggaatgaagagaggctcagtttatcatgtacctttgaacccagtccaagcaactgcggtgagagacgcccttgctaaggcaatttataataatttattcgactggattgtcgatagggttaacgtatctttgcaggcatttcctggtgctgataaatcaattgggattctagacatttacggcttcgaaatttttgaacacaactcttttgagcaaatatgtatcaattatgttaatgaaaagttacaacagatttttatccaattgactttgaaggctgagcaagaaacttatgaaagagaaaaaatcaaatggacccccatcaaatactttgacaataaagttgtctgtgatttaatcgaggcgaaaaatccaccgggcattcttgctgcaatgaatgactctattgcaactgctcatgcagactccaatgccgctgaccaggcgtttgctcaacgacttaacttatttaattcaaatccatacttcgaattaagggccaacaaatttgttattaaacattacgctggagatgtcacctatgacatcaatggtatcaccgataaaaataaagaccaacttcaaaaggacctaattgaattaattggaacaacgacaaatacattcctttccacaatttttcctgatgatgttgacaaagattcaaagagacggcctccaacagcaggtgacaaaattattaaaagtgcaaatgaactggtggaaactttgtcaaaagctgagccttcctatatcagaacaatcaagcctaatcaaactaaatcaccaaatgattatgatgatcaccaagtgctacatcaagtaaaatatttgggtttgcaagaaaatgttcgtatcaggagagccggtttcgcttacagacaaactttcgaaaaattcgtcgaaagattttatttactatctccagattgttcatatgctggtgattacacttgggatggggacacccttgaggcagtcaagcttattttaagagatgccatgataccagaaaaagaatttcaacttggagtgacaagcgtattcattaaaactccagaatctctatttgctctagaagacatgcgtgataaatactggtacaacatggctgctagaatccagagagcatggagaaggtttcttcaaaggcgtattgatgctgcgataaaaattcagcgtactatcagagagaaaaagggtggaaacaagtacgtcaagcttcgtgattatggaaccaaacttttagcgggtaaaaaagagagaagatccatgtctttacttggatacagggcttttatgggtgattacttatcctgcaatgagtctaaaacgaaaggatcgtacatcagaagacaggtaggaattaaggataaagttgttttttcgataaagggggaatgcctgcactctaaatttggcagatcagctcaaagattgaaaaaagtgtttatcttaacaaaaaagacattttatattattggacaaacacgggaacagaatgctatgaaatatacacaagattataaaattgatgtcggtaaaattaaacaagtgagcttaacaaacctccaagacgattggatgggcgttatccttgttaatagtacacaatccgatccactcattaacacgcctttcaagacggaattaatgacacgtttgaaaaaattaaatgaaaagataatgataaaagttggtcccacgattgagtatcacaaacaaccaaacaagttgcacactgtccgctcaaagataagcgattcagcaccgaaatacggtgacatctacaagtcaagtacaatatacgtgcgtcgtggacaccctgctaactccaaatcgaataaaaaacctaagaatccaggtgggttgagcgggaaacctatcaaaagcaaaaagagtaaacacaaatctactcataagcatacacatagccatagaagtcatagggatgctgcaaaaaagcaacctctcccttcgcaaaaacctgtgaatccgttatctttggcagctaccgctgcacaggcagcatacaatcctaaaccggataagaccgtaccaataaagtcatctgcaatccctgctgcaaaagtaagctcgaaacacagctcaaaaccctcatcgaaggaaaaagtcgcagtaaagaaagcctcctcaagccacaaatcctcatccgccaagcaaaaccaggtatcgatgccaccttcaaaaggggttgaaaaaaataaagaaccgttaaaggagacaactgcaactgcaactgcaaacataccaataccaccaccccctccccccatgggccaaccaaaggatccgaaattcgaagctgcatacgactttccaggttccggatcatcttcggagttgccattaaaaaagggcgatattgtatttataagcagagatgaacctagtggttggtctttagcaaagcttctcgatggaagcaaagaaggttgggttcctactgcttatatgactccttataaagacacaagaaatacggtgcctgttgcagcgacaggggcagtgaatgacgttacaaatcagaaatcaagccaaatcgacaataccatttcaagtgcacaagaaggtgtacagtttggaagtgcaacagttggacccactagtgataatcagagtaatccggtggggacgtttagcgacggtttagcttctgcattggcagcaagagcaaacaaaatgcgggcggaaagtgctgacgatgatgataatgacgatggcgatgatgatgatgactggtaa

SEQ ID NO: 6606 - DNA, 3819 bp, Artificial Sequence
  Description of Artificial Sequence: Synthetic polynucleotide
atggctgtcataaaaaagggagcacgcagaaaggacgttaaggagcccaagaagagatctgcaaaaatcaaaaaggctacatttgatgcaaataaaaagaaagaagtaggtatttctgatttgacacttttgagtaaaatatctgatgaatctatcaatgaaaatttgaaaaaaagatttaagaatggaattatttatacctatattggccatgtgttaattagtgtaaatccgttccgcgatttgggaatatatacaaatgccgttttagagtcttataaaggaaaaaatagacttgaagttccaccacacgtgtttgctattgcggaatctatgtactacaatctcaaatcttacaatgaaaatcagtgtgttattatttctggtgagtctggtgccggtaagacagaagcagccaaacgtattatgcaatatattgcagctgcatctaatagccattctgaaagtattgggaagatcaaagatatggttcttgctactaatccacttctcgagagtttcggttgtgctaaaactttgagaaacaacaattcttccaggcacgggaagtatttggaaattaaattcaactctcaatttgaaccttgcgcaggtaatatcacaaattatttgttggagaaacaaagagttgttggtcaaattaagaacgaaagaaactttcatattttttaccaattcactaagggagcatctgatacatataaacagatgttcggtgtgcaaatgcctgagcaatatatttacactgctgcggctggctgtactactgcagatacaattgatgacgtaaaagattacgaaggcacgttagaggctatgagaaccattggtttagtccaggaagaacaagaccaaatttttaggatgttggcggcaattttatggattggtaacatttcctttatagaaaatgaagagggcaatgctcaggtaggagatacctctgtgactgattttgtcgcttatttgttgcaggttgatgcttctttattggtaaaatgtttagtggaaagaatcatgcaaaccagtcatggaatgaagagaggctctgtttatcatgtacctttgaacccagtccaagcaactgcggtgagagacgcccttgctaaggcaatttataataatttattcgactggattgtcgatagggttaacgtatctttgcaggcatttcctggtgctgataaatccattgggattttggacatttacggcttcgaaatttttgaacacaactcttttgagcaaatatgtatcaattatgttaatgaaaagttacaacagatttttatccaattgactttgaaggctgagcaagaaacttatgaaagagaaaaaatcaaatggacccccatcaaatactttgacaataaagttgtctgtgatttaatcgaggcgaaaaatccaccgggcattcttgctgcaatgaatgactctattgcaactgctcatgcagactccaatgccgctgaccaggcgtttgctcaaaggcttaacttatttaatagtaatccatacttcgaattaagggccaacaaatttgttattaaacattacgctggagatgtcacctatgacatcaatggtatcaccgataaaaataaagaccaacttcaaaaggacttgattgaattaattggaacaacgacaaatacattcctttccacaatttttcctgatgatgttgacaaagattctaagagaagacctccaacagcaggtgacaaaattattaaaagtgcaaatgaattagtggaaactttgagtaaagctgagccttcctatatcagaacaatcaagcctaatcaaactaaatctccaaatgattatgatgatcaccaagtgttacatcaagtaaaatatttgggtttgcaagaaaatgttcgtatcaggagagccggtttcgcttacagacaaactttcgaaaaattcgtcgaaagattttatttattatctccagattgttcttatgctggtgattacacttgggatggggacacccttgaggcagtcaagcttattttaagagatgccatgataccagaaaaagaatttcaacttggagtgacaagcgtattcattaaaactccagaatctttatttgctttggaagacatgcgtgataaatactggtacaacatggctgctagaatccagagagcatggagaaggtttcttcaaaggcgtattgatgctgcgataaaaattcagcgtactatcagagagaaaaagggtggaaacaagtacgtcaagcttcgtgattatggaaccaaacttttagcgggtaaaaaagagagaagatccatgtctttacttggatacagggcttttatgggtgattacttatcctgcaatgagtctaaaacgaaaggatcttacatcagaagacaggtaggaattaaggataaagttgttttttccataaagggggaatgccttcactctaaatttggcagatctgctcaaagattgaaaaaagtgtttatcttaacaaaaaagacattttatattattggacaaacaagagaacagaatgctatgaaatatacacaagattataaaattgatgtcggtaaaattaaacaagtgagcttaacaaacctccaagacgattggatgggcgttatccttgttaatagtacacaatccgatccactcattaacacgcctttcaagacggaattaatgacacgtttgaaaaaattaaatgaaaagataatgataaaagttggtcccacgattgagtatcacaaacaaccaaacaagttgcacactgtccgctctaagataagcgattctgcaccgaaatacggtgacatctacaagagtagtacaatatacgtgcgtcgtggacaccctgctaactccaaatctaataaaaaacctaagaatccaggtgggttgagcgggaaacctatcaaaagcaaaaagagtaaacacaaatctactcataagcatacacatagccatagaagtcatagggatgctgcaaaaaagcaacctctcccttctcaaaaacctgtgaatccgttatctttggcagctaccgctgcacaggcagcatacaatcctaaaccggataagaccgtaccaataaagtcttctgcaatccctgctgcaaaagtaagcagtaaacacagcagtaaaccctcttccaaggaaaaagtcgcagtaaagaaagcctcctctagccacaaatcctcctccgccaagcaaaaccaggtatctatgccaccttccaaaggggttgaaaaaaataaagaaccgttaaaggagacaactgcaactgcaactgcaaacataccaataccaccaccccctccccccatgggccaaccaaaggatccgaaattcgaagctgcatacgactttccaggttccggatcttcttctgagttgccattaaaaaagggcgatattgtatttataagcagagatgaacctagtggttggtctttagcaaagcttctcgatggaagcaaagaaggttgggttcctactgcttatatgactccttataaagacacaagaaatacggtgcctgttgcagcgacaggggcagtgaatgacgttacaaatcagaaaagtagccaaatcgacaataccatttccagtgcacaagaaggtgtacagtttggaagtgcaacagttggacccactagtgataatcagagtaatccggtggggacgtttagcgacggtttagcttctgcattggcagcaagagcaaacaaaatgagagcggaaagtgctgacgatgatgataatgacgatggcgatgatgatgatgactggtga

SEQ ID NO: 6607 - DNA, 888 bp, Saccharomyces cerevisiae
atgtcactcagagcagtcccaggatattttgctgcatatccaagtgagggttttcaaggattagactccacgaaatatgatcacttagaattgattaaccataagaattggaaggaactgtatcatgctatccctagaaataccaaaaatcgccactataagctgttgattttagctaggcatggtcaaggttaccacaatgctgccatactgaggtacggtatggagaaatgggacgcctattggtcgttgctttcgggcgatgaacatggagagtggcttgactctaaactgacacctctgggtaaagatcaagttagaagaacaggatcgaatgtcttgctaccaatggcaaagcaattaggtatgctacctcatgtgtttttcagttctccaatgagaagatgtctcgaaacattcattgagtcgtggacaccagtgttagcggagacgcaagaattaccggccggaactaaaatttctacacgcattatagaaggtctaagggagacgttgggctctcacacttgtgacaaaagagtggctcactcaatggcagttgacgaataccaggatttcagcacggaatcgggccacactgtacattggcaatatgtaccagattacccagaagatgatgaattgtggcttcctgatcatagagaaacgtgtgctgaaatggacaaacgtacactgaatggattatttgaactatttaatcaattgtcaagcgaagaaaaattcatctcgcttacttgtcactcaggtgtcattcaaagtgtcttgagaaacttacagcatcctccaatttataacctggacacaggtaaagtcgtcgctgtcgtcgtggaagtaccagtcaacacggccgatcgcggcaggctctga

SEQ ID NO: 6608 - DNA, 888 bp, Artificial Sequence
  Description of Artificial Sequence: Synthetic polynucleotide
atgagtctcagagcagtcccaggatattttgctgcatatccaagtgagggttttcaaggattagactccacgaaatatgatcacttagaattgattaaccataagaattggaaggaattgtatcatgctatccctagaaataccaaaaatcgccactataagttgttgattttagctaggcatggtcaaggttaccacaatgctgccatattaaggtacggtatggagaaatgggacgcctattggtctttgctttctggcgatgaacatggagagtggcttgactctaaattaacacctttaggtaaagatcaagttagaagaacaggaagtaatgtcttgttaccaatggcaaagcaattaggtatgttgcctcatgtgtttttcagttctccaatgagaagatgtctcgaaacattcattgagagttggacaccagtgttagcggagacgcaagaattaccggccggaactaaaatttctacacgcattatagaaggtttgagggagacgttgggctctcacacttgtgacaaaagagtggctcactccatggcagttgacgaataccaggatttcagcacggaaagtggccacactgtacattggcaatatgtaccagattacccagaagatgatgaattgtggcttcctgatcatagagaaacgtgtgctgaaatggacaaacgtacattaaatggattatttgaattatttaatcaattgagtagcgaagaaaaattcatctctcttacttgtcactctggtgtcattcaaagtgtcttgagaaacttacagcatcctccaatttataacttggacacaggtaaagtcgtcgctgtcgtcgtggaagtaccagtcaacacggccgatcgcggcaggctctga

SEQ ID NO: 6609 - DNA, 1713 bp, Saccharomyces cerevisiae
atgtcacttctaatagattctgtaccaacagttgcttataaggaccaaaaaccgggtacttcaggtttacgtaagaagaccaaggttttcatggatgagcctcattatactgagaacttcattcaagcaacaatgcaatctatccctaatggctcagagggaaccactttagttgttggaggagatggtcgtttctacaacgatgttatcatgaacaagattgccgcagtaggtgctgcaaacggtgtcagaaagttagtcattggtcaaggcggtttactttcaacaccagctgcttctcatataattagaacatacgaggaaaagtgtaccggtggtggtatcatattaactgcctcacacaacccaggcggtccagagaatgatttaggtatcaagtataatttacctaatggtgggccagctccagagagtgtcactaacgctatctgggaagcgtctaaaaaattaactcactataaaattataaagaacttccccaagttgaatttgaacaagcttggtaaaaaccaaaaatatggcccattgttagtggacataattgatcctgccaaagcatacgttcaatttctgaaggaaatttttgattttgacttaattaaaagcttcttagcgaaacagcgcaaagacaaagggtggaagttgttgtttgactccttaaatggtattacaggaccatatggtaaggctatatttgttgatgaatttggtttaccggcagaggaagttcttcaaaattggcaccctttacctgatttcggcggtttacatcccgatccgaatctaacctatgcacgaactcttgttgacagggttgaccgcgaaaaaattgcctttggagcagcctccgatggtgatggtgataggaatatgatttacggttatggccctgctttcgtttcgccaggtgattctgttgccattattgccgaatatgcacccgaaattccatacttcgccaaacaaggtatttatggcttggcacgttcatttcctacatcctcagccattgatcgtgttgcagcaaaaaagggattaagatgttacgaagttccaaccggctggaaattcttctgtgccttatttgatgctaaaaagctatcaatctgtggtgaagaatccttcggtacaggttccaatcatatcagagaaaaggacggtctatgggccattattgcttggttaaatatcttggctatctaccataggcgtaaccctgaaaaggaagcttcgatcaaaactattcaggacgaattttggaacgagtatggccgtactttcttcacaagatacgattacgaacatatcgaatgcgagcaggccgaaaaagttgtagctcttttgagtgaatttgtatcaaggccaaacgtttgtggctcccacttcccagctgatgagtctttaaccgttatcgattgtggtgatttttcgtatagagatctagatggctccatctctgaaaatcaaggccttttcgtaaagttttcgaatgggactaaatttgttttgaggttatccggcacaggcagttctggtgcaacaataagattatacgtagaaaagtatactgataaaaaggagaactatggccaaacagctgacgtcttcttgaaacccgtcatcaactccattgtaaaattcttaagatttaaagaaattttaggaacagacgaaccaacagtccgcacatag

SEQ ID NO: 6610 - DNA, 1713 bp, Artificial Sequence
  Description of Artificial Sequence: Synthetic polynucleotide
atgtctcttttgatagattctgtaccaacagttgcttataaggaccaaaaaccgggtacttctggtttacgtaagaagaccaaggttttcatggatgagcctcattatactgagaacttcattcaagcaacaatgcaatctatccctaatggcagtgagggaaccactttagttgttggaggagatggtcgtttctacaacgatgttatcatgaacaagattgccgcagtaggtgctgcaaacggtgtcagaaagttagtcattggtcaaggcggtttactttctacaccagctgcttctcatataattagaacatacgaggaaaagtgtaccggtggtggtatcatattaactgcctctcacaacccaggcggtccagagaatgatttaggtatcaagtataatttacctaatggtgggccagctccagagagtgtcactaacgctatctgggaagcgtctaaaaaattaactcactataaaattataaagaacttccccaagttgaatttgaacaagcttggtaaaaaccaaaaatatggcccattgttagtggacataattgatcctgccaaagcatacgttcaatttttgaaggaaatttttgattttgacttaattaaaagcttcttagcgaaacagcgcaaagacaaagggtggaagttgttgtttgactccttaaatggtattacaggaccatatggtaaggctatatttgttgatgaatttggtttaccggcagaggaagttcttcaaaattggcaccctttacctgatttcggcggtttacatcccgatccgaatttgacctatgcaagaactcttgttgacagggttgaccgcgaaaaaattgcctttggagcagcctccgatggtgatggtgataggaatatgatttacggttatggccctgctttcgtttctccaggtgattctgttgccattattgccgaatatgcacccgaaattccatacttcgccaaacaaggtatttatggcttggcacgttcttttcctacatcctctgccattgatcgtgttgcagcaaaaaagggattaagatgttacgaagttccaaccggctggaaattcttctgtgccttatttgatgctaaaaagttatctatctgtggtgaagaatccttcggtacaggttccaatcatatcagagaaaaggacggtttatgggccattattgcttggttaaatatcttggctatctaccataggcgtaaccctgaaaaggaagcttctatcaaaactattcaggacgaattttggaacgagtatggccgtactttcttcacaagatacgattacgaacatatcgaatgcgagcaggccgaaaaagttgtagctcttttgagtgaatttgtaagtaggccaaacgtttgtggctcccacttcccagctgatgagtctttaaccgttatcgattgtggtgatttttcttatagagatttggatggctccatctctgaaaatcaaggccttttcgtaaagttttctaatgggactaaatttgttttgaggttatccggcacaggcagttctggtgcaacaataagattatacgtagaaaagtatactgataaaaaggagaactatggccaaacagctgacgtcttcttgaaacccgtcatcaactccattgtaaaattcttaagatttaaagaaattttaggaacagacgaaccaacagtccgcacatga

SEQ ID NO: 6611 - DNA, 2043 bp, Saccharomyces cerevisiae
atgtattcttggaagtcaaagtttaagtttggaaaatctaaagaagaaaaagaagccaaacatagtgggttttttcactcctctaaaaaggaagaacagcagaataatcaagcaactgcgggggaacatgatgcttcaattactcgttcatctttagacaggaagggcacgataaatccatcaaattcatcagtggtcccggttcgtgtttcatacgatgcatcctcatcgacctctactgtacgagattcaaatggtggtaattcagaaaacacgaactcatctcaaaatttagatgaaacagcaaatattggttctacagggacacccaatgatgccacctcaagttcaggaatgatgactatcaaagtatataatggtgatgactttattttaccttttccgattacctcaagcgagcaaatattgaataaactattggcctcgggtgttccaccgccacataaggagattagtaaagaagtagatgctttaattgcacaactgtcccgtgttcaaataaagaaccaaggtccagctgatgaagatttgatctctagcgagtcagcagcaaagttcatcccatctactatcatgttaccagggtcttcgaccttaaatcccttactatatttcaccattgaatttgataatacagttgcaactattgaagcagagtatggtacgatcgctaaacctggtttcaataagatatctacctttgatgtgacaaggaaattaccttatttaaagattgatgtatttgcaagaattccgtccattcttttgccctcgaagacatggcaacaggagatgggtttgcaagacgagaagctacagaccatttttgataaaataaattccaatcaagatatacatttagattctttccatttgcccatcaacttaagttttgactctgcagctagtattagactatataatcaccactggatcacattggataatggcttgggtaagatcaatattagtattgattataaaccttccagaaataaacctttgtccatcgatgatttcgatcttttgaaagttatcggtaagggttcgtttggtaaagtgatgcaagtcagaaagaaagatacacaaaaagtatacgctttgaaggcaatcagaaaatcatacattgtctctaaatccgaagtcacgcatactttggcagaaagaaccgttctagcacgtgttgattgtccatttattgtacctttgaagttttctttccaatcaccggaaaaattatactttgttttagcgtttatcaatggtggtgagttgttttatcatctacaaaaggaaggaaggtttgatttatcacgtgccagattttataccgcagaattgttatgtgcgctagacaacttgcataaactagatgttgtctatcgtgatttgaaaccagagaatattttattggattatcaaggccacattgccctttgtgatttcgggctatgcaaattgaatatgaaggatgatgataagacagatactttttgtgggaccccagaatacttggcaccagaactattgctaggtttaggctatacaaaggcagtagattggtggacattgggagtcttgttatacgagatgctcacaggtcttcctccttattatgatgaagatgttccaaaaatgtataagaagattctacaggagccactagttttcccagatggatttgatagagatgcaaaggatctattgattggattattgagccgtgatccgacaagaagattgggctacaatggtgccgacgaaattcggaaccatccttttttcagccaattatcatggaagcgcctgttgatgaagggttatattccaccatataaaccagctgttagtaattccatggatactagtaatttcgatgaggaattcactagggagaagccaattgatagtgtggtagatgaatacttgagtgaaagtgttcaaaagcaatttggtggctggacatacgttggaaatgaacagctaggtagctcaatggtgcaaggtagaagcattagatag

SEQ ID NO: 6612 - DNA, 2043 bp, Artificial Sequence
  Description of Artificial Sequence: Synthetic polynucleotide
atgtattcttggaagtccaagtttaagtttggaaaatctaaagaagaaaaagaagccaaacatagtgggttttttcactcctctaaaaaggaagaacagcagaataatcaagcaactgcgggggaacatgatgcttccattactcgttcttctttagacaggaagggcacgataaatccatccaattcttctgtggtcccggttcgtgtttcttacgatgcatcctcttccacctctactgtaagagattctaatggtggtaattctgaaaacacgaactcttctcaaaatttagatgaaacagcaaatattggttctacagggacacccaatgatgccacctctagtagtggaatgatgactatcaaagtatataatggtgatgactttattttaccttttccgattaccagtagcgagcaaatattgaataaacttttggcctctggtgttccaccgccacataaggagattagtaaagaagtagatgctttaattgcacaattatcccgtgttcaaataaagaaccaaggtccagctgatgaagatttgatctctagcgagtctgcagcaaagttcatcccatctactatcatgttaccagggtcttccaccttaaatcccttattatatttcaccattgaatttgataatacagttgcaactattgaagcagagtatggtacgatcgctaaacctggtttcaataagatatctacctttgatgtgacaaggaaattaccttatttaaagattgatgtatttgcaagaattccgtccattcttttgccctccaagacatggcaacaggagatgggtttgcaagacgagaagttacagaccatttttgataaaataaattccaatcaagatatacatttagattctttccatttgcccatcaacttaagttttgactctgcagctagtattagattatataatcaccactggatcacattggataatggcttgggtaagatcaatattagtattgattataaaccttccagaaataaacctttgtccatcgatgatttcgatcttttgaaagttatcggtaagggttcttttggtaaagtgatgcaagtcagaaagaaagatacacaaaaagtatacgctttgaaggcaatcagaaaatcttacattgtctctaaatccgaagtcacgcatactttggcagaaagaaccgttttagcacgtgttgattgtccatttattgtacctttgaagttttctttccaatctccggaaaaattatactttgttttagcgtttatcaatggtggtgagttgttttatcatttacaaaaggaaggaaggtttgatttatctcgtgccagattttataccgcagaattgttatgtgcgttggacaacttgcataaattggatgttgtctatcgtgatttgaaaccagagaatattttattggattatcaaggccacattgccctttgtgatttcgggttatgcaaattgaatatgaaggatgatgataagacagatactttttgtgggaccccagaatacttggcaccagaattattgttgggtttaggctatacaaaggcagtagattggtggacattgggagtcttgttatacgagatgctcacaggtcttcctccttattatgatgaagatgttccaaaaatgtataagaagattttacaggagccattagttttcccagatggatttgatagagatgcaaaggatttattgattggattattgagccgtgatccgacaagaagattgggctacaatggtgccgacgaaattagaaaccatccttttttcagccaattatcttggaagcgcttgttgatgaagggttatattccaccatataaaccagctgttagtaattccatggatactagtaatttcgatgaggaattcactagggagaagccaattgatagtgtggtagatgaatacttgagtgaaagtgttcaaaagcaatttggtggctggacatacgttggaaatgaacagttgggtagcagtatggtgcaaggtagaagcattagatga

SEQ ID NO: 6613 - DNA, 1884 bp, Saccharomyces cerevisiae
atgatggcttttgagaatacaagtaaacgaccaccccaggactttgtagctcctatagatcaaaaaaaaaggaaggtccagttttccgatagtactggcctggtaacccttcaaccagaggagataaaagatgaagtgttttcagcggccatgtatagcaggttcgtgaaatctgccctagatgatctggataagaatgattcaacccagatcggcataattgccaatcaagtagcgcttccgagcaagaatcctgaaagaattaatgataagaatctcaatattcttttggatatcttatctagtaatatcaacaggatagaatcctccaggggaactttcctcatacaatctatcataaactttgagaagtggtgggaattgcctccacacactctaagtaaatatatatatttcatcaaaatcctttgctcgagtatacccaaatggtggcaagacgtttcgatgatactggtatcttgttttattttaccaatcaaacagacagtgtgtcatcatgatatgcttaaatatttcttaaggatgattccctcctcgatgggattcatagatacatatttggccaaatttttcccaaataaaaatgatactcggagaaagttggttaattacacttcaaatttgctgaaattgagaggctactgctctgagctaggattccaaatttggtccttactgatagaaaagattatttcgattgatgtcgagttacaaaatgaattagatgaattagatgatgatgtagatgacgatgatctagaggaagttgatctagaggatgacgacgatttagatgatgattcaggagacgatgatgatgaaaattgtgggaacagtaatgaagagttaaggtctggagcagccgacggtagtcaaagtgatagtgaagatatggacatcattgaaggtatggacggtactgaagaatataatgtggagttgacgcagggaatcaaagaactttccaccaaattggactctatcttaactttggtaagcacgcatgtggaagagcaagtgacgccggagagtttagaaagcggtgaaggcgtaggagtcttcaacactctaacaacattatttaaaacgcatgttctacccacgtactataccaggtcgattcaatatatcatgttccatgtttcacaacaacaattagaactaatggattcatttttagtgacactgatagatatttcgtttgccgtcaacgaagcagcagagaagaaaattaagtcattacaatatttggggtcgtacattgcgagggccaagaaactatccagaactcaaattattttcgttgcaagctatttaacgtcctggttgaatagatacgttatcgaaagagaagaagaagttgatcaacgtggaggtatggaaaggtttaaacatttctatgcagcatttcaagcactttgttacattttctgtttcagacataacatcttcagagatacagatggtaactgggagtgtgaactggacaaattctttcaaagaatggtcatttcaaaatttaacccattaaagttttgtaatgaaaatgtcatgttgatgtttgctcgtattgcccaacaagaaagcgtcgcgtactgtttcagcataattgaaaataacaacaatgaaagattgaggggaatcatcggcaaagctgatagcgacaagaaggaaaattccgcacaagcaaataccacatcgtcttcttggtctttagccactcgacaacaatttattgacttacagagttacttcccatatgatcctttgtttctgaaaaactataaaattttaatgaaggaatactacatagagtggagtgaagcaagcggggaatatgaaagtgatgggtcggatgactaa

SEQ ID NO: 6614 - DNA, 1884 bp, Artificial Sequence
  Description of Artificial Sequence: Synthetic polynucleotide
atgatggcttttgagaatacaagtaaaaggccaccccaggactttgtagctcctatagatcaaaaaaaaaggaaggtccagttttccgatagtactggcttagtaacccttcaaccagaggagataaaagatgaagtgttttctgcggccatgtatagcaggttcgtgaaatctgccttggatgatttggataagaatgattctacccagatcggcataattgccaatcaagtagcgcttccgagcaagaatcctgaaagaattaatgataagaatctcaatattcttttggatatcttatctagtaatatcaacaggatagaatcctccaggggaactttcctcatacaatctatcataaactttgagaagtggtgggaattgcctccacacactttaagtaaatatatatatttcatcaaaatcctttgcagcagtatacccaaatggtggcaagacgtttctatgatattagtatcttgttttattttaccaatcaaacagacagtgtgtcatcatgatatgcttaaatatttcttaaggatgattccctcctctatgggattcatagatacatatttggccaaatttttcccaaataaaaatgatactagaagaaagttggttaattacacttccaatttgttgaaattgagaggctactgctctgagttaggattccaaatttggtccttattgatagaaaagattatttccattgatgtcgagttacaaaatgaattagatgaattagatgatgatgtagatgacgatgatttagaggaagttgatttagaggatgacgacgatttagatgatgattctggagacgatgatgatgaaaattgtgggaacagtaatgaagagttaaggtctggagcagccgacggtagtcaaagtgatagtgaagatatggacatcattgaaggtatggacggtactgaagaatataatgtggagttgacgcagggaatcaaagaactttccaccaaattggactctatcttaactttggtaagcacgcatgtggaagagcaagtgacgccggagagtttagaaagcggtgaaggcgtaggagtcttcaacactttgacaacattatttaaaacgcatgttttgcccacgtactataccaggtctattcaatatatcatgttccatgtttctcaacaacaattagaattgatggattcttttttagtgacattaatagatatttcctttgccgtcaacgaagcagcagagaagaaaattaagtctttacaatatttggggtcttacattgcgagggccaagaaactttccagaactcaaattattttcgttgcaagctatttaacgtcctggttgaatagatacgttatcgaaagagaagaagaagttgatcaacgtggaggtatggaaaggtttaaacatttctatgcagcatttcaagcactttgttacattttctgtttcagacataacatcttcagagatacagatggtaactgggagtgtgaattagacaaattctttcaaagaatggtcatttccaaatttaacccattaaagttttgtaatgaaaatgtcatgttgatgtttgctcgtattgcccaacaagaaagcgtcgcgtactgtttcagcataattgaaaataacaacaatgaaagattgaggggaatcatcggcaaagctgatagcgacaagaaggaaaattccgcacaagcaaataccacatcttcttcttggtctttagccactaggcaacaatttattgacttacagagttacttcccatatgatcctttgtttttgaaaaactataaaattttaatgaaggaatactacatagagtggagtgaagcaagcggggaatatgaaagtgatgggtctgatgactga

SEQ ID NO: 6615 - DNA, 1740 bp, Saccharomyces cerevisiae
atgtatgtcacttttaatgaggctttggatagttcttttggtaatctagagagtccgaatcatgacttcaaagtaggtgaccctaacatggtaccaactccccctatggattcagattctgcagcaattagtttggctttcttaataagtctttctattacgtttgcaatattaatgctcatcttggtagtaatagcggcatatgtcaccttttgtggtgatgatgaatcagaatacgacgaagagaacgccttaggtacacgaacttcaggaactctgcactctttgtttggtaaaaaacatagtggcatcttgttggattcgagttttgcatcccctggcgggtttgatgatgagatcgttcttcaggaaagagaacttgaagaattaccaaagatgtcagcgtacgaggttgagttgtatataagagcgaaagagtttcaaatgatgagcccgccaatggtgaaggactttggcacgtatttggacagtgacgaccagcagtttattaaggatcgtggcattcaaagctattttttgctaccaagcattaatgataatatagacgaatatggaaactttctacccagttttattgtccaggataaactagatattcaattttcaaagttcaataagagctcatccactgtaatgaactatcccctacctcacaataggaaggacgcagtgtatttcgaagttaaaattttcagacatattcaaaagtccaatagtatattcagtataggtttgactactgtaccatatccttatttcagggtaccgggcatggccaaatactccattgcatacgaatccacaggtaaactgaggataaataaccccttcactgccagcacattattaccaaaattggaagaaggtgacacggtaggattcggttacagatataaaacaggtacaatcttcattacacataatgggaaaaaattaatggatgtaacacaaaatattggcattgatcttttcattggaattggcgcgtttaatgccgcatatacaagaacatatacgagggatggtctattggaagacccggataatgttagcttccgtgaagctctctctgaaggcaaagatattgaagtcgccaaagatcttcaaagagttcacgatccacatgatgaaagtgatgaaatgacgtcagatgaggttgaattacatgttaatttgggccaagttgggttcgtctttatagaagccaatgtgaaaaaatatgcgtttgggagtgtttatggccaaattggaattcctcctgcgtataatggaaccgagatcaagaaggatactattttacagaaaggagaagaattgccaccaagatatgctgacactgataatttctttggtagtatgaaggtaaaagaagggtcatcctctaggataacggcgcaaactagtaagcccctgtggtctgttgggacgtatgaaagaatctcttctaactttgacagagaaaataatgtttaccacgacagtcttgaaaccgacgataacaacaccgataacaatgttaataacaacgatgagaacgctggttgcaatgaaaattcgccattattggaagatgatggcaataaaagaccggaaaattcaaataccccccgtgaagtatcagatggagctatcaataagaaccctagaaataaatctactaaaaaacgtcaaagaaacagaggcaaatcttctaaaaagaagaacagatcgagaaaataa

SEQ ID NO: 6616 - DNA, 1740 bp, Artificial Sequence
  Description of Artificial Sequence: Synthetic polynucleotide
atgtatgtcacttttaatgaggctttggatagttcttttggtaatttggagagtccgaatcatgacttcaaagtaggtgaccctaacatggtaccaactccccctatggattctgattctgcagcaattagtttggctttcttaataagtctttctattacgtttgcaatattaatgctcatcttggtagtaatagcggcatatgtcaccttttgtggtgatgatgaaagtgaatacgacgaagagaacgccttaggtacaagaacttctggaactttgcactctttgtttggtaaaaaacatagtggcatcttgttggattctagttttgcatcccctggcgggtttgatgatgagatcgttcttcaggaaagagaacttgaagaattaccaaagatgagtgcgtacgaggttgagttgtatataagagcgaaagagtttcaaatgatgagcccgccaatggtgaaggactttggcacgtatttggacagtgacgaccagcagtttattaaggatcgtggcattcaaagctattttttgttaccaagcattaatgataatatagacgaatatggaaactttttgcccagttttattgtccaggataaattggatattcaattttccaagttcaataagagctcttccactgtaatgaactatcccttacctcacaataggaaggacgcagtgtatttcgaagttaaaattttcagacatattcaaaagtccaatagtatattcagtataggtttgactactgtaccatatccttatttcagggtaccgggcatggccaaatactccattgcatacgaatccacaggtaaattgaggataaataaccccttcactgccagcacattattaccaaaattggaagaaggtgacacggtaggattcggttacagatataaaacaggtacaatcttcattacacataatgggaaaaaattaatggatgtaacacaaaatattggcattgatcttttcattggaattggcgcgtttaatgccgcatatacaagaacatatacgagggatggtttattggaagacccggataatgttagcttccgtgaagctctctctgaaggcaaagatattgaagtcgccaaagatcttcaaagagttcacgatccacatgatgaaagtgatgaaatgacgtctgatgaggttgaattacatgttaatttgggccaagttgggttcgtctttatagaagccaatgtgaaaaaatatgcgtttgggagtgtttatggccaaattggaattcctcctgcgtataatggaaccgagatcaagaaggatactattttacagaaaggagaagaattgccaccaagatatgctgacactgataatttctttggtagtatgaaggtaaaagaagggtcttcctctaggataacggcgcaaactagtaagcccctttggtctgttgggacgtatgaaagaatctcttctaactttgacagagaaaataatgtttaccacgacagtcttgaaaccgacgataacaacaccgataacaatgttaataacaacgatgagaacgctggttgcaatgaaaattctccattattggaagatgatggcaataaaagaccggaaaatagtaataccccccgtgaagtatctgatggagctatcaataagaaccctagaaataaatctactaaaaaacgtcaaagaaacagaggcaaatcttctaaaaagaagaacagatctagaaaatga

SEQ ID NO: 6617 - DNA, 504 bp, Saccharomyces cerevisiae
atgtctgtgaaacccattgacaactacatcacgaacagtgttcgcctttttgaggtgaatccatctcaaacgctcttctccatatcgtataaaccaccaacacagaagacagacaccaaagtgtcctttagaactcataactcgcatttatccttgaactataaatttactactaataagagtaaagatgtttcaagattacttagtgcattaggcccacgaggcgtatctataactccaggtaaaattgaaaaaatagcacagtcgaagaagaaaaataacaaaataaaagaatcgagtaaaaaaataaaaggtaagagcatccaagacattgttggtttagccaccttaattgtcaacacagatgtcgaaaagagcgatcctgcggctaagaaaactgctacagaaccgaagcaaaaagctaatgctgtgcaaaataacaatggtaactctgcagcttcaaaaaagaaaaaaaataaaaacaagggcaaaaaaaagcgttaa

SEQ ID NO: 6618 - DNA, 504 bp, Artificial Sequence
  Description of Artificial Sequence: Synthetic polynucleotide
atgtctgtgaaacccattgacaactacatcacgaacagtgttcgcctttttgaggtgaatccatctcaaacgctcttctccatatcttataaaccaccaacacagaagacagacaccaaagtgtcctttagaactcataactctcatttatccttgaactataaatttactactaataagagtaaagatgtttctagattacttagtgcattaggcccaagaggcgtatctataactccaggtaaaattgaaaaaatagcacagtccaagaagaaaaataacaaaataaaagaaagtagtaaaaaaataaaaggtaagagcatccaagacattgttggtttagccaccttaattgtcaacacagatgtcgaaaagagcgatcctgcggctaagaaaactgctacagaaccgaagcaaaaagctaatgctgtgcaaaataacaatggtaactctgcagcttccaaaaagaaaaaaaataaaaacaagggcaaaaaaaagcgttga

SEQ ID NO: 6619 - DNA, 2559 bp, Saccharomyces cerevisiae
atgttcaagtcgaaaacaagcactttaagctatgatgaaaccccgaactccaacgagggtgatcgcaatgcaacccctgtaaatcccaaagaaaagagccaaacgaaacatttgaacataccaggcgacaggagccgacattcctctattgcagattcaaaaagaagctcttctagatatgatggaggctactctgccgatataattcctgctcaattaaggttcattgataatatagactacggcacgaggctgagaaaaacacttcacagaaactcagtggtttcaaatgggtacaataaactcagtgagaatgaccgatggtatttcgacctattcgataggaaatatttcgaaaactatctcgaagaacccacatatattaaaatatttaaaaaaaaggaaggattagaacagtttgatagaatgttcttagctcaagagttgaaaattcccgacgtttacaaatctacaacctaccagggagaacctgcagttgctaattcagagctattcaagaattcaatatgctgctgtacgttcagtcatgatggtaagtatatggttattggttgtaaagatggctctttgcatctttggaaagtcataaactcaccagttaagagatccgaaatgggacgctcagaaaagtcagtcagtgcctctagagcaaactcactaaagattcaaagacatttggcgagcattagttctcataacggctccatatcaagtaatgatttgaagccgagcgaccagtttgaaggaccttccaaacaattacatttatacgcaccggttttctattctgatgtgtttagggtttttatggagcacgctttagatattttggatgcaaactggtccaaaaatggatttctaataacagcatcaatggacaaaactgcaaaactatggcaccctgagaggaaatactcattgaaaacttttgttcacccagattttgttacatccgcaatattttttcccaatgatgatcgtttcataattaccggatgcttagatcacaggtgtagactgtggtctatactggacaatgaggtttcttatgcctttgattgcaaagatttgataacatccctaacattatctcctcctggtggggaatatacaattatcggtacattcaatggatacatttatgttttactgacacatggattaaaatttgtatcttcattccatgtatctgataaaagcactcaaggaaccactaagaatagctttcatccatcttccgaatatggaaaggtccaacacggccctcgaatcacgggtttacaatgcttcttttctaaggtggacaaaaatttaagattgatagttacgacaaatgattcaaaaattcaaatctttgatttaaatgaaaaaaaacctttagagctttttaaaggattccaaagtggttcctcacgtcatagaggccaattcctaatgatgaaaaatgaacctgtagttttcacgggaagtgatgatcattggttttatacctggaaaatgcagtcctttaatctttcagcagaaatgaattgcactgctccgcatagaaagaaacggctgagcggcagtatgagtttaaaagggctgttgagaattgtatctaataagagtacgaatgatgaatgtttgacagaaacgtcaaaccaaagcagctcacacacatttaccaactcatcaaaaaatgttcttcaaactcaaactgttggttctcaagctatcaaaaacaatcattatatatcatttcatgcccataactcccctgtcacatgtgcttccattgctcccgacgttgcaattaaaaatttgtccttgtcaaacgatttgattttcgaactgacttcacagtacttcaaagaaatgggccaaaattattcagaatctaaggaaacatgtgataacaaacctaatcacccagttacagaaacaggaggattcagctcaaacctatcgaacgttgtgaataatgttggaaccattctaataacaacagacagtcaaggtctaatccgtgttttcagaactgatatcttaccggaaatacgaaaaaaaataatagaaaagttccatgaatacaatttattccacctcgaagctgctggtaaaatcaacaaccacaacaatgacagcatattggaaaatagaatggatgaaagaagttccacagaggataatgagtttagcacaaccccaccatctaacacgcacaatagtaggccaagccacgatttttgtgagctgcatcctaataatagcccggtgatttccggcatgccatcaagagctagtgctattttcaagaattcgatctttaataaatccaatggaagttttatatccctaaagtcaagaagtgaaagtacgagctccacggtgtttggaccgcatgatattccgagagtttctaccacttatccgaagttgaaatgtgacgtctgcaatggatctaattttgaatgtgcttccaaaaaccccattgctggcggtgatagcggtttcacgtgtgctgattgtggtacaatcctcaataatttcagatag

SEQ ID NO: 6620 - DNA, 2559 bp, Artificial Sequence
  Description of Artificial Sequence: Synthetic polynucleotide
atgttcaagagtaaaacaagcactttaagctatgatgaaaccccgaactccaacgagggtgatcgcaatgcaacccctgtaaatcccaaagaaaagagccaaacgaaacatttgaacataccaggcgacaggagcaggcattcctctattgcagattctaaaagaagctcttctagatatgatggaggctactctgccgatataattcctgctcaattaaggttcattgataatatagactacggcacgaggttaagaaaaacacttcacagaaactctgtggtttctaatgggtacaataaactcagtgagaatgacagatggtatttcgaccttttcgataggaaatatttcgaaaactatctcgaagaacccacatatattaaaatatttaaaaaaaaggaaggattagaacagtttgatagaatgttcttagctcaagagttgaaaattcccgacgtttacaaatctacaacctaccagggagaacctgcagttgctaattctgagcttttcaagaattctatatgctgctgtacgttcagtcatgatggtaagtatatggttattggttgtaaagatggctctttgcatctttggaaagtcataaactctccagttaagagatccgaaatgggacgcagtgaaaagtctgtcagtgcctctagagcaaactctttgaagattcaaagacatttggcgagcattagttctcataacggctccatatctagtaatgatttgaagccgagcgaccagtttgaaggaccttccaaacaattacatttatacgcaccggttttctattctgatgtgtttagggtttttatggagcacgctttagatattttggatgcaaactggtccaaaaatggatttttaataacagcatctatggacaaaactgcaaaattatggcaccctgagaggaaatactctttgaaaacttttgttcacccagattttgttacatccgcaatattttttcccaatgatgatcgtttcataattaccggatgcttagatcacaggtgtagattatggtctatattggacaatgaggtttcttatgcctttgattgcaaagatttgataacatccttaacattatctcctcctggtggggaatatacaattatcggtacattcaatggatacatttatgttttattaacacatggattaaaatttgtatcttctttccatgtatctgataaaagcactcaaggaaccactaagaatagctttcatccatcttccgaatatggaaaggtccaacacggccctagaatcacgggtttacaatgcttcttttctaaggtggacaaaaatttaagattgatagttacgacaaatgattctaaaattcaaatctttgatttaaatgaaaaaaaacctttagagctttttaaaggattccaaagtggttcctctcgtcatagaggccaattcttaatgatgaaaaatgaacctgtagttttcacgggaagtgatgatcattggttttatacctggaaaatgcagtcctttaatctttctgcagaaatgaattgcactgctccgcatagaaagaaaagattgagcggcagtatgagtttaaaagggttattgagaattgtatctaataagagtacgaatgatgaatgtttgacagaaacgtccaaccaaagcagctctcacacatttaccaactcttctaaaaatgttcttcaaactcaaactgttggttctcaagctatcaaaaacaatcattatatatcctttcatgcccataactcccctgtcacatgtgcttccattgctcccgacgttgcaattaaaaatttgtccttgtctaacgatttgattttcgaattgacttctcagtacttcaaagaaatgggccaaaattattctgaatctaaggaaacatgtgataacaaacctaatcacccagttacagaaacaggaggattcagcagtaacttatctaacgttgtgaataatgttggaaccattttaataacaacagacagtcaaggtttgatccgtgttttcagaactgatatcttaccggaaataagaaaaaaaataatagaaaagttccatgaatacaatttattccacctcgaagctgctggtaaaatcaacaaccacaacaatgacagcatattggaaaatagaatggatgaaagaagttccacagaggataatgagtttagcacaaccccaccatctaacacgcacaatagtaggccaagccacgatttttgtgagttacatcctaataatagcccggtgatttccggcatgccatctagagctagtgctattttcaagaattccatctttaataaatccaatggaagttttatatccttgaagtctagaagtgaaagtacgagctccacggtgtttggaccgcatgatattccgagagtttctaccacttatccgaagttgaaatgtgacgtctgcaatggatctaattttgaatgtgcttccaaaaaccccattgctggcggtgatagcggtttcacgtgtgctgattgtggtacaatcctcaataatttcagatga

SEQ ID NO: 6621 - DNA, 975 bp, Saccharomyces cerevisiae
atgtcatctgacaactctaaacaagataaacaaattgaaaaaacagccgcccagaagatatcgaagtttggttcgtttgtggctggtgggctagcagcatgtatagctgttacagttactaatccgatcgaattgattaaaatcagaatgcagcttcaaggtgaaatgtcagcatcagctgcaaaagtttataaaaatccaatccaaggtatggcggtaattttcaaaaacgaaggtataaaaggtctgcaaaaagggttaaatgctgcttatatctatcaaattgggctaaatggttccagattagggttttatgagccaatcagatcatcattaaatcagcttttcttcccagatcaagagccacataaggtacagagcgtcggagttaacgtcttttctggtgccgcatctggtataattggtgcagtcattggctctccattattcttggtgaaaacaagacttcaatcatattccgagtttataaaaattggtgaacaaacgcactacaccggtgtttggaacgggttagtaaccatttttaaaaccgaaggtgttaagggtctattcagaggtattgatgcggcaattttaaggacaggtgctggttcctctgttcaactacctatctacaacacagcaaagaacattttggtcaaaaatgatctgatgaaagatggcccagcattacatttaactgctagtactatctctgggttaggtgttgccgtcgttatgaacccatgggatgtcattttgacaagaatctataatcaaaaaggtgacttgtacaagggacctatagattgtttggtcaaaactgttagaatcgaaggtgtaaccgctttgtataagggttttgcagctcaagtgttcagaatcgcacctcatacaatcatgtgtttgaccttcatggaacagacaatgaaactagtttattcgatagagtcgagagttttaggccataattaa

SEQ ID NO: 6622 - DNA, 975 bp, Artificial Sequence
  Description of Artificial Sequence: Synthetic polynucleotide
atgtcttctgacaactctaaacaagataaacaaattgaaaaaacagccgcccagaagatatccaagtttggttcttttgtggctggtgggttagcagcatgtatagctgttacagttactaatccgatcgaattgattaaaatcagaatgcagcttcaaggtgaaatgtctgcatctgctgcaaaagtttataaaaatccaatccaaggtatggcggtaattttcaaaaacgaaggtataaaaggtttacaaaaagggttaaatgctgcttatatctatcaaattgggttaaatggttccagattagggttttatgagccaatcagaagttctttaaatcagcttttcttcccagatcaagagccacataaggtacagagcgtcggagttaacgtcttttctggtgccgcatctggtataattggtgcagtcattggctctccattattcttggtgaaaacaagacttcaaagttattccgagtttataaaaattggtgaacaaacgcactacaccggtgtttggaacgggttagtaaccatttttaaaaccgaaggtgttaagggtcttttcagaggtattgatgcggcaattttaaggacaggtgctggttcctctgttcaattacctatctacaacacagcaaagaacattttggtcaaaaatgatttgatgaaagatggcccagcattacatttaactgctagtactatctctgggttaggtgttgccgtcgttatgaacccatgggatgtcattttgacaagaatctataatcaaaaaggtgacttgtacaagggacctatagattgtttggtcaaaactgttagaatcgaaggtgtaaccgctttgtataagggttttgcagctcaagtgttcagaatcgcacctcatacaatcatgtgtttgaccttcatggaacagacaatgaaattggtttattctatagagagcagagttttaggccataattga

SEQ ID NO: 6623 - DNA, 648 bp, Saccharomyces cerevisiae
atgttcgaaattaaactgaatgatagaataactgaatttctgcgaaagttcaagaatagcgcgaaatcaaacgaaggaattgatgaggacattgatttgttcctgaagcgacacgcaatacctatgcagtcacttcttttttatgtgaaagagtatagaaaagacagtgatctccaatgctctatcaaagaacttttgaaacctttggagttcgaattcaagcccaaggccgtcagaggtttacactattcagaggatttcaagaaaaaattagagtttttgaaatatcaggaacaagaacttgaatatcaaagtatggtcaagagaagcaagtctgtcttttcacttcaagaagacgatgaactcacgccttcacaaattaataaacagattaaggaacaagttaccactgttttcaacgttcttgtaagtgtcatatcggttgttgtggccatttggtactggaccggatcttcaacaaactttccggtccatgttcgtcttttgttgtgcttgttctttggaatattggtcttagtagcagatgtggttgtgtataacagctatctgaaaaaactcgaagaagcaaaagtaaaagaaaaaacaaaggttgagaaaaagaaagttctaagcaagattacactgtaa

SEQ ID NO: 6624 - DNA, 648 bp, Artificial Sequence
  Description of Artificial Sequence: Synthetic polynucleotide
atgttcgaaattaaattgaatgatagaataactgaatttttaagaaagttcaagaatagcgcgaaaagtaacgaaggaattgatgaggacattgatttgttcttgaagagacacgcaatacctatgcagtctcttcttttttatgtgaaagagtatagaaaagacagtgatctccaatgctctatcaaagaacttttgaaacctttggagttcgaattcaagcccaaggccgtcagaggtttacactattctgaggatttcaagaaaaaattagagtttttgaaatatcaggaacaagaacttgaatatcaaagtatggtcaagagaagcaagtctgtcttttcccttcaagaagacgatgaactcacgccttctcaaattaataaacagattaaggaacaagttaccactgttttcaacgttcttgtaagtgtcatatctgttgttgtggccatttggtactggaccggatcttctacaaactttccggtccatgttcgtcttttgttgtgcttgttctttggaatattggtcttagtagcagatgtggttgtgtataacagctatttgaaaaaactcgaagaagcaaaagtaaaagaaaaaacaaaggttgagaaaaagaaagttttaagcaagattacattatga

SEQ ID NO: 6625 - DNA, 651 bp, Saccharomyces cerevisiae
atgtccgataaagttattaaccctcaagttgcatgggctcaaaggtctagtactactgatccagaaagaaattatgtcttaataactgtgtcaattgcagactgtgatgcccctgagttaaccattaagccatcatacatcgaattaaaggctcaatcaaagcctcatgttggcgatgaaaatgtccatcattatcaattacacattgatctatacaaggaaattatacctgaaaaaacaatgcataaggttgctaatggccagcactactttttgaaattgtataaaaaggatttagaatctgaatactggccacgtttgacaaaggaaaaggtgaagtacccttacatcaaaactgatttcgataaatgggttgatgaagatgaacaagacgaagttgaagctgaaggtaatgatgccgctcaaggaatggatttcagccaaatgatgggaggtgctggaggtgctggaggtgctggaggcatggacttcagccaaatgatgggaggtgctggtggcgctggttctccagatatggctcaattgcagcaattattggctcaaagcggtggtaatttggacatgggagatttcaaagaaaacgatgaagaagatgaagaagaggaaatagagccggaagtgaaagcttaa

SEQ ID NO: 6626 - DNA, 651 bp, Artificial Sequence
  Description of Artificial Sequence: Synthetic polynucleotide
atgtccgataaagttattaaccctcaagttgcatgggctcaaaggtctagtactactgatccagaaagaaattatgtcttaataactgtgtccattgcagactgtgatgcccctgagttaaccattaagccatcttacatcgaattaaaggctcaatccaagcctcatgttggcgatgaaaatgtccatcattatcaattacacattgatttatacaaggaaattatacctgaaaaaacaatgcataaggttgctaatggccagcactactttttgaaattgtataaaaaggatttagaatctgaatactggccacgtttgacaaaggaaaaggtgaagtacccttacatcaaaactgatttcgataaatgggttgatgaagatgaacaagacgaagttgaagctgaaggtaatgatgccgctcaaggaatggatttcagccaaatgatgggaggtgctggaggtgctggaggtgctggaggcatggacttcagccaaatgatgggaggtgctggtggcgctggttctccagatatggctcaattgcagcaattattggctcaaagcggtggtaatttggacatgggagatttcaaagaaaacgatgaagaagatgaagaagaggaaatagagccggaagtgaaagcttga

SEQ ID NO: 6627 - DNA, 1557 bp, Saccharomyces cerevisiae
atggatgaatatagtagtatatattcacaaccaaagactcctcggttgaaacaagaaggatttcccgactccattggcgatcaacacgaaaaggcattgattgatgaaaatggtgaggaagataaaaaaatggcatccactgaagggaccactggtgattctcgcagtacacctttgactgtatctattccgacgtttgaaaatgtccaagcattacctacaccgatgacctacactccgttatccccaggcaatctgtcaatgtcacctatagatcaatcctcgttgaatatacccaaaagacgaagtcatgcacgattactggatgatatgctttctgttacacaaccaaaccaaagagttgtttctgaacttattgcaccagctaatttatccccccaaagggttgtttccttaccaacagtgactgaagaggctttagtaaatgattctgttgatagtgataactacacgaaagaaccttattttcccgaaagtagtagttctaccgaaaagtgtgacgatgatatatttcagggatttcttttagatcactgggatcgcccgttattatggaaaaaggtcaggcccattggttcaggaaattttagtaccgtacttttatatgaactcatggaccaaagcaatcctaaactgaaacaagtggccgttaaacgactcaaatatcccgaggaattatcaaatgttgaacaaatcaatacatcgttacgatataaggaaactttatcccgtttggaaaattctctgactagggaattgcaggtgctaaaatcactaaatcacccatgtatagttaaactacttgggataaacaatccaatttttgttactagcaaaaaacctttatgcgatttgattataaaaactccaagagctctgccgccttgtgatatgattatgtcttattgtcctgcaggagacttattagctgccgtcatggcccgtaacggaagactagaagcgtggctgattcaaaggatttttacggaagtagtactggcagtaaaatatttgcacgaaaacagtattattcatcgggacctaaaattagagaatatactactgaaatatagttttgatgatatcaacagttttagggactcacccatttactgcaagcaaaatttcattgagctagcagattttggtctctgcaaaaaaattgagaacaatgagatgtgtacagcaagatgtggatcagaggattatgtctcaccagaaatcctgatgggagttccctacgatggccatttaagcgacacgtgggccttaggtgtcatactatacagcttgtttgaggacagattaccatttgaccctcctccaaacgcttcagcaagacagcgtagcagagctacgtcacatcgtattgccaggtttgattggagatggtaccggttaagcgattataaaactaatgtgggaaaacagattgtggaaaatacgctaacgaggaagaaccaacgttggtcgattaatgaaatttacgaatcccccttcgttaaaacgatcgctgatactctaagtttttcttga

SEQ ID NO: 6628 - DNA, 1557 bp, Artificial Sequence
  Description of Artificial Sequence: Synthetic polynucleotide
atggatgaatatagtagtatatattctcaaccaaagactcctagattgaaacaagaaggatttcccgactccattggcgatcaacacgaaaaggcattgattgatgaaaatggtgaggaagataaaaaaatggcatccactgaagggaccactggtgattctcgcagtacacctttgactgtatctattccgacgtttgaaaatgtccaagcattacctacaccgatgacctacactccgttatccccaggcaatttatctatgtctcctatagatcaatcctctttgaatatacccaaaagaagaagtcatgcaagattattagatgatatgctttctgttacacaaccaaaccaaagagttgtttctgaacttattgcaccagctaatttatccccccaaagggttgtttccttaccaacagtgactgaagaggctttagtaaatgattctgttgatagtgataactacacgaaagaaccttattttcccgaaagtagtagttctaccgaaaagtgtgacgatgatatatttcagggatttcttttagatcactgggatcgcccgttattatggaaaaaggtcaggcccattggttctggaaattttagtaccgtacttttatatgaactcatggaccaaagcaatcctaaattgaaacaagtggccgttaaaaggctcaaatatcccgaggaattatccaatgttgaacaaatcaatacaagtttaagatataaggaaactttatcccgtttggaaaattctttgactagggaattgcaggtgttgaaatctttgaatcacccatgtatagttaaattacttgggataaacaatccaatttttgttactagcaaaaaacctttatgcgatttgattataaaaactccaagagctttaccgccttgtgatatgattatgtcttattgtcctgcaggagacttattagctgccgtcatggcccgtaacggaagattagaagcgtggttgattcaaaggatttttacggaagtagtattggcagtaaaatatttgcacgaaaacagtattattcatagagacttgaaattagagaatatattattgaaatatagttttgatgatatcaacagttttagggactctcccatttactgcaagcaaaatttcattgagttggcagattttggtctctgcaaaaaaattgagaacaatgagatgtgtacagcaagatgtggatctgaggattatgtctctccagaaatcttgatgggagttccctacgatggccatttaagcgacacgtgggccttaggtgtcatattatacagcttgtttgaggacagattaccatttgaccctcctccaaacgcttctgcaagacagcgtagcagagctacgagtcatcgtattgccaggtttgattggagatggtacagattaagcgattataaaactaatgtgggaaaacagattgtggaaaatacgttaacgaggaagaaccaacgttggtctattaatgaaatttacgaatcccccttcgttaaaacgatcgctgatactttaagtttttcttga

SEQ ID NO: 6629 - DNA, 1104 bp, Saccharomyces cerevisiae
atgccttcgacacctagctttgttagatctgctgtctcgaaatacaaatttggtgcgcacatgtcaggtgccggtggaatttctaatagtgtaactaatgcatttaacactggctgtaattcgtttgccatgtttttaaaatctccaagaaagtgggtttctccgcagtatacacaggaggaaatagataaatttaagaaaaactgtgcaacttacaattataacccattgacggacgtcttaccgcatggccaatactttattaatttggctaatccggatagggaaaaggcagaaaagagttatgagtcattcatggacgatctgaacaggtgtgagcaattagggataggcctgtataacttacatccaggttctactttgaaaggagaccatcagttgcagttaaaacaactagcctcatatttgaacaaagcaattaaggaaacgaaatttgttaaaattgtattagaaaatatggctggtactggaaatttagtaggaagttctctggtagatttgaaggaggttattggaatgattgaagataaatcaagaatcggcgtttgcatagatacatgccatacatttgcagcaggctacgatatcagcaccactgaaacgtttaacaatttttggaaagagttcaatgatgtaatagggttcaaatatctaagtgctgttcacttaaatgattccaaggctcctttaggagcaaatagagatttgcatgaacgcttgggtcaaggttatttgggtatagatgtgtttagaatgatcgcgcactctgaatacctgcagggtatccctattgtcttggaaactccatacgaaaatgatgaaggctatggtaatgaaatcaaacttatggagtggttggaatcaaagagtgagagcgaattgttagaagacaaggagtataaagaaaaaaatgatacgctgcagaaattaggtgctaaatcgcgtaaggaacagttagacaagtttgaggttaaacaaaagaagcgagctgggggcaccaagaggaagaaagccactgcagagccaagcgataatgatatcttgtcacaaatgacaaagaagaggaagactaagaaagaataa

SEQ ID NO: 6630 - DNA, 1104 bp, Artificial Sequence
  Description of Artificial Sequence: Synthetic polynucleotide
atgccttctacacctagctttgttagatctgctgtctccaaatacaaatttggtgcgcacatgagtggtgccggtggaatttctaatagtgtaactaatgcatttaacactggctgtaattcttttgccatgtttttaaaatctccaagaaagtgggtttctccgcagtatacacaggaggaaatagataaatttaagaaaaactgtgcaacttacaattataacccattgacggacgtcttaccgcatggccaatactttattaatttggctaatccggatagggaaaaggcagaaaagagttatgagagtttcatggacgatttgaacaggtgtgagcaattagggataggcttgtataacttacatccaggttctactttgaaaggagaccatcagttgcagttaaaacaattggcctcttatttgaacaaagcaattaaggaaacgaaatttgttaaaattgtattagaaaatatggctggtactggaaatttagtaggaagttctttagtagatttgaaggaggttattggaatgattgaagataaatctagaatcggcgtttgcatagatacatgccatacatttgcagcaggctacgatatcagcaccactgaaacgtttaacaatttttggaaagagttcaatgatgtaatagggttcaaatatttgagtgctgttcacttaaatgattccaaggctcctttaggagcaaatagagatttgcatgaacgcttgggtcaaggttatttgggtatagatgtgtttagaatgatcgcgcactctgaatacttacagggtatccctattgtcttggaaactccatacgaaaatgatgaaggctatggtaatgaaatcaaacttatggagtggttggaatccaagagtgagagcgaattgttagaagacaaggagtataaagaaaaaaatgatacgttgcagaaattaggtgctaaatctcgtaaggaacagttagacaagtttgaggttaaacaaaagaagagagctgggggcaccaagaggaagaaagccactgcagagccaagcgataatgatatcttgtctcaaatgacaaagaagaggaagactaagaaagaatga

SEQ ID NO: 6631 - DNA, 1149 bp, Saccharomyces cerevisiae
atgggtattaaaggtttgaatgcaattatatcggaacatgttccctctgctatcaggaaaagcgatatcaagagcttttttggcagaaaggttgccatcgatgcctctatgtctctatatcagtttttaattgctgtaagacagcaagacggtgggcagttgaccaatgaagccggtgaaacaacgtcacacttgatgggtatgttttataggacactgagaatgattgataacggtatcaagccttgttatgtcttcgacggcaaacctccagatttgaaatctcatgagttgacaaagcggtcttcaagaagggtggaaacagaaaaaaaactggcagaggcaacaacagaattggaaaagatgaagcaagaaagaagattggtgaaggtctcaaaagagcataatgaagaagcccaaaaattactaggactaatgggaatcccatatataatagcgccaacggaagctgaggctcaatgtgctgagttggcaaagaagggaaaggtgtatgccgcagcaagtgaagatatggacacactctgttatagaacacccttcttgttgagacatttgactttttcagaggccaagaaggaaccgattcacgaaatagatactgaattagttttgagaggactcgacttgacaatagagcagtttgttgatctttgcataatgcttggttgtgactactgtgaaagcatcagaggtgttggtccagtgacagccttaaaattgataaaaacgcatggatccatcgaaaaaatcgtggagtttattgaatctggggagtcaaacaacactaaatggaaaatcccagaagactggccttacaaacaagcaagaatgctgtttcttgaccctgaagttatagatggtaacgaaataaacttgaaatggtcgccaccaaaggagaaggaacttatcgagtatttatgtgatgataagaaattcagtgaagaaagagttaaatctggtatatcaagattgaaaaaaggcttgaaatctggcattcagggtaggttagatgggttcttccaagtggtgcctaagacaaaggaacagctggctgctgcggcgaaaagagcacaagaaaataaaaaattgaacaaaaataagaataaagtcacaaagggaagaagatga

SEQ ID NO: 6632 - DNA, 1149 bp, Artificial Sequence
  Description of Artificial Sequence: Synthetic polynucleotide
atgggtattaaaggtttgaatgcaattatatctgaacatgttccctctgctatcaggaaaagcgatatcaagagcttttttggcagaaaggttgccatcgatgcctctatgtctttgtatcagtttttaattgctgtaagacagcaagacggtgggcagttgaccaatgaagccggtgaaacaacgagccacttgatgggtatgttttataggacattaagaatgattgataacggtatcaagccttgttatgtcttcgacggcaaacctccagatttgaaatctcatgagttgacaaagagatcttctagaagggtggaaacagaaaaaaaattggcagaggcaacaacagaattggaaaagatgaagcaagaaagaagattggtgaaggtctccaaagagcataatgaagaagcccaaaaattattaggattaatgggaatcccatatataatagcgccaacggaagctgaggctcaatgtgctgagttggcaaagaagggaaaggtgtatgccgcagcaagtgaagatatggacacactctgttatagaacacccttcttgttgagacatttgactttttctgaggccaagaaggaaccgattcacgaaatagatactgaattagttttgagaggactcgacttgacaatagagcagtttgttgatctttgcataatgcttggttgtgactactgtgaaagcatcagaggtgttggtccagtgacagccttaaaattgataaaaacgcatggatccatcgaaaaaatcgtggagtttattgaatctggggagagcaacaacactaaatggaaaatcccagaagactggccttacaaacaagcaagaatgttatttcttgaccctgaagttatagatggtaacgaaataaacttgaaatggtctccaccaaaggagaaggaacttatcgagtatttatgtgatgataagaaattcagtgaagaaagagttaaatctggtatatctagattgaaaaaaggcttgaaatctggcattcagggtaggttagatgggttcttccaagtggtgcctaagacaaaggaacagttagctgctgcggcgaaaagagcacaagaaaataaaaaattgaacaaaaataagaataaagtcacaaagggaagaagatga

SEQ ID NO: 6633 - DNA, 2196 bp, Saccharomyces cerevisiae
atggacaaattagtcgtgaattattatgaatacaagcaccctataattaataaagacctggccattggagcccatggaggcaaaaaatttcccaccttgggtgcttggtatgatgtaattaatgagtacgaatttcagacgcgttgccctattattttaaagaattcgcataggaacaaacattttacatttgcctgtcatttgaaaaactgtccatttaaagtcttgctaagctatgctggcaatgctgcatcctcagaaacctcatctccttctgcaaataataataccaaccctccgggtactcctgatcatattcatcatcatagcaacaacatgaacaacgaggacaatgataataacaatggcagtaataataaggttagcaatgacagtaaacttgacttcgttactgatgatcttgaataccatctggcgaacactcatccggacgacaccaatgacaaagtggagtcgagaagcaatgaggtgaatgggaacaatgacgatgatgctgatgccaacaacatttttaaacagcaaggtgttactatcaagaacgacactgaagatgattcgataaataaggcctctattgaccggggattggacgacgagagcggtcctactcatggtaatgacagcggtaaccaccgtcacaacgaggaggatgacgtccatacccaaatgacgaaaaactattctgacgtagtgaacgatgaagacatcaacgttgccattgccaatgccgtcgcaaatgtagattctcaatcaaacaataagcacgatggaaaagacgatgatgccactaacaacaatgatggccaagataataatactaataacgatcacaacaataacagcaatatcaataacaacaatgtcggtagccacggcatttcctcccactcaccatcctccatacgagacacgtctatgaatttagacgtcttcaattctgctaccgatgatataccgggcccatttgtcgttaccaaaattgagccctatcatagtcacccactagaagataacttgtcactgggtaaatttatcctaactaagattccaaagattttacaaaacgatttaaagtttgatcaaatactagaaagctcttacaataattctaaccatacagtgagtaaatttaaagtttctcattacgtggaggagtccggtcttttagacattttaatgcaaagatatggattaaccgccgaagatttcgaaaaaaggttactttcccaaatagccagacgtataacgacgtataaagcaagatttgttttgaaaaagaaaaaaatgggcgagtataatgatttacaaccttcttcatcttccaataacaacaataacaacgatggtgagctttctggcacgaacttgagaagtaactctatcgactacgccaaacatcaggaaatatcaagtgcgggtacctcatcgaacacaaccaaaaatgtgaataataacaagaatgacagtaatgacgataataacggcaacaataataatgacgcctcaaatttaatggaaagtgtgctagataaaacctctagtcaccggtatcaacccaagaagatgccaagcgtcaataaatggagcaagccagatcaaataactcattcagacgtgtccatggttggcctagatgaatcaaacgatggcggtaatgaaaatgtccacccaaccttggctgaagtagacgctcaagaagctcgtgaaactgctcagttagccatagacaagatcaattcttataagaggtccattgatgacaagaatggtgatggccataacaattcgtcgagaaacgtggtagatgaaaacttgatcaacgatatggattcagaagatgctcacaagtccaaaagacagcatttgtcagatatcacactggaagagagaaatgaagacgacaaactaccacatgaagtggcggaacagttaaggttactgtcatcgcatttgaaagaggtagagaatctacaccagaataatgatgatgacgtagacgatgtaatggtggacgtggatgtagaatcgcagtataataagaacacaactcatcataataaccatcatagccaacctcatcacgatgaagaagatgttgctggactaatagggaaagccgatgatgaagaagacctttctgatgaaaacattcaaccagaattaagaggtcaatag

SEQ ID NO: 6634 - DNA, 2196 bp, Artificial Sequence
  Description of Artificial Sequence: Synthetic polynucleotide
atggacaaattagtcgtgaattattatgaatacaagcaccctataattaataaagacttggccattggagcccatggaggcaaaaaatttcccaccttgggtgcttggtatgatgtaattaatgagtacgaatttcagacgcgttgccctattattttaaagaattctcataggaacaaacattttacatttgcctgtcatttgaaaaactgtccatttaaagtcttgttgagctatgctggcaatgctgcatccagtgaaacctcttctccttctgcaaataataataccaaccctccgggtactcctgatcatattcatcatcatagcaacaacatgaacaacgaggacaatgataataacaatggcagtaataataaggttagcaatgacagtaaacttgacttcgttactgatgatcttgaataccatttagcgaacactcatccggacgacaccaatgacaaagtggagagcagaagcaatgaggtgaatgggaacaatgacgatgatgctgatgccaacaacatttttaaacagcaaggtgttactatcaagaacgacactgaagatgattctataaataaggcctctattgacagaggattggacgacgagagcggtcctactcatggtaatgacagcggtaaccaccgtcacaacgaggaggatgacgtccatacccaaatgacgaaaaactattctgacgtagtgaacgatgaagacatcaacgttgccattgccaatgccgtcgcaaatgtagattctcaaagtaacaataagcacgatggaaaagacgatgatgccactaacaacaatgatggccaagataataatactaataacgatcacaacaataacagcaatatcaataacaacaatgtcggtagccacggcatttcctcccactctccatcctccataagagacacgtctatgaatttagacgtcttcaattctgctaccgatgatataccgggcccatttgtcgttaccaaaattgagccctatcatagtcacccattggaagataacttgtctttgggtaaatttatcttgactaagattccaaagattttacaaaacgatttaaagtttgatcaaatattggaaagctcttacaataattctaaccatacagtgagtaaatttaaagtttctcattacgtggaggagtccggtcttttagacattttaatgcaaagatatggattaaccgccgaagatttcgaaaaaaggttactttcccaaatagccagacgtataacgacgtataaagcaagatttgttttgaaaaagaaaaaaatgggcgagtataatgatttacaaccttcttcttcttccaataacaacaataacaacgatggtgagctttctggcacgaacttgagaagtaactctatcgactacgccaaacatcaggaaatatctagtgcgggtacctcttccaacacaaccaaaaatgtgaataataacaagaatgacagtaatgacgataataacggcaacaataataatgacgcctctaatttaatggaaagtgtgttggataaaacctctagtcacagatatcaacccaagaagatgccaagcgtcaataaatggagcaagccagatcaaataactcattctgacgtgtccatggttggcttggatgaatctaacgatggcggtaatgaaaatgtccacccaaccttggctgaagtagacgctcaagaagctcgtgaaactgctcagttagccatagacaagatcaattcttataagaggtccattgatgacaagaatggtgatggccataacaattcttctagaaacgtggtagatgaaaacttgatcaacgatatggattctgaagatgctcacaagtccaaaagacagcatttgagtgatatcacattagaagagagaaatgaagacgacaaattaccacatgaagtggcggaacagttaaggttattatcttctcatttgaaagaggtagagaatttacaccagaataatgatgatgacgtagacgatgtaatggtggacgtggatgtagaatctcagtataataagaacacaactcatcataataaccatcatagccaacctcatcacgatgaagaagatgttgctggattgatagggaaagccgatgatgaagaagacctttctgatgaaaacattcaaccagaattaagaggtcaatga

SEQ ID NO: 6635 - DNA, 942 bp, Saccharomyces cerevisiae
atgccactggtgctttttacgggatacccatgtagtggtaagacaacgcttgctaaacatttggtacaactactacagtccaagatcgatgcaaccccatcattaagtaaatattccataacctatcattcagatgaatctttaggcataaaacattcagattatataacttcccaagatgaaagaaaattgaggtcggagatcatctccgcagtgaaaagagatctatctaaaaacaagatagtcattgtagactcgttgaattatatcaagggtttccggtatcaacttcactgcgaggtgaaaaatttgtccaccacattttgtgtaattcaaacactgtgtccaccagagactatattcgagtggaataagacttcaaacccgaacccttgggaacccgagttattgaatcaattgattcaacgatacgaagagcctaactcaagcaaccgatgggactctccactctttgctattcttactcctcaggacaacataactgactacatcgacgatatttgtaaagtagtctttcaaacttccaaatcggctaaaaacagtggacacaatgatccgttgagtaagggcttacaaaaaccgaactcagccacggtactaaagcctgcgtctcagtccaatttcatccaggttctcgacatcgaaactagtaagataataaaaaccataatgaaccacatcaaaagcctgacttctattggcggggtaagtaacggaacaagagtcattgtttccgaagggattaccgatatcaatgatgatggttgcttcttcgtagacttgcccattggtaacgtcgttacgttggcgcaattgcagagattgaaaaggcaattcattaacttcaacaaactaagagatatagatcaagataggatcggtccgcttttcgctgattatcttaacaaaaacttgaattga

SEQ ID NO: 6636 - DNA, 942 bp, Artificial Sequence
  Description of Artificial Sequence: Synthetic polynucleotide
atgccattggtgctttttacgggatacccatgtagtggtaagacaacgcttgctaaacatttggtacaattattgcagtccaagatcgatgcaaccccatctttaagtaaatattccataacctatcattctgatgaatctttaggcataaaacattctgattatataacttcccaagatgaaagaaaattgaggagtgagatcatctccgcagtgaaaagagatttatctaaaaacaagatagtcattgtagactctttgaattatatcaagggtttcagatatcaacttcactgcgaggtgaaaaatttgtccaccacattttgtgtaattcaaacattatgtccaccagagactatattcgagtggaataagacttctaacccgaacccttgggaacccgagttattgaatcaattgattcaaagatacgaagagcctaactccagcaacagatgggactctccactctttgctattcttactcctcaggacaacataactgactacatcgacgatatttgtaaagtagtctttcaaacttccaaatctgctaaaaacagtggacacaatgatccgttgagtaagggcttacaaaaaccgaactctgccacggtattgaagcctgcgtctcagtccaatttcatccaggttctcgacatcgaaactagtaagataataaaaaccataatgaaccacatcaaaagcttaacttctattggcggggtaagtaacggaacaagagtcattgtttccgaagggattaccgatatcaatgatgatggttgcttcttcgtagacttgcccattggtaacgtcgttacgttggcgcaattgcagagattgaaaaggcaattcattaacttcaacaaattgagagatatagatcaagataggatcggtccgcttttcgctgattatcttaacaaaaacttgaattga

SEQ ID NO: 6637 - DNA, 1665 bp, Saccharomyces cerevisiae
atgaccgcaaagacttttctactacaggcctccgctagtcgccctcgtagtaaccattttaaaaatgagcataataatattccattggcgcctgtaccgatcgccccaaataccaaccatcataacaatagttcgctggaattcgaaaacgatggcagtaaaaagaagaagaagtctagcttggtggttagaacttcaaaacattgggttttgcccccaagaccaagacctggtagaagatcatcttctcacaacactctacctgccaacaacaccaataatattttaaatgttggccctaacagcaggaacagtagtaataataataataataataacatcatttcgaataggaaacaagcttccaaagaaaagaggaaaataccaagacatatccagacaatcgatgaaaagctaataaacgactcgaattacctcgcatttttgaagttcgatgacttggaaaatgaaaagtttcattcttctgcctcctccatttcatctccatcttattcatctccatctttttcaagttatagaaatagaaaaaaatcagaattcatggacgatgaaagctgcaccgatgtggaaaccattgctgctcacaacagtctgctaacaaaaaaccatcatatagattcttcttcaaatgttcacgcaccacccacgaaaaaatcaaagttgaacgactttgatttattgtccttatcttccacatcttcatcggccactccggtcccacagttgacaaaagatttgaacatgaacctaaattttcataagatccctcataaggcttcattccctgattctccagcagatttctctccagcagattcagtctcgttgattagaaaccactccttgcctactaatttgcaagttaaggacaaaattgaggatttgaacgagattaaattctttaacgatttcgagaaacttgagtttttcaataagtatgccaaagtcaacacgaataacgacgttaacgaaaataatgatctctggaattcttacttacagtctatggacgatacaacaggtaagaacagtggcaattaccaacaagtggacaatgacgataatatgtctttattgaatctgccaattttggaggaaaccgtatcttcagggcaagatgataaggttgagccagatgaagaagacatttggaattatttaccaagttcaagttcacaacaagaagattcatcacgtgctttgaaaaaaaatactaattctgagaaggcgaacatccaagcaaagaacgatgaaacctatctgtttcttcaggatcaggatgaaagcgctgattcgcatcaccatgacgagttaggttcagaaatcactttggctgacaataagttttcttatttgcccccaactctagaagagttgatggaagagcaggactgtaacaatggcagatcttttaaaaatttcatgttttccaacgataccggtattgacggtagtgccggtactgatgacgactacaccaaagttctgaaatccaaaaaaatttctacgtcgaagtcgaacgctaacctttatgacttaaacgataacaacaatgatgcaactgccaccaatgaacttgatcaaagcagtttcatcgacgaccttgacgaagatgtcgattttttaaaggtacaagtattttga

SEQ ID NO: 6638 - DNA, 1665 bp, Artificial Sequence
  Description of Artificial Sequence: Synthetic polynucleotide
atgaccgcaaagacttttttattgcaggcctccgctagtcgccctcgtagtaaccattttaaaaatgagcataataatattccattggcgcctgtaccgatcgccccaaataccaaccatcataacaatagttctttggaattcgaaaacgatggcagtaaaaagaagaagaagtctagcttggtggttagaacttctaaacattgggttttgcccccaagaccaagacctggtagaagatcttcttctcacaacactttacctgccaacaacaccaataatattttaaatgttggccctaacagcaggaacagtagtaataataataataataataacatcatttctaataggaaacaagcttccaaagaaaagaggaaaataccaagacatatccagacaatcgatgaaaagttaataaacgactctaattacctcgcatttttgaagttcgatgacttggaaaatgaaaagtttcattcttctgcctcctccatttcttctccatcttattcttctccatctttttctagttatagaaatagaaaaaaaagtgaattcatggacgatgaaagctgcaccgatgtggaaaccattgctgctcacaacagtttattaacaaaaaaccatcatatagattcttcttccaatgttcacgcaccacccacgaaaaaatccaagttgaacgactttgatttattgtccttatcttccacatcttcttctgccactccggtcccacagttgacaaaagatttgaacatgaacttgaattttcataagatccctcataaggcttctttccctgattctccagcagatttctctccagcagattctgtctctttgattagaaaccactccttgcctactaatttgcaagttaaggacaaaattgaggatttgaacgagattaaattctttaacgatttcgagaaacttgagtttttcaataagtatgccaaagtcaacacgaataacgacgttaacgaaaataatgatctctggaattcttacttacagtctatggacgatacaacaggtaagaacagtggcaattaccaacaagtggacaatgacgataatatgtctttattgaatttaccaattttggaggaaaccgtatcttctgggcaagatgataaggttgagccagatgaagaagacatttggaattatttaccaagtagtagttctcaacaagaagattcttctcgtgctttgaaaaaaaatactaattctgagaaggcgaacatccaagcaaagaacgatgaaacctatttatttcttcaggatcaggatgaaagcgctgattctcatcaccatgacgagttaggttctgaaatcactttggctgacaataagttttcttatttgcccccaactttggaagagttgatggaagagcaggactgtaacaatggcagatcttttaaaaatttcatgttttccaacgataccggtattgacggtagtgccggtactgatgacgactacaccaaagttttgaaatccaaaaaaatttctacgtccaagtctaacgctaacctttatgacttaaacgataacaacaatgatgcaactgccaccaatgaacttgatcaaagcagtttcatcgacgaccttgacgaagatgtcgattttttaaaggtacaagtattttga

SEQ ID NO: 6639 - DNA, 1362 bp, Saccharomyces cerevisiae
atgtactcatttgaactggacaaattgaaaattgagctgaaaacatgggagcatgatttcattgataaaaataaaagggaacccacaagggatgacatcaagagcctgcggactgttcggcagatgtataaacaatattccacactgaagaagaaacaatctttgcaacgacaaaaagttgacactcaagagtcggttgaactcccggcacataaaaaagaccacgacgaagtcgtagagataggccctactccccaagtttacggtaaggcgattagtatctttgacatgaatttgtcgcctataaagcctatatacatgacattcacaaataatattgatgttaacaatgataactccaagacaatttctaatgaatcttctccacgaaaaactattctcctaaaatcgtcgcctgcagatcgtacgttagtggcggaaccaatatccagtgtgaaacgccaattaaactttcaaatgctaaacgcttcttctacacgtactccgacttcatcaccatgcaagaatcgcaatgggaagttggtagaaatcaagaaatgtagtccaactattaatcctccactagaatctggcaaaccatcggggtattatggacctaattccccgctaaaattggatgaagaaaacattcacctaaacatctcacttaattcaagcactaaacgccggcttcaaatagcatatccatctttacagaagactccctcaaaggatcaagcggatatttcaacttcatttagtccgtctccactcattagaagaccactgacgaaatccctgatagaattggccagggaacatactgaaattgtaaaagaatttggtgtcttacaggaagaagatattgaagaggaagaggaaggagaagaaggcgagaatggttacgatgagaaaaaccacgaagacgactttgggctagaagatgaactaattagaccaaaagttgtgaaggacatatttcaagaggatgatgataatgatgatagccaagcaagggaagataccttcataagaaagagacccaaaagaagaaaggttatcagaagattacgagacaatgatccagaaaccgagaccgcaggttttgagagagatgtccataaggagctggtgaaactcaaaagaaggaaagtggcagaatttttgggatccacctcacaaatctctgatactgaatttgaacatgatccggaggcaagcagcggcgttgtaagctcagagcaaaagcctacggctaagcgaaagggtagaaagaagtataatctagtgagcaataacttcagaagactaaaactgccaaagaaaaaccgattctctaatggacgatggggaagaaggtga

SEQ ID NO: 6640 - DNA, 1362 bp, Artificial Sequence
  Description of Artificial Sequence: Synthetic polynucleotide
atgtactcttttgaattagacaaattgaaaattgagttgaaaacatgggagcatgatttcattgataaaaataaaagggaacccacaagggatgacatcaagagcttaagaactgttagacagatgtataaacaatattccacattgaagaagaaacaatctttgcaaagacaaaaagttgacactcaagagtctgttgaactcccggcacataaaaaagaccacgacgaagtcgtagagataggccctactccccaagtttacggtaaggcgattagtatctttgacatgaatttgtctcctataaagcctatatacatgacattcacaaataatattgatgttaacaatgataactccaagacaatttctaatgaatcttctccaagaaaaactattctcttgaaaagctctcctgcagatcgtacgttagtggcggaaccaatatccagtgtgaaacgccaattaaactttcaaatgttgaacgcttcttctacacgtactccgacttcttctccatgcaagaatcgcaatgggaagttggtagaaatcaagaaatgtagtccaactattaatcctccattggaatctggcaaaccatctgggtattatggacctaattccccgttaaaattggatgaagaaaacattcacttgaacatctctcttaatagtagcactaaacgcagacttcaaatagcatatccatctttacagaagactccctccaaggatcaagcggatatttctacttcttttagtccgtctccactcattagaagaccattaacgaaatccttgatagaattggccagggaacatactgaaattgtaaaagaatttggtgtcttacaggaagaagatattgaagaggaagaggaaggagaagaaggcgagaatggttacgatgagaaaaaccacgaagacgactttgggttggaagatgaattgattagaccaaaagttgtgaaggacatatttcaagaggatgatgataatgatgatagccaagcaagggaagataccttcataagaaagagacccaaaagaagaaaggttatcagaagattaagagacaatgatccagaaaccgagaccgcaggttttgagagagatgtccataaggagttggtgaaactcaaaagaaggaaagtggcagaatttttgggatccacctctcaaatctctgatactgaatttgaacatgatccggaggcaagcagcggcgttgtaagctctgagcaaaagcctacggctaagagaaagggtagaaagaagtataatttggtgagcaataacttcagaagattgaaattaccaaagaaaaacagattctctaatggaagatggggaagaaggtga

SEQ ID NO: 6641 - DNA, 930 bp, Saccharomyces cerevisiae
atgttctggaaaaaggatcccaccgtcagttgggaaagaaaaaatatcaatgacattgattttagtcgttttaatgtggccataattggtggcacaggtggacttggacgtgcaataagtagagagctggcccaaagaaatgccagggttactgttgtcgggcaaacttttagggacgaggacctaaaagataaaattaactttgtcaaggctgatttaagtttagtgtcagaatgcaagcgtatatctcatagtgatgaaattccctacgaggagttaacacatctgattttcactacgggtatttttgcatcacgccagagacaagctacaagtgagggtttggaaaaagacatggcagtgagctatttgagtagatacattatcttccatgatgtggcgaagcgattaggaattagtaggacaaaaaaagacgatttgccaaaagttttcatagcagggtttccaggaaatggtcaggtgggagacccagatgacttgaattctgatgaaaagaagtatagtgcctacgctacacatatgaacactgtggcagccaatgaaagtctggtcatagacgctaaagacagatacacgaatatagatactttcggtttgaaccctgggctgatcaaaacgaacattcgtaataatcttcttggcagtgacacctacctcagccgcattacagaatggataatcagctggacctgtcaaagcgcagagacgtatgcgaaaacaatatgcaccctgattgcgagccccgctatcgaatcacgcagtggtacaatgttcagcaacaaaggcgatgctattttaccttcgcctggtttgaccaaagatgttgttgagaagtttatggaaaattcggaacttctagttgaaaaggccttgcgtaatcaaagtcctttcacttccagtaacgaatga

SEQ ID NO: 6642 - DNA, 930 bp, Artificial Sequence
  Description of Artificial Sequence: Synthetic polynucleotide
atgttctggaaaaaggatcccaccgtcagttgggaaagaaaaaatatcaatgacattgattttagtcgttttaatgtggccataattggtggcacaggtggacttggacgtgcaataagtagagagttggcccaaagaaatgccagggttactgttgtcgggcaaacttttagggacgaggacttgaaagataaaattaactttgtcaaggctgatttaagtttagtgtctgaatgcaagcgtatatctcatagtgatgaaattccctacgaggagttaacacatttgattttcactacgggtatttttgcatctcgccagagacaagctacaagtgagggtttggaaaaagacatggcagtgagctatttgagtagatacattatcttccatgatgtggcgaagagattaggaattagtaggacaaaaaaagacgatttgccaaaagttttcatagcagggtttccaggaaatggtcaggtgggagacccagatgacttgaattctgatgaaaagaagtatagtgcctacgctacacatatgaacactgtggcagccaatgaaagtttagtcatagacgctaaagacagatacacgaatatagatactttcggtttgaaccctgggttgatcaaaacgaacattcgtaataatcttcttggcagtgacacctacctcagccgcattacagaatggataatcagctggacctgtcaaagcgcagagacgtatgcgaaaacaatatgcaccttgattgcgagccccgctatcgaatctcgcagtggtacaatgttcagcaacaaaggcgatgctattttaccttctcctggtttgaccaaagatgttgttgagaagtttatggaaaattctgaacttttggttgaaaaggccttgcgtaatcaaagtcctttcacttccagtaacgaatga

SEQ ID NO: 6643 - DNA, 120 bp, Saccharomyces cerevisiae
atgccatttccgtcgatattacatctgacaataggaagatatgcgagctatgactccaacaatcacatgagacggcgtgcaaaactcatggaagccatcttccgcatccgaacaatatga

SEQ ID NO: 6644 - DNA, 120 bp, Artificial Sequence
  Description of Artificial Sequence: Synthetic polynucleotide
atgccatttccgagcatattacatttaacaataggaagatatgcgagctatgactccaacaatcacatgagaagacgtgcaaaactcatggaagccatcttccgcatcagaacaatatga

SEQ ID NO: 6645 - DNA, 1356 bp, Saccharomyces cerevisiae
atgttgaggacgaggcttactaattgcagtctatggaggccctactacacgtcatcgcttagtagagtaccaagagcacctccagataaagtcttggggttatctgaacacttcaaaaaggtaaaaaatgttaacaaaattgacctgaccgtaggaatatataaagatggttggggcaaagtgacgacgtttccctccgttgcaaaagctcaaaaattgattgaatctcatttagagttgaataagaatctttcatatttaccaataacaggttccaaagaatttcaggaaaacgttatgaaatttttgttcaaggaatcatgtccgcagtttgggccattttatttagcccatgatagaatcagctttgttcagactttgagtggtacaggcgccctagctgtagcagctaaattcttggcattatttatttcaagagatatttggatacctgacccatcatgggcaaatcataagaacatttttcagaacaatggttttgaaaatatttaccggtattcctattataaggacggtcagatagacatcgacggatggattgagcaattgaaaacctttgcatataacaaccagcaagaaaacaataagaacccaccttgcataatcttgcatgcgtgttgtcacaaccctacaggtctcgacccaactaaagagcaatgggaaaagattatagatactatatatgagctaaaaatggtacccattgttgatatggcttatcagggtttagagtctggtaacttactaaaggacgcatatttattgaggctatgtctcaatgtaaataaatatccaaattggagtaacggtatctttctttgtcaatcttttgccaagaacatgggcctttatggtgaacgagttggttccttaagcgttatcacgccggcaactgcgaacaatggaaagttcaaccctctacaacagaaaaactcattgcagcaaaatattgactcccaattaaaaaagattgtcagaggtatgtattcttctccaccaggatacggttctcgtgtggtaaatgtagtattatcagatttcaaattgaaacagcaatggttcaaggatgttgatttcatggttcagagattgcatcacgtcagacaggagatgtttgaccgtctagggtggccggatcttgtaaatttcgcacaacagcacggtatgttttactatacaaggtttagtccaaagcaagtcgaaatattgagaaacaattacttcgtctatttaacaggtgatggtagattgtcgcttagcggagtcaatgattcgaacgttgattacttatgtgaatctcttgaagcagtctcgaaaatggacaaactcgcataa

SEQ ID NO: 6646 - DNA, 1356 bp, Artificial Sequence
  Description of Artificial Sequence: Synthetic polynucleotide
atgttgaggacgaggcttactaattgcagtttatggaggccctactacacgtcttctcttagtagagtaccaagagcacctccagataaagtcttggggttatctgaacacttcaaaaaggtaaaaaatgttaacaaaattgacttgaccgtaggaatatataaagatggttggggcaaagtgacgacgtttccctccgttgcaaaagctcaaaaattgattgaatctcatttagagttgaataagaatctttcctatttaccaataacaggttccaaagaatttcaggaaaacgttatgaaatttttgttcaaggaaagttgtccgcagtttgggccattttatttagcccatgatagaatcagctttgttcagactttgagtggtacaggcgccttagctgtagcagctaaattcttggcattatttatttctagagatatttggatacctgacccatcttgggcaaatcataagaacatttttcagaacaatggttttgaaaatatttacagatattcctattataaggacggtcagatagacatcgacggatggattgagcaattgaaaacctttgcatataacaaccagcaagaaaacaataagaacccaccttgcataatcttgcatgcgtgttgtcacaaccctacaggtctcgacccaactaaagagcaatgggaaaagattatagatactatatatgagttgaaaatggtacccattgttgatatggcttatcagggtttagagtctggtaacttattgaaggacgcatatttattgaggttatgtctcaatgtaaataaatatccaaattggagtaacggtatctttctttgtcaatcttttgccaagaacatgggcctttatggtgaaagagttggttccttaagcgttatcacgccggcaactgcgaacaatggaaagttcaaccctttacaacagaaaaactctttgcagcaaaatattgactcccaattaaaaaagattgtcagaggtatgtattcttctccaccaggatacggttctcgtgtggtaaatgtagtattaagtgatttcaaattgaaacagcaatggttcaaggatgttgatttcatggttcagagattgcatcacgtcagacaggagatgtttgaccgtcttgggtggccggatcttgtaaatttcgcacaacagcacggtatgttttactatacaaggtttagtccaaagcaagtcgaaatattgagaaacaattacttcgtctatttaacaggtgatggtagattgtctcttagcggagtcaatgattccaacgttgattacttatgtgaatctcttgaagcagtctccaaaatggacaaactcgcatga

SEQ ID NO: 6647 - DNA, 3399 bp, Saccharomyces cerevisiae
atgatccaagaaagtagtccagatgccttagcagcagcagcagcaattggaaatgcgctcagttataatgggaggaccgttgacaagagtaaaataccgcaatacaatcagagttttacctctcgaactacgtcaatcgcagggattaataggtatacaatgctctcgaattctaggactaactcaaggatgctcttaatgaatggtaacgttcgccaatactctaagcgcacgtcgagtttgccaaaccaaggacataagaatacctctaataattcggcggggagaaggcaacacagggctcacgaggatgcagaaaccacgtttcgagaatttggaggcaagcagtcatcgaaggttttaaacatttcaagttcgactggtcagaatagtaaatcaaggaccacatcacttgggaactcaggcagcacaataaggacgataaaaaaatacataccaggccctagggggttaatggctgtggaagtacccgtggaagtagagcctcctagatacagtctgagcaaccgctcaaaccaacgaggtggtagagcatattctttgcctactcgaaacaacaaaactagtctaatgcataggaataaaactactaagaaagcaggatcacaagagaaaaaaagtgaaagcggcggtaaatcaaaaaacgattatcatggcaaagtattatctaaaatgcatactacatcattaaagcaacggcataacaatgttccattaataccaacaactatgaacgaggaaacggaacaagaactgcaagaggatcttcatgatcctttagaatttaaacccatgattatatccgatgacgaaaactcttttattgaacccagcgttctcgatcgtagcatacccaaaaaagataaaagtggtctcagtggacgtgagaaaaaggaagaaattgaaacattgcttaaagaggttcatagcttggaggaaaaaatatcaaatatcgaaatagcaaaattgaacgaagaagaaagggaacaaagcttaattttggaattgcgaaaagttaagctagatgaagaacggagaatggagttattgaaaagagagctaaatatagttaaggagaatgccgaccttgaagcccaagaattaaaactaattgaaagcaaaagaaaacaacactttcacaaaggacaggaagtagcatccgaggtcaaatcgatcacgattcgtcaacctactttatcagaacctaagcctgcctatgtacctccggaagacgtggagaaagagccatcaactctctccaatcaaactcagaatattgaaaatgcagagaatatcgattctgttgatgccgaaggaaatttagtagatcctattcttctcggctctttaaacaattctaacttccacatgaattcagataacgaagtgaggtgcattgcagattcaaacagtctcactggcagcgaattatccgattataattatatagaaggctcggcaactgatcttcgcgctactgcaaagacaagtgtggagtctgaaataggcggaaatcaggttggactaaaaattccgcaagatgatgatagtgaaaaacaggaagaacgtacaaagggaaaaaagtcaggcctcgtcgatacaaattgctttttagtccaaaaagaagatcaagaagaggcgctttccgataatgaaccggaaagttctgaaaaattccctagcacttctgggatcgagaacgttaaactggaggatgagactggtagtgttatggacaaaaataatggacccaacaatgacaaggacgatgatgatgacaaagacaatgataatgacgatgatgatgacaaggacgatgatgttaacgatgatgacaaggatgaaaatgttgacgatgatgaaaatgttgacgatgatgatgacgatgatgatgacgatgatgatgaatatcatgattcttatgacgtgataatgagagatccggttcaaatagaacaagatatatctgacgtgccttcattaaaacacccttcagaatattctaccgagacagaagataataaaaagaaggaacaaaattctgaaaatgcagaagttagtcagtccggaacaaacatggccaagtatttacgtggtgctaatccttacctcactaacacaagttcagacactttcagcctagattccgaaaacgtgaactccaagtcctccacggataccacaagagttgcacctgaccttttgaaaagctcactacaaccacaacttagatctgatttgaaacaatcagccgttccatcaagtacttcctcgtccatttattcgatagaaacgtctccaaatattgattcctctacagggaaaactgcttccaatacgaaaacgaacagccatggccctccgacgagtatttcaaaacagaaatacgatcaatctagttctcatcaaatacccgtgatgtctcccaagcgtctcgacgataaaagaaaaatcaccaatcgttcgtgcctaagaactctacgtggtagttcaaatgaggctactctttcgcataatatagtatatccagcttctgactcatcttcatcccctccatatcatagcaagaagccatcaaatcctccatcatctggcaacttggcttcacacgaggcgtccaagtgttttccaaaagctcctcaggcgagcacaacatcgagacgattgcctgatcatgtccctctatacattgataaaaataatagtgcactctaccccaaagaaccccccgccaggaagtctagttttgagaaggaaagacctgcgaaggataacctaggatttagaagcatgtctttgagagagccacttatcacaaagaatgctacagccacagcagcagagaacctggatgtggaagaaaagaaggaaaaaggaggtcatgtctcaagaaaatcatggacttttggtttgccctctccgctgaaaaggagaacaagtcattctactcataccacgaacgaaacagagatagttaatcccatgacgaacttcaaaaataagaccaacgaaaacgatatgccaatattagcaaataaaaagagctgcaacaacgatgattcttccccttacactgcatcatccatgaacactaatgacgtaagcgaagctggtacagaaggccaccggttttcattattcggaaataaaagccaattgtcaaataggaacatatctggtggaacagccactttggagtcatcaaatcctgacctgcctacagccttaccattaagcgttccggtgactatcattgataaaaatggagagatacacaagcttcataacgatgatgcagctataaaagataagtcgcatgaccgtcacggtcacagtaaattcggtaggaaactgaaaaaaatttttggcaggaaatga

SEQ ID NO: 6648 - DNA, 3399 bp, Artificial Sequence
  Description of Artificial Sequence: Synthetic polynucleotide
atgatccaagaaagtagtccagatgccttagcagcagcagcagcaattggaaatgcgctcagttataatgggaggaccgttgacaagagtaaaataccgcaatacaatcagagttttacctctagaactacgtccatcgcagggattaataggtatacaatgctctctaattctaggactaacagcaggatgctcttaatgaatggtaacgttcgccaatactctaagcgcacgtccagtttgccaaaccaaggacataagaatacctctaataattctgcggggagaaggcaacacagggctcacgaggatgcagaaaccacgtttagagaatttggaggcaagcagtcttccaaggttttaaacatttccagttctactggtcagaatagtaaatctaggaccacatctcttgggaacagtggcagcacaataaggacgataaaaaaatacataccaggccctagggggttaatggctgtggaagtacccgtggaagtagagcctcctagatacagtttaagcaaccgctctaaccaaagaggtggtagagcatattctttgcctactagaaacaacaaaactagtttaatgcataggaataaaactactaagaaagcaggatctcaagagaaaaaaagtgaaagcggcggtaaatctaaaaacgattatcatggcaaagtattatctaaaatgcatactacaagtttaaagcaaagacataacaatgttccattaataccaacaactatgaacgaggaaacggaacaagaattacaagaggatcttcatgatcctttagaatttaaacccatgattatatccgatgacgaaaactcttttattgaacccagcgttctcgatcgtagcatacccaaaaaagataaaagtggtctcagtggacgtgagaaaaaggaagaaattgaaacattgcttaaagaggttcatagcttggaggaaaaaatatccaatatcgaaatagcaaaattgaacgaagaagaaagggaacaaagcttaattttggaattgagaaaagttaagttggatgaagaaagaagaatggagttattgaaaagagagttgaatatagttaaggagaatgccgaccttgaagcccaagaattaaaattgattgaaagcaaaagaaaacaacactttcacaaaggacaggaagtagcatccgaggtcaaatctatcacgattcgtcaacctactttatctgaacctaagcctgcctatgtacctccggaagacgtggagaaagagccatctactctctccaatcaaactcagaatattgaaaatgcagagaatatcgattctgttgatgccgaaggaaatttagtagatcctattcttctcggctctttaaacaattctaacttccacatgaattctgataacgaagtgaggtgcattgcagattccaacagtctcactggcagcgaattatccgattataattatatagaaggcagtgcaactgatcttcgcgctactgcaaagacaagtgtggagtctgaaataggcggaaatcaggttggattgaaaattccgcaagatgatgatagtgaaaaacaggaagaacgtacaaagggaaaaaagtctggcctcgtcgatacaaattgctttttagtccaaaaagaagatcaagaagaggcgctttccgataatgaaccggaaagttctgaaaaattccctagcacttctgggatcgagaacgttaaattagaggatgagactggtagtgttatggacaaaaataatggacccaacaatgacaaggacgatgatgatgacaaagacaatgataatgacgatgatgatgacaaggacgatgatgttaacgatgatgacaaggatgaaaatgttgacgatgatgaaaatgttgacgatgatgatgacgatgatgatgacgatgatgatgaatatcatgattcttatgacgtgataatgagagatccggttcaaatagaacaagatatatctgacgtgccttctttaaaacacccttctgaatattctaccgagacagaagataataaaaagaaggaacaaaattctgaaaatgcagaagttagtcagtccggaacaaacatggccaagtatttacgtggtgctaatccttacctcactaacacaagtagtgacactttcagcttagattccgaaaacgtgaactccaagtcctccacggataccacaagagttgcacctgaccttttgaaaagctctttacaaccacaacttagatctgatttgaaacaatctgccgttccatctagtacttcctcctccatttattctatagaaacgtctccaaatattgattcctctacagggaaaactgcttccaatacgaaaacgaacagccatggccctccgacgagtatttccaaacagaaatacgatcaatctagttctcatcaaatacccgtgatgtctcccaagcgtctcgacgataaaagaaaaatcaccaatcgttcttgcttgagaactttacgtggtagtagtaatgaggctactctttctcataatatagtatatccagcttctgactcttcttcttcccctccatatcatagcaagaagccatccaatcctccatcttctggcaacttggcttctcacgaggcgtccaagtgttttccaaaagctcctcaggcgagcacaacatctagaagattgcctgatcatgtccctttgtacattgataaaaataatagtgcactctaccccaaagaaccccccgccaggaagtctagttttgagaaggaaagacctgcgaaggataacttgggatttagaagcatgtctttgagagagccacttatcacaaagaatgctacagccacagcagcagagaaccttgatgtggaagaaaagaaggaaaaaggaggtcatgtctctagaaaaagttggacttttggtttgccctctccgttaaaaaggagaacaagtcattctactcataccacgaacgaaacagagatagttaatcccatgacgaacttcaaaaataagaccaacgaaaacgatatgccaatattagcaaataaaaagagctgcaacaacgatgattcttccccttacactgcatcttccatgaacactaatgacgtaagcgaagctggtacagaaggccacagattttctttattcggaaataaaagccaattgagcaataggaacatatctggtggaacagccactttggagtcttccaatcctgacttgcctacagccttaccattaagcgttccggtgactatcattgataaaaatggagagatacacaagcttcataacgatgatgcagctataaaagataagagtcatgaccgtcacggtcacagtaaattcggtaggaaattgaaaaaaatttttggcaggaaatga

SEQ ID NO: 6649 - DNA, 2154 bp, Saccharomyces cerevisiae
atgtgtggtatctttggttactgcaattatctagtggaaagatccagaggagaaattatcgacaccttagtggatggtttacaaagattagaatatagaggctatgattccaccggtattgctatcgatggtgacgaagctgattctactttcatctataagcaaatcggtaaagtgagtgctttgaaagaggagattactaagcaaaatccgaacagagacgttacttttgtctctcattgtggtattgcgcatactagatgggctactcacggtcgaccagaacaagttaactgtcaccctcaaagatctgacccagaagaccaatttgtggtcgttcataatggtatcatcacaaattttagagaactgaagactcttttaattaacaaaggttataaattcgaaagtgataccgataccgagtgtattgctaaactatatttgcatttatacaatacaaatttacaaaatgggcatgacttagatttccacgaattaaccaagctagttcttttagaactagaaggttcatacgggttattatgtaaatcttgtcactatcctaatgaggttatcgccactagaaaagggtcccctttactgattggtgtcaaatctgaaaaaaaactaaaagtcgacttcgtggatgtggaatttcccgaagaaaacgctggtcaaccggaaattccattgaaatctaacaacaaatcatttggcttgggcccaaagaaagctcgtgaatttgaagctggttcccaaaatgccaatttactaccaattgccgccaatgaatttaacttgagacattctcaatccagggctttcctatcagaagatggatctccaacaccggtggaattttttgtttcttcggatgcggcatctgttgttaaacataccaagaaggtgctatttttagaagatgacgatttggctcatatttacgatggtgagttacatattcatagatctagaagagaagtaggcgcatcaatgacaaggtccattcaaactttagagatggagttagctcagatcatgaagggcccttacgaccattttatgcaaaaggaaatctatgagcaaccagaatctactttcaatactatgagaggtagaatcgactatgaaaataataaagtgatattgggtggtttaaaggcatggttaccagttgtcagaagagcacggagactgatcatgatcgcatgcggtacttcttatcattcatgtttggctactcgtgctatcttcgaagaattatcagatatcccagttagtgtggaattagcgtctgactttctggacagaaaatgccctgtcttcagagacgatgtatgcgtgtttgtttcacaaagtggtgaaactgcggataccatgctggctctaaattattgtttagaaagaggagccttaactgtcggaattgttaacagtgttggttcttctatctctcgtgtcacccactgtggtgttcatattaacgctggtcctgaaattggtgttgcctctacaaaagcttatacttcccagtatattgccttagtgatgtttgctctatcgctgtcagatgaccgtgtatcgaaaatagacagaagaattgaaatcattcaaggcttgaagttaatcccgggccaaattaagcaggtattaaagctggaaccaagaataaaaaagctctgtgcgactgaattaaaggatcaaaaatctctattgttattgggtagaggttaccaatttgctgctgctctggaaggtgctttgaagatcaaagaaatttcttatatgcattctgaaggtgttttggcaggtgagttgaagcacggtgtcttggccttggtggacgaaaacttgccaatcattgcttttggtaccagagactctctattccctaaagtagtttcctctattgagcaagttactgcaagaaagggccatccaattattatttgtaacgaaaatgatgaagtgtgggcgcaaaaatctaaatcaatcgacctgcaaaccttagaagttccacaaactgttgattgtttacaaggtctaattaatattattccattacaactaatgtcatattggttggctgttaataaagggattgatgttgattttccaagaaacttggctaaatctgttaccgtcgaataa

SEQ ID NO: 6650 - DNA, 2154 bp, Artificial Sequence
  Description of Artificial Sequence: Synthetic polynucleotide
atgtgtggtatctttggttactgcaattatttggtggaaagatccagaggagaaattatcgacaccttagtggatggtttacaaagattagaatatagaggctatgattccaccggtattgctatcgatggtgacgaagctgattctactttcatctataagcaaatcggtaaagtgagtgctttgaaagaggagattactaagcaaaatccgaacagagacgttacttttgtctctcattgtggtattgcgcatactagatgggctactcacggtagaccagaacaagttaactgtcaccctcaaagatctgacccagaagaccaatttgtggtcgttcataatggtatcatcacaaattttagagaattgaagactcttttaattaacaaaggttataaattcgaaagtgataccgataccgagtgtattgctaaactttatttgcatttatacaatacaaatttacaaaatgggcatgacttagatttccacgaattaaccaagttggttcttttagaattggaaggttcttacgggttattatgtaaatcttgtcactatcctaatgaggttatcgccactagaaaagggtcccctttattgattggtgtcaaatctgaaaaaaaattgaaagtcgacttcgtggatgtggaatttcccgaagaaaacgctggtcaaccggaaattccattgaaatctaacaacaaaagttttggcttgggcccaaagaaagctcgtgaatttgaagctggttcccaaaatgccaatttattaccaattgccgccaatgaatttaacttgagacattctcaatccagggctttcttatctgaagatggatctccaacaccggtggaattttttgtttcttctgatgcggcatctgttgttaaacataccaagaaggtgctttttttagaagatgacgatttggctcatatttacgatggtgagttacatattcatagatctagaagagaagtaggcgcatctatgacaaggtccattcaaactttagagatggagttagctcagatcatgaagggcccttacgaccattttatgcaaaaggaaatctatgagcaaccagaatctactttcaatactatgagaggtagaatcgactatgaaaataataaagtgatattgggtggtttaaaggcatggttaccagttgtcagaagagcaagaagattgatcatgatcgcatgcggtacttcttatcattcttgtttggctactcgtgctatcttcgaagaattaagtgatatcccagttagtgtggaattagcgtctgactttttggacagaaaatgccctgtcttcagagacgatgtatgcgtgtttgtttctcaaagtggtgaaactgcggataccatgttggctttgaattattgtttagaaagaggagccttaactgtcggaattgttaacagtgttggttcttctatctctcgtgtcacccactgtggtgttcatattaacgctggtcctgaaattggtgttgcctctacaaaagcttatacttcccagtatattgccttagtgatgtttgctttatctttaagtgatgaccgtgtatccaaaatagacagaagaattgaaatcattcaaggcttgaagttaatcccgggccaaattaagcaggtattaaagttggaaccaagaataaaaaagctctgtgcgactgaattaaaggatcaaaaatctttgttgttattgggtagaggttaccaatttgctgctgctttggaaggtgctttgaagatcaaagaaatttcttatatgcattctgaaggtgttttggcaggtgagttgaagcacggtgtcttggccttggtggacgaaaacttgccaatcattgcttttggtaccagagactctttattccctaaagtagtttcctctattgagcaagttactgcaagaaagggccatccaattattatttgtaacgaaaatgatgaagtgtgggcgcaaaaatctaaatctatcgacttgcaaaccttagaagttccacaaactgttgattgtttacaaggtttgattaatattattccattacaattgatgtcttattggttggctgttaataaagggattgatgttgattttccaagaaacttggctaaatctgttaccgtcgaatga

SEQ ID NO: 6651 - DNA, 255 bp, Saccharomyces cerevisiae
atgaacgaccacaaattggtcttctgggtcagatctttgagggtgacagttaacttgttctggtcgaccgtgagtagcccatctagtatgcgcaataccacaatgagagacaaaagtaacgtctctgttcggattttgcttagtaatctcctctttcaaagcactcactttaccgatttgcttatagatgaaagtagaatcagcttcgtcaccatcgatagcaataccggtggaatcatagcctctatattctaa

SEQ ID NO: 6652 - DNA, 255 bp, Artificial Sequence
  Description of Artificial Sequence: Synthetic polynucleotide
atgaacgaccacaaattggtcttctgggtcagatctttgagggtgacagttaacttgttctggtctaccgtgagtagcccatctagtatgcgcaataccacaatgagagacaaaagtaacgtctctgttagaattttgcttagtaatctcctctttcaaagcactcactttaccgatttgcttatagatgaaagtagaatcagcttcgtcaccatcgatagcaataccggtggaatcatagcctctatattctga

SEQ ID NO: 6653 - DNA, 1545 bp, Saccharomyces cerevisiae
atggaggaacaacgtgaaatactggaacaattgaagaaaactctgcagatgctaactgtagagccatctaaaaataaccaaatcgccaacgaagaaaaggaaaagaaagaaaatgaaaattcgtggtgcatcctcgagcacaattatgaggatattgcacaggaattcattgatttcatttacaagaaccctaccacttaccatgtagtatcatttttcgcggagctgttagataagcataacttcaaatacttgagcgagaaatccaattggcaggactccattggcgaagatggtgggaaattctacactataagaaatggaactaacctatctgcctttatcctgggcaaaaactggagagccgaaaagggtgtcggtgtcattggatctcatgtggacgctttgacggtcaaattgaagcccgtctcctttaaagacacagcggaaggttacggaagaattgctgttgctccctatggaggtacactgaatgaattgtggctagacagagacctaggtattggtggtcgccttctttacaagaagaagggcactaacgaaattaaaagcgccttggttgattctacacccctacctgtttgtcgaattccttccttggctccccatttcggtaaacctgctgaaggcccatttgataaagaggaccaaactatcccggtcatcggcttccccactccggatgaggaaggtaatgaacctcccacggatgatgaaaagaaatcgcccttatttggcaaacactgcatccacctgttaaggtacgttgccaaattagccggtgtggaagtgtccgaattgattcaaatggatttagacttattcgatgtgcaaaagggtaccattggaggtattggtaaacacttcctttttgcaccacgtctagatgacaggttgtgtagtttcgcagcaatgattgctttgatttgctacgctaaggatgttaataccgaggaatcagatttattctctactgtcactttgtatgataatgaagaaatcggatcgttgacaagacaaggcgcaaaaggtggcttgttggagtcagtggtggaacgcagttcttctgcattcactaagaaaccggtcgatttgcatacggtttgggctaattccatcatcttgtccgcagacgtcaaccacctctacaacccaaactttcctgaagtctatttgaagaatcattttccagtgcctaatgtcggaatcactttatcactggatcctaacggtcatatggccacagatgtcgtaggaactgccctagtagaagaattagcacgccgcaatggagacaaagtgcaatatttccaaatcaaaaacaactcaagatcaggtggtactatcggcccatcattggcttctcaaacaggtgctcgtaccatagacctgggaattgcacagttgtccatgcacagcatcagagctgctacagggtccaaggatgtcggattaggtgttaagttcttcaacggatttttcaagcactggagatcagtctacgatgaattcggcgagttgtga

SEQ ID NO: 6654 - DNA, 1545 bp, Artificial Sequence
  Description of Artificial Sequence: Synthetic polynucleotide
atggaggaacaacgtgaaatattggaacaattgaagaaaactttacagatgttgactgtagagccatctaaaaataaccaaatcgccaacgaagaaaaggaaaagaaagaaaatgaaaattcttggtgcatcctcgagcacaattatgaggatattgcacaggaattcattgatttcatttacaagaaccctaccacttaccatgtagtatcctttttcgcggagttattagataagcataacttcaaatacttgagcgagaaatccaattggcaggactccattggcgaagatggtgggaaattctacactataagaaatggaactaacttatctgcctttatcttgggcaaaaactggagagccgaaaagggtgtcggtgtcattggatctcatgtggacgctttgacggtcaaattgaagcccgtctcctttaaagacacagcggaaggttacggaagaattgctgttgctccctatggaggtacattaaatgaattgtggttagacagagacttgggtattggtggtcgccttctttacaagaagaagggcactaacgaaattaaaagcgccttggttgattctacacccttacctgtttgtagaattccttccttggctccccatttcggtaaacctgctgaaggcccatttgataaagaggaccaaactatcccggtcatcggcttccccactccggatgaggaaggtaatgaacctcccacggatgatgaaaagaaaagtcccttatttggcaaacactgcatccacttattaaggtacgttgccaaattagccggtgtggaagtgtccgaattgattcaaatggatttagacttattcgatgtgcaaaagggtaccattggaggtattggtaaacacttcctttttgcaccacgtttggatgacaggttgtgtagtttcgcagcaatgattgctttgatttgctacgctaaggatgttaataccgaggaaagtgatttattctctactgtcactttgtatgataatgaagaaatcggatctttgacaagacaaggcgcaaaaggtggcttgttggagtctgtggtggaacgcagttcttctgcattcactaagaaaccggtcgatttgcatacggtttgggctaattccatcatcttgtccgcagacgtcaaccacctctacaacccaaactttcctgaagtctatttgaagaatcattttccagtgcctaatgtcggaatcactttatctttagatcctaacggtcatatggccacagatgtcgtaggaactgccttggtagaagaattagcacgccgcaatggagacaaagtgcaatatttccaaatcaaaaacaactctagatctggtggtactatcggcccatctttggcttctcaaacaggtgctcgtaccatagacttgggaattgcacagttgtccatgcacagcatcagagctgctacagggtccaaggatgtcggattaggtgttaagttcttcaacggatttttcaagcactggagatctgtctacgatgaattcggcgagttgtga

SEQ ID NO: 6655 - DNA, 306 bp, Saccharomyces cerevisiae
atgtgtgctttattcgctgaggtttcatcgacagctgcagccagttgttcattcggtgttctcttgtgcagcggctcaaattgtggcaggcttgtaggctccgaacgccgtaaggtactttatgtttttaatgtcaacgtttgcaagaaaatgtcatcctattactttctgaggcatgataacattgtaatcccttatctcttgcgcttgttggtatcagataaagaagcatcaaacaagaacccactccttccttttctcatggataaagagaggtcgcaccatttcgtgaggaatatgaattag

SEQ ID NO: 6656 - DNA, 306 bp, Artificial Sequence
  Description of Artificial Sequence: Synthetic polynucleotide
atgtgtgctttattcgctgaggtttcttctacagctgcagccagttgttctttcggtgttctcttgtgcagcggcagtaattgtggcaggcttgtaggctccgaacgccgtaaggtactttatgtttttaatgtcaacgtttgcaagaaaatgtcttcctattactttttaaggcatgataacattgtaatcccttatctcttgcgcttgttggtatctgataaagaagcatctaacaagaacccactccttccttttctcatggataaagagaggtctcaccatttcgtgaggaatatgaattga

SEQ ID NO: 6657 - DNA, 4557 bp, Saccharomyces cerevisiae
atgactggtcacgtttcaaaaacgagccacgtacccaaaggtcgcccgtcttcattggccaagaaggcagctaaaagggccatggccaaagtaaattcgaatccaaaaagggcgtcggggcatttggagcgtgttgtacaatctgtgaacgacgctaccaaaagattatctcagcccgactctaccgtaagtgttgctacaaaatcatcaaagagaaaatccagagacacggtgggtccttggaaacttggcaaaacattggggaagggatcttctggtagggttcgcttggctaaaaatatggaaacaggacaattagctgccattaaaattgtccccaagaagaaagcctttgttcattgttctaataatggaactgttcctaattcttactcttcttccatggtcacttccaatgtatcttctccatcaatagcatctagagaacatagtaaccattctcaaacgaacccatatggcatagagagagaaatagtaatcatgaaattgatatctcacacaaacgttatggcattgtttgaagtttgggagaacaaatcagagctgtacctagttttggaatatgttgatggtggcgaattattcgattatctggtctcgaagggaaagctacctgaaagggaggctatccattacttcaagcagatagttgaaggtgtttcctattgtcattcttttaatatatgccatcgtgatctgaagcctgaaaatttattattagataaaaagaataggagaatcaaaattgctgatttcggcatggcagcattagagcttcctaataaacttttaaaaacttcatgtggctctccacactatgcgtctcctgaaattgttatgggtagaccatatcatggcggtcctagcgatgtctggtcctgcggtatcgttttatttgcattactcaccggtcatttaccatttaatgatgacaacatcaaaaagctgttgttgaaagttcaatcgggcaaatatcaaatgccctcaaatttatcttctgaggctcgtgatttgatatcaaaaatattggtaattgatccagaaaaaagaattaccactcaagagatattgaagcatcctctgatcaaaaaatatgatgatctcccagttaataaagtgctgaggaaaatgagaaaggataacatggcgaggggaaaatctaactcggatttgcatttgctaaataatgtctcgccctctattgtaactttacattcaaaaggggaaattgatgaatccatcttgaggagtttgcaaattttgtggcatggagtttctcgtgaactaatcactgccaagttgcttcaaaagccaatgtcggaggaaaaactattctactcactgttattacaatataaacaacgtcactcaatatcattgtcctcgtcaagcgaaaacaagaaatcagcaacagaaagtagcgtaaatgaacctaggattgaatacgcatccaaaactgccaataatacaggcctaaggagcgagaacaatgatgtgaagactttacattctctagaaattcattcagaagatacttcaacagtgaatcagaacaacgcaattacaggggttaatacagaaattaatgcccctgtattggcacaaaaatcgcaatttagtatcaatacgctcagtcaacctgaaagtgataaggctgaagcagaagctgtaacattaccacccgctattcccatattcaatgcttcttcatcaaggattttccgtaactcatacacctctatttcatcacgttcgagaagatcgctacgcttatcgaattccagattatcattgtccgcttcaacttctagagaaactgtgcatgataatgagatgcctctacctcaactgccgaagtcgccttcaagatattcattgtcaagaagggcaatccacgcctccccatctactaaatcaatacataaatcactttcgaggaagaatatagctgcaactgttgccgctagaagaacactacaaaactcggcttcaaagagatccttatactcattacagtcaatttcaaaacgttccttgaacctgaatgatttattagtctttgacgatcctctccctagtaagaaaccagcatccgaaaatgtgaataaatcagaaccccattcgttggaatcagactctgattttgagatcttatgcgatcagatcttatttggaaacgccttagataggatactcgaagaggaagaggacaatgaaaaagaacgcgacacccaaagacagaggcaaaacgatacaaaatcttcggcagacacttttacgatctctggggtgtctacaaataaggaaaatgagggcccggagtatccaaccaaaattgagaaaaatcaattcaatatgtcatataaaccatctgagaatatgtcagggctctcttcatttcctatctttgaaaaagaaaacacgttaagctcaagttatttggaagaacagaagccaaagagagcggccctttcagatatcacgaactcattcaataaaatgaataaacaggaaggtatgaggatagaaaaaaagattcaaagagaacaacttcaaaaaaaaaatgaccgcccgtcaccactcaaacctattcagcaccaagaacttcgtgtaaattctttgcctaatgatcaaggtaaaccgtccttatctctagatccccgccgtaacatctcccagccagtgaattcaaaagtggaatcactattgcagggactgaaattcaaaaaggagccagcctctcactggacccatgagagaggttccttgttcatgagtgaacatgtggaagacgaaaaaccagtcaaagcctcagatgtttcaatcgaaagttcatatgtacctttaacaacagtagcaacatcttcgagagatcccagtgttttagcagaatctagtacaattcaaaaaccaatgctgtctttaccttctagttttttgaacacatctatgacgttcaaaaatcttagccagatactcgctgatgacggtgatgataagcatctaagtgtgccacagaaccaatctagaagtgtagccatgtcacaccctttgcgaaaacaatctgccaaaatatctctaactccacggtctaatttgaacgccaatttatccgttaaacgtaatcagggctcacctggctcctatttgagtaatgatctggatggaatctctgatatgacatttgcgatggaaataccaacaaacacctttaccgctcaggcgattcaactgatgaacaacgacacggacaataataaaatcaatacttcgcccaaagcatcttcttttacaaaagaaaaagtaatcaaatcggcagcctatatctcgaaggaaaaagaaccagataatagcgatactaattatattccagattatactataccaaacacatatgatgaaaaagccattaatatttttgaagatgcgccctccgatgagggttcattaaatacatcttcttcagaaagcgattcacgagcaagtgtgcataggaaagcggtatctattgacactatggcgacaacaaacgttcttactcccgcgacaaatgttagagtaagtctttattggaataataacagttctggtatacccagagagactactgaagagatactttctaaacttagattgtcaccagaaaatccttctaatacacatatgcaaaagaggttttcttccacgcgtggtagtcgtgatagtaatgcattaggcatttctcaaagtttacagtcaatgttcaaagatttggaggaagatcaagatgggcatacttctcaagctgatattcttgaatcaagtatgagctattcaaagcgaagaccatctgaggaaagcgttaatccaaaacaacgagtgacaatgcttttcgatgaggaggaggaagaatctaaaaaagtaggtgggggaaaaattaaagaagagcataccaagctagacaataaaatatccgaggaatcttctcaacttgtgttgccggtggttgaaaaaaaggaaaatgcaaataatacagaaaataactactctaaaataccaaaaccctcaacgattaaagttacgaaggataccgctatggaatcaaatacacaaacccatacaaaaaagccaattctaaaaagtgtccaaaatgttgaagttgaagaagcgccttccagtgataaaaagaattggttcgtcaaactatttcaaaacttttcttctcataataatgctactaaggcatccaagaatcatgtaacgaatatatcatttgatgatgcgcatatgctaacattaaatgaattcaacaagaatagtatcgactatcaattaaagaacctagatcacaaatttgggagaaaggtggtggaatacgattgtaaatttgtaaaaggcaacttcaaattcaaaatcaagattactagcacacccaatgcatctacggtaattactgtaaaaaaaagaagcaaacattcaaacacaagttccaataaagcctttgaaaagtttaatgatgatgtggagagagtaattcgaaatgccggacgttcataa

SEQ ID NO: 6658 - DNA, 4557 bp, Artificial Sequence
  Description of Artificial Sequence: Synthetic polynucleotide
atgactggtcacgtttccaaaacgagccacgtacccaaaggtcgcccgtcttctttggccaagaaggcagctaaaagggccatggccaaagtaaatagtaatccaaaaagggcgtctgggcatttggagcgtgttgtacaatctgtgaacgacgctaccaaaagattatctcagcccgactctaccgtaagtgttgctacaaaatcttccaagagaaaatccagagacacggtgggtccttggaaacttggcaaaacattggggaagggatcttctggtagggttcgcttggctaaaaatatggaaacaggacaattagctgccattaaaattgtccccaagaagaaagcctttgttcattgttctaataatggaactgttcctaattcttactcttcttccatggtcacttccaatgtatcttctccaagtatagcatctagagaacatagtaaccattctcaaacgaacccatatggcatagagagagaaatagtaatcatgaaattgatatctcacacaaacgttatggcattgtttgaagtttgggagaacaaaagtgagttatacttggttttggaatatgttgatggtggcgaattattcgattatttagtctccaagggaaagttacctgaaagggaggctatccattacttcaagcagatagttgaaggtgtttcctattgtcattcttttaatatatgccatcgtgatttgaagcctgaaaatttattattagataaaaagaataggagaatcaaaattgctgatttcggcatggcagcattagagcttcctaataaacttttaaaaacttcttgtggctctccacactatgcgtctcctgaaattgttatgggtagaccatatcatggcggtcctagcgatgtctggtcctgcggtatcgttttatttgcattactcaccggtcatttaccatttaatgatgacaacatcaaaaagttgttgttgaaagttcaaagtggcaaatatcaaatgccctccaatttatcttctgaggctcgtgatttgatatccaaaatattggtaattgatccagaaaaaagaattaccactcaagagatattgaagcatcctttgatcaaaaaatatgatgatctcccagttaataaagtgttaaggaaaatgagaaaggataacatggcgaggggaaaatctaacagtgatttgcatttgttgaataatgtctctccctctattgtaactttacattctaaaggggaaattgatgaatccatcttgaggagtttgcaaattttgtggcatggagtttctcgtgaattgatcactgccaagttgcttcaaaagccaatgtctgaggaaaaattattctactctttattattacaatataaacaacgtcactccatatctttgtcctcttctagcgaaaacaagaaatctgcaacagaaagtagcgtaaatgaacctaggattgaatacgcatccaaaactgccaataatacaggcttgaggagcgagaacaatgatgtgaagactttacattctttggaaattcattctgaagatacttctacagtgaatcagaacaacgcaattacaggggttaatacagaaattaatgcccctgtattggcacaaaaatctcaatttagtatcaatacgctcagtcaacctgaaagtgataaggctgaagcagaagctgtaacattaccacccgctattcccatattcaatgcttcttcttccaggattttccgtaactcttacacctctatttcttctcgttccagaagatccttacgcttatccaattccagattatctttgtccgcttccacttctagagaaactgtgcatgataatgagatgcctttgcctcaattgccgaagtctccttccagatattctttgtccagaagggcaatccacgcctccccatctactaaatctatacataaatctctttctaggaagaatatagctgcaactgttgccgctagaagaacattacaaaactctgcttccaagagatccttatactctttacagagtatttccaaacgttccttgaacttgaatgatttattagtctttgacgatcctctccctagtaagaaaccagcatccgaaaatgtgaataaaagtgaaccccattctttggaaagtgactctgattttgagatcttatgcgatcagatcttatttggaaacgccttagataggatactcgaagaggaagaggacaatgaaaaagaacgcgacacccaaagacagaggcaaaacgatacaaaatcttctgcagacacttttacgatctctggggtgtctacaaataaggaaaatgagggcccggagtatccaaccaaaattgagaaaaatcaattcaatatgtcttataaaccatctgagaatatgagtgggctctcttcttttcctatctttgaaaaagaaaacacgttaagcagtagttatttggaagaacagaagccaaagagagcggccctttctgatatcacgaactctttcaataaaatgaataaacaggaaggtatgaggatagaaaaaaagattcaaagagaacaacttcaaaaaaaaaatgaccgcccgtctccactcaaacctattcagcaccaagaacttcgtgtaaattctttgcctaatgatcaaggtaaaccgtccttatctttagatccccgccgtaacatctcccagccagtgaattctaaagtggaatctttgttgcagggattgaaattcaaaaaggagccagcctctcactggacccatgagagaggttccttgttcatgagtgaacatgtggaagacgaaaaaccagtcaaagcctctgatgtttccatcgaaagttcttatgtacctttaacaacagtagcaacatcttctagagatcccagtgttttagcagaatctagtacaattcaaaaaccaatgctttctttaccttctagttttttgaacacatctatgacgttcaaaaatcttagccagatactcgctgatgacggtgatgataagcatttgagtgtgccacagaaccaatctagaagtgtagccatgtctcaccctttgagaaaacaatctgccaaaatatctttgactccaagatctaatttgaacgccaatttatccgttaaacgtaatcagggctctcctggctcctatttgagtaatgatttggatggaatctctgatatgacatttgcgatggaaataccaacaaacacctttaccgctcaggcgattcaattgatgaacaacgacacggacaataataaaatcaatacttctcccaaagcatcttcttttacaaaagaaaaagtaatcaaatctgcagcctatatctccaaggaaaaagaaccagataatagcgatactaattatattccagattatactataccaaacacatatgatgaaaaagccattaatatttttgaagatgcgccctccgatgagggttctttaaatacatcttcttctgaaagcgattctagagcaagtgtgcataggaaagcggtatctattgacactatggcgacaacaaacgttcttactcccgcgacaaatgttagagtaagtctttattggaataataacagttctggtatacccagagagactactgaagagatactttctaaacttagattgtctccagaaaatccttctaatacacatatgcaaaagaggttttcttccacgcgtggtagtcgtgatagtaatgcattaggcatttctcaaagtttacagtccatgttcaaagatttggaggaagatcaagatgggcatacttctcaagctgatattcttgaaagtagtatgagctattccaagagaagaccatctgaggaaagcgttaatccaaaacaaagagtgacaatgcttttcgatgaggaggaggaagaatctaaaaaagtaggtgggggaaaaattaaagaagagcataccaagttggacaataaaatatccgaggaatcttctcaacttgtgttgccggtggttgaaaaaaaggaaaatgcaaataatacagaaaataactactctaaaataccaaaacccagtacgattaaagttacgaaggataccgctatggaaagtaatacacaaacccatacaaaaaagccaattttgaaaagtgtccaaaatgttgaagttgaagaagcgccttccagtgataaaaagaattggttcgtcaaattatttcaaaacttttcttctcataataatgctactaaggcatccaagaatcatgtaacgaatatatcctttgatgatgcgcatatgttaacattaaatgaattcaacaagaatagtatcgactatcaattaaagaaccttgatcacaaatttgggagaaaggtggtggaatacgattgtaaatttgtaaaaggcaacttcaaattcaaaatcaagattactagcacacccaatgcatctacggtaattactgtaaaaaaaagaagcaaacattccaacacaagttccaataaagcctttgaaaagtttaatgatgatgtggagagagtaattagaaatgccggacgttcctga

SEQ ID NO: 6659 - DNA, 1764 bp, Saccharomyces cerevisiae
atggacaagtatttgaattcatttgttgaccacctttcagagtggtcatctcgtgcctttaggaacaattcatcaagcgctaaccaaagtgcgtcgaacaaggaattagaacaagtttttgaacagatcaatgctatagttgaaaaccacaataacaaattaaccactgcctttgataagatatcatatcgcgttgctcacaagattacacacttggtggaaagccattctttagtattcaactacgccactttagttctcatcgcaagtgctttggtcgttattggctcatttacgtctatttcttctattccatttacagctctacctcctacgagagaacactcattgtttgatcctacagattttgatgtggaccacgactgtcatgttatctaccgcgagaatgacgaagataaaaagaaaaagaagaaaagcaagaggtttttcgatatgatggatgaaaaacatgcgattatactgcccttaactagtggctgtactttactcgctctctattttgtgatcaagaaactacacctaaactggctaaaatatgtggtgaaaattttgaattttaatataacactgctaaatatcccagctggcacatttgtctactcctactttctcaactcacttttcagaaacctatcacatttagcttcttggaatcccctggttgttttaccaaggtatcgtgtaacaatagctgatgataacgaagacctgaacaagataggcgggtttgttaccaatttgaattacaaagatggattgaccaactcagttgttcacaagaaaacattggatgagattgaaaaagatcattggatgaagcatttttacagaagagaattagttgaaccgaaggatattaaatcgaagaggcagatcagcaacatgtatttgaatagcgcattaattgtttcgttcgttctgtccatcgtttctaccgtatatttctatttatcacccaatgattggttaatatccaatgctgtcagtatgaatatggctatttggtccattgctcaattaaaattgaagaatttaaaatcaggggccctaatcctaattgctctatttttttacgacatttgctttgtctttggtaccgatgtaatggttacagtagctactaaccttgatattcccgtaaaactaagcttaccagtcaagtttaatacagctcaaaacaacttcaatttttcaatacttggtctgggtgatattgccttgcctggtatgtttattgcgatgtgctacaaatatgacatctggaagtggcaccttgatcatgatgacactgaattccactttttgaactggtcatacgttggaaaatattttattactgctatggttagttacgttgcttctttggtatctgccatggtctccttgtccattttcaatactgctcaaccggctttattatacattgttccttccttgttgattagtactattttggtagcttgctggaacaaggattttaagcagttttggaattttcagtatgatacgattgaagtggataaaagtttaaaaaaagcgatagaaaaaaaggagaactctataacttattcgaccttcatcctatcagaatactataatgatgccgacaagtatgccttgcttggtgatgatgtaaacgaaaattttgacgatgatgaagaattcgtgcaagaggaagatctcagtgacagctctgaggaagagctttctgaagaagatctcttggatgacgaatcttcttga

SEQ ID NO: 6660 - DNA, 1764 bp, Artificial Sequence
  Description of Artificial Sequence: Synthetic polynucleotide
atggacaagtatttgaattcttttgttgaccacctttctgagtggtcttctcgtgcctttaggaacaattcttctagcgctaaccaaagtgcgtccaacaaggaattagaacaagtttttgaacagatcaatgctatagttgaaaaccacaataacaaattaaccactgcctttgataagatatcttatcgcgttgctcacaagattacacacttggtggaaagccattctttagtattcaactacgccactttagttctcatcgcaagtgctttggtcgttattggctcttttacgtctatttcttctattccatttacagctttacctcctacgagagaacactctttgtttgatcctacagattttgatgtggaccacgactgtcatgttatctaccgcgagaatgacgaagataaaaagaaaaagaagaaaagcaagaggtttttcgatatgatggatgaaaaacatgcgattatattgcccttaactagtggctgtactttactcgctctctattttgtgatcaagaaattacacttgaactggttgaaatatgtggtgaaaattttgaattttaatataacattgttgaatatcccagctggcacatttgtctactcctactttctcaactctcttttcagaaacttatctcatttagcttcttggaatcccttagttgttttaccaaggtatcgtgtaacaatagctgatgataacgaagacttgaacaagataggcgggtttgttaccaatttgaattacaaagatggattgaccaactctgttgttcacaagaaaacattggatgagattgaaaaagatcattggatgaagcatttttacagaagagaattagttgaaccgaaggatattaaatccaagaggcagatcagcaacatgtatttgaatagcgcattaattgtttctttcgttttatccatcgtttctaccgtatatttctatttatctcccaatgattggttaatatccaatgctgtcagtatgaatatggctatttggtccattgctcaattaaaattgaagaatttaaaaagtggggccttgatcttgattgctttgtttttttacgacatttgctttgtctttggtaccgatgtaatggttacagtagctactaaccttgatattcccgtaaaattaagcttaccagtcaagtttaatacagctcaaaacaacttcaatttttccatacttggtttaggtgatattgccttgcctggtatgtttattgcgatgtgctacaaatatgacatctggaagtggcaccttgatcatgatgacactgaattccactttttgaactggagttacgttggaaaatattttattactgctatggttagttacgttgcttctttggtatctgccatggtctccttgtccattttcaatactgctcaaccggctttattatacattgttccttccttgttgattagtactattttggtagcttgctggaacaaggattttaagcagttttggaattttcagtatgatacgattgaagtggataaaagtttaaaaaaagcgatagaaaaaaaggagaactctataacttattctaccttcatcttatctgaatactataatgatgccgacaagtatgccttgcttggtgatgatgtaaacgaaaattttgacgatgatgaagaattcgtgcaagaggaagatctcagtgacagctctgaggaagagctttctgaagaagatctcttggatgacgaatcttcttga

SEQ ID NO: 6661 - DNA, 753 bp, Saccharomyces cerevisiae
atggctaaacttgtacatgatgttcagaaaaagcagcatagagaacgttctcagctaactagccgttccagatatgggtttttagaaaagcataaagactatgtgaaacgtgctcaagacttccacaggaagcagtccactttgaaagtcctcagagaaaaagcaaaagagagaaatccagatgaatactaccatgctatgcattcaaggaagacagatgcaaaaggactgctgatcagctcacgtcacggtgacgaagaagacgaatcgctttccatggatcaagttaaattactcaaaacgcaagatagtaattatgtgaggacgctgaggcaaatagagctgaaaaagctggagaaaggagcgaaacagttgatgttcaaaagcagtgggaatcatacaatattcgtcgattcccgagagaagatgaacgaattcaccccagagaagtttttcaataccacctccgagatggtgaatagatctgaaaatagattaactaaggaccaattagcccaagatatttcaaacaataggaacgcttcatcaataatgccaaaggaatcattagacaaaaagaaattgaaaaagttcaagcaagtcaagcagcacttacagagggaaactcaattgaaacaggtccaacaaagaatggatgctcaaagagaattgttgaagaagggttccaagaaaaaaatcgtagactcttcaggaaaaatttcatttaaatggaagaaacaacggaaacgttag

SEQ ID NO: 6662 - DNA, 753 bp, Artificial Sequence
  Description of Artificial Sequence: Synthetic polynucleotide
atggctaaacttgtacatgatgttcagaaaaagcagcatagagaacgttctcagttgactagccgttccagatatgggtttttagaaaagcataaagactatgtgaaacgtgctcaagacttccacaggaagcagtccactttgaaagtcctcagagaaaaagcaaaagagagaaatccagatgaatactaccatgctatgcattccaggaagacagatgcaaaaggacttttgatcagcagccgtcacggtgacgaagaagacgaatctctttccatggatcaagttaaattactcaaaacgcaagatagtaattatgtgaggacgttgaggcaaatagagttgaaaaagttggagaaaggagcgaaacagttgatgttcaaaagcagtgggaatcatacaatattcgtcgattccagagagaagatgaacgaattcaccccagagaagtttttcaataccacctccgagatggtgaatagatctgaaaatagattaactaaggaccaattagcccaagatatttccaacaataggaacgcttcttctataatgccaaaggaatctttagacaaaaagaaattgaaaaagttcaagcaagtcaagcagcacttacagagggaaactcaattgaaacaggtccaacaaagaatggatgctcaaagagaattgttgaagaagggttccaagaaaaaaatcgtagactcttctggaaaaatttcctttaaatggaagaaacaaagaaaacgttga

SEQ ID NO: 6663 - DNA, 1074 bp, Saccharomyces cerevisiae
atgggcgatcataatctgccggattttcagacatgtttgaagttttctgttacagctaaaaagagctttctatgtatgtatagagacagcgtctcaaaggaaaaattagcctcttcgatgccaagtacttgtgatatacaactgaagagggcaatcaatgacgcttatccgggcggaggaataaaggtcacggttctgaactcaacaactgcaagcttggactcgttagcaactacacatgttaaggaatttgagattgttatcattccagacataaattctcttttacagccagaccaagcgaaattagtaaaaattatgagagattgcacagtggcgattgagaaggcacagtcaacacgtatatttataggagtggttcattggaataatcccgtgcagccttcaggcgccgctaaggatggggatgaagcaggtaaaccagctcccaaaactcgcatcttcctgcccacgtctttccgtatgggcgcttggctcaaacacaaattctggtttgcatgtgcacccccatatttggattttgaaagttcaactgagtctagcattaatacaagagccaataatagcattggtatggctgaggaagagaagcaggagccagagagcaagaggtcgatcatattaaatgaagaggcaaatctgaacgatgtatttgtggggtccactgtaagacggtatattctcgatatcatggtccatttgcgaacgcatagattgacgtataacgccaaagccggcggggtatatacaaattcattggacgacgtggtgttattgtctagattaattggtctacatagcggcaagatgtttgtgtcaccttcacatgtcaaagaggcgtccaggtggtacttccccatgcacttggaattggttcagcgttcctccatggatagttccttattgtacggtagcgaccccaacttggtggacgaaatgctagagaaacttgcgaagattaagtgtgaggaggttaatgagtttgagaatccccttttcctggaatctctcgtagtgaaaaacgtactaagtaaagtcgtgccgcccgtgtaa

SEQ ID NO: 6664 - DNA, 1074 bp, Artificial Sequence
  Description of Artificial Sequence: Synthetic polynucleotide
atgggcgatcataatttaccggattttcagacatgtttgaagttttctgttacagctaaaaagagctttttatgtatgtatagagacagcgtctccaaggaaaaattagcctcttctatgccaagtacttgtgatatacaattgaagagggcaatcaatgacgcttatccgggcggaggaataaaggtcacggttttgaactccacaactgcaagcttggactctttagcaactacacatgttaaggaatttgagattgttatcattccagacataaattctcttttacagccagaccaagcgaaattagtaaaaattatgagagattgcacagtggcgattgagaaggcacagagtacacgtatatttataggagtggttcattggaataatcccgtgcagccttccggcgccgctaaggatggggatgaagcaggtaaaccagctcccaaaactcgcatcttcttgcccacgtctttccgtatgggcgcttggctcaaacacaaattctggtttgcatgtgcacccccatatttggattttgaaagttctactgagtctagcattaatacaagagccaataatagcattggtatggctgaggaagagaagcaggagccagagagcaagaggtctatcatattaaatgaagaggcaaatttgaacgatgtatttgtggggtccactgtaagaagatatattctcgatatcatggtccatttgagaacgcatagattgacgtataacgccaaagccggcggggtatatacaaattctttggacgacgtggtgttattgtctagattaattggtttgcatagcggcaagatgtttgtgtctccttctcatgtcaaagaggcgtccaggtggtacttccccatgcacttggaattggttcagcgttcctccatggatagttccttattgtacggtagcgaccccaacttggtggacgaaatgttagagaaacttgcgaagattaagtgtgaggaggttaatgagtttgagaatccccttttcttggaatctctcgtagtgaaaaacgtattgagtaaagtcgtgccgcccgtgtga

SEQ ID NO: 6665 - DNA, 411 bp, Saccharomyces cerevisiae
atgttcctatttacgtttaccattcttgagagtgaaaaacttattatatggcccgttccggccgtggtactgggtgttatggccccaaaacgcgcatattccacgccttttgggccttggccgggccccgcggagtgcctgtggaattgcccttcggagctaaggcagttcagttcgtgttgtttacctctgccgaaactgaggccgcccaggcccactttcgcttctctttggcgtgttgtggcggcgatcgctgcattgtttcaagtgccctggagacgtaaaacaggcgtgggaaaagcaatcttctgcataggttgctgctgcctagcatatcagtggcgcagaacgcggtattttgcatacaagattatgacaggaacatgcttcatgacagacttggcgccctaa

SEQ ID NO: 6666 - DNA, 411 bp, Artificial Sequence
  Description of Artificial Sequence: Synthetic polynucleotide
atgttcttatttacgtttaccattcttgagagtgaaaaacttattatatggcccgttccggccgtggtattgggtgttatggccccaaaacgcgcatattccacgccttttgggccttggccgggccccgcggagtgcctctggaattgcccttctgagttgaggcagttcagtagttgttgtttacctttgccgaaattgaggccgcccaggcccactttcgcttctctttggcgtgttgtggcggcgatcgctgcattgtttcaagtgccctggagacgtaaaacaggcgtgggaaaagcaatcttctgcataggttgctgctgcttggcatatcagtggcgcagaacgagatattttgcatacaagattatgacaggaacatgcttcatgacagacttggcgccctga

SEQ ID NO: 6667 - DNA, 150 bp, Saccharomyces cerevisiae
atgaagttatttattcttgattatgagaagaaaagaacaaagataggaaaagggatggcaagaagagaattgaaaatgatgaacaagaagcctgatttatatacgattattgtatcttatttttcaattttttcgttgttttttttttag

SEQ ID NO: 6668 - DNA, 150 bp, Artificial Sequence
  Description of Artificial Sequence: Synthetic polynucleotide
atgaagttatttattcttgattatgagaagaaaagaacaaagataggaaaagggatggcaagaagagaattgaaaatgatgaacaagaagcctgatttatatacgattattgtatcttatttttctattttttctttgttttttttttga

SEQ ID NO: 6669 - DNA, 279 bp, Saccharomyces cerevisiae
atgcaattctctactgtcgcttccgttgctttcgtcgctttggctaactttgttgccgctgaatccgctgccgccatttctcaaatcactgacggtcaaatccaagctactaccactgctaccaccgaagctaccaccactgctgccccatcttccaccgttgaaactgtttctccatccagcaccgaaactatctctcaacaaactgaaaatggtgctgctaaggccgctgtcggtatgggtgccggtgctctagctgctgctgctatgttgttataa

SEQ ID NO: 6670 - DNA, 279 bp, Artificial Sequence
  Description of Artificial Sequence: Synthetic polynucleotide
atgcaattctctactgtcgcttccgttgctttcgtcgctttggctaactttgttgccgctgaatccgctgccgccatttctcaaatcactgacggtcaaatccaagctactaccactgctaccaccgaagctaccaccactgctgccccatcttccaccgttgaaactgtttctccatccagcaccgaaactatctctcaacaaactgaaaatggtgctgctaaggccgctgtcggtatgggtgccggtgctttggctgctgctgctatgttgttatga

SEQ ID NO: 6671 - DNA, 720 bp, Saccharomyces cerevisiae
atgaaattctccactgctttgtctgtcgctttattcgccttggctaagatggtcattgccgattccgaagaattcggcctggtgagtatccgttccggctcggatttacaatacttgagtgtttacagtgataacggcactttgaaacttggcagcggtagtggctcatttgaggcaactattaccgatgacggtaaactgaaatttgacgacgataagtatgctgttgtcaatgaggatggctcattcaaagaaggttctgagagcgatgctgccactggtttttctattaaagatggccatctaaactacaagagctcttctggtttctacgctatcaaggacgggtcgtcttacattttctcttctaagcaatccgacgacgctaccggtgttgcgattagaccaactagtaagagcggatctgttgcagcagatttttctccaagcgactctagttcctcttcatctgcttctgcttcgtctgcttccgcatcatcttctacaaagcatagttcgagtatagaatctgtcgagacctctactactgtggaaacttcctctgctagctccccaactgcttcagttatctctcaaattactgatggacaaatccaagctccaaacacagtttacgaacaaacagaaaatgcaggtgccaaggctgccgtcggcatgggtgctggtgctctagcggtcgcagctgcttacttgttgtaa

SEQ ID NO: 6672 - DNA, 720 bp, Artificial Sequence
  Description of Artificial Sequence: Synthetic polynucleotide
atgaaattctccactgctttgtctgtcgctttattcgccttggctaagatggtcattgccgattccgaagaattcggcttggtgagtatccgttccggcagtgatttacaatacttgagtgtttacagtgataacggcactttgaaacttggcagcggtagtggctcttttgaggcaactattaccgatgacggtaaattgaaatttgacgacgataagtatgctgttgtcaatgaggatggcagtttcaaagaaggttctgagagcgatgctgccactggtttttctattaaagatggccatttgaactacaagagctcttctggtttctacgctatcaaggacgggagttcttacattttctcttctaagcaatccgacgacgctaccggtgttgcgattagaccaactagtaagagcggatctgttgcagcagatttttctccaagcgactctagttcctcttcttctgcttctgcttcttctgcttccgcatcttcttctacaaagcatagtagtagtatagaatctgtcgagacctctactactgtggaaacttcctctgctagctccccaactgcttctgttatctctcaaattactgatggacaaatccaagctccaaacacagtttacgaacaaacagaaaatgcaggtgccaaggctgccgtcggcatgggtgctggtgctttggcggtcgcagctgcttacttgttgtga

SEQ ID NO: 6673 - DNA, 837 bp, Saccharomyces cerevisiae
atgtctgaaagaaaagctattaacaagtactatccaccggattacaacccactggaagctgaaaagctatccaggaaaatggctaaaaaactgaaaaccatgaataagagccacgcatcgattagattaatgaccccatttagtatgaggtgtttggaatgtaacgaatatattcccaaaagcagaaaattcaatggtaagaaagagctactgaaggagaagtacctggactccattaagatatatagactaaccatttcatgtccacgttgtgccaattccattgcatttagaacagaccccggtaattcagattatgtaatggaagtggggggcgtaagaaactatgtccctcagaaaccaaatgatgacctgaacgctaaaacagctgtcgaaagcatagacgagacactgcaacgcttagtgagagagaaggaaatggagcagaacgagaagatgggtataaaggagcaagcagatgacaaaatggatttgctggaaaaaagactagccaaaattcaacaagagcaagaggatgatgaggaacttgaaaatttaaggaaaaaaaaccttgaaatgagccagagagctgaaatgataaaccgcagcaaacacgcacaacaagaaaaagcagtaacgactgatgatctggacaacctcgtagatcaggtatttgacaatcacaggcagcgtaccaataaacctggcaataacaacgatgagaagagaactccgttgtttaatcctacatccactaagggaaaaatacagaagaaaagctctgtgcgtacgaatccgttagggatagttataaaacgaggaaagtctctcaaatga

SEQ ID NO: 6674 - DNA, 837 bp, Artificial Sequence
  Description of Artificial Sequence: Synthetic polynucleotide
atgtctgaaagaaaagctattaacaagtactatccaccggattacaacccattggaagctgaaaagttatccaggaaaatggctaaaaaattgaaaaccatgaataagagccacgcatctattagattaatgaccccatttagtatgaggtgtttggaatgtaacgaatatattcccaaaagcagaaaattcaatggtaagaaagagttattgaaggagaagtacttggactccattaagatatatagattgaccattagttgtccacgttgtgccaattccattgcatttagaacagaccccggtaattctgattatgtaatggaagtggggggcgtaagaaactatgtccctcagaaaccaaatgatgacttgaacgctaaaacagctgtcgaaagcatagacgagacattacaacgcttagtgagagagaaggaaatggagcagaacgagaagatgggtataaaggagcaagcagatgacaaaatggatttgttggaaaaaagattggccaaaattcaacaagagcaagaggatgatgaggaacttgaaaatttaaggaaaaaaaaccttgaaatgagccagagagctgaaatgataaaccgcagcaaacacgcacaacaagaaaaagcagtaacgactgatgatttggacaacctcgtagatcaggtatttgacaatcacaggcagcgtaccaataaacctggcaataacaacgatgagaagagaactccgttgtttaatcctacatccactaagggaaaaatacagaagaaaagctctgtgcgtacgaatccgttagggatagttataaaaagaggaaagtctctcaaatga

SEQ ID NO: 6675 - DNA, 942 bp, Saccharomyces cerevisiae
atggctccgtatccatacaaagtgcagacgacagtacctgaacttcaatacgaaaactttgatggtgctaagttcgggtacatgttctggcctgttcaaaatggcaccaatgaggtcagaggtagagttttactgattcatgggtttggcgagtacacaaagattcaattccggcttatggaccacttatcactcaatggttacgagtcatttacgtttgatcaaaggggtgctggtgttacatcgccgggcagatcgaaaggtgtaactgatgagtaccatgtgtttaacgatcttgagcattttgtggagaagaacttgagtgaatgtaaggccaaaggcatacccttgttcatgtgggggcattcaatgggcggtggtatctgcctaaactatgcctgccaaggtaagcacaaaaacgaaataagcggatatatcgggtcaggcccattaataattttacatccgcatacaatgtataacaagccgacccaaattattgctccattattggcgaaatttttaccaagggtaaggatcgacactggtttagatcttaaaggaatcacatctgataaagcctatcgtgctttcctcggaagcgatcctatgtctgttccactatatgggtcgtttaggcaaatacacgactttatgcaacgtggtgccaagctctacaagaatgaaaacaattatattcagaagaacttcgctaaagacaaacccgttattattatgcatggacaagacgacacaatcaacgatcctaagggctctgaaaagttcattcaggactgtccttctgctgacaaagaattaaagctgtatccgggcgcaagacattcgattttctcactagagacagataaagtcttcaacacggtgttcaatgatatgaagcaatggttggacaaacacaccacgaccgaagctaaaccataa

SEQ ID NO: 6676 - DNA, 942 bp, Artificial Sequence
  Description of Artificial Sequence: Synthetic polynucleotide
atggctccgtatccatacaaagtgcagacgacagtacctgaacttcaatacgaaaactttgatggtgctaagttcgggtacatgttctggcctgttcaaaatggcaccaatgaggtcagaggtagagttttattgattcatgggtttggcgagtacacaaagattcaattccgtcttatggaccacttatctctcaatggttacgagtcttttacgtttgatcaaaggggtgctggtgttacatctccgggcagaagtaaaggtgtaactgatgagtaccatgtgtttaacgatcttgagcattttgtggagaagaacttgagtgaatgtaaggccaaaggcatacccttgttcatgtgggggcattctatgggcggtggtatctgcttgaactatgcctgccaaggtaagcacaaaaacgaaataagcggatatatcgggtctggcccattaataattttacatccgcatacaatgtataacaagccgacccaaattattgctccattattggcgaaatttttaccaagggtaaggatcgacactggtttagatcttaaaggaatcacatctgataaagcctatcgtgctttcctcggaagcgatcctatgtctgttccattgtatgggtcttttaggcaaatacacgactttatgcaacgtggtgccaagctctacaagaatgaaaacaattatattcagaagaacttcgctaaagacaaacccgttattattatgcatggacaagacgacacaatcaacgatcctaagggctctgaaaagttcattcaggactgtccttctgctgacaaagaattaaagctttatccgggcgcaagacattctattttctctttggagacagataaagtcttcaacacggtgttcaatgatatgaagcaatggttggacaaacacaccacgaccgaagctaaaccatga

SEQ ID NO: 6677 - DNA, 1020 bp, Saccharomyces cerevisiae
atgaggatggaaaaaacaacagacaaaccactttctgcaggagatatgaacgatgaatattctcggggtccaatcgacgatatagactgtttgaactttttcgaaagggctgttcaggacccatgttgtgaggcctgtgacacagaagatgcagatgaagaactgagagcaaagcttagtagcttcaattttcagcctgattcatctccgtgtaatgctaaatgtcaacagacactgaatccactgtgtaaaatagatgaagcactcccagcggagtcagaattagctccatcgagaaacggctcagtatctgaggcaaattctgatacaaattccatagcttctactgtccatgaccctgtcgactccaaatatggaggcatgcctagcttgagaaaggccaaaacaacgtcgtactttacttcatcttcatcgaacaataccacaatgaggaacccgctaaaaaaatgtaataccaatataaatggccttttagtgaacggaaggagctcaagctcctccagacagtctataccagagctctttagcggtgcgtgtactaaaaagaaaaacaacgtattactgaaaagtgaaacacccaattcagaattctctagtaactcacttcaacattgcaactcaaggtcgttttctctacccaggtcaagatcaaggtcttctgccattgccataccaacacatttgtatggcttggaaaagtacgtttcacctgggttggatactttgactgctgacccagaagaaagtattgaaaggttttcaaataatcggccccgtgaaatatcatcgtgttgtccgaacgatacaggggacacctcctcatcattatcacattcgaacacttcctcatcactaaatttccctttaggtacaaatacaaatcaattccaccaaccaaggcagccagtacaacagcaacagtcttcgaaaccaaactttggtgctgggaggaaaaaatctttcattgagatgtcactagcaagttcctttgcaggctaa

SEQ ID NO: 6678 - DNA, 1020 bp, Artificial Sequence
  Description of Artificial Sequence: Synthetic polynucleotide
atgaggatggaaaaaacaacagacaaaccactttctgcaggagatatgaacgatgaatattctcgtggtccaatcgacgatatagactgtttgaactttttcgaaagggctgttcaggacccatgttgtgaggcctgtgacacagaagatgcagatgaagaattgagagcaaagcttagtagcttcaattttcagcctgattcttctccgtgtaatgctaaatgtcaacagacattaaatccattatgtaaaatagatgaagcactcccagcggagagtgaattagctccatctagaaacggctctgtatctgaggcaaattctgatacaaattccatagcttctactgtccatgaccctgtcgactccaaatatggaggcatgcctagcttgagaaaggccaaaacaacgtcttactttacttcttcttcttccaacaataccacaatgaggaacccgttaaaaaaatgtaataccaatataaatggccttttagtgaacggaaggagcagcagctcctccagacagtctataccagagctctttagcggtgcgtgtactaaaaagaaaaacaacgtattattgaaaagtgaaacacccaattctgaattctctagtaactctcttcaacattgcaacagcaggtctttttctttacccaggagcagaagtaggtcttctgccattgccataccaacacatttgtatggcttggaaaagtacgtttctcctgggttggatactttgactgctgacccagaagaaagtattgaaaggttttctaataataggccccgtgaaatatcttcttgttgtccgaacgatacaggggacacctcctcttctttatctcattccaacacttcctcttctttgaatttccctttaggtacaaatacaaatcaattccaccaaccaaggcagccagtacaacagcaacagtcttctaaaccaaactttggtgctgggaggaaaaaatctttcattgagatgtctttggcaagttcctttgcaggctga

SEQ ID NO: 6679 - DNA, 3315 bp, Saccharomyces cerevisiae
atgagctccaacaatgaaccggcccaaagtcgaacatcatatttcaaattgaatgaatttttgtccaacgttaagcattacaagaatacctttaagggtgagattcagtggtgtaataacctgtccttaaacgactggaagacacactatctgcaaattaccagtacaggtgcactaacccactcaatcgatgagttaacagcagactctactaatattcagccaattatcaaacatctacagcaatgtagaatcgagattattaaggataagcattcctcttttaaggatattaatgcaaattgtaattttataatccaagtaaacacctcaggtaaagataataaagtttacctgcgagttaaaagttggagtgatttcaagaaattgctaacatgtctgatctggtggagctcaatgaagacaaatggtatatttaataagtttcaagtatcgcgacctctagaatttaaaagcaaaaaaatggcgaaaccagaaagtttgctggtttacaaattgaatgtttttgggcccatcgttaagaacatcgtccttccgccagcaacaaatattttagaaagccctgatataattaataatgatgacaacagcgtaggttggttttccgctatgggggtgcttaaatcaaacggcatgctagatcttcttttacagagtgacggctctctgatttactcattgaatattagccagcttttaagatcagagataagaattctggattcatctgttttacaaagtgaaaacagtttgtttttaggtgaattgccattactaaggagccagttgggcctcgaaaagtttcgcatagaaaatattgccagtgctgccaccaactctagtgatatttctcaagaaattattgtagagtttcccttaagaatagacctggaggattgttttatagcgttacaatcgttcgctaggtcggaatacttatctattactggctcagataaatcaaatgatatgaagatatcgaatagctttaaaatttccatactggaagctaattttcagtcaatcaatttaaatgacaagaataatacgccatggtcaatattcacagacataacggcctggggccatacatgggctagaacatccatggtttcaaactcctctaatccattttggagagaagagtttcagttcaatgaacttttaagacttactaattcttatctggaaatcaagcagttattccacgatctcaataataaaaaacggttacgattgataggcaaaataaaaatcacacaagaaataataaatgatacaagatataataaggaaacaagactacccatcatggacgttgataacaaaaattttcaaataggaacaatctgtattaaaatttcttcaaatttgaacttcattttaccgtcaaccaatttcgttaaattggaaaaacttttgatgaacgcaaacttgtccatggtttccaatctaatttacaaatcttcttcatcaatggagaatgataacaaattgacgcaaacatccataatttttctcgatatattccaatctttgtcaagaatagaagaatggttccacgtccttatagacaaagaattggctaaaattgatggaacggtttcaagaataaaccagaaaaatttagactcaaagcatgttttcaacagtttattccgtggtaactctatcttaacaaagtcgattgaacagtactttttcagagtgggtaatgaatatttgagtaaagcgcttagtgcaatactaaaagagatcattgagtcaaacaaatcatgtgaattggatcctgctagagtaaaagaaaaagatgaagtaaaaaagaggaaaataattgccgacaactacaaacgattgtattcttgggttacgaagatttggaaaaggctgtatgcaacgagtaatgacctgccgattgaaataagaaatgttttaaaaatctttaggcaaaaactagagataatttgtatcgatgacactttgcaaataattttgaatggtatatcaggattattgtttttaaggtttttttgtccagtcatattaaaccctaagctattcaaatatgtttctcaaaatttaaacgaaacagcaagaaggaatcttaccctaataagtaaagttttacttaatctgtccactttgacgcagtttgcaaacaaagagccctggctaatgaagatgaataactttatcgataaaagacacaatgacttattagattacattgataaaatgacgcaaaagaaactagattttaattcaaagatattgaacctaagttctactatttcgagacccaaattggccattgaacaaacgatgttggatgatttgcctcagattccttatctgcttgataagaatttgagagaaactgagtttgttaacttgattgttaatttcagtcaggaagatatgaccaagatggaaaaatacaatcacatggataatggtgggaagggagaattaatcgaagaggagggcctgttaagcggtagcagcctaaatttgtctgtggataaaaaagatttggattcaccaattgaggttaagccagaaattggagagttagaatttgagaaaataactgaaaacaacacggagatcttcggagatgatttaatgaacctactgaaaagcgatgatgtaggttccagaagcagagatttggataatggcgctaattcaggcatcaaatttaattctataatcccgaaagcagaagaggaaaagcatgcaatgaaagaattggagcaagagtcatgtttactctataataggattaatcatattagaaaacggttgtcaggttatgaatgtgcttccagcactttgtttgaagacaaaaaatactccatttcactctcacataaaattttttatgaagaaataaaggagggaaaagaaattgttcttaaactactaaataaaccaacaaatgaaaactcttccgcaagattgcagaaattcttcacaaaaggtgtctctagtaaatccaataacacagttggagatagttactgtaaatttttgactattgatgtaagtgatgagaatcccaagagtagcaacaaaacatcggtacatggaacatcatcggaaaatggagccaaggatgattacttgacgcttccaaactcgcaaggtaaaggtaacttggggaatagattttccccgacaaagttatctaggataatgaggaaacctcctaacgcagatgttcctaaagaacaaaattcccgtaagctgacaagatggttcaaaaagaaaaaagaaacagggggatcttaa

SEQ ID NO: 6680 - DNA, 3315 bp, Artificial Sequence
  Description of Artificial Sequence: Synthetic polynucleotide
atgagctccaacaatgaaccggcccaaagtaggacatcttatttcaaattgaatgaatttttgtccaacgttaagcattacaagaatacctttaagggtgagattcagtggtgtaataacctttccttaaacgactggaagacacactatttacaaattaccagtacaggtgcattgacccactccatcgatgagttaacagcagactctactaatattcagccaattatcaaacatttacagcaatgtagaatcgagattattaaggataagcattcctcttttaaggatattaatgcaaattgtaattttataatccaagtaaacacctctggtaaagataataaagtttacttaagagttaaaagttggagtgatttcaagaaattgttgacatgtttaatctggtggagcagtatgaagacaaatggtatatttaataagtttcaagtatctagacctttggaatttaaaagcaaaaaaatggcgaaaccagaaagtttgttggtttacaaattgaatgtttttgggcccatcgttaagaacatcgtccttccgccagcaacaaatattttagaaagccctgatataattaataatgatgacaacagcgtaggttggttttccgctatgggggtgcttaaaagtaacggcatgcttgatcttcttttacagagtgacggctctttgatttactctttgaatattagccagcttttaagaagtgagataagaattttagattcttctgttttacaaagtgaaaacagtttgtttttaggtgaattgccattattgaggagccagttgggcctcgaaaagtttcgcatagaaaatattgccagtgctgccaccaactctagtgatatttctcaagaaattattgtagagtttcccttaagaatagacttggaggattgttttatagcgttacaaagtttcgctaggtctgaatacttatctattactggcagtgataaatctaatgatatgaagatatccaatagctttaaaatttccatattggaagctaattttcagtctatcaatttaaatgacaagaataatacgccatggtccatattcacagacataacggcctggggccatacatgggctagaacatccatggtttctaactcctctaatccattttggagagaagagtttcagttcaatgaacttttaagacttactaattcttatttggaaatcaagcagttattccacgatctcaataataaaaaaagattaagattgataggcaaaataaaaatcacacaagaaataataaatgatacaagatataataaggaaacaagattacccatcatggacgttgataacaaaaattttcaaataggaacaatctgtattaaaatttcttccaatttgaacttcattttaccgtccaccaatttcgttaaattggaaaaacttttgatgaacgcaaacttgtccatggtttccaatttaatttacaaatcttcttcttctatggagaatgataacaaattgacgcaaacatccataatttttctcgatatattccaatctttgtccagaatagaagaatggttccacgtccttatagacaaagaattggctaaaattgatggaacggtttctagaataaaccagaaaaatttagactccaagcatgttttcaacagtttattccgtggtaactctatcttaacaaagtctattgaacagtactttttcagagtgggtaatgaatatttgagtaaagcgcttagtgcaatattgaaagagatcattgagagcaacaaaagttgtgaattggatcctgctagagtaaaagaaaaagatgaagtaaaaaagaggaaaataattgccgacaactacaaaagattgtattcttgggttacgaagatttggaaaaggttatatgcaacgagtaatgacttgccgattgaaataagaaatgttttaaaaatctttaggcaaaaattagagataatttgtatcgatgacactttgcaaataattttgaatggtatatctggattattgtttttaaggtttttttgtccagtcatattaaaccctaagcttttcaaatatgtttctcaaaatttaaacgaaacagcaagaaggaatcttaccttaataagtaaagttttacttaatttatccactttgacgcagtttgcaaacaaagagccctggttaatgaagatgaataactttatcgataaaagacacaatgacttattagattacattgataaaatgacgcaaaagaaattggattttaattctaagatattgaacttgagttctactatttctagacccaaattggccattgaacaaacgatgttggatgatttgcctcagattccttatttacttgataagaatttgagagaaactgagtttgttaacttgattgttaatttcagtcaggaagatatgaccaagatggaaaaatacaatcacatggataatggtgggaagggagaattaatcgaagaggagggcttattaagcggtagcagcttgaatttgtctgtggataaaaaagatttggattctccaattgaggttaagccagaaattggagagttagaatttgagaaaataactgaaaacaacacggagatcttcggagatgatttaatgaacttattgaaaagcgatgatgtaggttccagaagcagagatttggataatggcgctaatagtggcatcaaatttaattctataatcccgaaagcagaagaggaaaagcatgcaatgaaagaattggagcaagagagttgtttactctataataggattaatcatattagaaaaagattgtctggttatgaatgtgcttccagcactttgtttgaagacaaaaaatactccatttctctctctcataaaattttttatgaagaaataaaggagggaaaagaaattgttcttaaattattgaataaaccaacaaatgaaaactcttccgcaagattgcagaaattcttcacaaaaggtgtctctagtaaatccaataacacagttggagatagttactgtaaatttttgactattgatgtaagtgatgagaatcccaagagtagcaacaaaacatctgtacatggaacatcttctgaaaatggagccaaggatgattacttgacgcttccaaactctcaaggtaaaggtaacttggggaatagattttccccgacaaagttatctaggataatgaggaaacctcctaacgcagatgttcctaaagaacaaaattcccgtaagttaacaagatggttcaaaaagaaaaaagaaacagggggatcttga

SEQ ID NO: 6681 - DNA, 933 bp, Saccharomyces cerevisiae
atgacaaccagcatactcgatacttatcctcaaatatgctcccccaatgctttgccaggtactcccggcaatttgactaaggagcaagaggaagcgcttttgcaatttaggtcaatcttgttagaaaagaattacaaagaaaggctggatgattctacgctattgcgatttctacgggcaaggaaatttgatatcaatgctagcgttgagatgtttgtagaaactgaacgatggagggaagaatacggtgccaacactattatcgaggattatgaaaacaacaaggaagccgaagacaaagaaagaatcaaattggccaaaatgtaccctcagtattaccatcacgttgataaggatgggagaccattgtacttcgaagaactaggaggaattaacttaaagaaaatgtacaagatcactaccgaaaaacagatgctaagaaacttagtcaaggagtacgaattatttgccacgtaccgggtcccagcgtgttcgagaagagctggctaccttattgaaacttcgtgcactgtgctggacttgaagggtatctcactttctaatgcttatcatgtgctttcctatattaaagatgttgcagatatcagtcaaaattattatcctgaaagaatgggtaagttttatattatacacagtccatttggtttctcgacgatgttcaagatggttaaacccttcttggatccagtaaccgtgtcaaaaatctttattcttggctcttcttataaaaaggaattattaaaacaaattccaatcgagaacttgcctgttaaatatggtggtacatctgtcttgcacaaccctaatgataagttctactattccgatattggtccctggagagaccctagatacatcggaccagaaggtgaaattcccaacatttttggtaaatttactgttaccagctaa

SEQ ID NO: 6682 - DNA, 933 bp, Artificial Sequence
  Description of Artificial Sequence: Synthetic polynucleotide
atgacaaccagcatactcgatacttatcctcaaatatgctcccccaatgctttgccaggtactcccggcaatttgactaaggagcaagaggaagcgcttttgcaatttaggtctatcttgttagaaaagaattacaaagaaaggttagatgattctacgttattgagatttttaagagcaaggaaatttgatatcaatgctagcgttgagatgtttgtagaaactgaaagatggagggaagaatacggtgccaacactattatcgaggattatgaaaacaacaaggaagccgaagacaaagaaagaatcaaattggccaaaatgtaccctcagtattaccatcacgttgataaggatgggagaccattgtacttcgaagaattaggaggaattaacttaaagaaaatgtacaagatcactaccgaaaaacagatgttgagaaacttagtcaaggagtacgaattatttgccacgtacagagtcccagcgtgttccagaagagctggctaccttattgaaacttcttgcactgtgcttgacttgaagggtatctctctttctaatgcttatcatgtgctttcctatattaaagatgttgcagatatcagtcaaaattattatcctgaaagaatgggtaagttttatattatacacagtccatttggtttcagtacgatgttcaagatggttaaacccttcttggatccagtaaccgtgtctaaaatctttattcttggctcttcttataaaaaggaattattaaaacaaattccaatcgagaacttgcctgttaaatatggtggtacatctgtcttgcacaaccctaatgataagttctactattccgatattggtccctggagagaccctagatacatcggaccagaaggtgaaattcccaacatttttggtaaatttactgttaccagctga

SEQ ID NO: 6683 - DNA, 1332 bp, Saccharomyces cerevisiae
atgagtatggataacaatgatgaccatgaatctaaattgtcaatcttgatggacatgtttccagctatttccaaatccaaattacaagtacatttacttgaaaacaataatgatttggatttaacgataggcttgctgttaaaagaaaacgacgataagtctacagttgataatgaattacatcaactgtacgacatgtttcctcagcttgattgcagcgttataaaagatcagtttgtaataaatgagaagtccgtagaatcgactatttctgatcttctgaattatgaaaccctgcaaaaacttaaagacaatcaagcaaattctcctgatagcgtaaaaaggaacgaaaagaaaaataattgggaatcaacaaacgatcacatagagagtataataaagtttaccgacgctcccaaaaatattgcgcaggaatacttagccgaaaatggttttgatacagtaaaggcgatcatcaaaatcattttggattattacgacaaaagggattttaaaaaagatgtggatactttcaaagtaaaacggagtcctaatacgactgtgagaggtggtcgagttcaatcatcgacggggcttgcccacgttttgaaaaagggtaaagaatccgcaaatgttgctcaagagagtctcaaaaggccaaggagttataagcactccttggatagtccgcagatggttgagttaaatgaattagttgcagataatcgcgatctcaaagccataaaccatgaatttttgcaaaaatgcctgcaattttatgatggagatgttgtaaaggtgttgaacatatcgtccttattgatcgaagatgacaagaatattacgaaaacttggaactttgacgaaggttttaccttgacatccagagataattgtaagcaacatttacccaaattttcaacaccgcagatttcccgcagaaatgaggtaggaaatacttataaattgccccttcatgacaaagaaacccccgagggagctgtgccggttataaataacctgtttcaaacatacagattggatttccatggttttcttcccagtgaagcggtttcaacactgaaacttgcattaaataagtggtggtccaaagaggtagcagaacgagagttgaactcccacaacataaactcatatggctcaaaagtacagtttgtaagcccgttaatcgtggtaactggtagaggtatccacagcatcggcgggatctcaaaggttcgactgcaggttaaaagttttcttgaaaaaaatcactacatattttgggaagaatcttcctacttcagaattgagggtaagaagaagaaataa

SEQ ID NO: 6684 - DNA, 1332 bp, Artificial Sequence
  Description of Artificial Sequence: Synthetic polynucleotide
atgagtatggataacaatgatgaccatgaatctaaattgtccatcttgatggacatgtttccagctatttccaaatccaaattacaagtacatttacttgaaaacaataatgatttggatttaacgataggcttgttattaaaagaaaacgacgataagtctacagttgataatgaattacatcaattgtacgacatgtttcctcagcttgattgcagcgttataaaagatcagtttgtaataaatgagaagtccgtagaatctactatttctgatcttttgaattatgaaaccttacaaaaacttaaagacaatcaagcaaattctcctgatagcgtaaaaaggaacgaaaagaaaaataattgggaatctacaaacgatcacatagagagtataataaagtttaccgacgctcccaaaaatattgcgcaggaatacttagccgaaaatggttttgatacagtaaaggcgatcatcaaaatcattttggattattacgacaaaagggattttaaaaaagatgtggatactttcaaagtaaaaagaagtcctaatacgactgtgagaggtggtagagttcaatcttctacggggcttgcccacgttttgaaaaagggtaaagaatccgcaaatgttgctcaagagagtctcaaaaggccaaggagttataagcactccttggatagtccgcagatggttgagttaaatgaattagttgcagataatcgcgatctcaaagccataaaccatgaatttttgcaaaaatgcttacaattttatgatggagatgttgtaaaggtgttgaacatatcttccttattgatcgaagatgacaagaatattacgaaaacttggaactttgacgaaggttttaccttgacatccagagataattgtaagcaacatttacccaaattttctacaccgcagatttcccgcagaaatgaggtaggaaatacttataaattgccccttcatgacaaagaaacccccgagggagctgtgccggttataaataacttgtttcaaacatacagattggatttccatggttttcttcccagtgaagcggtttctacattaaaacttgcattaaataagtggtggtccaaagaggtagcagaaagagagttgaactcccacaacataaacagttatggctctaaagtacagtttgtaagcccgttaatcgtggtaactggtagaggtatccacagcatcggcgggatctccaaggttagattacaggttaaaagttttcttgaaaaaaatcactacatattttgggaagaatcttcctacttcagaattgagggtaagaagaagaaatga

SEQ ID NO: 6685 - DNA, 1650 bp, Saccharomyces cerevisiae
atggattatatgaaattggggcttaagtcccgtaaaactggtattgatgttaagcaagatatacccaaagatgaatacagcatggaaaatattgatgattttttcaaagatgatgaaactagtcttatcagtatgagaaggaaaagcagaagaaaatcatcgcttttcttaccatcaacgttaaatggcgatactaagaacgtattaccgccatttctacagtcatataaatctcaagatgatgaagttgtccaaagcccatctgggaaaggcgatggatcaagacgatcatctttgttaagccatcaatcaaacttcctgagtccagccaatgatttcgagcctattgaggaagaaccagaacaagaagaaaatgatatcagaggcaatgattttgccacaccaatcacacagaaattgagtaaacctacatataaaagaaagtactccactcggtatagccttgacacttcagaaagcccttctgtaaggttgacacctgatagaatcactaataagaatgtttattcagatgtacctgatttggttgctgatgaggatgacgatgatagagtaaacacttctttaaacacatctgataacgcattattagaagacgaattagaagatgacgggtttatacctgaaagtgaagaggacggtgattacattgaaagtgactcatctttggattcaggctcggattcagccagtgattcagatggagataacacctatcaagaagtagaagaggaggctgaggtgaacacaaatgacaatgaagatgattatataagacgacaagcgagtgatgtggttcgtacagattcaataattgatagaaacgggcttcggaaatctacaagagtcaaggtggcgcctttgcagtattggaggaacgaaaaaatagtatataagaggaagtccaataaacccgttcttgacatagacaaaattgtcacatatgatgaatctgaagacgaagaggagatattggcagcacaaagaaggaagaaacaaaaaaaaaaacctacaccaaccagaccttacaactacgtacctacggggagaccaagaggaaggccaaagaaggatccaaatgcaaaggaaaatttgattccagaagatcccaacgaggatattatagaaaggatagaatctggaggcatagaaaatggcgagtggctgaaacatggaatactggaagctaatgtgaaaattagcgacactaaggaggaaactaaggatgaaattattgcattcgcgcccaatttgtcgcaaactgaacaagtaaaagacacgaaggacgagaattttgcccttgagataatgttcgataagcataaagaatattttgctagcggcatattaaaactaccagctatttctggacaaaagaaattaagcaactcatttaggacatatattacgttccacgtgatacagggaatagtcgaagtaactgtatgtaagaacaagttcttgagcgttaaaggttccactttccaaataccggcattcaacgagtacgcgattgccaatagagggaatgatgaagccaaaatgttcttcgttcaagtgaccgtttcagaagacgctaacgatgacaacgacaaagaattagacagtacgtttgacacttttgggtaa

SEQ ID NO: 6686 - DNA, 1650 bp, Artificial Sequence
  Description of Artificial Sequence: Synthetic polynucleotide
atggattatatgaaattggggcttaagtcccgtaaaactggtattgatgttaagcaagatatacccaaagatgaatacagcatggaaaatattgatgattttttcaaagatgatgaaactagtcttatcagtatgagaaggaaaagcagaagaaaaagctctcttttcttaccatctacgttaaatggcgatactaagaacgtattaccgccatttttgcagagttataaatctcaagatgatgaagttgtccaaagcccatctgggaaaggcgatggaagcagaagatcttctttgttaagccatcaaagtaacttcttaagtccagccaatgatttcgagcctattgaggaagaaccagaacaagaagaaaatgatatcagaggcaatgattttgccacaccaatcacacagaaattgagtaaacctacatataaaagaaagtactccactagatatagccttgacacttctgaaagcccttctgtaaggttgacacctgatagaatcactaataagaatgtttattctgatgtacctgatttggttgctgatgaggatgacgatgatagagtaaacacttctttaaacacatctgataacgcattattagaagacgaattagaagatgacgggtttatacctgaaagtgaagaggacggtgattacattgaaagtgactcttctttggattctggcagtgattctgccagtgattctgatggagataacacctatcaagaagtagaagaggaggctgaggtgaacacaaatgacaatgaagatgattatataagaagacaagcgagtgatgtggttcgtacagattctataattgatagaaacgggcttagaaaatctacaagagtcaaggtggcgcctttgcagtattggaggaacgaaaaaatagtatataagaggaagtccaataaacccgttcttgacatagacaaaattgtcacatatgatgaatctgaagacgaagaggagatattggcagcacaaagaaggaagaaacaaaaaaaaaaacctacaccaaccagaccttacaactacgtacctacggggagaccaagaggaaggccaaagaaggatccaaatgcaaaggaaaatttgattccagaagatcccaacgaggatattatagaaaggatagaatctggaggcatagaaaatggcgagtggttgaaacatggaatattggaagctaatgtgaaaattagcgacactaaggaggaaactaaggatgaaattattgcattcgcgcccaatttgtctcaaactgaacaagtaaaagacacgaaggacgagaattttgcccttgagataatgttcgataagcataaagaatattttgctagcggcatattaaaattaccagctatttctggacaaaagaaattaagcaactcttttaggacatatattacgttccacgtgatacagggaatagtcgaagtaactgtatgtaagaacaagttcttgagcgttaaaggttccactttccaaataccggcattcaacgagtacgcgattgccaatagagggaatgatgaagccaaaatgttcttcgttcaagtgaccgtttctgaagacgctaacgatgacaacgacaaagaattagacagtacgtttgacacttttgggtga

SEQ ID NO: 6687 - DNA, 1716 bp, Saccharomyces cerevisiae
atgacggatgaaaaagtgaactcagatcagaatatgaacggtaagcagggagttaacttaatttcatccttgcctacaacacaagtgccggtttcaattttgaccaacaaggagagaagaaaaagtattcacgatgaatcaaatttcgaaagatctgatagtcatgaagatcaatcaaaatccaactctaataggaggaatatttacaaaaacgattatagcacaaatttgagggatttctcttttgccaatctgaagcaaaatagtgaaaggaacaaagatggccatgaaatacagatcaacaccagtatgccagctaatacaaatggccagcaaaaaaggttttcaccttcattaccttctgctgtttcatttacggtgcccgaggtggaaaggttgccgtatcatagatattcgatatccaataaacctggaaagcagcagcagcagcaggaacaactgcagcaaaatcaacaacaagaagagcagcaaaaggcacaactgcaggagcaaaatcaacgagcaaaacagcaagaagaggtgaagcaaattcaggagcaagtgcaaaaaaagcaaactgaaagacagcaactgatagacgaaaaggagaggatagcgaatgcaatatttaaggagaacactactaatgatggtactgatatcaggaaacattcggtatcgagtggtacgagcaatagcgaagatgaagtagattcaccttcgatggaaaaaaattctatcgttcatatgccaggtgattttatctacttcaatcccaagtcaaacgcttctaaacctatcactgcaaaggcggcgccattatcggctaataactccacacataaaaacaaggaagttatcactgcacccacagggcctcgtgtacccttcacagagttctttcagaaggaagacgacaagaaattccacattctcattggtgcgacgggctcagttgccacaataaaagtacctctaattattgataaacttttcaagatatatgggcctgagaaaatctctattcagttgattgtcacaaaacccgctgagcattttttgaaagggctcaaaatgtcaacacacgttaaaatttggagggaggaagacgcttgggtattcgacgctgtgaataagaatgatactagcttgagtctgaacttgatattgcaccatgaattaagaaaatgggctgatattttcctgattgcgcctttgtcagctaacacacttgctaaactggccaatggtatatgtaacaatttgctaacttctgtgatgagagattggtcaccactgaccccagtgttgattgcgcctgcaatgaatacattcatgtatatcaatcctatgacaaagaaacacctgacgagtttagtgcaagactatccgttcatccaagttttgaaaccggtggaaaaggtattaatatgcggagatattggtatgggtggtatgagagaatggacagatattgtagagatcgttaggaggagaatcaatgaaatacggaaagctagggacgaggaaactggtgataaagagcaagaacaagaagaacaagagggtgctgacaatgaggacgacgatgatgaggatgacgaagaggatgaggaggacgaggaggaggaagaagctctaaatgaaacagcatccgatgagagcaatgacgaggaagacgaagaggatgaggaagacgtgaaaaccgaagtttaa

SEQ ID NO: 6688 - DNA, 1716 bp, Artificial Sequence
  Description of Artificial Sequence: Synthetic polynucleotide
atgacggatgaaaaagtgaacagtgatcagaatatgaacggtaagcagggagttaacttaatttcttccttgcctacaacacaagtgccggtttctattttgaccaacaaggagagaagaaaaagtattcacgatgaaagtaatttcgaaagatctgatagtcatgaagatcaaagtaaatccaactctaataggaggaatatttacaaaaacgattatagcacaaatttgagggatttctcttttgccaatttgaagcaaaatagtgaaaggaacaaagatggccatgaaatacagatcaacaccagtatgccagctaatacaaatggccagcaaaaaaggttttctccttctttaccttctgctgtttcttttacggtgcccgaggtggaaaggttgccgtatcatagatattctatatccaataaacctggaaagcagcagcagcagcaggaacaattgcagcaaaatcaacaacaagaagagcagcaaaaggcacaattgcaggagcaaaatcaaagagcaaaacagcaagaagaggtgaagcaaattcaggagcaagtgcaaaaaaagcaaactgaaagacagcaattgatagacgaaaaggagaggatagcgaatgcaatatttaaggagaacactactaatgatggtactgatatcaggaaacattctgtatctagtggtacgagcaatagcgaagatgaagtagattctccttctatggaaaaaaattctatcgttcatatgccaggtgattttatctacttcaatcccaagtctaacgcttctaaacctatcactgcaaaggcggcgccattatctgctaataactccacacataaaaacaaggaagttatcactgcacccacagggcctcgtgtacccttcacagagttctttcagaaggaagacgacaagaaattccacattctcattggtgcgacgggctctgttgccacaataaaagtacctttgattattgataaacttttcaagatatatgggcctgagaaaatctctattcagttgattgtcacaaaacccgctgagcattttttgaaagggctcaaaatgtctacacacgttaaaatttggagggaggaagacgcttgggtattcgacgctgtgaataagaatgatactagcttgagtttgaacttgatattgcaccatgaattaagaaaatgggctgatattttcttgattgcgcctttgtctgctaacacacttgctaaattggccaatggtatatgtaacaatttgttgacttctgtgatgagagattggtctccattgaccccagtgttgattgcgcctgcaatgaatacattcatgtatatcaatcctatgacaaagaaacacttaacgagtttagtgcaagactatccgttcatccaagttttgaaaccggtggaaaaggtattaatatgcggagatattggtatgggtggtatgagagaatggacagatattgtagagatcgttaggaggagaatcaatgaaataagaaaagctagggacgaggaaactggtgataaagagcaagaacaagaagaacaagagggtgctgacaatgaggacgacgatgatgaggatgacgaagaggatgaggaggacgaggaggaggaagaagctttgaatgaaacagcatccgatgagagcaatgacgaggaagacgaagaggatgaggaagacgtgaaaaccgaagtttga

SEQ ID NO: 6689 - DNA, 675 bp, Saccharomyces cerevisiae
atgatgtcttcagaccaacaggggaaatgccccgtagatgaggaaaccaaaaagttatggctacgagaacatggcaacgaagcgcatcctggtgctactgccccaggcaatcaactagagtgctctgcaaacccacaagataacgataaaacgcctgaatatcacaccacggtggatctctctcagtccagagaggtttccaccataccaaggacgaattctgacagaaactggatatacccgtcggagaaacaattttacgaggcaatgatgaaaaaaaattgggatccgaactcagatgacatgaaggtggttgtgcctttacataactccatcaatgagcgggtttggaactacattaaaagctgggaagacaagcagggtggtgaagcgtgtggcggtatcaaattaacaaattttaaaggtgattccaaaaaactgacaccaagggcctggttcaggtcccgtatcttgcacctggccaaaccttttgatagacatgattggcagatagatagatgcggtaaaaccgtcgactacgtaatcgatttctattccaccgatctgaacgatgcaaactcgcagcaacaaccacttatttatctcgatgttagaccaaaattaaacagttttgagggctttagattacggttctggaaatctttaggcttttga

SEQ ID NO: 6690 - DNA, 675 bp, Artificial Sequence
  Description of Artificial Sequence: Synthetic polynucleotide
atgatgtcttctgaccaacaggggaaatgccccgtagatgaggaaaccaaaaagttatggttaagagaacatggcaacgaagcgcatcctggtgctactgccccaggcaatcaattggagtgctctgcaaacccacaagataacgataaaacgcctgaatatcacaccacggtggatctctctcagtccagagaggtttccaccataccaaggacgaattctgacagaaactggatatacccgagtgagaaacaattttacgaggcaatgatgaaaaaaaattgggatccgaacagtgatgacatgaaggtggttgtgcctttacataactccatcaatgagagagtttggaactacattaaaagctgggaagacaagcagggtggtgaagcgtgtggcggtatcaaattaacaaattttaaaggtgattccaaaaaattaacaccaagggcctggttcaggtcccgtatcttgcacttggccaaaccttttgatagacatgattggcagatagatagatgcggtaaaaccgtcgactacgtaatcgatttctattccaccgatttgaacgatgcaaactctcagcaacaaccacttatttatctcgatgttagaccaaaattaaacagttttgagggctttagattaagattctggaaatctttaggcttttga

SEQ ID NO: 6691 - DNA, 384 bp, Saccharomyces cerevisiae
atgtcactacaaagcaacagtgtaaaaccaacagaaattcctctctcagagatcagacgccccctagcgcctgtgttggatcctcaaaagatcgacgcaatggtggccacaatgaagggcattcccaccgctagcaagacatgctctctagaacaggctgaggcggctgcctcagccggggaactgccgcccgtggacgtgctgggcgtgcgagtcaagggacagacgctatattatgccttcggcggctgccaccgtctacaggcatacgaccgccgggctcgcgaaacgcagaacgccgccttccccgtgcgctgcagggtgctaccggccactccccgccaaatccgcatgtacctgggcagcagtctcgacatcgaataa

SEQ ID NO: 6692 - DNA, 384 bp, Artificial Sequence
  Description of Artificial Sequence: Synthetic polynucleotide
atgtctttacaaagcaacagtgtaaaaccaacagaaattcctctcagtgagatcagacgccccttagcgcctgtgttggatcctcaaaagatcgacgcaatggtggccacaatgaagggcattcccaccgctagcaagacatgctctttggaacaggctgaggcggctgcctctgccggggaattaccgcccgtggacgtgttaggcgtgagagtcaagggacagacgctttattatgccttcggcggctgccaccgtttgcaggcatacgaccgccgtgctcgcgaaacgcagaacgccgccttccccgtgcgctgcagggtgttgccggccactccccgccaaatccgcatgtacttgggcagcagtctcgacatcgaatga

SEQ ID NO: 6693 - DNA, 1005 bp, Saccharomyces cerevisiae
atgttgtcaagagtagctaaacgtgcgttttcctctacagttgccaacccttataaagtgactgttttgggtgcaggcggtggtattggacaaccattgtctttgcttctaaagcttaaccataaagtcacggacttaagactgtacgacctaaagggcgcaaaaggtgttgccaccgatttgtctcatattccaacaaactccgtggtcaaggggtttactccagaagagccagacggattgaacaacgctttaaaggacacagacatggttttaattcctgctggtgtgcccagaaagcctggtatgacacgtgatgacttgttcgccatcaacgcaagcatcgttcgcgatttggcagcagcaaccgccgaatccgctcccaatgctgccattctggtcatttccaacccagtcaattctaccgttccaattgtcgcccaagtcttgaaaaacaagggtgtttacaacccaaagaaattgttcggtgtgactaccttggactctattagagccgccagattcatctcagaagtcgagaacaccgatccaactcaggaaagggttaacgtcatcggtggacattctggtattaccatcatcccattgatttcgcaaacaaaccataagttgatgtctgatgacaagagacacgaattgattcacagaatacagtttggtggtgacgaagtcgtcaaagcaaagaatggtgctggctctgctacgttgtcaatggcccatgctggtgctaaattcgctaacgctgttttgtccggtttcaaaggcgaaagagacgtcatcgagccttccttcgtggactctcccttgttcaaatccgaaggcatcgaattctttgcatctccggtcactttgggcccagatggtattgaaaagatccatccaataggtgagttatcttcagaagaagaagaaatgctacaaaaatgtaaagaaaccttgaagaagaatatcgaaaagggtgtcaactttgttgctagtaaatag

SEQ ID NO: 6694 - DNA, 1005 bp, Artificial Sequence
  Description of Artificial Sequence: Synthetic polynucleotide
atgttgtccagagtagctaaacgtgcgttttcctctacagttgccaacccttataaagtgactgttttgggtgcaggcggtggtattggacaaccattgtctttgcttttgaagcttaaccataaagtcacggacttaagattatacgacttgaagggcgcaaaaggtgttgccaccgatttgtctcatattccaacaaactccgtggtcaaggggtttactccagaagagccagacggattgaacaacgctttaaaggacacagacatggttttaattcctgctggtgtgcccagaaagcctggtatgacacgtgatgacttgttcgccatcaacgcaagcatcgttcgcgatttggcagcagcaaccgccgaatccgctcccaatgctgccattttagtcatttccaacccagtcaattctaccgttccaattgtcgcccaagtcttgaaaaacaagggtgtttacaacccaaagaaattgttcggtgtgactaccttggactctattagagccgccagattcatcagtgaagtcgagaacaccgatccaactcaggaaagggttaacgtcatcggtggacattctggtattaccatcatcccattgatttctcaaacaaaccataagttgatgtctgatgacaagagacacgaattgattcacagaatacagtttggtggtgacgaagtcgtcaaagcaaagaatggtgctggctctgctacgttgtccatggcccatgctggtgctaaattcgctaacgctgttttgtccggtttcaaaggcgaaagagacgtcatcgagccttccttcgtggactctcccttgttcaaatccgaaggcatcgaattctttgcatctccggtcactttgggcccagatggtattgaaaagatccatccaataggtgagttatcttctgaagaagaagaaatgttacaaaaatgtaaagaaaccttgaagaagaatatcgaaaagggtgtcaactttgttgctagtaaatga

SEQ ID NO: 6695 - DNA, 351 bp, Saccharomyces cerevisiae
atgatcgaaactgccatttatggtaagacagtggatgaccaatctcgatgtgtccactggcatcttccaaaggatgtaattgccatcaggtttaaatgttgtgataagtactatgcgtgctttgaatgccaccaagagttaagttctcacccgctagaaaaatatgatctccttgacgatgcaaataaacacttgattatttgcggagtttgccgtcatgaaatgacgtttgcagagtattacgactacaattcaaaccttatttgtcccaattgcagatccccctttaatccaggctgtaaattgcactaccatttgtatttccagaaccctccccccgctatgtgttga

SEQ ID NO: 6696 - DNA, 351 bp, Artificial Sequence
  Description of Artificial Sequence: Synthetic polynucleotide
atgatcgaaactgccatttatggtaagacagtggatgaccaatctcgttgtgtccactggcatcttccaaaggatgtaattgccatcaggtttaaatgttgtgataagtactatgcgtgctttgaatgccaccaagagttaagttctcacccgttggaaaaatatgatctccttgacgatgcaaataaacacttgattatttgcggagtttgccgtcatgaaatgacgtttgcagagtattacgactacaatagcaaccttatttgtcccaattgcagatccccctttaatccaggctgtaaattgcactaccatttgtatttccagaaccctccccccgctatgtgttga

SEQ ID NO: 6697 - DNA, 1305 bp, Saccharomyces cerevisiae
atgagtaattcacttgaggagcgccttcgtgctaattcaagcgccttcgatggtttattggctttaattcctgcaaaatactattatgatgaaaaaagtcaagagcaatggaaggccaagaagaaaaccaaagaacagagtaaaaatgataaactgaaaaaattagacccggagcaacgtgatgatgaaacatctagtacattagaagtaatgaagaagaaggagaaagacgcaaagccggtggtcctacctggtgaaaaattcaagcacatgaaaatgcaaaagcaaaaggaagcaacatcaaaagtggaaggagactccgacctgaacgtagaagtaaacgatcctatgataatagcaccagacgaagatgaagaagaggaagaggatattaaggtgatctttgatgatgagggaaatgaaataccattagaatctaaaaaagatactacagagcccgatagatctgtcgaaaagaagtctattacagaggaagagaaactacaaagaaagaaaaacttggaagcactacgttccaagttacaagcgaaaatttcagatatgaagagtaaaaggaaagcacccggttctagagaggctattcttgctcaaaggaaacgcaaggaagagttgaaaaaaagaaagcgtctagaaagtgaacaggaacaggatcaggatgaaattgcgtctgattccgatatggaagacatcgatagtgatttagaaaacaattcgaaaaaaagattcaaaaaaggcaagaaggactcagaaattaacgcagatggtgtaatgtttcaaaatatcatattcgatgatggtgcaagggccacttcagatttacaaaggttaagaaaagctggtagaacgaagggtccggctaagaatgatgtaaaatcacacttaaagttattagaagccaagaagaataagatggaggcgaaagacgaactagaacaaatcaagcagaaggaaaaggaaaaatggcaaaaggctatgttacaagcagaaggaattaagattagggatgacgaaaaactacttcgcaaagctataaagagaaaggaagcacaaaagagaaagtctgcgattgaatggagcgaacgtaagagggttgtggaagacacgatatctgaaagacaaaagagaagagaagagaatctgaggattaggaaagacaacaagggtaaaaagagaaataagcaagaaaagatgaaaagaaagtatgtcggtagtgccgtaccaaagaaaagagccggatttgagggtagattaaaaacaggtaaaaagaagggaggacctaaataa

SEQ ID NO: 6698 - DNA, 1305 bp, Artificial Sequence
  Description of Artificial Sequence: Synthetic polynucleotide
atgagtaattctcttgaggagcgccttcgtgctaatagtagcgccttcgatggtttattggctttaattcctgcaaaatactattatgatgaaaaaagtcaagagcaatggaaggccaagaagaaaaccaaagaacagagtaaaaatgataaattgaaaaaattagacccggagcaacgtgatgatgaaacatctagtacattagaagtaatgaagaagaaggagaaagacgcaaagccggtggtcttacctggtgaaaaattcaagcacatgaaaatgcaaaagcaaaaggaagcaacaagtaaagtggaaggagactccgacttgaacgtagaagtaaacgatcctatgataatagcaccagacgaagatgaagaagaggaagaggatattaaggtgatctttgatgatgagggaaatgaaataccattagaatctaaaaaagatactacagagcccgatagatctgtcgaaaagaagtctattacagaggaagagaaattacaaagaaagaaaaacttggaagcattgcgttccaagttacaagcgaaaatttctgatatgaagagtaaaaggaaagcacccggttctagagaggctattcttgctcaaaggaaacgcaaggaagagttgaaaaaaagaaagcgtttagaaagtgaacaggaacaggatcaggatgaaattgcgtctgattccgatatggaagacatcgatagtgatttagaaaacaattctaaaaaaagattcaaaaaaggcaagaaggactctgaaattaacgcagatggtgtaatgtttcaaaatatcatattcgatgatggtgcaagggccacttctgatttacaaaggttaagaaaagctggtagaacgaagggtccggctaagaatgatgtaaaatctcacttaaagttattagaagccaagaagaataagatggaggcgaaagacgaattggaacaaatcaagcagaaggaaaaggaaaaatggcaaaaggctatgttacaagcagaaggaattaagattagggatgacgaaaaattacttcgcaaagctataaagagaaaggaagcacaaaagagaaagtctgcgattgaatggagcgaacgtaagagggttgtggaagacacgatatctgaaagacaaaagagaagagaagagaatttaaggattaggaaagacaacaagggtaaaaagagaaataagcaagaaaagatgaaaagaaagtatgtcggtagtgccgtaccaaagaaaagagccggatttgagggtagattaaaaacaggtaaaaagaagggaggacctaaatga

SEQ ID NO: 6699 - DNA, 1239 bp, Saccharomyces cerevisiae
atgtcccaaggtactttatacattaatagatctccaagaaactacgcttctgaagctttgatttcttactttaaactagatgtcaagatcgttgatctagaacaatctagcgagtttgcttctttgttcccattgaagcaagcccctgcatttttgggtccaaagggcttaaagctaactgaagctttggctatccaattttatttggctaatcaagttgccgatgaaaaagaaagagctcgcttattaggttccgacgttatcgaaaagtctcaaatccttagatgggcatctctagctaattccgatgtcatgagcaacattgctcgtccattcctttctttcaaaggtttgattccatacaacaagaaagacgttgatgcttgttttgttaaaatcgacaacctagctgctgtcttcgatgctagattgagagactacacctttgttgctaccgaaaacatttctctaggtgaccttcatgccgctggttcttgggcttttggtttggccactattttgggccctgaatggagagctaagcatcctcatttgatgagatggttcaacactgttgctgcttctccaatcgtgaagactccatttgctgaagtcaaattggctgaaaaggctctaacctacactccaccaaagaagcaaaaggctgaaaagccaaaggccgaaaagtcaaaggctgaaaagaagaaggacgaagctaagccagcagatgatgctgctccagctaaaaagccaaagcacccattggaagctttaggaaagtccacatttgtcttggatgactggaagagaaagtactccaacgacgacaccagaccagttgctttgccatggttctgggaacactacaaccctgaagaatactccatctggaaggttggttacaaatacaacgacgaacttaccttgactttcatgtccaacaacttggtcggtggttttttcaacagattgtccgcttctactaagtacatgttcggttgtttagttgtctatggtgaaaacaacaataatggtattgttggtgccgttatggtcagaggccaagatttcgctccagcctttgatgtcgctccagactgggaatcttacgaatacaccaagttggacccaaccaaggaagaagacaaagaatttgtcaacaacatgtgggcttgggataagcctgttgttgtcaatggcgaagataaggaaattgttgacggtaaggttttgaaataa

SEQ ID NO: 6700 - DNA, 1239 bp, Artificial Sequence
  Description of Artificial Sequence: Synthetic polynucleotide
atgtcccaaggtactttatacattaatagatctccaagaaactacgcttctgaagctttgatttcttactttaaattggatgtcaagatcgttgatttggaacaatctagcgagtttgcttctttgttcccattgaagcaagcccctgcatttttgggtccaaagggcttaaagttgactgaagctttggctatccaattttatttggctaatcaagttgccgatgaaaaagaaagagctcgcttattaggttccgacgttatcgaaaagtctcaaatccttagatgggcatctttggctaattccgatgtcatgagcaacattgctcgtccattcctttctttcaaaggtttgattccatacaacaagaaagacgttgatgcttgttttgttaaaatcgacaacttggctgctgtcttcgatgctagattgagagactacacctttgttgctaccgaaaacatttctttgggtgaccttcatgccgctggttcttgggcttttggtttggccactattttgggccctgaatggagagctaagcatcctcatttgatgagatggttcaacactgttgctgcttctccaatcgtgaagactccatttgctgaagtcaaattggctgaaaaggctttgacctacactccaccaaagaagcaaaaggctgaaaagccaaaggccgaaaagtccaaggctgaaaagaagaaggacgaagctaagccagcagatgatgctgctccagctaaaaagccaaagcacccattggaagctttaggaaagtccacatttgtcttggatgactggaagagaaagtactccaacgacgacaccagaccagttgctttgccatggttctgggaacactacaaccctgaagaatactccatctggaaggttggttacaaatacaacgacgaacttaccttgactttcatgtccaacaacttggtcggtggttttttcaacagattgtccgcttctactaagtacatgttcggttgtttagttgtctatggtgaaaacaacaataatggtattgttggtgccgttatggtcagaggccaagatttcgctccagcctttgatgtcgctccagactgggaatcttacgaatacaccaagttggacccaaccaaggaagaagacaaagaatttgtcaacaacatgtgggcttgggataagcctgttgttgtcaatggcgaagataaggaaattgttgacggtaaggttttgaaatga

SEQ ID NO: 6701 - DNA, 1179 bp, Saccharomyces cerevisiae
atggctactgcgttatatactgcaaacgatttcatattaatctcgttgcctcaaaatgctcaacctgttaccgcccctggctccaaaactgattcatggttcaatgagaccttaatcgggggtagggcatttgtttctgatttcaaaattcccgaattcaaaattggctctttagacacattgatagttgaatcggaagaactgtctaaagtagataaccaaattggggcttctattggcaaaatcattgaaattcttcaaggcctcaacgagaccagcaccaatgcttacaggactttacctatcaataatatgccagttcctgaatacttggaaaattttcaatggcaaaccagaaagttcaagttagataagtctatcaaagatttgataacattgatttctaatgaatcttctcaattagacgccgacgtcagagctacttatgcaaattacaacagcgctaaaactaacttggctgctgctgagagaaagaagacgggtgacctttctgtcagatccttgcatgatattgtcaagcccgaagacttcgttcttaattctgaacatttaactactgttctagtagcagttcccaaaagtttaaaatccgatttcgaaaaatcgtacgaaactttatccaagaacgttgtaccagcatctgccagcgtgattgcagaggatgctgagtatgttttgttcaatgttcatttgttcaagaaaaacgttcaagaattcacaacagctgctagagagaagaaattcattcctcgtgaatttaactactcggaggaattaattgaccagttgaaaaaagagcatgactctgctgccagtttagaacaatctttgcgcgtccagttggtaagattggccaagacagcttatgtcgatgtttttataaattggttccacatcaaggccttgagagtttacgtggaatctgttttgcgttacgggttgccacctcactttaacatcaagattatagctgtcccaccaaagaatctctctaaatgcaagtctgaattaattgatgcttttggatttcttggtggcaatgccttcatgaaggataaaaaagggaaaattaacaagcaagatacttctcttcaccaatatgcttctcttgtcgacacagagtatgaaccatttgtgatgtatataatcaatttataa

SEQ ID NO: 6702 - DNA, 1179 bp, Artificial Sequence
  Description of Artificial Sequence: Synthetic polynucleotide
atggctactgcgttatatactgcaaacgatttcatattaatctctttgcctcaaaatgctcaacctgttaccgcccctggctccaaaactgattcttggttcaatgagaccttaatcgggggtagggcatttgtttctgatttcaaaattcccgaattcaaaattggctctttagacacattgatagttgaaagtgaagaattatctaaagtagataaccaaattggggcttctattggcaaaatcattgaaattcttcaaggcctcaacgagaccagcaccaatgcttacaggactttacctatcaataatatgccagttcctgaatacttggaaaattttcaatggcaaaccagaaagttcaagttagataagtctatcaaagatttgataacattgatttctaatgaatcttctcaattagacgccgacgtcagagctacttatgcaaattacaacagcgctaaaactaacttggctgctgctgagagaaagaagacgggtgacctttctgtcagatccttgcatgatattgtcaagcccgaagacttcgttcttaattctgaacatttaactactgttttggtagcagttcccaaaagtttaaaatccgatttcgaaaaatcttacgaaactttatccaagaacgttgtaccagcatctgccagcgtgattgcagaggatgctgagtatgttttgttcaatgttcatttgttcaagaaaaacgttcaagaattcacaacagctgctagagagaagaaattcattcctcgtgaatttaactactctgaggaattaattgaccagttgaaaaaagagcatgactctgctgccagtttagaacaatctttgcgcgtccagttggtaagattggccaagacagcttatgtcgatgtttttataaattggttccacatcaaggccttgagagtttacgtggaatctgttttgcgttacgggttgccacctcactttaacatcaagattatagctgtcccaccaaagaatctctctaaatgcaagtctgaattaattgatgcttttggatttcttggtggcaatgccttcatgaaggataaaaaagggaaaattaacaagcaagatacttctcttcaccaatatgcttctcttgtcgacacagagtatgaaccatttgtgatgtatataatcaatttatga

SEQ ID NO: 6703 - DNA, 1971 bp, Saccharomyces cerevisiae
atgcactggaatataatttcgaaagagcaaagtagctcttctgtatcgttaccaactctagacagcagtgaaccctgtcacatcgaagttatcctcagggcgatacccgaaaaaggattacaaaacaatgagtcgaccttcaaaatagacccatatgaaaatactgtgctatttcgcacaaacaatccgttacatgagacaaccaaggagacccattcaacatttcaattcgataaggtattcgatgctaacgccactcaagaagatgttcagaaatttctggtgcatccaataataaatgatgttttgaatggttataacggtactgtaataacatatggaccaagtttcagcggaaagtcctattcccttattggatcaaaagaaagcgaaggaattctaccgaacatatgcaagaccttgtttgatacgctagaaaaaaatgaagaaacaaagggagatagttttagcgtaagtgttttggcattcgaaatatatatggagaaaacgtatgacttattggtacctttacctgaaagaaaaccattaaagcttcaccgttcttcaagcaaaatggacttagaaatcaaagatatttgtccggcacatgtcggatcgtatgaagacttaagaagctacattcaggcagtccaaaacgtcggcaataggatggcatgtggcgacaagacagagagatcaagatcacacctagtttttcaattacacgtagaacaaaggaatagaaaagatgatatattaaaaaatagttctttatatctggttgatttacacggggcagagaagttcgataaaagaactgaaagtacgctatcacaagatgcgttaaaaaaattaaaccaatctattgaggcgttgaaaaacactgtgcggtccttgtcaatgaaagagcgtgattcagcctacagcgcaaaaggatcacatagttctgcttaccgtgaatcgcaattaactgaagtgttaaaagattcccttgggggaaataggaaaacaaaggtgatattgacatgtttcttaagtaatgttccaactaccctatcaacactagaatttggtgacagtattagacagatcaataacaaggttacagataacaccacaggtttaaatctgaaaaaaaaaatggatctatttattcaggacatgaaaattaaggatgataattatgttgcccaaattaatatactaaaggctgaaatagactctttaaaaagccttcacaataaatctcttcccgaagacgacgagaaaaaaatgttagaaaatacaaagaaagaaaatatcaaactaaagcttcaattagacagtattacccaattattgagtagttctaccaatgaagatcctaacaatcgtattgacgaagaagtttctgaaatattaacgaaaagatgcgaacagattgctcagcttgagttatcttttgatcgacagatgaattccaattctaagttgcagcaagagttagaatacaaaaagtcaaaagaggaagccttagagtctatgaacgttaggctactagaacaaattcagcttcaggaaagagagattcaagagcttttaactactaacgccatcttaaagggtgaactagaaactcacactaaacttactgaaacacgcagtgaaaggataaaatctttggaaagttctgtcaaagagctttctcttaataaatctgcaatcccatctcctagaagagggtctatgagctcgtcatcaggaaatactatgttgcatatcgaggagggttctgaaatatcaaatagcccttggtcagccaatacttcctcaaaacctttagtatggggcgcgagaaaggtttcttctagcagtatagcaaccactggatcacaggagtcttttgtggcaagaccgttcaagaagggattaaacctccattcgataaaagtcacttcgagtactccaaaaagtccctcttctggaagctga

SEQ ID NO: 6704 - DNA, 1971 bp, Artificial Sequence
  Description of Artificial Sequence: Synthetic polynucleotide
atgcactggaatataatttccaaagagcaaagtagctcttctgtatctttaccaactttggacagcagtgaaccctgtcacatcgaagttatcctcagggcgatacccgaaaaaggattacaaaacaatgagtctaccttcaaaatagacccatatgaaaatactgtgctttttcgcacaaacaatccgttacatgagacaaccaaggagacccattctacatttcaattcgataaggtattcgatgctaacgccactcaagaagatgttcagaaatttttagtgcatccaataataaatgatgttttgaatggttataacggtactgtaataacatatggaccaagtttcagcggaaagtcctattcccttattggatctaaagaaagcgaaggaattttaccgaacatatgcaagaccttgtttgatacgttagaaaaaaatgaagaaacaaagggagatagttttagcgtaagtgttttggcattcgaaatatatatggagaaaacgtatgacttattggtacctttacctgaaagaaaaccattaaagcttcaccgttcttctagcaaaatggacttagaaatcaaagatatttgtccggcacatgtcggatcctatgaagacttaagaagctacattcaggcagtccaaaacgtcggcaataggatggcatgtggcgacaagacagagagatctagaagtcacttggtttttcaattacacgtagaacaaaggaatagaaaagatgatatattaaaaaatagttctttatatttggttgatttacacggggcagagaagttcgataaaagaactgaaagtacgttatctcaagatgcgttaaaaaaattaaaccaatctattgaggcgttgaaaaacactgtgagatccttgtccatgaaagagcgtgattctgcctacagcgcaaaaggatctcatagttctgcttaccgtgaatctcaattaactgaagtgttaaaagattcccttgggggaaataggaaaacaaaggtgatattgacatgtttcttaagtaatgttccaactaccttatctacattagaatttggtgacagtattagacagatcaataacaaggttacagataacaccacaggtttaaatttgaaaaaaaaaatggatttatttattcaggacatgaaaattaaggatgataattatgttgcccaaattaatatattgaaggctgaaatagactctttaaaaagccttcacaataaatctcttcccgaagacgacgagaaaaaaatgttagaaaatacaaagaaagaaaatatcaaattgaagcttcaattagacagtattacccaattattgagtagttctaccaatgaagatcctaacaatcgtattgacgaagaagtttctgaaatattaacgaaaagatgcgaacagattgctcagcttgagttatcttttgatagacagatgaattccaattctaagttgcagcaagagttagaatacaaaaagagtaaagaggaagccttagagtctatgaacgttaggcttttagaacaaattcagcttcaggaaagagagattcaagagcttttaactactaacgccatcttaaagggtgaattggaaactcacactaaacttactgaaacacgcagtgaaaggataaaatctttggaaagttctgtcaaagagctttctcttaataaatctgcaatcccatctcctagaagagggtctatgagctcttcttctggaaatactatgttgcatatcgaggagggttctgaaatatccaatagcccttggtctgccaatacttcctctaaacctttagtatggggcgcgagaaaggtttcttctagcagtatagcaaccactggatctcaggagtcttttgtggcaagaccgttcaagaagggattaaacctccattccataaaagtcacttctagtactccaaaaagtccctcttctggaagctga

SEQ ID NO: 6705 - DNA, 2208 bp, Saccharomyces cerevisiae
atggcagcaaatagcaatagtagagttgcatcaaaccatacttctaaaaaacaaaaggttaggaggaatatacatccattcacgaataacactcggattaaaagagctagtaaaatcgtaaagtttaatgattcaggcgagggcgaccatgtttcagaccaacgttcgaacaaggaaaatgtccttacttataaatctttgaaaagtcgggcaagcgatttactcaaaatgagagaaacacttcccgtttaccaacacaagcgagaaataatgtcatatattgaaagcaatcccgttaccgtccttattggtgaaacaggttctggtaaatcaacacaaattccgcaattcgtattagaaaaattatatgatacgaagaagcatgggtcgattgctgtaactcaaccccgtcgtgttgcggccatcaatttggctacacgtgttgctcaagaacatggttgcaaactgggtgaacaagtaggttattctgtcagatttgacaatacgactactacaagaacaagacttaagtatctgactgacggtatgttacttagagaacttatgatgaatagtgaccttagagaatacagcgtcatcgttatcgatgaagcgcatgaaagaactgtgcttacagatttgatattggggttcttaaaatccttgatacaagggccaagacctgatttgagaataattgttatgtctgcaacattgcaagccgaaaaatttagtgagttcttcaataatgccccaatcttatttgtagaaggaagaaaatttgatgtcaaacaatactacttgaaggcgccaacagatgatatagtagacgctgtcatcaggtgttgtatacaaataaaccaaggtgaagaactgggagatatcttatgttttttaccgggccaagaagagattgacaaagcagtgactataatggagaaaattgcaaagtatgtttcagatgaggccccagtaccattaatagttccttatcctttatatgcagctcttcccgcggtccaacagtccttggtcttcgctccgataaagggtttcaagagaaaagtcgtctttagtaccaatattgcagaaacatctgttaccatatccggtgttaaatttgtcgttgattctggtcttcgaaaagtcaaagtttggagacatcagctgggattagccactctacttaccgtacccatttctcaggcaagtgcgatgcagagaagtggtcgtgctggtagagaaagtgaaggaaagagtttcaggctttattgtgagtctgattatgtgaaattacctaaacaaagtgaacctgaaatagccagaagtgacgtcacatctcctgtgttaatgttgaagagatatggtgttgatgacctgctaaactggacctggtttgagaaccctggaaaggaagctatagtaatggggcttcaggaactttatgaattgggtgctcttgacactcgtggaaagataactaaacggggtcaacaaatggctctgttaccgctacaaccgcatttaagtagtgtcttaattaaagccagtgaagtcggatgtttgagtcaggtcattgatatcgtctcttgccttagtgtggaaaatttactgttgaatccgtcaccagaagaaagagatgaggtgaacgagcgtcgtttgtccttatgcaacgctggtaaaaggtatggtgaccttatcatgctgaaagagctttttgatatctatttctacgaactagggaaaagtcaagatgcaagctctgaaagaaatgattggtgtaaaggattgtgtatttcgatacgtgggtttaaaaatgtaattcgtgtcagagaccagttaagagtttattgtaagcgtttgttttcttcaatcagtgaagaggatgaagaatccaaaaagattggtgaagatggcgagctaatttcgaaaattttaaagtgtttcttaactgggtttatcaagaatacagctatagggatgccagacaggtcttatagaactgtttccactggagagccgataagcattcatccatcatctatgctatttatgaataaaagctgccccggtataatgtacacggagtatgtctttactacgaagggatatgccagaaatgttagtaggattgaactttcatggttacaagaagttgtcactaatgcagccgctgtagcaaagcaaaaagtttctgattcaaaataa

SEQ ID NO: 6706 - DNA, 2208 bp, Artificial Sequence
  Description of Artificial Sequence: Synthetic polynucleotide
atggcagcaaatagcaatagtagagttgcatctaaccatacttctaaaaaacaaaaggttaggaggaatatacatccattcacgaataacactagaattaaaagagctagtaaaatcgtaaagtttaatgattctggcgagggcgaccatgtttctgaccaacgttctaacaaggaaaatgtccttacttataaatctttgaaaagtagagcaagcgatttactcaaaatgagagaaacacttcccgtttaccaacacaagagagaaataatgtcttatattgaaagcaatcccgttaccgtccttattggtgaaacaggttctggtaaatctacacaaattccgcaattcgtattagaaaaattatatgatacgaagaagcatgggtctattgctgtaactcaaccccgtcgtgttgcggccatcaatttggctacacgtgttgctcaagaacatggttgcaaattgggtgaacaagtaggttattctgtcagatttgacaatacgactactacaagaacaagacttaagtatttgactgacggtatgttacttagagaacttatgatgaatagtgaccttagagaatacagcgtcatcgttatcgatgaagcgcatgaaagaactgtgcttacagatttgatattggggttcttaaaatccttgatacaagggccaagacctgatttgagaataattgttatgtctgcaacattgcaagccgaaaaatttagtgagttcttcaataatgccccaatcttatttgtagaaggaagaaaatttgatgtcaaacaatactacttgaaggcgccaacagatgatatagtagacgctgtcatcaggtgttgtatacaaataaaccaaggtgaagaattaggagatatcttatgttttttaccgggccaagaagagattgacaaagcagtgactataatggagaaaattgcaaagtatgtttctgatgaggccccagtaccattaatagttccttatcctttatatgcagctcttcccgcggtccaacagtccttggtcttcgctccgataaagggtttcaagagaaaagtcgtctttagtaccaatattgcagaaacatctgttaccatatccggtgttaaatttgtcgttgattctggtcttagaaaagtcaaagtttggagacatcagttaggattagccactttacttaccgtacccatttctcaggcaagtgcgatgcagagaagtggtcgtgctggtagagaaagtgaaggaaagagtttcaggctttattgtgagtctgattatgtgaaattacctaaacaaagtgaacctgaaatagccagaagtgacgtcacatctcctgtgttaatgttgaagagatatggtgttgatgacttattaaactggacctggtttgagaaccctggaaaggaagctatagtaatggggcttcaggaactttatgaattgggtgctcttgacactcgtggaaagataactaaaagaggtcaacaaatggctttattaccgttacaaccgcatttaagtagtgtcttaattaaagccagtgaagtcggatgtttgagtcaggtcattgatatcgtctcttgccttagtgtggaaaatttattattgaatccgtctccagaagaaagagatgaggtgaacgagcgtcgtttgtccttatgcaacgctggtaaaaggtatggtgaccttatcatgttgaaagagctttttgatatctatttctacgaattggggaaaagtcaagatgcaagctctgaaagaaatgattggtgtaaaggattgtgtatttctatacgtgggtttaaaaatgtaattcgtgtcagagaccagttaagagtttattgtaagcgtttgttttcttctatcagtgaagaggatgaagaatccaaaaagattggtgaagatggcgagttgatttccaaaattttaaagtgtttcttaactgggtttatcaagaatacagctatagggatgccagacaggtcttatagaactgtttccactggagagccgataagcattcatccatcttctatgttatttatgaataaaagctgccccggtataatgtacacggagtatgtctttactacgaagggatatgccagaaatgttagtaggattgaactttcttggttacaagaagttgtcactaatgcagccgctgtagcaaagcaaaaagtttctgattctaaatga

SEQ ID NO: 6707 - DNA, 1179 bp, Saccharomyces cerevisiae
atgagatttcacgatagtatacttatcttcttttctttggcatcgctttatcaacatgttcatggtgcaagacaagtcgttcgtccaaaggagaaaatgactacttcagaagaagttaaaccttggttacgtacggtttatggaagtcaaaaagaattagtcactcctacggtcattgccggtgtcactttttctgaaaaaccagaagaaacaccaaatccattgaaaccttgggtatctttagagcatgatggtaggccaaaaaccattaaaccagaaatcaacaaaggtcgaaccaagaagggaagacctgattactcaacttacttcaaaacggtaagttcccacacatattcttatgaagaattgaaggctcacaatatgggccctaatgaagtttttgtagaagaagagtatattgatgaagatgacacctacgtctccctgaatcctattgtcagatgtactcctaatctttacttcaataaaggtctagcaaaggatatccgcagtgagccattttgtaccccttatgagaattctagatggaaggttgacaagacttacttcgttacttggtatacaagattttttacagatgagaattccggtaaagttgctgataaggttcgtgttcatttgtcctatgttaaagaaaaccccgtagagaagggcaattataaaagagatatccctgcaacttttttctcttccgaatggattgataatgacaacggtctaatgccggttgaggtcagagatgaatggctgcaggaccaatttgatcgtaggatcgttgtatcagttcagccaatatacatatcagatgaagatttcgatccactacaatacggtattttattatacatcactaagggttcaaaagtgtttaagcctactaaggagcaactggctttagacgatgcaggtataacaaatgatcagtggtattatgttgcattatctatccctactgtcgtggtggtatttttcgtcttcatgtactttttcttatatgtcaacgggaaaaacagagatttcacagatgttactagaaaagctttaaacaagaaacgccgtgttttgggtaagttctcggagatgaagaaattcaaaaacatgaaaaatcacaagtacaccgaattgccatcttataagaaaaccagtaaacaaaattag

SEQ ID NO: 6708 - DNA, 1179 bp, Artificial Sequence
  Description of Artificial Sequence: Synthetic polynucleotide
atgagatttcacgatagtatacttatcttcttttctttggcatctctttatcaacatgttcatggtgcaagacaagtcgttcgtccaaaggagaaaatgactacttctgaagaagttaaaccttggttacgtacggtttatggaagtcaaaaagaattagtcactcctacggtcattgccggtgtcactttttctgaaaaaccagaagaaacaccaaatccattgaaaccttgggtatctttagagcatgatggtaggccaaaaaccattaaaccagaaatcaacaaaggtagaaccaagaagggaagacctgattactccacttacttcaaaacggtaagttcccacacatattcttatgaagaattgaaggctcacaatatgggccctaatgaagtttttgtagaagaagagtatattgatgaagatgacacctacgtctccttgaatcctattgtcagatgtactcctaatctttacttcaataaaggtttggcaaaggatatccgcagtgagccattttgtaccccttatgagaattctagatggaaggttgacaagacttacttcgttacttggtatacaagattttttacagatgagaattccggtaaagttgctgataaggttcgtgttcatttgtcctatgttaaagaaaaccccgtagagaagggcaattataaaagagatatccctgcaacttttttctcttccgaatggattgataatgacaacggtttgatgccggttgaggtcagagatgaatggttacaggaccaatttgatcgtaggatcgttgtatctgttcagccaatatacatatctgatgaagatttcgatccattgcaatacggtattttattatacatcactaagggttccaaagtgtttaagcctactaaggagcaattggctttagacgatgcaggtataacaaatgatcagtggtattatgttgcattatctatccctactgtcgtggtggtatttttcgtcttcatgtactttttcttatatgtcaacgggaaaaacagagatttcacagatgttactagaaaagctttaaacaagaaacgccgtgttttgggtaagttcagtgagatgaagaaattcaaaaacatgaaaaatcacaagtacaccgaattgccatcttataagaaaaccagtaaacaaaattga

SEQ ID NO: 6709 - DNA, 1353 bp, Saccharomyces cerevisiae
atggctaaagatttattgcccaagcaagcggccaacgagccatcgttaaaggactgtacctgtaaaagatgtcttaaattgggtgcttcaaaagaaaaaaagattagaagaaagaagaaaggtgaggagaaaagagaaagacattatggaaatagacgaaagttaacattcaactttttgaagcatacgaacatggaaaatacaaattacgacgtaatcacttcggttggatatctgaatgaaaaatacggattgaaaaaatcacattacattgaaaaatttatcaaatgcatccatagaaaaataaatatcgatgttagcaaaattacggacgcctatgtaaactcgctaaacccgtgggttaaagtaaaactcttccttttattggtgacattgtctgaaaagggtggtccggaatactggctagataagacagatggtgaaaagaactcagaggcgtcttcaacagataatagtttggaaaattctactaaaggagcagatagcgctggatctactgctttgagagatgaaatggtcaaaagccataaaaaccttttcccaactcttacagagcaaatcatacagcataacatcaaccaagattttacggaatcgacttacgacgaggattatgtattttcgtcaatttgggcaaacttcatggaaggactgatcaatcactatttggaaaaagtcattgtaccttactcggaaatgaaagtctgtcagcaattatacaagcctatgatgaaaattatctccctctataacgaatacaatgagcttatggtcaaaagcgaaaagaacggattcttgccttctctacaagactccgaaaatgtccaaggtgataaaggcgaaaaagagagcaaggatgatgccgttagccaagaaagactggaaagagcgcaaaagctgttatggcaagctcgagaagatattccaaaaacaattagcaaagaattaacgttgttatcagaaatgtattctacattatctgctgatgagcaagattacgaattagatgaatttgtttgttgcgcagaggagtacattgaattggaatacctacctgcccttgtagatgtcttgtttgctaattgtggcacgaacaacttctggaaaattatgttggtgttggaaccctttttctactacattgaagacgtcggcggagatgatgatgaagatgaagataatgtggacaatagcgagggcgacgaagaaagcttacttagcaggaatgtggaaggagatgataatgtggttgagcgtcattttaagcctgatccaagggtcattacactggaaaaaatatgtgaagttgctgcaagacagaaatggatataa

SEQ ID NO: 6710 - DNA, 1353 bp, Artificial Sequence
  Description of Artificial Sequence: Synthetic polynucleotide
atggctaaagatttattgcccaagcaagcggccaacgagccatctttaaaggactgtacctgtaaaagatgtcttaaattgggtgcttccaaagaaaaaaagattagaagaaagaagaaaggtgaggagaaaagagaaagacattatggaaatagaagaaagttaacattcaactttttgaagcatacgaacatggaaaatacaaattacgacgtaatcacttctgttggatatttgaatgaaaaatacggattgaaaaaatctcattacattgaaaaatttatcaaatgcatccatagaaaaataaatatcgatgttagcaaaattacggacgcctatgtaaactctttgaacccgtgggttaaagtaaaactcttccttttattggtgacattgtctgaaaagggtggtccggaatactggcttgataagacagatggtgaaaagaacagtgaggcgtcttctacagataatagtttggaaaattctactaaaggagcagatagcgctggatctactgctttgagagatgaaatggtcaaaagccataaaaaccttttcccaactcttacagagcaaatcatacagcataacatcaaccaagattttacggaatctacttacgacgaggattatgtattttcttccatttgggcaaacttcatggaaggattgatcaatcactatttggaaaaagtcattgtaccttactctgaaatgaaagtctgtcagcaattatacaagcctatgatgaaaattatctccctctataacgaatacaatgagcttatggtcaaaagcgaaaagaacggattcttgccttctttacaagactccgaaaatgtccaaggtgataaaggcgaaaaagagagcaaggatgatgccgttagccaagaaagattagaaagagcgcaaaagcttttatggcaagctagagaagatattccaaaaacaattagcaaagaattaacgttgttatctgaaatgtattctacattatctgctgatgagcaagattacgaattagatgaatttgtttgttgcgcagaggagtacattgaattggaatacttacctgcccttgtagatgtcttgtttgctaattgtggcacgaacaacttctggaaaattatgttggtgttggaaccctttttctactacattgaagacgtcggcggagatgatgatgaagatgaagataatgtggacaatagcgagggcgacgaagaaagcttacttagcaggaatgtggaaggagatgataatgtggttgagcgtcattttaagcctgatccaagggtcattacattagaaaaaatatgtgaagttgctgcaagacagaaatggatatga

SEQ ID NO: 6711 - DNA, 1584 bp, Saccharomyces cerevisiae
atggctgatgaaaagagactggaggatttgagatccaaaataatggagtctataggaaaatcagaaaaggatgttgtgccgattgagaacaaaagattcaacacggataatgcagttatagatacacattttaagaggcaaaaaagtgacggtgagcttccgaaagcgccaaaaagtagaaacgtttcacattctaataacagaggaccatcgtcaataattactatgagcacgaatcgaacgacttatgaacaaacaagggcaggtcctcatcgtcaaagttatcgggatgcatcgggaagatcatataacagggagaatcggtatagtagtcacaatactgggccccaatggaacaacaatccctataataggcaacgggatgaaagaagaggaagaaatgaaaggttcgatagaaggggaagaaatggaaacggaaactacgatcgtttcaattaccaaaggaagaacgaaggttctaaattcaatggcgaccgtgataaaaggcagttgcaaactaataaatatgacatgaactataattcccaaaatgtaatgtacccgggttcatcattcgattctccggcttactacaacatggcctcatccaaggcaaattcaaggcttgtaatttcgggcttgtctcaaagcagcgaccccagcattgtagcaagattgaaagatttgctggaaaattttatttcaggtctccagaaaactgagagtaatgcggaggactttaaaatttccaacttttatattggtgaaggaaggccggaccatattattgttgagtttagttctcagatctgtagcactatggttttggcctgtcgatcattctttaatgcgaagcttggtactttcgacttaaaatggagaagacctaatgattatgttcaacaacttgatcatctggtcgatttttgcaggggtacggtaattgcattggaaaatttggaaaatataggcgagggtgaagattatagaatgaaagagcttttttcgtcattgaatgtaacaaacggtaccgctaagccacttttttacaaatgttcgtccaatacaaacaacactggcaaagaatccgaattcactaaatgtattctattatcgtttgaagtcgtcactcaggatattcttgataaattaaaaccatacaaatggttcaagccaaatgatggaaagatatcacaagttacttcatggattacgtttcaaagcctgccaaatctggttacccaatctgttcgtgttgaatcgagagttttgttgctcttaaattgtcttgatccattggatttgaaagatgaaacctttatcacagaaattaaagaaacattaaagtatagtatcgcgggagcagatacgattaaaatatgccaacccggcgtcgattacagacttaattttgaaaacttggcttccggagccggtaatatttatatcaagttcaagaccttggaggcagcaaaacacgcaatggaagaattgccgggtacgcaattcaacgatcgcactgttctgtgtacttatatagatgaggacgactttgacatgatggaagcaacccaactttcctaa

SEQ ID NO: 6712 - DNA, 1584 bp, Artificial Sequence
  Description of Artificial Sequence: Synthetic polynucleotide
atggctgatgaaaagagattggaggatttgagatccaaaataatggagtctataggaaaaagtgaaaaggatgttgtgccgattgagaacaaaagattcaacacggataatgcagttatagatacacattttaagaggcaaaaaagtgacggtgagcttccgaaagcgccaaaaagtagaaacgtttctcattctaataacagaggaccatcttctataattactatgagcacgaatagaacgacttatgaacaaacaagggcaggtcctcatcgtcaaagttatagagatgcatctggaagatcttataacagggagaatagatatagtagtcacaatactgggccccaatggaacaacaatccctataataggcaaagagatgaaagaagaggaagaaatgaaaggttcgatagaaggggaagaaatggaaacggaaactacgatcgtttcaattaccaaaggaagaacgaaggttctaaattcaatggcgaccgtgataaaaggcagttgcaaactaataaatatgacatgaactataattcccaaaatgtaatgtacccgggttcttctttcgattctccggcttactacaacatggcctcttccaaggcaaattctaggcttgtaatttctggcttgtctcaaagcagcgaccccagcattgtagcaagattgaaagatttgttggaaaattttatttctggtctccagaaaactgagagtaatgcggaggactttaaaatttccaacttttatattggtgaaggaaggccggaccatattattgttgagtttagttctcagatctgtagcactatggttttggcctgtagatctttctttaatgcgaagcttggtactttcgacttaaaatggagaagacctaatgattatgttcaacaacttgatcatttggtcgatttttgcaggggtacggtaattgcattggaaaatttggaaaatataggcgagggtgaagattatagaatgaaagagcttttttcttctttgaatgtaacaaacggtaccgctaagccacttttttacaaatgttcttccaatacaaacaacactggcaaagaatccgaattcactaaatgtattttattatcttttgaagtcgtcactcaggatattcttgataaattaaaaccatacaaatggttcaagccaaatgatggaaagatatctcaagttacttcttggattacgtttcaaagcttgccaaatttggttacccaatctgttcgtgttgaatctagagttttgttgctcttaaattgtcttgatccattggatttgaaagatgaaacctttatcacagaaattaaagaaacattaaagtatagtatcgcgggagcagatacgattaaaatatgccaacccggcgtcgattacagacttaattttgaaaacttggcttccggagccggtaatatttatatcaagttcaagaccttggaggcagcaaaacacgcaatggaagaattgccgggtacgcaattcaacgatcgcactgttttatgtacttatatagatgaggacgactttgacatgatggaagcaacccaactttcctga

SEQ ID NO: 6713 - DNA, 2646 bp, Saccharomyces cerevisiae
atgcgaaacgttttaaggcttttatttttaacagcttttgttgctatagggtctttagcagccgttttaggtgttgattacggtcagcaaaatatcaaggccattgtggtttctccgcaagccccattagaacttgtgctcacaccagaggcaaaacggaaggagatatctggtctttcgataaaaagattaccaggttatggaaaggatgatccgaatgggattgaaagaatctacggttccgctgttggcagtttagcaacaaggtttccccaaaacacattgttgcatttgaaaccgctacttgggaaatcactagaagatgaaaccactgtaactttgtattcaaaacaacaccccggtttagaaatggtatcaacaaatagaagtaccatagcctttttagttgataatgtggaatatccattggaagagttagtggcaatgaatgtccaagagattgccaatagagccaattcactgttgaaggatagagatgcaagaactgaggactttgtaaacaagatgagttttacaattcctgacttttttgaccaacatcaaaggaaagcacttttagatgccagttcaataaccacaggaatcgaagagacatatctggttagtgaagggatgtctgttgcagttaactttgtattaaagcagcgccaatttccaccaggtgaacagcagcattatatcgtatatgacatggggagcggttctattaaggcctcaatgttctctatattgcagccggaggacactactcagcccgttacaatagaatttgaaggatatgggtataatccacatctaggtggtgcaaagtttacaatggatattggcagtttgatagagaataagtttttggaaacacacccagccataagaactgatgaattgcacgctaatcccaaggccttagcaaaaatcaaccaagcagcagagaaggcaaagttaattttaagcgccaattctgaggcaagtattaacatagaatcactgatcaacgatattgatttccgtacttctataactagacaggaattcgaagaatttattgcagactcgttattggacattgtcaaacccataaatgacgctgttacaaaacaattcggtggctatggaacaaatttacctgagataaatggggtcattttggcgggaggctcttcccgaattcccattgtgcaggatcaattaatcaaactcgtatccgaagaaaaagtgttgagaaatgtcaatgctgatgaatcagctgtgaatggtgttgttatgagagggatcaagttatctaattcgtttaagaccaagccgttaaatgttgttgaccgttctgtaaatacttattcattcaaattatcaaacgaatctgaactgtatgatgtgttcacgcgcggaagtgcttatccaaacaaaacatctattttgacaaacacgactgattcgattcctaataattttaccattgacttatttgagaatggtaaattgttcgaaactatcacagttaattcaggagctataaagaattcatattcctctgataagtgctcgtcaggagttgcgtataacattactttcgacttgtccagtgatagattattctctattcaagaggttaactgcatttgtcagagcgaaaatgacataggtaactccaagcaaattaagaacaaaggcagccgtttggcttttacttctgaggatgttgagatcaaaaggctttctccttcagaacgttcgcgtttgcatgagcatatcaagttgctcgataaacaggataaggaaagatttcaattccaagaaaatttaaacgttcttgaaagtaacttgtatgatgctagaaacctgctaatggatgatgaagttatgcaaaatggaccaaaatcccaagtagaagagttatcggagatggttaaagtatatttggattggctcgaagatgcatcctttgatactgaccctgaggatatagttagcagaattagagaaattggaatattaaaaaagaaaatagaactttacatggattctgcaaaggaacctttgaactctcaacaatttaaaggaatgcttgaagaaggccataagttacttcaggctatagaaacccataagaataccgttgaagaatttttgagtcaatttgaaaccgagtttgcggataccatagataatgttagagaagaatttaaaaagattaagcaaccagcgtatgtgtcgaaggcgttatctacatgggaggaaaccttaacctcttttaaaaattccattagcgaaatagagaagttcctggcaaaaaacctatttggcgaagaccttcgtgaacatttatttgaaatcaaattacaatttgatatgtatcgtacgaaactagaggaaaaactgcgtttaataaaaagcggtgatgaaagtcgcttaaatgaaataaagaagttacatttaagaaacttccgcctacaaaagagaaaggaggaaaagttgaaaagaaagcttgaacaggaaaaaagcagaaacaacaatgaaacagaatcgacagtaatcaactcggctgacgataaaactactattgtcaatgacaagaccaccgagtcgaatccaagttctgaggaagacattttgcatgatgaattatag

SEQ ID NO: 6714 - DNA, 2646 bp, Artificial Sequence
  Description of Artificial Sequence: Synthetic polynucleotide
atgagaaacgttttaaggcttttatttttaacagcttttgttgctatagggtctttagcagccgttttaggtgttgattacggtcagcaaaatatcaaggccattgtggtttctccgcaagccccattagaacttgtgctcacaccagaggcaaaaagaaaggagatatctggtctttccataaaaagattaccaggttatggaaaggatgatccgaatgggattgaaagaatctacggttccgctgttggcagtttagcaacaaggtttccccaaaacacattgttgcatttgaaaccgttacttgggaaatctttggaagatgaaaccactgtaactttgtattctaaacaacaccccggtttagaaatggtatctacaaatagaagtaccatagcctttttagttgataatgtggaatatccattggaagagttagtggcaatgaatgtccaagagattgccaatagagccaattctttgttgaaggatagagatgcaagaactgaggactttgtaaacaagatgagttttacaattcctgacttttttgaccaacatcaaaggaaagcacttttagatgccagtagtataaccacaggaatcgaagagacatatttggttagtgaagggatgtctgttgcagttaactttgtattaaagcagcgccaatttccaccaggtgaacagcagcattatatcgtatatgacatggggagcggttctattaaggcctctatgttctctatattgcagccggaggacactactcagcccgttacaatagaatttgaaggatatgggtataatccacatttaggtggtgcaaagtttacaatggatattggcagtttgatagagaataagtttttggaaacacacccagccataagaactgatgaattgcacgctaatcccaaggccttagcaaaaatcaaccaagcagcagagaaggcaaagttaattttaagcgccaattctgaggcaagtattaacatagaatctttgatcaacgatattgatttccgtacttctataactagacaggaattcgaagaatttattgcagactctttattggacattgtcaaacccataaatgacgctgttacaaaacaattcggtggctatggaacaaatttacctgagataaatggggtcattttggcgggaggctcttccagaattcccattgtgcaggatcaattaatcaaactcgtatccgaagaaaaagtgttgagaaatgtcaatgctgatgaatctgctgtgaatggtgttgttatgagagggatcaagttatctaattcttttaagaccaagccgttaaatgttgttgaccgttctgtaaatacttattctttcaaattatctaacgaatctgaattgtatgatgtgttcacgcgcggaagtgcttatccaaacaaaacatctattttgacaaacacgactgattctattcctaataattttaccattgacttatttgagaatggtaaattgttcgaaactatcacagttaattctggagctataaagaattcttattcctctgataagtgctcttctggagttgcgtataacattactttcgacttgtccagtgatagattattctctattcaagaggttaactgcatttgtcagagcgaaaatgacataggtaactccaagcaaattaagaacaaaggcagccgtttggcttttacttctgaggatgttgagatcaaaaggctttctccttctgaacgttcccgtttgcatgagcatatcaagttgctcgataaacaggataaggaaagatttcaattccaagaaaatttaaacgttcttgaaagtaacttgtatgatgctagaaacttattgatggatgatgaagttatgcaaaatggaccaaaatcccaagtagaagagttatctgagatggttaaagtatatttggattggctcgaagatgcatcctttgatactgaccctgaggatatagttagcagaattagagaaattggaatattaaaaaagaaaatagaactttacatggattctgcaaaggaacctttgaactctcaacaatttaaaggaatgcttgaagaaggccataagttacttcaggctatagaaacccataagaataccgttgaagaatttttgagtcaatttgaaaccgagtttgcggataccatagataatgttagagaagaatttaaaaagattaagcaaccagcgtatgtgagcaaggcgttatctacatgggaggaaaccttaacctcttttaaaaattccattagcgaaatagagaagttcttggcaaaaaacttgtttggcgaagaccttcgtgaacatttatttgaaatcaaattacaatttgatatgtatcgtacgaaattagaggaaaaattacgtttaataaaaagcggtgatgaaagtcgcttaaatgaaataaagaagttacatttaagaaacttccgcttacaaaagagaaaggaggaaaagttgaaaagaaagcttgaacaggaaaaaagcagaaacaacaatgaaacagaatctacagtaatcaactctgctgacgataaaactactattgtcaatgacaagaccaccgagagcaatccaagttctgaggaagacattttgcatgatgaattatga

SEQ ID NO: 6715 - DNA, 2301 bp, Saccharomyces cerevisiae
atgcaactggaagccactcatcagaaagaaaaccacctgtctcctttggctagcttcatttttccagacttcagggcattgttcaacatagggtttaatttatattctaatataaactacaaagaagtagatattaatggatttgaaatttacattgtcgaacaatgggctgcccagagaaaaatatcaactctaatcacttcatatacgggcaacttacaagacaccatatctgcagtagaggttgctcttcccgaagatcctgaggaatggccatgttgtttgaagaaataccatgaagaattgttgaagttttctagtccaaaaaagactgccaaaggaactttatttgttacaaacctttcttctttcaaatctacgctaaacttattgcatgttgagtgtggtaatctaaagaaaatctggaaaaacttcaaaaccaactacgacctaaagagattacattgtggtggtcgttcagctcagctgttaaaaaagacacctagtgcctcaatagcgaagtttgcacagttatataaatttccgaattcagctttttctcatgaaataacgtcggatttccaacaaccttctcttcagaatgacaacagctcaataagtagcatagaaaatattcctgttaatcattgccctgtggtagaactaactaccctcgtgcaaatatcacttagttattttgcgctgtttgaatacaagaaggagagagatggtctcttatgcaatggaacgaaacaatcccttgaaaaatggtgggaaatatatgggaaacgataccacggcattgataagccgaagaatgaaacgatccttggtccgactacggtggcatcactacttagtcttgtattgacttgttacttcaaattaatggtagaagattgcatgtcagcaaaagatccgtttgatgaagaagagttttattctggtctttatgcatttcaaaagaaatacggcctatccaaaaacaataaacagacctccttagacgaactaacaattgataaattatttgaagtatcttccaagacttcaaacaaagatattttcaagtttaaaaaggttgtgaagtcaactgttcaagacatgactggcaaaggaaactttatgcatctatccaatgagatcctaacaactgatttagataccctggtaaagaatatacacggtggatcccttggtaagctctggaaagggagaagtgcttcgagaaaggaaacatgcatggtttgggaaagaaaaacctttctaagtttcaagtttgaacgtggagatccatccttacaattggaaaataatgagctgttttatggtacgagtgtgccaagtgaacagttaacgacttccaataaggaggacagtgatacgcaacccacaaagagaaatagtatatatgatattgccaatggctccaaatcatcgctatctatctcatccatgttctgtaattatgatgaaacccgttacaaaagtaccaacaaccttaatagagcctataggggggagtattttaggcgcaattcgatcccattttgtaacgatggtatacacgatactaaaaaaatatctgctgatcttaataagatagatggattgtatcgttgcaattcatattctgaggtacaaaacgcaatagagctgtggagcttgccattcgattcatcagtcatcagattagcaagagacttacttaagatacaaagtctaatgtcagttcaacgtcagctcgatgaaatacgtgacggatatctgggaaaaaattcacaaagatcataccagaatgatctgatgtttagacaaagcttgaacaaattgcaggaaatgtgtgagagatgtaagagaggttctaacgaatttcactgggaatatggtaacatgcaaaacaaacagcaaattttggagagtgagaaaaaagatatgaaatcactttcttcgaaactgaaatataacgttcgtatcctagatagacgtgtaagagatgttgaagccagcgtagatcattttgatcgcaagttagaggatgttagaaaaaagcttctggagcaaaataatagtaaagacatatctatggccttagaaagtccttgtgataaatttgaatttgacagttttatggactctatagtgcagtcccaacagactaaatatgaagggctgtgttttaaaattttagacaagaaaagtcttcgaaagttaaaaaaggaattctggaaatggagcacctggacattcgataccttcttatacaaaaataggcccaataaggagaaagatacactatga

SEQ ID NO: 6716 - DNA, 2301 bp, Artificial Sequence
  Description of Artificial Sequence: Synthetic polynucleotide
atgcaattggaagccactcatcagaaagaaaaccacttatctcctttggctagcttcatttttccagacttcagggcattgttcaacatagggtttaatttatattctaatataaactacaaagaagtagatattaatggatttgaaatttacattgtcgaacaatgggctgcccagagaaaaatatctactttgatcacttcttatacgggcaacttacaagacaccatatctgcagtagaggttgctcttcccgaagatcctgaggaatggccatgttgtttgaagaaataccatgaagaattgttgaagttttctagtccaaaaaagactgccaaaggaactttatttgttacaaacctttcttctttcaaatctacgttgaacttattgcatgttgagtgtggtaatttgaagaaaatctggaaaaacttcaaaaccaactacgacttgaagagattacattgtggtggtcgttctgctcagcttttaaaaaagacacctagtgcctctatagcgaagtttgcacagttatataaatttccgaattctgctttttctcatgaaataacgtctgatttccaacaaccttctcttcagaatgacaacagcagtataagtagcatagaaaatattcctgttaatcattgccctgtggtagaattgactaccctcgtgcaaatatctcttagttattttgcgttatttgaatacaagaaggagagagatggtctcttatgcaatggaacgaaacaatcccttgaaaaatggtgggaaatatatgggaaaagataccacggcattgataagccgaagaatgaaacgatccttggtccgactacggtggcatctttacttagtcttgtattgacttgttacttcaaattaatggtagaagattgcatgtctgcaaaagatccgtttgatgaagaagagttttattctggtctttatgcatttcaaaagaaatacggcttatccaaaaacaataaacagacctccttagacgaattaacaattgataaattatttgaagtatcttccaagacttctaacaaagatattttcaagtttaaaaaggttgtgaagtctactgttcaagacatgactggcaaaggaaactttatgcatttgtccaatgagatcttaacaactgatttagataccttggtaaagaatatacacggtggatcccttggtaagctctggaaagggagaagtgcttccagaaaggaaacatgcatggtttgggaaagaaaaacctttttgagtttcaagtttgaacgtggagatccatccttacaattggaaaataatgagttattttatggtacgagtgtgccaagtgaacagttaacgacttccaataaggaggacagtgatacgcaacccacaaagagaaatagtatatatgatattgccaatggctccaaaagctctttatctatctcttccatgttctgtaattatgatgaaacccgttacaaaagtaccaacaaccttaatagagcctataggggggagtattttaggcgcaattccatcccattttgtaacgatggtatacacgatactaaaaaaatatctgctgatcttaataagatagatggattgtatcgttgcaattcttattctgaggtacaaaacgcaatagagttatggagcttgccattcgattcttctgtcatcagattagcaagagacttacttaagatacaaagtttaatgtctgttcaacgtcagctcgatgaaatacgtgacggatatttgggaaaaaattctcaaagatcttaccagaatgatttgatgtttagacaaagcttgaacaaattgcaggaaatgtgtgagagatgtaagagaggttctaacgaatttcactgggaatatggtaacatgcaaaacaaacagcaaattttggagagtgagaaaaaagatatgaaatctctttcttctaaattgaaatataacgttcgtatcttagatagacgtgtaagagatgttgaagccagcgtagatcattttgatcgcaagttagaggatgttagaaaaaagcttttggagcaaaataatagtaaagacatatctatggccttagaaagtccttgtgataaatttgaatttgacagttttatggactctatagtgcagtcccaacagactaaatatgaagggctttgttttaaaattttagacaagaaaagtcttagaaagttaaaaaaggaattctggaaatggagcacctggacattcgataccttcttatacaaaaataggcccaataaggagaaagatacattgtga

SEQ ID NO: 6717 - DNA, 771 bp, Saccharomyces cerevisiae
atgaatacttcatcaagaataacttactttatcatcggtggtagccgtggaattggttttaatttggtcaaaattttaagcgcttctacgggcaatacagttataacctctattcgtggatcaccttcattacccaagaacaaacaagtggaagatttagcaaaaatcaggaagaatatccatattgtccaacttgaccttacaaaggacgaaagtattggcaatattgcggacgagatcaagaaaacgccattcttcttgggtattgatatttttatcgcatgttctgcagtatctgattcttattacaaggtcctggaaactcccaaatcagtctggctcaaccattatagcacaaacgctctgggtccgatactagcccttcaaaaagtttatccactgcttcttttgaaaaagacgaggaagatattctttatctctagtgttgcaggatctatcaatgcgtttgtaccactttctgtttccgcttatggtcaatcgaaagctgccttgaattatgcggtaaagacgctcagttttgaattgaaaccggagggttttactgtcgttgcttttcacccaggtatggtatctactgatatgggccaatatggccttgatcattttaaagagaagaatatagacatcagcggcgtaaatattatcacaccagaagaaagtgcctctgcgctaattgatgtcttccgaaaaattttaccagaagataatggaaagttcttcaactatgacggcagcgaaggcgtcttttag

SEQ ID NO: 6718 - DNA, 771 bp, Artificial Sequence
  Description of Artificial Sequence: Synthetic polynucleotide
atgaatacttcttctagaataacttactttatcatcggtggtagccgtggaattggttttaatttggtcaaaattttaagcgcttctacgggcaatacagttataacctctattcgtggatctccttctttacccaagaacaaacaagtggaagatttagcaaaaatcaggaagaatatccatattgtccaacttgaccttacaaaggacgaaagtattggcaatattgcggacgagatcaagaaaacgccattcttcttgggtattgatatttttatcgcatgttctgcagtatctgattcttattacaaggtcttggaaactcccaaatctgtctggctcaaccattatagcacaaacgctttgggtccgatattggcccttcaaaaagtttatccattacttcttttgaaaaagacgaggaagatattctttatctctagtgttgcaggatctatcaatgcgtttgtaccactttctgtttccgcttatggtcaaagtaaagctgccttgaattatgcggtaaagacgctcagttttgaattgaaaccggagggttttactgtcgttgcttttcacccaggtatggtatctactgatatgggccaatatggccttgatcattttaaagagaagaatatagacatcagcggcgtaaatattatcacaccagaagaaagtgcctctgcgttaattgatgtcttcagaaaaattttaccagaagataatggaaagttcttcaactatgacggcagcgaaggcgtcttttga

SEQ ID NO: 6719 - DNA, 510 bp, Saccharomyces cerevisiae
atgtacattcctaaacattttgagtccatggaactctcaaggtacaaattatcaaaaaaacccccgctaggaacactattctcctctaaggctagcaggcaaggtttcttcggatggagaacttcttccaataaagatgaccccgattttggtatgtgcgcatcacatattccatttgtattcgtggagttcgataatggagagcataaacttattgcacatttagcacggaagaataaacatgtggaaatgctggaaagagttcaaaaatgcttagtggtatttcagagcgtcgattcatacatttctccggcgtggttcccaatgaagaaaaagacccataagttcgtaccaacatgggattttgccgctgtgcacgtttacggtacaccaaggattatccgcgacgataaagactggcttattaatatgttatcaactttgactgaccaagaagaagagaaaagacctgagggggaaaatgtacgaagtaaagtggagcgtttctga

SEQ ID NO: 6720 - DNA, 510 bp, Artificial Sequence
  Description of Artificial Sequence: Synthetic polynucleotide
atgtacattcctaaacattttgagtccatggaactctccaggtacaaattatccaaaaaacccccgttgggaacattgttctcctctaaggctagcaggcaaggtttcttcggatggagaacttcttccaataaagatgaccccgattttggtatgtgcgcatctcatattccatttgtattcgtggagttcgataatggagagcataaacttattgcacatttagcaagaaagaataaacatgtggaaatgttggaaagagttcaaaaatgcttagtggtatttcagagcgtcgattcttacatttctccggcgtggttcccaatgaagaaaaagacccataagttcgtaccaacatgggattttgccgctgtgcacgtttacggtacaccaaggattatccgcgacgataaagactggcttattaatatgttatctactttgactgaccaagaagaagagaaaagacctgagggggaaaatgtaaggagtaaagtggagcgtttctga

SEQ ID NO: 6721 - DNA, 543 bp, Saccharomyces cerevisiae
atgggctcatcaaccgggtttcatcatgccgatcatgttaactattcttcaaatctgaataaggaagaaattctagaacagcttctgctttcatacgaggggctatcagatggacaagtcaattgggtttgtaatttgtcaaacgcttcgtcattgatctggcatgcgtacaagtcattagctgttgatatcaattgggctggattttacgttactcaagctagcgaagaaaacacactgatattgggcccatttcaaggaaaggtcgcttgccaaatgattcaattcggtaaaggtgtttgcggaactgcagcctctacaaaggaaacgcagattgttccagatgtcaacaagtatcccggtcatattgcgtgcgacggtgaaaccaagagcgaaattgttgttccaatcatatccaatgatggtaagacattgggcgtcatagacatagattgtttggattacgaaggattcgaccacgtagacaaagaattcctagaaaaacttgctaaattaattaataaatcatgtgtctttaaataa

SEQ ID NO: 6722 - DNA, 543 bp, Artificial Sequence
  Description of Artificial Sequence: Synthetic polynucleotide
atgggctcttccaccgggtttcatcatgccgatcatgttaactattcttccaatttgaataaggaagaaattttggaacagcttttactttcttacgaggggctttctgatggacaagtcaattgggtttgtaatttgtctaacgcttcttctttgatctggcatgcgtacaagtctttagctgttgatatcaattgggctggattttacgttactcaagctagcgaagaaaacacattaatattgggcccatttcaaggaaaggtcgcttgccaaatgattcaattcggtaaaggtgtttgcggaactgcagcctctacaaaggaaacgcagattgttccagatgtcaacaagtatcccggtcatattgcgtgcgacggtgaaaccaagagcgaaattgttgttccaatcatatccaatgatggtaagacattgggcgtcatagacatagattgtttggattacgaaggattcgaccacgtagacaaagaattcttggaaaaacttgctaaattaattaataaaagttgtgtctttaaatga

SEQ ID NO: 6723 - DNA, 237 bp, Saccharomyces cerevisiae
atgcaggcaaaccattccgtcagttacctttacgaatcaagtacttcaaagaggtcaaatgggctcttttctcaaacacaaaagcaaggaagttttcaaaaagctttaagtcaaactcaggaagaaatagaagatgaagacctgatggtagacctcaacacaggatctttaactcccgttaagttaaaatattggactcaaatgagtgctatgacggaaaaatttggtaaactgtga

SEQ ID NO: 6724 - DNA, 237 bp, Artificial Sequence
  Description of Artificial Sequence: Synthetic polynucleotide
atgcaggcaaaccattccgtcagttacctttacgaaagtagtacttctaagaggtctaatgggctcttttctcaaacacaaaagcaaggaagttttcaaaaagctttaagtcaaactcaggaagaaatagaagatgaagacttgatggtagacctcaacacaggatctttaactcccgttaagttaaaatattggactcaaatgagtgctatgacggaaaaatttggtaaattatga

SEQ ID NO: 6725 - DNA, 2880 bp, Saccharomyces cerevisiae
atgtttggcaacaatagaccaatgtttggagggagcaacctttcctttggatcaaatacgtcatccttcggtgggcaacaatcgcaacaaccaaactctctttttggaaatagcaataacaacaacaattccaccagtaacaatgcccaatcaggatttggtggattcacttctgccgctggcagtaatagtaacagtttatttggaaataacaatactcaaaataatggggcatttggccagtcaatgggtgccacccaaaactcaccatttgggtcgttaaactcctcaaatgccagtaatgggaacacttttggaggatccagttcaatgggttcttttggtggtaataccaataatgcatttaataataacagtaacagtaccaattccccgtttggtttcaataaaccgaatacaggagggaccttgtttggttcgcagaataataatagtgcaggtacttctagtttatttggcggccaaagtacaagtaccactggcacattcggaaacaccggaagtagtttcggaacaggcttaaatggcaacggctctaacatatttggggcagggaacaactcacaaagcaatactaccggcagcttgtttggcaaccaacaatcttcagcgtttgggacaaataatcaacaaggaagtctatttggacagcaatctcaaaacaccaataatgcgtttggtaatcaaaatcagctggggggcagttccttcggatcaaaaccagttggttcagggtcgctgtttggccagagcaacaacactttaggtaatacaaccaataatagaaatggattgtttggtcaaatgaattccagtaaccaaggcagttctaacagtggattgtttggacaaaactcgatgaacagcagcactcaaggggtatttggacaaaacaataatcaaatgcaaattaatggcaataacaacaacagtttatttggaaaggcaaacaccttttcaaattccgcatcaggaggtttatttggccaaaataatcaacagcaagggtccgggctgtttggtcaaaattctcagacaagcggtagtagtggactttttgggcagaataatcagaaacagcccaatacttttacccaatctaatacaggaataggtctctttggacagaacaacaaccagcaacaacaatctacaggtttgtttggagccaaaccagcaggtaccacaggatctcttttcggtggtaattcatcaacccagcctaactctcttttcggtactaccaatgtacctacctctaatacacagtcacaacaaggaaatagtctttttggtgccacgaagctgaccaacatgccctttggaggaaatcccactgcaaaccagtcagggagtggaaacagtctattcggaactaaacctgcctccactaccggctcattatttggaaacaacacagcttctacgacagtaccttccacgaatggattgtttggtaacaacgctaacaattcaactagcactacgaatacgggacttttcggtgcaaagcctgattctcagtccaaacctgcattagggggagggttattcggcaattcaaactcgaattcttccacaatcggccaaaacaaaccagtttttggaggcacaacccaaaatacaggactctttggcgccaccggcacgaactcttcagcagttggttcaactggtaaactttttggccagaataataatacgcttaatgttggtacacaaaatgtaccacctgtgaacaataccacccaaaacgcccttttgggtacaacggcagttccttccctacaacaagccccagtaactaatgaacagcttttttccaaaatatcaatccctaactctattacaaatccagttaaagcaacaacttcaaaagtgaacgcagatatgaaaagaaatagtagcctcacgtctgcctatagacttgccccaaagccgttatttgctccctcttcgaatggcgatgctaaatttcaaaagtggggcaagacactggaaagaagtgatagaggaagcagtaccagcaattctattacggacccagaatcaagctatctaaattcaaacgacttgttgtttgatccagatagaagatatttgaaacatctggtgattaaaaataataagaacttaaatgtcattaaccataatgatgatgaagcaagcaaagttaaattagtgacgtttacaacagaatcagcttcaaaagatgaccaagcctcatcaagcattgctgcttcaaaattaactgaaaaagcacattctcctcagactgacctaaaagatgatcatgatgaaagcactcctgatcctcaatcgaaatctccaaatggttccacctctataccaatgattgagaatgaaaagattagcagcaaagttcccggcctattgagcaacgacgttacctttttcaagaataactactacatttcaccttccatagaaacgcttggcaataagtcattaattgaacttcgtaaaataaacaacctagtcattggtcacagaaattatggtaaagtcgagtttctggagcccgttgatttgttgaatactcctttggatactttatgcggggatcttgtcacctttggaccaaaatcatgttcaatatatgaaaactgttccataaagccagaaaagggcgaaggcattaatgtacgttgtagagtgactttatattcctgttttcctattgacaaagaaacaaggaaacctataaagaatataacacatcctctactgaaaagaagtatagccaaactaaaagaaaacccagtgtacaagtttgaaagctatgaccccgtaacaggcacctatagttacaccatagatcacccagttttaacttaa

SEQ ID NO: 6726 - DNA, 2880 bp, Artificial Sequence
  Description of Artificial Sequence: Synthetic polynucleotide
atgtttggcaacaatagaccaatgtttggagggagcaacctttcctttggaagtaatacgtcttccttcggtgggcaacaatctcaacaaccaaactctctttttggaaatagcaataacaacaacaattccaccagtaacaatgcccaaagtggatttggtggattcacttctgccgctggcagtaatagtaacagtttatttggaaataacaatactcaaaataatggggcatttggccagtccatgggtgccacccaaaactctccatttgggtctttaaactcctctaatgccagtaatgggaacacttttggaggatccagttctatgggttcttttggtggtaataccaataatgcatttaataataacagtaacagtaccaattccccgtttggtttcaataaaccgaatacaggagggaccttgtttggttctcagaataataatagtgcaggtacttctagtttatttggcggccaaagtacaagtaccactggcacattcggaaacaccggaagtagtttcggaacaggcttaaatggcaacggctctaacatatttggggcagggaacaactctcaaagcaatactaccggcagcttgtttggcaaccaacaatcttctgcgtttgggacaaataatcaacaaggaagtttatttggacagcaatctcaaaacaccaataatgcgtttggtaatcaaaatcagttagggggcagttccttcggatctaaaccagttggttctgggtctttatttggccagagcaacaacactttaggtaatacaaccaataatagaaatggattgtttggtcaaatgaattccagtaaccaaggcagttctaacagtggattgtttggacaaaactccatgaacagcagcactcaaggggtatttggacaaaacaataatcaaatgcaaattaatggcaataacaacaacagtttatttggaaaggcaaacaccttttctaattccgcatctggaggtttatttggccaaaataatcaacagcaagggtccgggttgtttggtcaaaattctcagacaagcggtagtagtggactttttgggcagaataatcagaaacagcccaatacttttacccaatctaatacaggaataggtctctttggacagaacaacaaccagcaacaacaatctacaggtttgtttggagccaaaccagcaggtaccacaggatctcttttcggtggtaattcttccacccagcctaactctcttttcggtactaccaatgtacctacctctaatacacagtctcaacaaggaaatagtctttttggtgccacgaagttgaccaacatgccctttggaggaaatcccactgcaaaccagagcgggagtggaaacagtttattcggaactaaacctgcctccactaccggctctttatttggaaacaacacagcttctacgacagtaccttccacgaatggattgtttggtaacaacgctaacaattctactagcactacgaatacgggacttttcggtgcaaagcctgattctcagtccaaacctgcattagggggagggttattcggcaatagcaacagtaattcttccacaatcggccaaaacaaaccagtttttggaggcacaacccaaaatacaggactctttggcgccaccggcacgaactcttctgcagttggttctactggtaaactttttggccagaataataatacgcttaatgttggtacacaaaatgtaccacctgtgaacaataccacccaaaacgcccttttgggtacaacggcagttccttccttacaacaagccccagtaactaatgaacagcttttttccaaaatatccatccctaactctattacaaatccagttaaagcaacaacttctaaagtgaacgcagatatgaaaagaaatagtagcctcacgtctgcctatagacttgccccaaagccgttatttgctccctcttccaatggcgatgctaaatttcaaaagtggggcaagacattagaaagaagtgatagaggaagcagtaccagcaattctattacggacccagaaagtagctatttgaatagcaacgacttgttgtttgatccagatagaagatatttgaaacatttggtgattaaaaataataagaacttaaatgtcattaaccataatgatgatgaagcaagcaaagttaaattagtgacgtttacaacagaatctgcttccaaagatgaccaagcctcttctagcattgctgcttccaaattaactgaaaaagcacattctcctcagactgacttgaaagatgatcatgatgaaagcactcctgatcctcaaagtaaatctccaaatggttccacctctataccaatgattgagaatgaaaagattagcagcaaagttcccggccttttgagcaacgacgttacctttttcaagaataactactacatttctccttccatagaaacgcttggcaataagtctttaattgaacttcgtaaaataaacaacttggtcattggtcacagaaattatggtaaagtcgagtttttggagcccgttgatttgttgaatactcctttggatactttatgcggggatcttgtcacctttggaccaaaaagttgttctatatatgaaaactgttccataaagccagaaaagggcgaaggcattaatgtacgttgtagagtgactttatattcctgttttcctattgacaaagaaacaaggaaacctataaagaatataacacatcctttattgaaaagaagtatagccaaattgaaagaaaacccagtgtacaagtttgaaagctatgaccccgtaacaggcacctatagttacaccatagatcacccagttttaacttga

SEQ ID NO: 6727 - DNA, 462 bp, Saccharomyces cerevisiae
atgtctagtcaaacagaaagaacttttattgcggtaaaaccagatggtgtccagaggggcttagtatctcaaattctatctcgttttgaaaaaaaaggttacaaactagttgctattaaattagttaaagcggatgataaattactagagcaacattacgcagagcatgttggtaaaccatttttcccaaagatggtatcctttatgaagtctggtcccattttggccacggtctgggagggaaaagatgtggttagacaaggaagaactattcttggtgctactaatcctttgggcagtgcaccaggtaccattagaggtgatttcggtattgacctaggcagaaacgtctgtcacggcagtgattctgttgatagcgctgaacgtgaaatcaatttgtggtttaagaaggaagagttagttgattgggaatctaatcaagctaagtggatttatgaatga

SEQ ID NO: 6728 - DNA, 462 bp, Artificial Sequence
  Description of Artificial Sequence: Synthetic polynucleotide
atgtctagtcaaacagaaagaacttttattgcggtaaaaccagatggtgtccagaggggcttagtatctcaaattttatctcgttttgaaaaaaaaggttacaaattggttgctattaaattagttaaagcggatgataaattattggagcaacattacgcagagcatgttggtaaaccatttttcccaaagatggtatcctttatgaagtctggtcccattttggccacggtctgggagggaaaagatgtggttagacaaggaagaactattcttggtgctactaatcctttgggcagtgcaccaggtaccattagaggtgatttcggtattgacttgggcagaaacgtctgtcacggcagtgattctgttgatagcgctgaacgtgaaatcaatttgtggtttaagaaggaagagttagttgattgggaatctaatcaagctaagtggatttatgaatga

SEQ ID NO: 6729 - DNA, 222 bp, Saccharomyces cerevisiae
atgagatctaatattttgaaattattacaacggacaagtaggagatatgtatcctcaaaggattttgagcctgtgatagggtctaatcctaagaaacaaacatctagactaatggtcggttctgtgggtgttatgattccagttctactttatttgttttataagaacgatagcaaacatagtgaaattaaaaagatataccaaaatgagaaaaaaatttaa

SEQ ID NO: 6730 - DNA, 222 bp, Artificial Sequence
  Description of Artificial Sequence: Synthetic polynucleotide
atgagatctaatattttgaaattattacaaagaacaagtaggagatatgtatcctccaaggattttgagcctgtgatagggtctaatcctaagaaacaaacatctagattaatggtcggttctgtgggtgttatgattccagttttactttatttgttttataagaacgatagcaaacatagtgaaattaaaaagatataccaaaatgagaaaaaaatttga

SEQ ID NO: 6731 - DNA, 621 bp, Saccharomyces cerevisiae
atgagtttatactttacgacattatttttattgctcactgttgagatggtaatgctcttcatcttcgttttgcctttgccattccggatccgtaggggtatttttagcacctataaccaattgacagcgaagcagcaaataaaaactataatctttataacgggttgtcttgttggcctgttgtttattgattcatggaaaaggtctcaaattcgtgtttcattataccacaacgacaacagtggctcaatcgggtcatctgctgtaactccaatacaggcactagcatcaagagcgtacaatcaaagaaatatgtatatttccgggttcatattgtacttttctatctgtatcccaactgtcatgtctattgtcaagagactggtgaaataccaaggcttaatcaacgaacaagaaaagcaaaaattgaacaaaccttcctcaaacagcaagaaagactcaaatgaagctgattccaccaaacttcaagaggaactaaggaaaaagcaaatttctctggagggcctacaaaagcaagtcaaaaacctggagaaatattttgatgagaagaatcaacctggaaatgtagcagctgctgaagcttccaagaaaggaaactaa

SEQ ID NO: 6732 - DNA, 621 bp, Artificial Sequence
  Description of Artificial Sequence: Synthetic polynucleotide
atgagtttatactttacgacattatttttattgctcactgttgagatggtaatgctcttcatcttcgttttgcctttgccattcagaatccgtaggggtatttttagcacctataaccaattgacagcgaagcagcaaataaaaactataatctttataacgggttgtcttgttggccttttgtttattgattcttggaaaaggtctcaaattcgtgtttctttataccacaacgacaacagtggctccatcgggagttctgctgtaactccaatacaggcattggcatctagagcgtacaatcaaagaaatatgtatatttccgggttcatattgtacttttctatctgtatcccaactgtcatgtctattgtcaagagattagtgaaataccaaggcttaatcaacgaacaagaaaagcaaaaattgaacaaaccttccagtaacagcaagaaagactctaatgaagctgattccaccaaacttcaagaggaattgaggaaaaagcaaatttctttggagggcttacaaaagcaagtcaaaaacttggagaaatattttgatgagaagaatcaacctggaaatgtagcagctgctgaagcttccaagaaaggaaactga

SEQ ID NO: 6733 - DNA, 2910 bp, Saccharomyces cerevisiae
atgagcactgataactcacaaaaggatgaaggtgttcctttgctttccccttactctagtagccctcaactaaggaaaaagaagcgcaatcaaaaaagaagaaaggacaagtttgttggtcacttgaagtcagactcacgtaggccaacgcaactgctgcatgataatctgcaacacaatcacggccagattactgatttcgaccagatcgattcctggggcatgctgcatgaatctgattctacaagtaatgatataataaaaagtgaggatccatcgctcaagggcgcgttcattgatcatagaccttcaatgagccaacctagggaggggcctcaaagtgtatcaagcacagttcaaccacagccaataatgaagttttcaacaccaagttacaagaaacccgcagggttaagaccctctgatcagaatagatcattagtatcggacttatccccttcagagcttgaatcatggctgaagagaaggaaatctgttcataagagttttgttgacgaaaactcccccaccgataggagacaatcgaacgcgaataatgatgtcgtgattgatgttgatgcgttaatgaaccatgttaacaacaatgcaagtactggggttaatgataacagcaagagaagaaagaaaaagaggggttctgatgatagtagcaacaaaaattccaaatccacatccagtgattcaaacgatgaagaggatgagtataactcaaggccatcttctagtctttcttcaaataactcttctttggatgacgtttgtttagtgcttgatgatgagggtagcgaagtgccaaaagcttggcctgattgtactgttttggaagaattttccaaggaagaaacagagagactaagaagtcaagctattcaagatgctgaagctttccacttccaatacgatgaagatgaggaagatggaacatcaaatgaagatggaattcttttttcaaagccaatcgtaactaatattgatgtccctgaattgggaaacagaagggtaaacgaaacagagaatttgaagaacggccgtttaaggccaaaaagaattgcgccatggcatttgattcaacgtccaatggtccttgggtccaattcaaccaaggactcaaaatcaagaattcaaagcggattacaagataacttactagtcggcagaaatattcaatatcctccgcatattatttctaataacccagaacatttcaggttcacttattttagggtggatttggactctactgttcattctccgacaatatctggtttactgcaacctggtcaaaaatttcaagatttatttgtcgcttctatatactcccaagataatagcgctggtcatatcaagacacatccaaattctccaacacctggtataaaagcagaaactgtatctcaactccagggattgacagctaaaaacccttccactttatcgtctatgtctgtggcaaatatagaggatgttcctccattctggttggatgtcagcaatcctactgaagaggagatgaaaatattaagtaaagctttcggaattcaccctttaactacagaagatatttttttgggagaagttcgtgagaaagtggaactatttagagattattacctgatttgttttagaagtttcgatattgtagcagaaaagcatgttcgtcggaggagaaaagaaaagcaagaatctgctaccttggatcatgaaagtatttcacgtcgtaaatcacaagcctatggtgctactatgtcaaatgaatcaaatgcaaataacaataacagtacaagcaatgcaagtaggagcaaatggcttccatcgattttacgtgcacgccgtcggtcatctgcaaatagaacaaccaatacatcatcatcaagctataaacgccgtgtcaaaagcgaaaagaaaaagatggaagagaacgaaaaattcaaaagaaaatcaggagacaggcacaaaccacgtgagggagaattagagccattgaatgtttacattattgttttcagaactggtgtattgacgtttcattttgctcccacaccacatcctattaatgttcgaagaagagcaagactactaaaggattaccttaatgttacctctgattggattgcgtatgccttaatcgatgacattacagacgcatttgcccctatgatagaacttatcgaagatgaagtttatgagattgaggacgccattttgaagatgcatcagtcagatgattctagtgatagcgattctagcgatagtgattccgattcgggcgctagcgatgaggatgcatttccgttcgatgtctattctaaaaagacgtcctactctagtgcaaaatctagtgtgagttcaagaagtatgagcacttctgaagcgtcattcaatgcaaatttgataggttggaagagaaaaggagatatgttgaggcggattggtgaatgccgtaaaagagtgatgagtatactaagattgctaggatccaaggctgatgtgataaaaggatttgccaaaaggtataatgagcaatgggaagcttcgccacaatctgaaatcgcaatgtatttgggtgatattcaagatcatattgtaaccatggtctcatcgctaaaccattatgaaaaactgttaagtagatcgcattcaaattatctggcacaaatcaacattgatatgacgaaggttaataatgacatgaacgacgttttgggaaaaattaccatactgggtactattgttctgccaatgaatgtgattacgggtctgtggggtatgaatgttatcgtgcccggacaatacagggattcgttgacatggtttataggcattgtgctttttatgtgtatgctagcatgttctgcatatatgtatactaagagaagattcgggttttaa

SEQ ID NO: 6734 - DNA, 2910 bp, Artificial Sequence
  Description of Artificial Sequence: Synthetic polynucleotide
atgagcactgataactctcaaaaggatgaaggtgttcctttgctttccccttactctagtagccctcaattaaggaaaaagaagcgcaatcaaaaaagaagaaaggacaagtttgttggtcacttgaagagtgactctcgtaggccaacgcaattattacatgataatttacaacacaatcacggccagattactgatttcgaccagatcgattcctggggcatgttgcatgaatctgattctacaagtaatgatataataaaaagtgaggatccatctctcaagggcgcgttcattgatcatagaccttctatgagccaacctagggaggggcctcaaagtgtatccagcacagttcaaccacagccaataatgaagttttctacaccaagttacaagaaacccgcagggttaagaccctctgatcagaatagatctttagtaagtgacttatccccttctgagcttgaaagttggttaaagagaaggaaatctgttcataagagttttgttgacgaaaactcccccaccgataggagacaaagtaacgcgaataatgatgtcgtgattgatgttgatgcgttaatgaaccatgttaacaacaatgcaagtactggggttaatgataacagcaagagaagaaagaaaaagaggggttctgatgatagtagcaacaaaaattccaaatccacatccagtgattccaacgatgaagaggatgagtataacagcaggccatcttctagtctttcttccaataactcttctttggatgacgtttgtttagtgcttgatgatgagggtagcgaagtgccaaaagcttggcctgattgtactgttttggaagaattttccaaggaagaaacagagagattgagaagtcaagctattcaagatgctgaagctttccacttccaatacgatgaagatgaggaagatggaacaagtaatgaagatggaattcttttttccaagccaatcgtaactaatattgatgtccctgaattgggaaacagaagggtaaacgaaacagagaatttgaagaacggccgtttaaggccaaaaagaattgcgccatggcatttgattcaacgtccaatggtccttgggtccaattctaccaaggactctaaatctagaattcaaagcggattacaagataacttattggtcggcagaaatattcaatatcctccgcatattatttctaataacccagaacatttcaggttcacttattttagggtggatttggactctactgttcattctccgacaatatctggtttattacaacctggtcaaaaatttcaagatttatttgtcgcttctatatactcccaagataatagcgctggtcatatcaagacacatccaaattctccaacacctggtataaaagcagaaactgtatctcaactccagggattgacagctaaaaacccttccactttatcttctatgtctgtggcaaatatagaggatgttcctccattctggttggatgtcagcaatcctactgaagaggagatgaaaatattaagtaaagctttcggaattcaccctttaactacagaagatatttttttgggagaagttcgtgagaaagtggaattatttagagattattacttgatttgttttagaagtttcgatattgtagcagaaaagcatgttcgtagaaggagaaaagaaaagcaagaatctgctaccttggatcatgaaagtatttctcgtcgtaaatctcaagcctatggtgctactatgagtaatgaaagtaatgcaaataacaataacagtacaagcaatgcaagtaggagcaaatggcttccatctattttacgtgcacgccgtagatcttctgcaaatagaacaaccaatacatcttcttctagctataaacgccgtgtcaaaagcgaaaagaaaaagatggaagagaacgaaaaattcaaaagaaaaagtggagacaggcacaaaccacgtgagggagaattagagccattgaatgtttacattattgttttcagaactggtgtattgacgtttcattttgctcccacaccacatcctattaatgttagaagaagagcaagattattgaaggattaccttaatgttacctctgattggattgcgtatgccttaatcgatgacattacagacgcatttgcccctatgatagaacttatcgaagatgaagtttatgagattgaggacgccattttgaagatgcatcagagcgatgattctagtgatagcgattctagcgatagtgattccgattctggcgctagcgatgaggatgcatttccgttcgatgtctattctaaaaagacgtcctactctagtgcaaaatctagtgtgagtagtagaagtatgagcacttctgaagcgtctttcaatgcaaatttgataggttggaagagaaaaggagatatgttgaggagaattggtgaatgccgtaaaagagtgatgagtatattaagattgttgggatccaaggctgatgtgataaaaggatttgccaaaaggtataatgagcaatgggaagcttctccacaatctgaaatcgcaatgtatttgggtgatattcaagatcatattgtaaccatggtctcttctttgaaccattatgaaaaattattaagtagaagccattctaattatttggcacaaatcaacattgatatgacgaaggttaataatgacatgaacgacgttttgggaaaaattaccatattaggtactattgttttgccaatgaatgtgattacgggtttatggggtatgaatgttatcgtgcccggacaatacagggattctttgacatggtttataggcattgtgctttttatgtgtatgttagcatgttctgcatatatgtatactaagagaagattcgggttttga

SEQ ID NO: 6735 - DNA, 504 bp, Saccharomyces cerevisiae
atgcagggcgatatcagaaggaaaaaagatcttttacctcgttataaaacaggaagcaaatataattccagaagaaggggcggttatctgactacccctatgaaaaagattatagtatacattatactgttatgtggcgtttatttcgttataaaagttgcctattctgatctgaataaagaaactgagatcaagctagaaagccattcttctgatgtttctgcaagtgcaagcgatcataccaatattgcagccggcggtgcagctgatgcgactaacaataagcaaccacaacaagctaaagtacctaaagaaaagttcaataatgaagtcgcaaagcaacaagaagtaaagaatttggagaacgatttgaaaccacaaattgattcagaaaagcaaaaacaaataaacaaggacaaaaaagaacaaaaacagcaactccagaaagagaaacaagatctcgccaaggaaaatttggctaacaatgaaatccttgataattaa

SEQ ID NO: 6736 - DNA, 504 bp, Artificial Sequence
  Description of Artificial Sequence: Synthetic polynucleotide
atgcagggcgatatcagaaggaaaaaagatcttttacctcgttataaaacaggaagcaaatataattccagaagaaggggcggttatttgactacccctatgaaaaagattatagtatacattatattattatgtggcgtttatttcgttataaaagttgcctattctgatttgaataaagaaactgagatcaagttggaaagccattcttctgatgtttctgcaagtgcaagcgatcataccaatattgcagccggcggtgcagctgatgcgactaacaataagcaaccacaacaagctaaagtacctaaagaaaagttcaataatgaagtcgcaaagcaacaagaagtaaagaatttggagaacgatttgaaaccacaaattgattctgaaaagcaaaaacaaataaacaaggacaaaaaagaacaaaaacagcaactccagaaagagaaacaagatctcgccaaggaaaatttggctaacaatgaaatccttgataattga

SEQ ID NO: 6737 - DNA, 1893 bp, Saccharomyces cerevisiae
atgctagtcttcggacctaatagtagtttcgttcgtcacgcaaacaagaaacaagaagattcgtctataatgaacgagccaaacggattgatggacccggtattgagcacaaccaacgtttctgctacttcttctaatgacaattctgcgaacaatagcatatcttcgccggaatatacctttggtcaattctcaatggattctccgcatagaacggacgccactaatactccaattttaacagcgacaactaatacgactgctaataatagtttaatgaatttaaaggataccgccagtttagctaccaactggaagtggaaaaattccaataacgcacagttcgtgaatgacggtgagaaacaaagcagtaatgctaatggtaagaaaaatggtggtgataagatatatagttcagtagccacccctcaagctttaaatgacgaattgaaaaacttggagcaactagaaaaggtattttctccaatgaatcctatcaatgacagtcattttaatgaaaatatagaattatcgccacaccaacatgcaacttctcccaagacaaaccttcttgaggcagaaccttcaatatattccaatttgtttctagatgctaggttaccaaacaacgccaacagtacaacaggattgaacgacaatgattataatctagacgataccaataatgataatactaatagcatgcaatcaatcttagaggattttgtatcttcagaagaagcattgaagttcatgccggacgctggtcgcgacgcaagaagatacagcgaggtggttacctcttcctttccttctatgacggattctagaaattcgatctctcattcgatagagttttggaatctcaatcacaaaaatagtagcaacagtaaacccactcaacaaattatccctgaaggtactgccactactgagaggcgtggatcaaccatttcacctactaccactataaacaactctaatccaaacttcaaattattagatcatgacgtttctcaagctctgagcggttatagtatggatttttctaaggactctggtataacaaagccaaaaagcatttcctcttctttaaatcgcatctcccatagcagtagcaccacaaggcaacagcgtgcctctttgcccttaattcatgatattgaatcttttgcaaatgattcggtgatggcaaatcctctgtctgattccgcatcatttctttcagaagaaaatgaagacgatgcttttggtgcgctaaattacaatagcttagatgcaaccacaatgtcggcattcgacaataacgtagaccccttcaacattctcaagtcatctccggctcaggatcaacagtttatcaaaccctctatgatgttgtcggataatgcctctgctgccgctaaattggcgacttctggtgttgataatatcacacctacaccagctttccaaagaagaagctatgatatctcgatgaactcttcgttcaaaatacttcctactagtcaagctcaccatgcagctcaacatcatcaacaacaacctactaaacaggcaacggtaagcccaaacacaagaagaagaaagtcgtcaagtgttactttaagtccaactatttctcataacaacaacaatggtaaggttcctgtccaacctcggaaaaggaaatctattactaccattgaccccaacaactacgataaaaataaacctttcaagtgtaaagactgtgagaaggcattcagacgcagtgagcacttgaaaaggcatataagatccgttcattcaacggaacgcccttttgcttgtatgttctgtgagaaaaaattcagtagaagtgacaatttatcacaacatctaaaaactcacaaaaagcacggtgatttttga

SEQ ID NO: 6738 - DNA, 1893 bp, Artificial Sequence
  Description of Artificial Sequence: Synthetic polynucleotide
atgcttgtcttcggacctaatagtagtttcgttcgtcacgcaaacaagaaacaagaagattcttctataatgaacgagccaaacggattgatggacccggtattgagcacaaccaacgtttctgctacttcttctaatgacaattctgcgaacaatagcatatcttctccggaatatacctttggtcaattctccatggattctccgcatagaacggacgccactaatactccaattttaacagcgacaactaatacgactgctaataatagtttaatgaatttaaaggataccgccagtttagctaccaactggaagtggaaaaattccaataacgcacagttcgtgaatgacggtgagaaacaaagcagtaatgctaatggtaagaaaaatggtggtgataagatatatagttctgtagccacccctcaagctttaaatgacgaattgaaaaacttggagcaattggaaaaggtattttctccaatgaatcctatcaatgacagtcattttaatgaaaatatagaattatctccacaccaacatgcaacttctcccaagacaaaccttcttgaggcagaaccttccatatattccaatttgtttttggatgctaggttaccaaacaacgccaacagtacaacaggattgaacgacaatgattataatttggacgataccaataatgataatactaatagcatgcaatccatcttagaggattttgtatcttctgaagaagcattgaagttcatgccggacgctggtcgcgacgcaagaagatacagcgaggtggttacctcttcctttccttctatgacggattctagaaattccatctctcattccatagagttttggaatctcaatcacaaaaatagtagcaacagtaaacccactcaacaaattatccctgaaggtactgccactactgagaggcgtggatctaccatttctcctactaccactataaacaactctaatccaaacttcaaattattagatcatgacgtttctcaagctttgagcggttatagtatggatttttctaaggactctggtataacaaagccaaaaagcatttcctcttctttaaatcgcatctcccatagcagtagcaccacaaggcaacagcgtgcctctttgcccttaattcatgatattgaatcttttgcaaatgattctgtgatggcaaatcctttatctgattccgcaagttttctttctgaagaaaatgaagacgatgcttttggtgcgttgaattacaatagcttagatgcaaccacaatgtctgcattcgacaataacgtagaccccttcaacattctcaagtcttctccggctcaggatcaacagtttatcaaaccctctatgatgttgagtgataatgcctctgctgccgctaaattggcgacttctggtgttgataatatcacacctacaccagctttccaaagaagaagctatgatatctctatgaactcttctttcaaaatacttcctactagtcaagctcaccatgcagctcaacatcatcaacaacaacctactaaacaggcaacggtaagcccaaacacaagaagaagaaagagtagtagtgttactttaagtccaactatttctcataacaacaacaatggtaaggttcctgtccaacctagaaaaaggaaatctattactaccattgaccccaacaactacgataaaaataaacctttcaagtgtaaagactgtgagaaggcattcagacgcagtgagcacttgaaaaggcatataagatccgttcattctacggaacgcccttttgcttgtatgttctgtgagaaaaaattcagtagaagtgacaatttatctcaacatttgaaaactcacaaaaagcacggtgatttttga

SEQ ID NO: 6739 - DNA, 342 bp, Saccharomyces cerevisiae
atgggagaacaaaacaaattgtactatgatgtcgagaaattggtgaattctttgcaggaaagttttgacctggattgcgcgcaaagtgtatcacttttcaccagtaaatcaaggagcaatgaggcttggttggaagagctagagaataaattcaagttaaaagatgatgttgaacttgatgatgtggaaaatttaagagccgaaattgacatgaagttaaatatgttggaggataaagtaagctactatgaaagactttacaaagaactcgaagagttccagaatgaaataaaaattaaaacagttgtgaataacagaagacaatcgcgaactccaaaatga

SEQ ID NO: 6740 - DNA, 342 bp, Artificial Sequence
  Description of Artificial Sequence: Synthetic polynucleotide
atgggagaacaaaacaaattgtactatgatgtcgagaaattggtgaattctttgcaggaaagttttgacttggattgcgcgcaaagtgtatctcttttcaccagtaaatctaggagcaatgaggcttggttggaagagttagagaataaattcaagttaaaagatgatgttgaacttgatgatgtggaaaatttaagagccgaaattgacatgaagttaaatatgttggaggataaagtaagctactatgaaagactttacaaagaactcgaagagttccagaatgaaataaaaattaaaacagttgtgaataacagaagacaatctagaactccaaaatga

SEQ ID NO: 6741 - DNA, 1080 bp, Saccharomyces cerevisiae
atgggtgttgaacaaatcttaaagagaaagaccggtgtcatcgttggtgaagatgtccacaacttattcacttacgctaaggaacacaagttcgctattccagctattaacgtcacctcttcttctactgccgtcgctgctttagaagctgctagagacagcaagtccccaatcattttgcaaacctctaacggtggtgctgcttacttcgctggtaagggtatctctaacgaaggtcaaaatgcttccatcaagggtgctattgccgctgcccactacatcagatccattgctccagcttacggtatcccagttgtcttacactctgaccactgtgccaagaagttgttgccatggttcgatggtatgttggaagctgatgaagcttacttcaaggaacacggtgaaccattattctcctcccacatgttggatttgtctgaagaaaccgatgaagaaaacatctctacttgtgtcaagtacttcaagagaatggccgctatggaccaatggttagaaatggaaatcggtattaccggtggtgaagaagatggtgttaacaacgaaaacgctgacaaggaagacttgtacaccaagccagaacaagtttacaacgtctacaaggctttgcacccaatctctccaaacttctccattgctgctgctttcggtaactgtcacggtttgtacgctggtgacatcgctttgagaccagaaatcttggctgaacaccaaaagtacaccagagaacaagttggttgcaaggaagaaaagccattgttcttggtcttccacggtggttccggttctactgtccaagaattccacactggtattgacaacggtgttgtcaaggtcaacttggacactgactgtcaatacgcttacttgactggtatcagagactacgtcttgaacaagaaggactacataatgtccccagtcggtaacccagaaggtccagaaaagccaaacaagaagttcttcgacccaagagtctgggttagagaaggtgaaaagaccatgggtgctaagatcaccaagtctttggaaactttccgtaccactaacactttataa

SEQ ID NO: 6742 - DNA, 1080 bp, Artificial Sequence
  Description of Artificial Sequence: Synthetic polynucleotide
atgggtgttgaacaaatcttaaagagaaagaccggtgtcatcgttggtgaagatgtccacaacttattcacttacgctaaggaacacaagttcgctattccagctattaacgtcacctcttcttctactgccgtcgctgctttagaagctgctagagacagcaagtccccaatcattttgcaaacctctaacggtggtgctgcttacttcgctggtaagggtatctctaacgaaggtcaaaatgcttccatcaagggtgctattgccgctgcccactacatcagatccattgctccagcttacggtatcccagttgtcttacactctgaccactgtgccaagaagttgttgccatggttcgatggtatgttggaagctgatgaagcttacttcaaggaacacggtgaaccattattctcctcccacatgttggatttgtctgaagaaaccgatgaagaaaacatctctacttgtgtcaagtacttcaagagaatggccgctatggaccaatggttagaaatggaaatcggtattaccggtggtgaagaagatggtgttaacaacgaaaacgctgacaaggaagacttgtacaccaagccagaacaagtttacaacgtctacaaggctttgcacccaatctctccaaacttctccattgctgctgctttcggtaactgtcacggtttgtacgctggtgacatcgctttgagaccagaaatcttggctgaacaccaaaagtacaccagagaacaagttggttgcaaggaagaaaagccattgttcttggtcttccacggtggttccggttctactgtccaagaattccacactggtattgacaacggtgttgtcaaggtcaacttggacactgactgtcaatacgcttacttgactggtatcagagactacgtcttgaacaagaaggactacataatgtccccagtcggtaacccagaaggtccagaaaagccaaacaagaagttcttcgacccaagagtctgggttagagaaggtgaaaagaccatgggtgctaagatcaccaagtctttggaaactttccgtaccactaacactttatga

SEQ ID NO: 6743 - DNA, 1326 bp, Saccharomyces cerevisiae
atgagtagcacgatattttaccgctttaagtctcaacgaaacacatcaagaattttatttgatggtaccggcctgacagtatttgatttgaaaagggaaattattcaagagaacaaactaggtgacggcacagatttccaattaaaaatttacaacccagatacagaagaggaatacgacgatgatgcctttgttatacctagatctactagtgtcatagtaaaaagatctccagcaattaaatcattctccgtacacagtcgacttaaagggaatgtgggagcagcagctcttgggaacgcaacaaggtatgttactggtaggccaagagtgttgcaaaagagacaacacactgctacaaccactgctaatgttagtggtacaacggaagaagaaagaattgctagtatgtttgccacacaagaaaatcaatgggaacaaacgcaagaagaaatgtctgcagccacacctgtttttttcaagtcacagacgaataagaattctgcacaagaaaacgaaggcccaccgccaccaggttatatgtgctatcgttgtgggggtagagaccactggattaaaaattgtccaactaacagcgatccaaattttgaaggaaaaagaatcagaagaaccacaggtattccaaagaagtttttaaaatccattgaaatagatcccgagacaatgacaccggaagagatggctcagcgaaagattatgattacggacgaaggcaagttcgtggtacaagttgaagacaaacaatcatgggaagactaccaaaggaaaagagagaaccgtcaaattgatggtgatgaaaccatttggagaaaaggccatttcaaagatcttcctgacgatttaaaatgtcccttgacaggtggtcttttgaggcagccggtaaagacaagcaagtgctgtaacatagatttctcaaaagaggcgctggaaaatgcactggtagagagcgactttgtatgccccaattgcgaaacccgcgatatccttctcgattctttagtacccgaccaggacaaggaaaaggaggtcgaaacgtttttgaagaaacaagaggaactacacggaagctctaaagatggcaaccagccagaaactaagaaaatgaagttgatggatccaactggcaccgctggcttgaacaacaataccagccttccaacttctgtaaataacggcggtacgccagtgccaccagtaccgttacctttcggtatacctcctttccccatgtttccaatgcccttcatgcctccaacggctactatcacaaatcctcatcaagctgacgcaagccctaagaaatga

SEQ ID NO: 6744 - DNA, 1326 bp, Artificial Sequence
  Description of Artificial Sequence: Synthetic polynucleotide
atgagtagcacgatattttaccgctttaagtctcaaagaaacacatctagaattttatttgatggtaccggcttaacagtatttgatttgaaaagggaaattattcaagagaacaaattgggtgacggcacagatttccaattaaaaatttacaacccagatacagaagaggaatacgacgatgatgcctttgttatacctagatctactagtgtcatagtaaaaagatctccagcaattaaatctttctccgtacacagtagacttaaagggaatgtgggagcagcagctcttgggaacgcaacaaggtatgttactggtaggccaagagtgttgcaaaagagacaacacactgctacaaccactgctaatgttagtggtacaacggaagaagaaagaattgctagtatgtttgccacacaagaaaatcaatgggaacaaacgcaagaagaaatgtctgcagccacacctgtttttttcaagtctcagacgaataagaattctgcacaagaaaacgaaggcccaccgccaccaggttatatgtgctatcgttgtgggggtagagaccactggattaaaaattgtccaactaacagcgatccaaattttgaaggaaaaagaatcagaagaaccacaggtattccaaagaagtttttaaaatccattgaaatagatcccgagacaatgacaccggaagagatggctcagagaaagattatgattacggacgaaggcaagttcgtggtacaagttgaagacaaacaaagttgggaagactaccaaaggaaaagagagaaccgtcaaattgatggtgatgaaaccatttggagaaaaggccatttcaaagatcttcctgacgatttaaaatgtcccttgacaggtggtcttttgaggcagccggtaaagacaagcaagtgctgtaacatagatttctccaaagaggcgttagaaaatgcattggtagagagcgactttgtatgccccaattgcgaaacccgcgatatccttctcgattctttagtacccgaccaggacaaggaaaaggaggtcgaaacgtttttgaagaaacaagaggaattgcacggaagctctaaagatggcaaccagccagaaactaagaaaatgaagttgatggatccaactggcaccgctggcttgaacaacaataccagccttccaacttctgtaaataacggcggtacgccagtgccaccagtaccgttacctttcggtatacctcctttccccatgtttccaatgcccttcatgcctccaacggctactatcacaaatcctcatcaagctgacgcaagccctaagaaatga

SEQ ID NO: 6745 - DNA, 369 bp, Saccharomyces cerevisiae
atggcagtacccgggtattacgaattatatcgtagaagtactatagggaatagtttggtggatgctcttgatactttaattagtgatgggagaatagaagcgtcgttagctatgcgtgttttagagacatttgacaaagtggtggctgagactttaaaagacaatacccaatctaaattgactgtgaaaggaaacctggacacatatggattttgcgatgatgtttggacttttatcgtaaaaaattgtcaggttactgttgaggacagccaccgcgacgcctcccagaacgggtctggagatagccaaagtgtaatttcggtggataagttgaggattgtggcatgtaactcaaaaaagagcgagtaa

SEQ ID NO: 6746 - DNA, 369 bp, Artificial Sequence
  Description of Artificial Sequence: Synthetic polynucleotide
atggcagtacccgggtattacgaattatatcgtagaagtactatagggaatagtttggtggatgctcttgatactttaattagtgatgggagaatagaagcgtctttagctatgcgtgttttagagacatttgacaaagtggtggctgagactttaaaagacaatacccaatctaaattgactgtgaaaggaaacttggacacatatggattttgcgatgatgtttggacttttatcgtaaaaaattgtcaggttactgttgaggacagccaccgcgacgcctcccagaacgggtctggagatagccaaagtgtaatttctgtggataagttgaggattgtggcatgtaactccaaaaagagcgagtga

SEQ ID NO: 6747 - DNA, 3114 bp, Saccharomyces cerevisiae
atggcatgcctctcaagaattgatgcaaatttgctccaatattatgaaaaacctgaacccaataatacggttgatttatacgtcagtaataacagtaataataacgggctgaaagaaggagataagtccatctctacaccagttcctcagccttacggaagtgaatattccaattgtttgttattgagtaactctgagtatatctgttaccatttttcctcaagatcaacattgttgacattttatcctttgagtgacgcataccatgggaagacaattaatatacacttaccaaatgcttctatgaatcagagatacactttaacgatacaagaagtggaacagcaattactggttaatgttatcttaaaagatggttcgtttttaacgttacaactacccctaagtttcctattttcatcggccaacactctcaatggagagtggtttcatctccaaaatccctacgactttacagttagagttcctcatttccttttctatgtatcaccccagttctcagttgtttttttggaagatggcggtttgttgggtttaaaaaaagttgacggcgtacattacgagcctttactattcaatgataattcatacttgaaaagcctaacgcgatttttttctaggagttctaaatcggattacgatagtgtgattagttgtaaattattccatgaaagatacttaattgtgttgactcagaattgccacttgaaaatttgggatttaacttcatttactttaatacaagattatgatatggtttcacagtcagattcagacccaagccattttagaaaagtggaagctgtaggggaatacctttccttgtataacaatactctagttacattgttgcctttggaaaatgggctttttcaaatgggcaccttgttggttgattcaagcggtattttgacttatacttttcaaaataacatccccactaatctttcagcttctgctatttggtcaattgtagatttagttctaacgagaccattggagttgaatgtcgaggctagttatttaaatttgatcgttttatggaaaagtggcactgctagcaagttacagatactaaacgtaaatgatgaaagtttcaaaaactatgaatggatagaatcagttaacaaatccttagtagatttgcaatccgaacatgatttggatatcgttacaaagactggagatgttgagaggggtttctgtaatttgaaatcaagatatggtacccaaatttttgaacgtgcacagcaaatattgagtgaaaataagattattatggctcataacgaagatgaagaatatttggctaatttagaaacaatattgagagacgtaaaaaccgcattcaacgaggcttcttctataacactttatggcgatgaaattattctcgtcaattgtttccaaccgtataatcattccctttacaagctgaatactactgtggagaattggttttataatatgcactctgaaactgatggttctgaattgttcaagtatttaaggacattgaatggttttgcttctactttgtcaaatgatgttcttagatccatttctaagaagtttcttgatataataacaggagagctgcctgattctatgactaccgtagaaaaatttacggacattttcaaaaattgcctagaaaatcaatttgaaatcacaaatctaaagattcttttcgacgaattaaactcttttgatatacccgttgttttaaatgatttaatcaataaccaaatgaagcctggtatattttggaaaaaggatttcatctctgcaatcaaattcgatggtttcacaagtataatttccctagaatctcttcaccagttactttccatacattatcgtattactttacaagtattgttaacattcgttctgttcgatcttgataccgaaattttcggacagcatatatctacattattggatttgcattataagcaatttttattgttaaacctttatagacaagataagtgtctgttggcggaagttcttctcaaggattcttctgaattctctttcggtgtcaaattttttaactacggccaactcattgcctatatcgattccttaaactctaatgtttacaatgcttccatcactgaaaattctttctttatgacgtttttccgctcatatatcattgaaaacacatctcataagaatataaggttctttctcgagaacgttgaatgccccttctacttacgccacaacgaggtgcaagaatttatgtttgccatgacgttatttagttgtggtaatttcgatcaatcctatgaaatttttcaactacacgattatccggaggctatcaatgataaattgccgacattcttagaagaccttaagagtgaaaactatcacggtgatagtatatggaaagatcttttgtgcacctttacagttccatataggcattctgcattctattatcaattatctctcttatttgatagaaataacagccaagaatttgctttgaaatgtatatctaagtcagcagaatattcattaaaagaaattcagattgaagaactgcaagacttcaaagaaaaacagcatattcattatttaaatcttttaatccacttcagaatgtttgaagaagtcttggatgttttgagattgggtcacgagtgtctttccgacacagtaagaacaaattttctccaattattattacaggaagacatatattcacgagattttttcagcacacttctgcgcttgtgtaacgcacattcagacaatggcgagctatatcttcgtacagtagatattaaaatagtggatagtattctgtcacaaaatctacggagtggtgattgggagtgttttaagaaactttattgttttagaatgttgaacaaaagcgagagggctgctgcagaagtactgtaccagtacatattaatgcaagctgatcttgatgttattcgaaagagaaaatgttacctaatggtcatcaacgttttatctagctttgatagtgcatacgatcaatggattctaaacggaagtaaagtggttactttaactgatttaagagatgagttacgaggtctatag

SEQ ID NO: 6748 - DNA, 3114 bp, Artificial Sequence
  Description of Artificial Sequence: Synthetic polynucleotide
atggcatgcctcagcagaattgatgcaaatttgctccaatattatgaaaaacctgaacccaataatacggttgatttatacgtcagtaataacagtaataataacgggttgaaagaaggagataagtccatctctacaccagttcctcagccttacggaagtgaatattccaattgtttgttattgagtaactctgagtatatctgttaccatttttccagcagatctacattgttgacattttatcctttgagtgacgcataccatgggaagacaattaatatacacttaccaaatgcttctatgaatcagagatacactttaacgatacaagaagtggaacagcaattattggttaatgttatcttaaaagatggttcttttttaacgttacaattgcccttgagtttcttattttcttctgccaacactctcaatggagagtggtttcatctccaaaatccctacgactttacagttagagttcctcatttccttttctatgtatctccccagttctctgttgtttttttggaagatggcggtttgttgggtttaaaaaaagttgacggcgtacattacgagcctttattattcaatgataattcttacttgaaaagcttaacgagatttttttctaggagttctaaatctgattacgatagtgtgattagttgtaaattattccatgaaagatacttaattgtgttgactcagaattgccacttgaaaatttgggatttaacttcttttactttaatacaagattatgatatggtttctcagagcgattctgacccaagccattttagaaaagtggaagctgtaggggaatacctttccttgtataacaatactttggttacattgttgcctttggaaaatgggctttttcaaatgggcaccttgttggttgattctagcggtattttgacttatacttttcaaaataacatccccactaatctttctgcttctgctatttggtctattgtagatttagttttgacgagaccattggagttgaatgtcgaggctagttatttaaatttgatcgttttatggaaaagtggcactgctagcaagttacagatattaaacgtaaatgatgaaagtttcaaaaactatgaatggatagaatctgttaacaaatccttagtagatttgcaatccgaacatgatttggatatcgttacaaagactggagatgttgagaggggtttctgtaatttgaaatctagatatggtacccaaatttttgaacgtgcacagcaaatattgagtgaaaataagattattatggctcataacgaagatgaagaatatttggctaatttagaaacaatattgagagacgtaaaaaccgcattcaacgaggcttcttctataacactttatggcgatgaaattattctcgtcaattgtttccaaccgtataatcattccctttacaagttgaatactactgtggagaattggttttataatatgcactctgaaactgatggttctgaattgttcaagtatttaaggacattgaatggttttgcttctactttgagcaatgatgttcttagatccatttctaagaagtttcttgatataataacaggagagcttcctgattctatgactaccgtagaaaaatttacggacattttcaaaaattgcttagaaaatcaatttgaaatcacaaatttgaagattcttttcgacgaattaaactcttttgatatacccgttgttttaaatgatttaatcaataaccaaatgaagcctggtatattttggaaaaaggatttcatctctgcaatcaaattcgatggtttcacaagtataatttccttagaatctcttcaccagttactttccatacattatcgtattactttacaagtattgttaacattcgttttgttcgatcttgataccgaaattttcggacagcatatatctacattattggatttgcattataagcaatttttattgttaaacctttatagacaagataagtgtttgttggcggaagttcttctcaaggattcttctgaattctctttcggtgtcaaattttttaactacggccaactcattgcctatatcgattccttaaactctaatgtttacaatgcttccatcactgaaaattctttctttatgacgtttttccgctcttatatcattgaaaacacatctcataagaatataaggttctttctcgagaacgttgaatgccccttctacttacgccacaacgaggtgcaagaatttatgtttgccatgacgttatttagttgtggtaatttcgatcaatcctatgaaatttttcaattacacgattatccggaggctatcaatgataaattgccgacattcttagaagaccttaagagtgaaaactatcacggtgatagtatatggaaagatcttttgtgcacctttacagttccatataggcattctgcattctattatcaattatctctcttatttgatagaaataacagccaagaatttgctttgaaatgtatatctaagtctgcagaatattctttaaaagaaattcagattgaagaattacaagacttcaaagaaaaacagcatattcattatttaaatcttttaatccacttcagaatgtttgaagaagtcttggatgttttgagattgggtcacgagtgtctttccgacacagtaagaacaaattttctccaattattattacaggaagacatatattctagagattttttcagcacacttttacgcttgtgtaacgcacattctgacaatggcgagttgtatcttcgtacagtagatattaaaatagtggatagtattttatctcaaaatttaagaagtggtgattgggagtgttttaagaaactttattgttttagaatgttgaacaaaagcgagagggctgctgcagaagtattgtaccagtacatattaatgcaagctgatcttgatgttattagaaagagaaaatgttacttgatggtcatcaacgttttatctagctttgatagtgcatacgatcaatggattttgaacggaagtaaagtggttactttaactgatttaagagatgagttaagaggtttatga

SEQ ID NO: 6749 - DNA, 504 bp, Saccharomyces cerevisiae
atgattatttacaaggatatcttctctaacgacgaattgttgtctgatgcttacgacgctaagttagttgatgacgttatctacgaagccgactgtgctatggtcaatgtcggaggtgacaacatcgatatcggtgctaacccatctgctgaaggtggtgacgatgatgttgaagaaggtgctgaaatggtcaacaacgttgtccactctttccgtctacaacaaaccgcttttgacaagaagtccttcttgacctacattaagggttacatgaaggctgttaaagctaagttgcaagaaactaacccagaagaagttcctaaattcgaaaagggtgctcaaacttacgtcaagaaggttattggttctttcaaggactgggagttcttcactggtgaatccatggacccagatgccatggttgtcatgttgaactaccgtgaagatggtaccactccatttgttgccatctggaagcacggtattgtggaagaaaagatctaa

SEQ ID NO: 6750 - DNA, 504 bp, Artificial Sequence
  Description of Artificial Sequence: Synthetic polynucleotide
atgattatttacaaggatatcttctctaacgacgaattgttgtctgatgcttacgacgctaagttagttgatgacgttatctacgaagccgactgtgctatggtcaatgtcggaggtgacaacatcgatatcggtgctaacccatctgctgaaggtggtgacgatgatgttgaagaaggtgctgaaatggtcaacaacgttgtccactctttccgtttacaacaaaccgcttttgacaagaagtccttcttgacctacattaagggttacatgaaggctgttaaagctaagttgcaagaaactaacccagaagaagttcctaaattcgaaaagggtgctcaaacttacgtcaagaaggttattggttctttcaaggactgggagttcttcactggtgaatccatggacccagatgccatggttgtcatgttgaactaccgtgaagatggtaccactccatttgttgccatctggaagcacggtattgtggaagaaaagatctga

SEQ ID NO: 6751 - DNA, 837 bp, Saccharomyces cerevisiae
atgcattatttgcctgttgcgatagtaacaggtgccactaggggtataggcaaggcaatatgtcaaaagttatttcaaaagggtttaagttgcattatacttgggtctactaaagaaagtatagagcgcaccgcgatagatagaggccaattacaatcgggattatcatatcagcggcaatgtgctatagcaattgattttaagaaatggcctcactggcttgactatgagtcatatgacggtatcgaatatttcaaagatagaccgcccttgaaacagaaatattccacattgttcgacccatgtaacaaatggtcaaataatgaacgccgctactacgtaaacttattgattaactgcgcaggcttgactcaagaatcattaagtgtaagaaccactgcatctcaaattcaggacataatgaatgttaactttatgagccctgtgacgatgacaaacatctgtattaagtatatgatgaagtcgcaaaggagatggccggaactcagtggtcaatctgctcgacccaccatcgtaaatatttcctccattctacactccggaaaaatgaaggttccaggtacatctgtttactccgcctctaaagccgcactgtccagatttacagaagttttagctgcagaaatggaaccaagaaacattaggtgttttacgatatctccaggtttagtcaaagggaccgatatgatccaaaatttgccagtggaggctaaagaaatgctggagagaaccattggggcaagcggtacaagcgcacccgctgaaatagcggaagaagtctggtctctatacagtagaactgctttggagacgtaa

SEQ ID NO: 6752 - DNA, 837 bp, Artificial Sequence
  Description of Artificial Sequence: Synthetic polynucleotide
atgcattatttgcctgttgcgatagtaacaggtgccactaggggtataggcaaggcaatatgtcaaaagttatttcaaaagggtttaagttgcattatacttgggtctactaaagaaagtatagagcgcaccgcgatagatagaggccaattacaaagtggattatcttatcagagacaatgtgctatagcaattgattttaagaaatggcctcactggcttgactatgagtcttatgacggtatcgaatatttcaaagatagaccgcccttgaaacagaaatattccacattgttcgacccatgtaacaaatggtctaataatgaacgccgctactacgtaaacttattgattaactgcgcaggcttgactcaagaatctttaagtgtaagaaccactgcatctcaaattcaggacataatgaatgttaactttatgagccctgtgacgatgacaaacatctgtattaagtatatgatgaagtctcaaaggagatggccggaactcagtggtcaatctgctagacccaccatcgtaaatatttcctccattttacactccggaaaaatgaaggttccaggtacatctgtttactccgcctctaaagccgcattgtccagatttacagaagttttagctgcagaaatggaaccaagaaacattaggtgttttacgatatctccaggtttagtcaaagggaccgatatgatccaaaatttgccagtggaggctaaagaaatgttagagagaaccattggggcaagcggtacaagcgcacccgctgaaatagcggaagaagtctggtctttgtacagtagaactgctttggagacgtga

SEQ ID NO: 6753 - DNA, 2217 bp, Saccharomyces cerevisiae
atgtctacacaatttaggaagtctaatcataatagtcatagtagtaaaaaactaaatcctgcgctaaagtccaaaatagatacgcttacagaattgttccctgactggacgagtgatgatttaattgatatagttcaagaatatgatgatttggaaactataattgataaaattacttccggcgcagtgacaagatgggatgaagtaaagaaacctgctaagaaggaaaaatatgaaaaaaaggagcaacaacactcatatgtccctcaacaacatttgccaaatccagaagatgatattacatataagagttctaataatagcaattcttttacttctacaaagcataacagtagtaacaattatactcaagccagaaataagaagaaggtacaaacaccacgagctcatacaaccgggaaacatgttaatctcgacaaggggaagcacgtaccatccaagcctgtttcaaacactacatcgtgggcagcagctgtttctgtagatactaaacatgacgttcctcaagattcaaatgataacaataatgaagaattagaagcacaagggcaacaagcgcaggagaaaaatcaagaaaaagagcaagaagagcaacaacagcaggaagggcataataacaaagaagaacacaaacaaatagagcaaccttctttatcttcaaagaaaacaacttctaggacatctgcttcacaaccaaagaaaatgtcgtgggctgcaattgctacaccaaagccaaaggctgttaaaaagaccgagtctcctcttgaaaacgttgctgaattgaagaaagaaataagcgatattaagaaggatgaccaaaagtctgaagctagtgaagaaaaagttaatgaacaagaaacatctgcacaagaacaagaggaggagactgctgaaccttctgaagaaaatgaagacagagtccctgaagtggacggagaagaagtccaagaagaagctgaaaaaaaggaacaagtaaaagaagaggaacagacagcggaagagctggaacaagaacaagataatgttgctgctccagaagaagaagttacagttgttgaagaaaaggttgaaattagtgctgttatttcagagcctccagaagatcaagctaatactgtacctcaaccacaacaacaatcccaacaaccacagcaaccacagcaaccacagcaaccacagcaaccacagcaaccacagcaacaacaacaaccacagcaaccacaacaaccacaacaacaactacaacagcaacagcaacagcaacaacaaccagtacaagctcaagctcaagcccaagaagaacaattatctcaaaactactatactcaacaacagcagcaacaatacgctcaacaacagcatcagttacagcaacagtatttgtcccaacaacaacaatatgctcagcaacagcaacagcatccacaacctcaatcacaacaacctcaatcacagcaaagtccacaaagtcaaaaacaagggaacaacgtggctgcccaacagtactacatgtatcaaaaccaatttcctggatattcttatccaggtatgtttgattcacaaggatacgcttacggtcaacaatatcagcaacttgctcaaaacaacgctcaaactagtggtaatgctaaccaatataatttccaacaaggttatggtcaagcaggcgcgaacactgctgctgctaatttgactagtgctgccgctgctgctgccgcttctccagctacagctcacgcccaacctcaacaacaacagccatacggtggctcattcatgccatactacgcccacttttaccaacagtcattcccatatggtcaacctcaatacggtgtagctggtcaatatccataccagttaccaaagaacaattacaactattaccaaactcaaaacggtcaggaacagcaaagtccaaatcaaggtgttgcccagcattctgaagactctcaacagaagcaatcacaacagcaacagcaacagcaacctcaaggtcaaccccaacctgaagttcaaatgcaaaatggccaacctgttaacccacaacaacaaatgcagttccaacaatactatcaattccaacaacaacagcaacaagctgctgccgctgccgctgctgctgcccaacaaggtgtaccatatggctacaacggttatgattacaattctaaaaattcaagaggtttctactaa

SEQ ID NO: 6754 - DNA, 2217 bp, Artificial Sequence
  Description of Artificial Sequence: Synthetic polynucleotide
atgtctacacaatttaggaagtctaatcataatagtcatagtagtaaaaaattgaatcctgcgttaaagtccaaaatagatacgcttacagaattgttccctgactggacgagtgatgatttaattgatatagttcaagaatatgatgatttggaaactataattgataaaattacttccggcgcagtgacaagatgggatgaagtaaagaaacctgctaagaaggaaaaatatgaaaaaaaggagcaacaacactcctatgtccctcaacaacatttgccaaatccagaagatgatattacatataagagttctaataatagcaattcttttacttctacaaagcataacagtagtaacaattatactcaagccagaaataagaagaaggtacaaacaccaagagctcatacaaccgggaaacatgttaatctcgacaaggggaagcacgtaccatccaagcctgtttctaacactacatcttgggcagcagctgtttctgtagatactaaacatgacgttcctcaagattctaatgataacaataatgaagaattagaagcacaagggcaacaagcgcaggagaaaaatcaagaaaaagagcaagaagagcaacaacagcaggaagggcataataacaaagaagaacacaaacaaatagagcaaccttctttatcttccaagaaaacaacttctaggacatctgcttctcaaccaaagaaaatgtcttgggctgcaattgctacaccaaagccaaaggctgttaaaaagaccgagtctcctcttgaaaacgttgctgaattgaagaaagaaataagcgatattaagaaggatgaccaaaagtctgaagctagtgaagaaaaagttaatgaacaagaaacatctgcacaagaacaagaggaggagactgctgaaccttctgaagaaaatgaagacagagtccctgaagtggacggagaagaagtccaagaagaagctgaaaaaaaggaacaagtaaaagaagaggaacagacagcggaagagttagaacaagaacaagataatgttgctgctccagaagaagaagttacagttgttgaagaaaaggttgaaattagtgctgttatttctgagcctccagaagatcaagctaatactgtacctcaaccacaacaacaatcccaacaaccacagcaaccacagcaaccacagcaaccacagcaaccacagcaaccacagcaacaacaacaaccacagcaaccacaacaaccacaacaacaattacaacagcaacagcaacagcaacaacaaccagtacaagctcaagctcaagcccaagaagaacaattatctcaaaactactatactcaacaacagcagcaacaatacgctcaacaacagcatcagttacagcaacagtatttgtcccaacaacaacaatatgctcagcaacagcaacagcatccacaacctcaatctcaacaacctcaatctcagcaaagtccacaaagtcaaaaacaagggaacaacgtggctgcccaacagtactacatgtatcaaaaccaatttcctggatattcttatccaggtatgtttgattctcaaggatacgcttacggtcaacaatatcagcaacttgctcaaaacaacgctcaaactagtggtaatgctaaccaatataatttccaacaaggttatggtcaagcaggcgcgaacactgctgctgctaatttgactagtgctgccgctgctgctgccgcttctccagctacagctcacgcccaacctcaacaacaacagccatacggtggcagtttcatgccatactacgcccacttttaccaacagtctttcccatatggtcaacctcaatacggtgtagctggtcaatatccataccagttaccaaagaacaattacaactattaccaaactcaaaacggtcaggaacagcaaagtccaaatcaaggtgttgcccagcattctgaagactctcaacagaagcaatctcaacagcaacagcaacagcaacctcaaggtcaaccccaacctgaagttcaaatgcaaaatggccaacctgttaacccacaacaacaaatgcagttccaacaatactatcaattccaacaacaacagcaacaagctgctgccgctgccgctgctgctgcccaacaaggtgtaccatatggctacaacggttatgattacaattctaaaaattctagaggtttctactga

SEQ ID NO: 6755 - DNA, 261 bp, Saccharomyces cerevisiae
atggggaatataatgtcagctagttttgcgcctgaatgcactgacctgaagacgaaatacgatagttgttttaatgaatggtatagcgaaaaattcctgaagggaaaatccgttgagaacgagtgctcaaaacaatggtacgcttatactacatgtgtcaacgcagctctcgtcaaacaaggtattaagcctgctctagacgaagctagggaggaggcgccgtttgaaaatggcggcaaactaaaagaagttgacaaatga

SEQ ID NO: 6756 - DNA, 261 bp, Artificial Sequence
  Description of Artificial Sequence: Synthetic polynucleotide
atggggaatataatgtctgctagttttgcgcctgaatgcactgacttgaagacgaaatacgatagttgttttaatgaatggtatagcgaaaaattcttgaagggaaaatccgttgagaacgagtgctccaaacaatggtacgcttatactacatgtgtcaacgcagctctcgtcaaacaaggtattaagcctgctttggacgaagctagggaggaggcgccgtttgaaaatggcggcaaattgaaagaagttgacaaatga

SEQ ID NO: 6757 - DNA, 879 bp, Saccharomyces cerevisiae
atggattctgcaagcaaagaggaaacattggaaaaacttgatcaagaaattacagtgaacctgcagaagatagactctaacttgagtttctgctttcataagatcacccaggacatcatcccacacgtggctacatattcagaaatatgtgagcggatcatggatagcaccgaatggctggggactatgtttcaagagactgggctggtgaatttgcaggcaaatgcagctgcaccagtgggaaacgctccagtcaaaagccttgtgagcaataatgttggtatatttcctacatccgctgaagaggcgagtaggcagtcccagacagacaatgggcctaacgaggcagattcagctgtacatgtcaaccgggatgtccattctatgtttaataacgacagtatagatgatttccacacagcgaatataacatccacgggacagatattgaaacttccggactctagcgacgaagatactggttcagaggcggtgccttcaagggagcaaacagaccttacaggcgagggtcatggtggagctgatgatgagcaagatgaaagtacaatacagagacaaagccgcaaaagaaagatttcgctacttttgcagcagcagtacgggtctagttccagcatggtaccgtctccgattgtgcccaataaaatgcggaagcaactggctcatgaagaacatattaataacgacggcgataacgacgatgagaacagcaataatatagagagctcgcctctgaagcaggggcaccaccacccgaagggacaagcggatgataacaacgaagggcccgatgaagaagagagtacgaaagaagtaccaaagcctgggaccatcattcatttttctacgaatagatag

SEQ ID NO: 6758 - DNA, 879 bp, Artificial Sequence
  Description of Artificial Sequence: Synthetic polynucleotide
atggattctgcaagcaaagaggaaacattggaaaaacttgatcaagaaattacagtgaacttacagaagatagactctaacttgagtttctgctttcataagatcacccaggacatcatcccacacgtggctacatattctgaaatatgtgagagaatcatggatagcaccgaatggttagggactatgtttcaagagactgggttagtgaatttgcaggcaaatgcagctgcaccagtgggaaacgctccagtcaaaagccttgtgagcaataatgttggtatatttcctacatccgctgaagaggcgagtaggcagtcccagacagacaatgggcctaacgaggcagattctgctgtacatgtcaacagagatgtccattctatgtttaataacgacagtatagatgatttccacacagcgaatataacatccacgggacagatattgaaacttccggactctagcgacgaagatactggttctgaggcggtgccttctagggagcaaacagaccttacaggcgagggtcatggtggagctgatgatgagcaagatgaaagtacaatacagagacaaagccgcaaaagaaagatttctttacttttgcagcagcagtacgggtctagttccagcatggtaccgtctccgattgtgcccaataaaatgagaaagcaattggctcatgaagaacatattaataacgacggcgataacgacgatgagaacagcaataatatagagagctctcctttgaagcaggggcaccaccacccgaagggacaagcggatgataacaacgaagggcccgatgaagaagagagtacgaaagaagtaccaaagcctgggaccatcattcatttttctacgaatagatga

SEQ ID NO: 6759 - DNA, 1062 bp, Saccharomyces cerevisiae
atgattcaatttaaaagtccaggtaactggctgttcatagtaccctggattgccttcattccatggtatggtatgctgatagccatgcttatttgctgggccagtcaaggccatcccatatattggttcatgcactcggagcaattccctgtgtacatttcagatataggtgccactaatttaaggccactgtttatatcgtgcgccggctggcagggtctaggctatgtaatcactgttgcccttgagttttttcaaagatccggctatctgcctttccaactgaaaaaaaaagacccttctatctctgattccacatcttatgctgagaaattgcacagcggtaaatacttaatgcctccatattacacaaaggatgaacggaacctgattttcgcagcttttgttctcggcagcattggtgaactagcccttttattcagttccatcttctcaaccgccctgtaccatcgcgttcacattgctatggtctctgttttcgtcgtcttcatgttcctatccacttgctgcttgattgcagagtatttcctcatgggaaggcactatgcctcagtccaccccctagccagccctcatttcaatcctcaatcatctgaaaaaagctttaaccaagattataacactgtggatgagctgccttggtataaatggaaaggccatgtatggaataaatttaccatcagtgcaactctaaaagttatatggttaactctcgcagttgtatgggccatttgttttggtgctatcaatgatagatctaagagtgcttgtttcgaatggttgctagcattttggtttggtatcatatttatgattctttccgccgacttttatttaggtggaagatacagacaatcccgctatttcaaccacgtggaatcattttcgggttattacaagtatgacaaggcgctaggcctctaccacagtgaagacgttttgccttcggacgataacgccggcgtgattgccacagaaacagcatcttcaaatatttacaataattcctcttccaacgaatctattcaagtagtcgtatga

SEQ ID NO: 6760 - DNA, 1062 bp, Artificial Sequence
  Description of Artificial Sequence: Synthetic polynucleotide
atgattcaatttaaaagtccaggtaactggcttttcatagtaccctggattgccttcattccatggtatggtatgttgatagccatgcttatttgctgggccagtcaaggccatcccatatattggttcatgcacagcgagcaattccctgtgtacatttctgatataggtgccactaatttaaggccattatttatatcttgcgccggctggcagggtcttggctatgtaatcactgttgcccttgagttttttcaaagatccggctatttacctttccaattgaaaaaaaaagacccttctatctctgattccacatcttatgctgagaaattgcacagcggtaaatacttaatgcctccatattacacaaaggatgaaagaaacttgattttcgcagcttttgttctcggcagcattggtgaattggcccttttattcagttccatcttctccaccgccctttaccatcgcgttcacattgctatggtctctgttttcgtcgtcttcatgttcttatccacttgctgcttgattgcagagtatttcctcatgggaaggcactatgcctctgtccaccccttagccagccctcatttcaatcctcaatcttctgaaaaaagctttaaccaagattataacactgtggatgagcttccttggtataaatggaaaggccatgtatggaataaatttaccatcagtgcaactttgaaagttatatggttaactctcgcagttgtatgggccatttgttttggtgctatcaatgatagatctaagagtgcttgtttcgaatggttgttggcattttggtttggtatcatatttatgattctttccgccgacttttatttaggtggaagatacagacaatcccgctatttcaaccacgtggaaagtttttctggttattacaagtatgacaaggcgttgggcctctaccacagtgaagacgttttgccttctgacgataacgccggcgtgattgccacagaaacagcatcttccaatatttacaataattcctcttccaacgaatctattcaagtagtcgtatga

SEQ ID NO: 6761 - DNA, 2769 bp, Saccharomyces cerevisiae
atgtcactaatatctgcgttgcaaaccaccgatgtggaatctgtccagacgtcccctgagcaaattactgaaagaaaggcggttagagtatccactttgcaagaatcgctacattcttctgaaatgcatcgcgctgctccagaaacacctcgctcaatttcaaatagcgttcacaaactgaaaactatatattctacttaccagcagagtggacaaccattgagtaaagaggcgatattccgtgcgaaacagaagtatggcattttgaatactccggctaattacaaaacacttggtttaggagactccaagagtgagtcagttgatcttgcggcccgtttagctagtaagagaacgaaagtctcgcctgatgactgtgtcgaaacagcaatcgagcaaaaggccagaggtgaggctttcaaagtaaccttttccaagattccattgaccccgcctgaagacgtcccaataacggtcaatttaggtctgaagggaaggcgtgattttttaacaagattagctgcacaaaaagcattggctttcagtccttctttagacaattccatgaagggcacctccgacagttccagtgttaaaaaaaagaggttttctggtgcccctattggtaatgagtttgatgcaaacttagttaatccacagcaccctgcaggtttcaaatccctcgatttatctaaggtattggatggagcggaaagaagggcgattagcagagttaatgacaggttgtatccccaaaaggtaaactttaaaaatggattacaaagcagcgatcaaagtggtgtatcaaaagctaacaaagaagtttttaagaaaggaactttggaaaaacttgaacattccgcagagcagttcttagagtctcatgctggtaatgaaagacaaaggctaagtgatcaacaatatatgtgtgcaaagggtgcagctgatgcagttaaagatcttgacccgaagacattggaagacccagattttgctgcaagagaggcacaaaagaaactgtacataaagcaggtagcatctccggtagtgctaaatgaagctcaaaagcttgcgaataggaaattgcaggatattgactcgcgcgatacttacatgcttttatttggtaaccaagcttacaataagcttgctgttaacatagctctacagcactattctgttaaacaagaagaaaaaaagaaaatatatttgggtggtggtttgtggatgactccagaagaggttaacgcagtcgccaaaaagttgatatcaccagtggtgaacgaaattgatgaacgagccagcagacaacgtgatgttgataaagatattgagagaaggtcaagagttcttgatcaggaatatgaggatgggaattctatggaacgtgcaaaagagcaaaacgacgggcaattattgttagcgatggcttcaaaacaacaacaggagaaagaagctaaaaaggccgaggagggacaacggtatgatcagttcgtacaaaagatgaatatcaaattacagcagaaggaaaaagaacttgaaaatgctagggaaaatcgtgaaaatctaagaaacgaactacaggaaaggttgtccaagaacctgtcaggagagaatgatgaattgaatgattggaacgatgcatgtgaaagagatctcaaaaattcgagcattgaacactattatgccgtcagatcacactttgacaatttgggaaattcggaaagagggtatgatgagcttttggaggagcgcagcaaaatacaggtagaaatcgaaagacttgtcgcttccattgctgaacataaaactgcaatccatggttttggggaaacagcagatgctggtggagctataccagctgtacagaaacagaaaattccaacaaggaaggaccttcttgatgctaccgtgaatgatcctttggttatttctgcagaaatggcaaaagaagaagcagaaatggctacagaagaatgtatgttgaaagaattacaggtagatgaaatgattataatcaggaacattatgctgcgggagtgtgaaaagaagctcgaagaggagaaggaaacggctaagaggtctagaaggggcactgaggagtcaaagaataattctaatttttctcgagatgttatcatgagtacacctgataacaatgaaaaagtgactcctatagggaagagtgcatctccaaaagatgttgttaaaagccgtttcctttctacttataatacaggaaaggatattgatagttctgccagtgctaggtcaatcactggtgttagcggcgtgttggatgatgggcctaaaacaccaacctccaataaggagaatgaattaattgacgatgaagtgaagtcatataaagtgcaccaagcagtagatggcaccggtgaagattccatcgcaaacaagagggataaatcttcaagaccagcggcgaacagtggaggctccataacgatagaacaatttttatttaataagaatgccgataaacaaggactatccaaaacagagtctgtaactatgaagagggagcctgtggtggatcaaatggactcaaaaaaggggcacgattttacccattgtaacgacaacggccgccggtcttttagtggcttttctcaaggttcgatagaaaatgattatagtaatgaagttacagatgatcaagacgatcaagagggatcggagataagagttcgcgattccaacgattccaatacctctcctaaggaaagttttttcaaagaggttatctaa

SEQ ID NO: 6762 - DNA, 2769 bp, Artificial Sequence
  Description of Artificial Sequence: Synthetic polynucleotide
atgtctttgatatctgcgttgcaaaccaccgatgtggaatctgtccagacgtcccctgagcaaattactgaaagaaaggcggttagagtatccactttgcaagaatctttgcattcttctgaaatgcatcgcgctgctccagaaacacctcgctccatttctaatagcgttcacaaattgaaaactatatattctacttaccagcagagtggacaaccattgagtaaagaggcgatattccgtgcgaaacagaagtatggcattttgaatactccggctaattacaaaacacttggtttaggagactccaagagtgagtctgttgatcttgcggcccgtttagctagtaagagaacgaaagtctctcctgatgactgtgtcgaaacagcaatcgagcaaaaggccagaggtgaggctttcaaagtaaccttttccaagattccattgaccccgcctgaagacgtcccaataacggtcaatttaggtttgaagggaaggcgtgattttttaacaagattagctgcacaaaaagcattggctttcagtccttctttagacaattccatgaagggcacctccgacagttccagtgttaaaaaaaagaggttttctggtgcccctattggtaatgagtttgatgcaaacttagttaatccacagcaccctgcaggtttcaaatccctcgatttatctaaggtattggatggagcggaaagaagggcgattagcagagttaatgacaggttgtatccccaaaaggtaaactttaaaaatggattacaaagcagcgatcaaagtggtgtatccaaagctaacaaagaagtttttaagaaaggaactttggaaaaacttgaacattccgcagagcagttcttagagtctcatgctggtaatgaaagacaaaggttgagtgatcaacaatatatgtgtgcaaagggtgcagctgatgcagttaaagatcttgacccgaagacattggaagacccagattttgctgcaagagaggcacaaaagaaactttacataaagcaggtagcatctccggtagtgttgaatgaagctcaaaagcttgcgaataggaaattgcaggatattgacagccgcgatacttacatgcttttatttggtaaccaagcttacaataagcttgctgttaacatagctttacagcactattctgttaaacaagaagaaaaaaagaaaatatatttgggtggtggtttgtggatgactccagaagaggttaacgcagtcgccaaaaagttgatatctccagtggtgaacgaaattgatgaaagagccagcagacaacgtgatgttgataaagatattgagagaaggagcagagttcttgatcaggaatatgaggatgggaattctatggaacgtgcaaaagagcaaaacgacgggcaattattgttagcgatggcttccaaacaacaacaggagaaagaagctaaaaaggccgaggagggacaaagatatgatcagttcgtacaaaagatgaatatcaaattacagcagaaggaaaaagaacttgaaaatgctagggaaaatcgtgaaaatttaagaaacgaattacaggaaaggttgtccaagaacttatctggagagaatgatgaattgaatgattggaacgatgcatgtgaaagagatctcaaaaatagtagcattgaacactattatgccgtcagaagtcactttgacaatttgggaaattctgaaagagggtatgatgagcttttggaggagcgcagcaaaatacaggtagaaatcgaaagacttgtcgcttccattgctgaacataaaactgcaatccatggttttggggaaacagcagatgctggtggagctataccagctgtacagaaacagaaaattccaacaaggaaggaccttcttgatgctaccgtgaatgatcctttggttatttctgcagaaatggcaaaagaagaagcagaaatggctacagaagaatgtatgttgaaagaattacaggtagatgaaatgattataatcaggaacattatgttgagagagtgtgaaaagaagctcgaagaggagaaggaaacggctaagaggtctagaaggggcactgaggagtctaagaataattctaatttttctagagatgttatcatgagtacacctgataacaatgaaaaagtgactcctatagggaagagtgcatctccaaaagatgttgttaaaagccgtttcctttctacttataatacaggaaaggatattgatagttctgccagtgctaggtctatcactggtgttagcggcgtgttggatgatgggcctaaaacaccaacctccaataaggagaatgaattaattgacgatgaagtgaagagttataaagtgcaccaagcagtagatggcaccggtgaagattccatcgcaaacaagagggataaatcttctagaccagcggcgaacagtggaggctccataacgatagaacaatttttatttaataagaatgccgataaacaaggattatccaaaacagagtctgtaactatgaagagggagcctgtggtggatcaaatggactctaaaaaggggcacgattttacccattgtaacgacaacggccgcagatcttttagtggcttttctcaaggttccatagaaaatgattatagtaatgaagttacagatgatcaagacgatcaagagggatctgagataagagttcgcgattccaacgattccaatacctctcctaaggaaagttttttcaaagaggttatctga

SEQ ID NO: 6763 - DNA, 690 bp, Saccharomyces cerevisiae
atgtcaagtaaacaacaatgggttagttctgctattcaaagtgattcgagtggaagatcactcagtaacgtcaacaggcttgcaggagaccaacaatctattaacgatcgtgcgttatcgttattgcagagaacaagagcgacaaagaacctgtttccaagaagagaggaaagaagacgttatgaaagctcaaaaagtgacctagatatcgaaacagactacgaagaccaagcaggtaatctagaaatcgagacagaaaatgaagaagaagctgaaatggaaactgaagtacctgcaccagtgcgaactcattcatatgccttagacagatatgttagacagaaaaggagggaaaaacaaagaaagcagagcttaaagcgcgtcgaaaagaaatatactcctagtgaattagctctgtacgaaattcgaaaataccaacgttccacggatttattaatctccaaaattccatttgcaaggctagtgaaagaagttacagacgagtttacaactaaagatcaggatttacgttggcagtcaatggcgattatggcgttacaggaagcaagcgaagcgtatctggtaggattattggaacatacaaacctcttggcgctgcatgcaaaaagaattactataatgaagaaagacatgcaactagcaagaagaatcaggggacagtttatttag

SEQ ID NO: 6764 - DNA, 690 bp, Artificial Sequence
  Description of Artificial Sequence: Synthetic polynucleotide
atgagcagtaaacaacaatgggttagttctgctattcaaagtgattctagtggaagaagtctcagtaacgtcaacaggcttgcaggagaccaacaatctattaacgatcgtgcgttatctttattgcagagaacaagagcgacaaagaacttgtttccaagaagagaggaaagaagacgttatgaaagcagtaaaagtgacttggatatcgaaacagactacgaagaccaagcaggtaatttggaaatcgagacagaaaatgaagaagaagctgaaatggaaactgaagtacctgcaccagtgagaactcattcttatgccttagacagatatgttagacagaaaaggagggaaaaacaaagaaagcagagcttaaagcgcgtcgaaaagaaatatactcctagtgaattagctttgtacgaaattagaaaataccaacgttccacggatttattaatctccaaaattccatttgcaaggttggtgaaagaagttacagacgagtttacaactaaagatcaggatttacgttggcagtccatggcgattatggcgttacaggaagcaagcgaagcgtatttggtaggattattggaacatacaaacctcttggcgttgcatgcaaaaagaattactataatgaagaaagacatgcaattggcaagaagaatcaggggacagtttatttga

SEQ ID NO: 6765 - DNA, 1923 bp, Saccharomyces cerevisiae
atgtcacctcgacagcttataccgacattaattccggaatgggcaccattatcccagcaatcgtgcataagagaggatgagttagatagtcccccgataacgcctacgagccagacatcttcatttggttcttctttttctcaacagaaaccaacctatagtacaattataggagaaaatatacacacgatcctggatgaaattcgaccatatgtgaaaaaaataactgttagtgaccaagataagaaaactataaaccaatatacgctaggagtctctgcaggaagtggacaatttggttatgtacgaaaagcgtacagttctactttaggcaaggttgttgctgtcaagattataccaaaaaaaccttggaatgcccagcaatattcagtaaatcaagtaatgaggcaaatccagctttggaagagtaaaggaaaaataacgacaaatatgagtggtaatgaggctatgagacttatgaatatcgaaaaatgtaggtgggaaatttttgcggcttcaagacttcgaaataatgttcatattgtgcgactaatagaatgcttggactctcctttcagcgaatctatctggatagtcactaattggtgcagccttggtgaactacagtggaaacgtgacgatgatgaagatattttaccgcaatggaaaaaaattgtgatttcaaattgtagtgtttctacatttgccaaaaaaatcctggaggatatgacaaaagggttggaatatttgcattctcagggttgtattcatcgtgatatcaaaccgtccaatattttattggatgaagaagaaaaagtagcgaaactttctgattttggaagttgtattttcactccccaatcattacctttcagcgatgctaattttgaagattgttttcagagggaattgaacaaaattgttggtactccggcatttattgcaccagagctatgtcatttgggcaattccaaaagagattttgtgacggatggctttaagttggatatttggtcattgggagtgacactatactgcttactgtacaacgagctgccatttttcggggaaaatgaattcgaaacctaccacaaaatcatcgaagtatcattgagttccaaaataaatggtaatactttaaacgatttagtcattaaaaggttattggagaaagacgttactttacgcataagtattcaggatttagtaaaggttttgtcgcgtgaccagcccatagattctaggaatcacagtcaaatttcatcgtccagtgtgaaccccgtaagaaacgaaggtcctgtaagaagattttttggtaggctactgactaaaaaaggaaagaaaaagacctcaggaaaagggaaagacaaggtattggtatctgcaactagtaaagtaacaccttcgatacatatcgacgaggaaccggataaagaatgtttttcgactacggtccttagatcttcgccagactcgagcgattattgttcatcgttaggggaggaagccattcaggttacggatttcttagatactttttgtaggtcaaatgaaagcttacctaatttgactgtgaataatgataagcagaattcggacatgaaaactgacagaagcgagtcatcctctcattcgtcattgaaaatcccaacacctatcaaagccatgataagactaaagagttcccctaaagagaacgggaacagaacccatattaattgctcacaggacaaaccgagttccccactaatggataggactgttggaaagcgcacggttaacaattcaggggctagaaagcttgctcattcaagtaatattctcaactttaaagcatacataaattcggaagatagtgacattcgagaaacagtagaagatgtaaaaacgtatctgaactttgcagataatggtcaaatatag

SEQ ID NO: 6766 - DNA, 1923 bp, Artificial Sequence
  Description of Artificial Sequence: Synthetic polynucleotide
atgtctcctcgtcagcttataccgacattaattccggaatgggcaccattatcccagcaaagttgcataagagaggatgagttagatagtcccccgataacgcctacgagccagacatcttcttttggttcttctttttctcaacagaaaccaacctatagtacaattataggagaaaatatacacacgatcttagatgaaattagaccatatgtgaaaaaaataactgttagtgaccaagataagaaaactataaaccaatatacgttgggagtctctgcaggaagtggacaatttggttatgtaagaaaagcgtacagttctactttaggcaaggttgttgctgtcaagattataccaaaaaaaccttggaatgcccagcaatattctgtaaatcaagtaatgaggcaaatccagctttggaagagtaaaggaaaaataacgacaaatatgagtggtaatgaggctatgagacttatgaatatcgaaaaatgtaggtgggaaatttttgcggcttccagacttagaaataatgttcatattgtgagattaatagaatgcttggactctcctttcagcgaatctatctggatagtcactaattggtgcagccttggtgaattacagtggaaacgtgacgatgatgaagatattttaccgcaatggaaaaaaattgtgatttctaattgtagtgtttctacatttgccaaaaaaatcttggaggatatgacaaaagggttggaatatttgcattctcagggttgtattcatcgtgatatcaaaccgtccaatattttattggatgaagaagaaaaagtagcgaaactttctgattttggaagttgtattttcactccccaatctttacctttcagcgatgctaattttgaagattgttttcagagggaattgaacaaaattgttggtactccggcatttattgcaccagagctctgtcatttgggcaattccaaaagagattttgtgacggatggctttaagttggatatttggtctttgggagtgacattgtactgcttattgtacaacgagttaccatttttcggggaaaatgaattcgaaacctaccacaaaatcatcgaagtatctttgagttccaaaataaatggtaatactttaaacgatttagtcattaaaaggttattggagaaagacgttactttacgcataagtattcaggatttagtaaaggttttgtctcgtgaccagcccatagattctaggaatcacagtcaaatttcttcttccagtgtgaaccccgtaagaaacgaaggtcctgtaagaagattttttggtaggttattaactaaaaaaggaaagaaaaagacctctggaaaagggaaagacaaggtattggtatctgcaactagtaaagtaacaccttccatacatatcgacgaggaaccggataaagaatgtttttccactacggtccttagatcttctccagactccagcgattattgttcttctttaggggaggaagccattcaggttacggatttcttagatactttttgtaggtctaatgaaagcttacctaatttgactgtgaataatgataagcagaatagtgacatgaaaactgacagaagcgagtcttcctctcattcttctttgaaaatcccaacacctatcaaagccatgataagattaaagagttcccctaaagagaacgggaacagaacccatattaattgcagccaggacaaaccgagttccccattaatggataggactgttggaaagcgcacggttaacaatagtggggctagaaagcttgctcattctagtaatattctcaactttaaagcatacataaattctgaagatagtgacattagagaaacagtagaagatgtaaaaacgtatttgaactttgcagataatggtcaaatatga

SEQ ID NO: 6767 - DNA, 1551 bp, Saccharomyces cerevisiae
atgaattccggaggtgaagaaccaactataaagccaaatgtatttaatattactcaacttttaaactcaaatggtgaaaaaccgggaattgcttgcatcttcttaagtaaatttgacatgaaaaagggaaatatcataatatggtctaaaagtattaatggtgcggcaattgacttaagcaatattgaatttaaatcgttaccagccggtattcacgaacaaactgacgatgttgtcaattttgtagttcctaaagaattagatgtctgtcaaactgccaagacgacaacttatgattacggcatcgcctatttcaaacaaaattcgttcgatattattgagaatgacaatcgtattgataggagtaaagttcaaatgttttctcttggtgtaattatcgatgtccaaaatgcctcatcagatagtaaaaagcacttttataaggaaatataccatgcgtatgctgccaacagatactcaagctatctagaaagtttactcggtcaatggataaggcagcgtgatcttgataagtttgatatttttgaaaagttttttgacgagaataaccaagggcacatggctgaaaattcagtagaagtctttgaacattcacccaaagaaagacggcatttggttgaatatttgccatactggacaaggaagttagggcctctcatatttccactttggaaagcaagtctccttcagtcaaggatattgatactagttcctcaaggagaatcgttcgaattgtgcaattctttggcctattgtgtcttcttaatatcaatgcttccaaaaaacttgataggaaaccatgtaagcgatgaatatattaagcctattttcacggtatcaacatcagatattccttttctagagtcgttcaaaaaggggaacggttatgtggctacgaccagcgaggaaattttgttgtataagcctgaaatttacgacatagtagtcaaacttacttcgagctcaactatagaagaatcaccagaaaaagaagtggaaattcttaccgcatctggtgaacaaaacaaagcaactcctcttgacttagaggtgtatgaaaaacttatactgggggagttacaagaggatgcctctacaaatgcgacatgtcgacatcatgaggtgacagaacccatatcatggctacagtttttaattgatgggttttttcttttaactactgcaggctatctggtagcgccatatcaccttgcaaataatttcaagattccgaggcacgtttctggcccagaacccaacaattcagaaatacagatcgctgaaaatttagttcgctattttcaccgcagaacatcaaatctgtacaacgatctgaaggatgtcatacaaaaaagtgaaaatattgattcagaacaaccgattactatcgcagcttcatttttaaccaagttaaatttggattgctttagcaaacaagatcatcaattcgtcaaggatatcgcccttaaatggttccaaagaagcattgatattagcaacctaccagaatgtttgggaaatctctgttaa

SEQ ID NO: 6768 - DNA, 1551 bp, Artificial Sequence
  Description of Artificial Sequence: Synthetic polynucleotide
atgaattccggaggtgaagaaccaactataaagccaaatgtatttaatattactcaacttttaaacagtaatggtgaaaaaccgggaattgcttgcatcttcttaagtaaatttgacatgaaaaagggaaatatcataatatggtctaaaagtattaatggtgcggcaattgacttaagcaatattgaatttaaatctttaccagccggtattcacgaacaaactgacgatgttgtcaattttgtagttcctaaagaattagatgtctgtcaaactgccaagacgacaacttatgattacggcatcgcctatttcaaacaaaattctttcgatattattgagaatgacaatcgtattgataggagtaaagttcaaatgttttctcttggtgtaattatcgatgtccaaaatgcctcttctgatagtaaaaagcacttttataaggaaatataccatgcgtatgctgccaacagatactccagctatttggaaagtttactcggtcaatggataaggcagcgtgatcttgataagtttgatatttttgaaaagttttttgacgagaataaccaagggcacatggctgaaaattctgtagaagtctttgaacattctcccaaagaaagaagacatttggttgaatatttgccatactggacaaggaagttagggcctctcatatttccactttggaaagcaagtctccttcagtctaggatattgatattagttcctcaaggagaatctttcgaattgtgcaattctttggcctattgtgtcttcttaatatccatgcttccaaaaaacttgataggaaaccatgtaagcgatgaatatattaagcctattttcacggtatctacatctgatattccttttttggagagtttcaaaaaggggaacggttatgtggctacgaccagcgaggaaattttgttgtataagcctgaaatttacgacatagtagtcaaacttacttccagctctactatagaagaatctccagaaaaagaagtggaaattcttaccgcatctggtgaacaaaacaaagcaactcctcttgacttagaggtgtatgaaaaacttatattaggggagttacaagaggatgcctctacaaatgcgacatgtagacatcatgaggtgacagaacccatatcttggttacagtttttaattgatgggttttttcttttaactactgcaggctatttggtagcgccatatcaccttgcaaataatttcaagattccgaggcacgtttctggcccagaacccaacaattctgaaatacagatcgctgaaaatttagttcgctattttcaccgcagaacaagtaatctttacaacgatttgaaggatgtcatacaaaaaagtgaaaatattgattctgaacaaccgattactatcgcagcttcttttttaaccaagttaaatttggattgctttagcaaacaagatcatcaattcgtcaaggatatcgcccttaaatggttccaaagaagcattgatattagcaacttaccagaatgtttgggaaatctctgttga

SEQ ID NO: 6769 - DNA, 1350 bp, Saccharomyces cerevisiae
atgctagtaaataaagtgatagggttactgggtgtactcttcgcaacaagatttacaaatgccgtcgaattggatctagacaactacgaatctttgcaaaatgctacttcactaattgcctacggtttaatggattattacactggtaatcagtatggtaagacggtcggtatgttttcagatccgtactattggtgggaagccggtggtgcctggggctgtatgctagattactggtttttcatggataacgacacctataatgatgaaattatagcagcaatgatacatcaagctggtgatgataatgactatattccgctaaatcaatctaccactgaaggtaatgatgaccaagccttttggggtattgctgctatgactgccgcggagagaaactttactaatcctcccgagaatgagcctcaatggctatatttagcacaggctgttttcaataccatggctttgcgttgggatgccgattcctgtggtggtggtttgaggtggcaaattttcgtttggaactctggttacgattacaagaacaccgtttctaacggtgccttgtttcacatagctgcaagattagcaagatatacaggtaatcaaacatatgttgactgggccgaaaaagtttacgagtggatggtcggtgtgaacttaatttctaatggtacctataagtatgtttacgatggtgtcagcattgatgataattgcaccaaagtgacctcatatcaatggacatataatcaaggtttgctgttggctggctctgcctacctttacaactttacgggatcagacctctggcacacaagaaccaaagagtttttgaacgcttcccaagtgtttttccatgatggtattgtgtatgaagctgcttgtcaaggtccaaattcttgtaatacagatcaacgttccttcaaagcctattttgcccgtttcttaggtgtcactgcacaactagtgccagaaactaggaaccaaattatgtcttggttgaatacatctgccattgcggccgcgaaatcatgttctggaggtactgatggtcatacctgtggattgaattggttcaatgggacttgggatggtatgtatggtctaggtgaacaaatgtccgccttagaagtaatggtcaacacgagggccttagataaacccgcaccatacacggcagagaatggtggttcatctgttggtgatggggcagcaggtactcaagcgcaacccacaaatttggcaccattaaatatcactaagggttcaaaggcaggtgcaggtattattaccgctgtcattggtatttcaattgtcgcatgtgctctgtggttagtcttttga

SEQ ID NO: 6770 - DNA, 1350 bp, Artificial Sequence
  Description of Artificial Sequence: Synthetic polynucleotide
atgttggtaaataaagtgatagggttattgggtgtactcttcgcaacaagatttacaaatgccgtcgaattggatttggacaactacgaatctttgcaaaatgctacttctttgattgcctacggtttaatggattattacactggtaatcagtatggtaagacggtcggtatgttttctgatccgtactattggtgggaagccggtggtgcctggggctgtatgcttgattactggtttttcatggataacgacacctataatgatgaaattatagcagcaatgatacatcaagctggtgatgataatgactatattccgttaaatcaatctaccactgaaggtaatgatgaccaagccttttggggtattgctgctatgactgccgcggagagaaactttactaatcctcccgagaatgagcctcaatggttatatttagcacaggctgttttcaataccatggctttgcgttgggatgccgattcctgtggtggtggtttgaggtggcaaattttcgtttggaactctggttacgattacaagaacaccgtttctaacggtgccttgtttcacatagctgcaagattagcaagatatacaggtaatcaaacatatgttgactgggccgaaaaagtttacgagtggatggtcggtgtgaacttaatttctaatggtacctataagtatgtttacgatggtgtcagcattgatgataattgcaccaaagtgacctcttatcaatggacatataatcaaggtttgttgttggctggctctgcctacctttacaactttacgggatctgacctctggcacacaagaaccaaagagtttttgaacgcttcccaagtgtttttccatgatggtattgtgtatgaagctgcttgtcaaggtccaaattcttgtaatacagatcaacgttccttcaaagcctattttgcccgtttcttaggtgtcactgcacaattagtgccagaaactaggaaccaaattatgtcttggttgaatacatctgccattgcggccgcgaaaagttgttctggaggtactgatggtcatacctgtggattgaattggttcaatgggacttgggatggtatgtatggtttaggtgaacaaatgtccgccttagaagtaatggtcaacacgagggccttagataaacccgcaccatacacggcagagaatggtggttcttctgttggtgatggggcagcaggtactcaagcgcaacccacaaatttggcaccattaaatatcactaagggttccaaggcaggtgcaggtattattaccgctgtcattggtatttccattgtcgcatgtgctttatggttagtcttttga

SEQ ID NO: 6771 - DNA, 1587 bp, Saccharomyces cerevisiae
atgttcaggcagtcaaaaagaagaattgcctcaaggaagaattttagttcatacgatgatattgtcaaaagcgaattggacgtaggcaacacaaatgcagctaaccagatcatcttaagttcaagttcatctgaagaagagaaaaaactttacgctaggctgtatgagtctaaattatcattttacgatttaccaccacagggagaaataacgttggaacaatttgagatctgggcaatcgatcgtctcaaaattctgttagagatcgaatcttgcctttcaagaaacaaatcgatcaaagaaattgaaaccattatcaagccgcagttccaaaaactactgcctttcaacacagagagtttagaagacagaaaaaaggattactactctcatttcattttaagattgtgcttttgtcgttcaaaagaactgcgggaaaaattcgtcagggctgaaacgtttttgttcaaaattagatttaacatgctaacctccaccgatcaaacaaaatttgttcaatcattggacttacccttactacagtttatctcaaatgaagaaaaggccgaattatctcatcagttgtatcaaacagtttctgcgtctctacagttccaattgaatttaaacgaggaacatcaaagaaaacagtatttccaacaggaaaaattcataaaattacctttcgaaaatgtgatagaactggtaggaaaccgtttagtgtttttgaaggacgggtacgcatatttaccacaattccagcaattgaatttactttctaatgagtttgctagcaaattgaaccaggagttaataaaaacgtaccagtacttaccaagactgaatgaggatgaccggttgttaccaattctaaatcatctttcgtcggggtacactatcgcggatttcaaccagcaaaaggcaaaccaattcagtgagaacgtagatgatgagattaatgcgcaaagtgtctggtctgaagagattagctcaaactatccgctatgtatcaaaaacctgatggagggtcttaaaaagaaccatcatttgaggtattatgggagacaacaactgagtctgtttttgaaaggtatcggcctgagcgctgatgaagcgttaaaattttggtctgaggcatttacaagaaatgggaacatgacaatggagaagttcaataaagaataccgttacagcttcaggcataattacggtcttgaaggtaacagaatcaactacaaaccatgggactgtcacactatcctttccaagcccagacctgggcgcggagattatcatggatgccctttccgtgattggagtcacgagagactatctgcagaattgcgctctatgaagttgacccaagcgcagatcatcagtgttctggattcctgccagaaaggtgaatacacaattgcttgcactaaagtgtttgaaatgacacacaactctgcatcagcggatttggaaattggcgagcaaacgcatatcgcgcatcctaacctatacttcgaaagatcaaggcaactgcaaaagaaacagcagaagctggaaaaggaaaaactattcaataatggtaatcattag

SEQ ID NO: 6772 - DNA, 1587 bp, Artificial Sequence
  Description of Artificial Sequence: Synthetic polynucleotide
atgttcaggcagtccaaaagaagaattgcctctaggaagaattttagtagttacgatgatattgtcaaaagcgaattggacgtaggcaacacaaatgcagctaaccagatcatcttaagtagtagttcttctgaagaagagaaaaaactttacgctaggttatatgagtctaaattatctttttacgatttaccaccacagggagaaataacgttggaacaatttgagatctgggcaatcgatcgtctcaaaattttattagagatcgaatcttgcctttctagaaacaaatctatcaaagaaattgaaaccattatcaagccgcagttccaaaaattattgcctttcaacacagagagtttagaagacagaaaaaaggattactactctcatttcattttaagattgtgcttttgtcgttctaaagaattaagagaaaaattcgtcagggctgaaacgtttttgttcaaaattagatttaacatgttgacctccaccgatcaaacaaaatttgttcaatctttggacttacccttattgcagtttatctctaatgaagaaaaggccgaattatctcatcagttgtatcaaacagtttctgcgtctttgcagttccaattgaatttaaacgaggaacatcaaagaaaacagtatttccaacaggaaaaattcataaaattacctttcgaaaatgtgatagaattggtaggaaaccgtttagtgtttttgaaggacgggtacgcatatttaccacaattccagcaattgaatttactttctaatgagtttgctagcaaattgaaccaggagttaataaaaacgtaccagtacttaccaagattgaatgaggatgacagattgttaccaattttgaatcatctttcttctgggtacactatcgcggatttcaaccagcaaaaggcaaaccaattcagtgagaacgtagatgatgagattaatgcgcaaagtgtctggtctgaagagattagcagtaactatccgttatgtatcaaaaacttgatggagggtcttaaaaagaaccatcatttgaggtattatgggagacaacaattgagtttatttttgaaaggtatcggcttaagcgctgatgaagcgttaaaattttggtctgaggcatttacaagaaatgggaacatgacaatggagaagttcaataaagaataccgttacagcttcaggcataattacggtcttgaaggtaacagaatcaactacaaaccatgggactgtcacactatcctttccaagcccagacctgggcgcggagattatcatggatgccctttccgtgattggagtcacgagagattatctgcagaattgcgctctatgaagttgacccaagcgcagatcatcagtgttttggattcctgccagaaaggtgaatacacaattgcttgcactaaagtgtttgaaatgacacacaactctgcaagtgcggatttggaaattggcgagcaaacgcatatcgcgcatcctaacctttacttcgaaagaagtaggcaattacaaaagaaacagcagaagttggaaaaggaaaaattattcaataatggtaatcattga

SEQ ID NO: 6773 - DNA, 321 bp, Saccharomyces cerevisiae
atgggttacgtaattatgacgttttcgagtgcgaggatgtcagaaaggagagccagaattatatatatatggatgcatctctctgcatataaaattaatttccctttcgtacagttccctacttttttttccctctttcgtttgcaaaagaaggcggccatactcattaaaaacccctccccatttttccttttttttttgtttccatataggaagaactctacagctcgaacaatacatcaaatcaatcaagcagtcgctctcgttctattgtgtgtttctcaccaccttacatatctcccctcagttcccagcctataa

SEQ ID NO: 6774 - DNA, 321 bp, Artificial Sequence
  Description of Artificial Sequence: Synthetic polynucleotide
atgggttacgtaattatgacgttttctagtgcgaggatgtctgaaaggagagccagaattatatatatatggatgcatctctctgcatataaaattaatttccctttcgtacagttccctacttttttttccctctttcgtttgcaaaagaaggcggccatactcattaaaaacccctccccatttttccttttttttttgtttccatataggaagaactctacagctagaacaatacatcaaatcaatcaagcagtcgctctcgttttattgtgtgtttctcaccaccttacatatctcccctctgttcccagcttgtga

SEQ ID NO: 6775 - DNA, 1101 bp, Saccharomyces cerevisiae
atgtaccatgttcctgaaatgaggctacattaccccctggtgaacactcaatctaacgccgcaataacacccaccagaagttacgacaatacccttccttcgtttaacgagctatcacaccagagtacaatcaatcttccattcgtccaacgcgaaactccaaacgcatatgctaatgttgcccaattagctacgtcgccaactcaggctaaatcagggtattattgtcgctattatgctgtgccttttcccacatatccacaacaaccacaatctccatatcaacaagctgtacttccttatgccaccattcccaacagcaatttccaaccatcttctttccctgtgatggcagtgatgcctccagaggttcaatttgatggatcattcttgaacaccttacatcctcacacagagttgcctccaatcattcaaaacactaatgatactagcgtcgcacgtccaaataaccttaaatcaatagcagcagcgtcaccaacagtgacagcaacaacaagaacacctggcgtcagttcaacgtcagttctcaaaccacgcgttataactacgatgtgggaagatgagaatactatctgctaccaagtagaggcgaacggtatatcagtcgtgcgtagggctgacaacaacatgattaacggcaccaagttgttgaatgtcacgaagatgacaagggggagaagggatggaatattaagatccgagaaggttagggaagtcgtgaagattggctccatgcacctcaagggtgtttggattcctttcgaaagggcttatatcctggctcaacgtgaacagattctagatcatctgtacccgctcttcgtcaaagatatagaatccattgttgatgccagaaagcccagcaacaaggcatctttgacccccaaatctagccctgcccccatcaagcaagaaccatctgataataaacacgaaattgctactgaaattaagccgaagagtattgatgctttatcgaatggagcatctactcagggtgctggcgaactgccccacttaaaaatcaaccatatcgatactgaggcccaaacaagtagagcaaaaaatgaattatcataa

SEQ ID NO: 6776 - DNA, 1101 bp, Artificial Sequence
  Description of Artificial Sequence: Synthetic polynucleotide
atgtaccatgttcctgaaatgaggttacattaccccttagtgaacactcaatctaacgccgcaataacacccaccagaagttacgacaatacccttccttcttttaacgagttatcccaccagagtacaatcaatcttccattcgtccaacgcgaaactccaaacgcatatgctaatgttgcccaattagctacgtctccaactcaggctaaaagtgggtattattgtcgctattatgctgtgccttttcccacatatccacaacaaccacaatctccatatcaacaagctgtacttccttatgccaccattcccaacagcaatttccaaccatcttctttccctgtgatggcagtgatgcctccagaggttcaatttgatggaagtttcttgaacaccttacatcctcacacagagttgcctccaatcattcaaaacactaatgatactagcgtcgcacgtccaaataaccttaaatctatagcagcagcgtctccaacagtgacagcaacaacaagaacacctggcgtcagttccacgtctgttctcaaaccacgcgttataactacgatgtgggaagatgagaatactatctgctaccaagtagaggcgaacggtatatctgtcgtgcgtagggctgacaacaacatgattaacggcaccaagttgttgaatgtcacgaagatgacaagggggagaagggatggaatattaagatccgagaaggttagggaagtcgtgaagattggctccatgcacctcaagggtgtttggattcctttcgaaagggcttatatcttggctcaacgtgaacagattttagatcatctttacccgctcttcgtcaaagatatagaatccattgttgatgccagaaagcccagcaacaaggcatctttgacccccaaatctagccctgcccccatcaagcaagaaccatctgataataaacacgaaattgctactgaaattaagccgaagagtattgatgctttatccaatggagcatctactcagggtgctggcgaattgccccacttaaaaatcaaccatatcgatactgaggcccaaacaagtagagcaaaaaatgaattatcttga

SEQ ID NO: 6777 - DNA, 1092 bp, Saccharomyces cerevisiae
atgaacggatctcccactcctaagcgatattcatccaaatcttcaaggctttacgacgactactataacatcccgtatcaatattccaatccgactccaatgaatagagactataatgacgtggggtcacgtatcaatgcagataaactggtaccagaggaatacaaacggaatacagaatttatcaacaaagctgtccaacaaaataaagaacttaacttcaaactgagagaaaagcagaacgaaatattcgaactcaagaagattgcagaaactctgcgctcaaagctcgaaaaatatgttgacattaccaaaaagcttgaagaccaaaacctcaacctacagataaaaataagcgacctagaaaagaaactttctgacgctaattctactttcaaagaaatgagattccccaaggtcaaggaccccatggtagatgacgaccctgtctccgaaaattatgatcagataaatgtaccaaaacacagagcaccggatgctacaggtaatcctcgtacaactaacaaagtctccaatacttcagaccaagatagcagactaaaagccattgaaagaaccctctcggtcctcacaaattatgttatgaggtcagaagacggtaataacgacaggatgtcacccttaccttctcctttaaatacgatattgccaataaataatcgtctgaattttcaagagccaaagagatataatccaaccgttaaggtaaatccgtctgatgacgatatcatgatgtatgaaagtgcagagctgaagcgtgtcgaagaagaaatagaggagctaaagagaaaaatacttgttaggaaaaaacatgacttaagaaaattgtctttaaataaccaactccaagagctgcaaagcatgatggacggtgatgacaatataaaacttgacaatgtttcgaagcataatcatgctacgcatcgtcattcttcccaatccagtcgcgattactcaccctcttcggatgcttgcttggagtgttctaatgatttatacgagaaaaatagagtcaagcctgaaaataatatgtcagaaacattcgcaactcccactcccaataatcgatga

SEQ ID NO: 6778 - DNA, 1092 bp, Artificial Sequence
  Description of Artificial Sequence: Synthetic polynucleotide
atgaacggatctcccactcctaagagatattcttccaaatcttccaggctttacgacgactactataacatcccgtatcaatattccaatccgactccaatgaatagagactataatgacgtggggtctcgtatcaatgcagataaattagtaccagaggaatacaaaagaaatacagaatttatcaacaaagctgtccaacaaaataaagaacttaacttcaaattgagagaaaagcagaacgaaatattcgaactcaagaagattgcagaaactttacgctctaagctcgaaaaatatgttgacattaccaaaaagcttgaagaccaaaacctcaacttacagataaaaataagcgacttggaaaagaaactttctgacgctaattctactttcaaagaaatgagattccccaaggtcaaggaccccatggtagatgacgaccctgtctccgaaaattatgatcagataaatgtaccaaaacacagagcaccggatgctacaggtaatcctcgtacaactaacaaagtctccaatacttctgaccaagatagcagattgaaagccattgaaagaaccctctctgtcctcacaaattatgttatgaggtctgaagacggtaataacgacaggatgtctcccttaccttctcctttaaatacgatattgccaataaataatcgtttgaattttcaagagccaaagagatataatccaaccgttaaggtaaatccgtctgatgacgatatcatgatgtatgaaagtgcagagttgaagcgtgtcgaagaagaaatagaggagttgaagagaaaaatacttgttaggaaaaaacatgacttaagaaaattgtctttaaataaccaactccaagagttacaaagcatgatggacggtgatgacaatataaaacttgacaatgtttccaagcataatcatgctacgcatcgtcattcttcccaatccagtcgcgattactctccctcttctgatgcttgcttggagtgttctaatgatttatacgagaaaaatagagtcaagcctgaaaataatatgtctgaaacattcgcaactcccactcccaataatcgctga

SEQ ID NO: 6779 - DNA, 675 bp, Saccharomyces cerevisiae
atggattatataaaaaaagccatatgggggccagaccctaaggagcaacagaggagaatcagatcggtcctgaggaaaaatggtcgaaatatagagaaatcgttgcgggaactcacagttttgcaaaataaaacccagcagcttatcaagaaatctgcaaagaagaacgatgttaggacagttcgactatatgcaaaagaactgtaccaaatcaataaacaatatgatagaatgtacacttccagagcgcagttggattctgttcgaatgaagatagatgaagcaatcagaatgaacactttgtcaaatcaaatggctgacagtgcgggcttaatgagggaggtaaattcattggttagactacctcaattgagaaatacgatgattgaattagaaaaggaacttatgaaatctgggattataagtgaaatggtggatgataccatggagagtgttggggacgtaggggaagagatggacgaagctgttgatgaagaagttaataagatagttgaacaatacacaaacgagaaattcaagaatgttgaccaagtgccaaccgtagaattagcagccaatgaagaagagcaagaaattccggatgaaaaagttgatgaggaagcagataggatggtaaatgaaatgcgtgaaaggctgagagctttgcaaaactag

SEQ ID NO: 6780 - DNA, 675 bp, Artificial Sequence
  Description of Artificial Sequence: Synthetic polynucleotide
atggattatataaaaaaagccatatgggggccagaccctaaggagcaacagaggagaatcagatctgtcttgaggaaaaatggtagaaatatagagaaatctttgagagaactcacagttttgcaaaataaaacccagcagcttatcaagaaatctgcaaagaagaacgatgttaggacagttagattatatgcaaaagaattataccaaatcaataaacaatatgatagaatgtacacttccagagcgcagttggattctgttagaatgaagatagatgaagcaatcagaatgaacactttgagcaatcaaatggctgacagtgcgggcttaatgagggaggtaaattctttggttagattacctcaattgagaaatacgatgattgaattagaaaaggaacttatgaaatctgggattataagtgaaatggtggatgataccatggagagtgttggggacgtaggggaagagatggacgaagctgttgatgaagaagttaataagatagttgaacaatacacaaacgagaaattcaagaatgttgaccaagtgccaaccgtagaattagcagccaatgaagaagagcaagaaattccggatgaaaaagttgatgaggaagcagataggatggtaaatgaaatgcgtgaaaggttaagagctttgcaaaactga

SEQ ID NO: 6781 - DNA, 771 bp, Saccharomyces cerevisiae
atgttcaaatcagtggctaaattggggaagtctccgattttttacttaaattctcagagattaattcatattaagactttaacaactccaaatgaaaatgctttaaaatttctctccacagatggcgagatgctacagacgcgtggctccaagagtatagttattaagaacactgatgaaaacctcatcaaccattccaagttagcacagcaaatttttttgcagtgtccaggagtggagtctttaatgataggtgatgattttctcactattaataaagacagaatggtccattggaatagtatcaagcctgaaattatagatttgttaaccaagcaacttgcttacggtgaagatgttatatccaaagaattccatgctgtccaagaagaagaaggagaaggtggctacaaaataaatatgcccaaatttgaacttaccgaagaagatgaagaggtcagcgaattgattgaagagctgatagatacaagaataagaccagccatcttggaggacggcggtgatatcgattaccgtgggtgggatccaaagactggaaccgtttatttaagattacaaggtgcatgtacctcatgctcttctagtgaagtgactttgaagtacggtattgagtccatgttgaagcactatgtggatgaagtgaaagaagtgattcagatcatggatcctgagcaagaaatagcattaaaggaatttgataagcttgaaaaaaagttggaatcgagtaaaaatacaagccatgaaaagtaa

SEQ ID NO: 6782 - DNA, 771 bp, Artificial Sequence
  Description of Artificial Sequence: Synthetic polynucleotide
atgttcaaatctgtggctaaattggggaagtctccgattttttacttaaattctcagagattaattcatattaagactttaacaactccaaatgaaaatgctttaaaatttctctccacagatggcgagatgttacagacgcgtggctccaagagtatagttattaagaacactgatgaaaacctcatcaaccattccaagttagcacagcaaatttttttgcagtgtccaggagtggagtctttaatgataggtgatgattttctcactattaataaagacagaatggtccattggaatagtatcaagcctgaaattatagatttgttaaccaagcaacttgcttacggtgaagatgttatatccaaagaattccatgctgtccaagaagaagaaggagaaggtggctacaaaataaatatgcccaaatttgaacttaccgaagaagatgaagaggtcagcgaattgattgaagagttgatagatacaagaataagaccagccatcttggaggacggcggtgatatcgattaccgtgggtgggatccaaagactggaaccgtttatttaagattacaaggtgcatgtaccagctgctcttctagtgaagtgactttgaagtacggtattgagtccatgttgaagcactatgtggatgaagtgaaagaagtgattcagatcatggatcctgagcaagaaatagcattaaaggaatttgataagcttgaaaaaaagttggaaagtagtaaaaatacaagccatgaaaagtga

SEQ ID NO: 6783 - DNA, 1572 bp, Saccharomyces cerevisiae
atgagagtatatcagttttgccgacctttccaattattcacctgcttcttatgctaccttctagtgttcgtaaaagctaacaaggaaaagataagtcaaaagaattatcaagtatgcgcaggtatgtattccaaagaagattggaagggcaaaatagacccgtttatatcattcaatcttaaaaaaataagtggattgagtgatgagtctgatccaggcttagtcgttgcaatctatgatttccaagactttgagcacttaggtgtgcaattgccggatgaagaaatgtattatatttgtgatgattatgcaattgatatcgggatttgtgaagaggagaatcgtgatgagtttattgttcaagatgttgtatatgatccatatacttccacaaatagatctttggccaatccaatcatgacgttttctcaaaatgaggtcggccttcatgatactagatacccaataaaagaaaccggattttattgtgttactgcgttcagatcatcgacgtctaccaagttcaacgctgtggtgaatttcaggaatgcttatggtcagcttgcgggcaccgagatcaacaaattgccactatatggtcttttggcggtcgcatacgttgtggcgatggcgttatattccttcgccttctggaagcacaagcatgaattgttaccattacaaaagtatttgctggccttttttgtatttttaaccgcagaaaccatatttgtatgggcttactatgatttgaaaaatgaaaaaggtgatactgcgggaataaaagtttatatggtgttcttgtcgatattgacggctggtaaagttacattttcatttttcctattattgattatcgctttgggctacggtatcgtgtaccctaagttgaataaaacgttgatgaggcgttgccaaatgtatggtgcgttaacttatgcaatttgcattggatttttgatccaaagttatttgaccgacatggaggcaccatctccactaatcttgatcaccttgattcctatggcgcttgcattaatcatattttactacatgattattagatccatgacaaaaacagttatctatttgaaagagcaaaggcagatcgtaaaattgaacatgtacaagaagctactatacatcatttatgcgtcctttttgagtgtactagctggtagtatagtttcgtcatttatttacgttggcatgaacactattgatatgattgagaagaactggaggtcaaggttcttcgttactgatttctggcctacgttagtgtatttcattgttttcgttaccatcgcgttcttatggagaccaacagatacttcatacatgctagccgcatcccaacaactacccacagacccagaaaatgtcgcggactttgacttgggcgatttgcaatcgtttgacgatcaagatgacgcaagtatcatcactggtgagcgtggcatagacgaggatgacctcaatttgaattttactgatgatgaagaaggacacgataatgtaaataaccatagccaaggccacgggccagtgtctccctctccaacaaaataa

SEQ ID NO: 6784 - DNA, 1572 bp, Artificial Sequence
  Description of Artificial Sequence: Synthetic polynucleotide
atgagagtatatcagttttgcaggcctttccaattattcacctgcttcttatgctaccttttagtgttcgtaaaagctaacaaggaaaagataagtcaaaagaattatcaagtatgcgcaggtatgtattccaaagaagattggaagggcaaaatagacccgtttatatctttcaatcttaaaaaaataagtggattgagtgatgagtctgatccaggcttagtcgttgcaatctatgatttccaagactttgagcacttaggtgtgcaattgccggatgaagaaatgtattatatttgtgatgattatgcaattgatatcgggatttgtgaagaggagaatcgtgatgagtttattgttcaagatgttgtatatgatccatatacttccacaaatagatctttggccaatccaatcatgacgttttctcaaaatgaggtcggccttcatgatactagatacccaataaaagaaaccggattttattgtgttactgcgttcagatcttctacgtctaccaagttcaacgctgtggtgaatttcaggaatgcttatggtcagcttgcgggcaccgagatcaacaaattgccattgtatggtcttttggcggtcgcatacgttgtggcgatggcgttatattccttcgccttctggaagcacaagcatgaattgttaccattacaaaagtatttgttagccttttttgtatttttaaccgcagaaaccatatttgtatgggcttactatgatttgaaaaatgaaaaaggtgatactgcgggaataaaagtttatatggtgttcttgagcatattgacggctggtaaagttacattttcttttttcttattattgattatcgctttgggctacggtatcgtgtaccctaagttgaataaaacgttgatgaggcgttgccaaatgtatggtgcgttaacttatgcaatttgcattggatttttgatccaaagttatttgaccgacatggaggcaccatctccattgatcttgatcaccttgattcctatggcgcttgcattaatcatattttactacatgattattagatccatgacaaaaacagttatctatttgaaagagcaaaggcagatcgtaaaattgaacatgtacaagaagttattgtacatcatttatgcgtcctttttgagtgtattggctggtagtatagtttcttcttttatttacgttggcatgaacactattgatatgattgagaagaactggaggagtaggttcttcgttactgatttctggcctacgttagtgtatttcattgttttcgttaccatcgcgttcttatggagaccaacagatacttcttacatgttggccgcatcccaacaattgcccacagacccagaaaatgtcgcggactttgacttgggcgatttgcaaagttttgacgatcaagatgacgcaagtatcatcactggtgagcgtggcatagacgaggatgacctcaatttgaattttactgatgatgaagaaggacacgataatgtaaataaccatagccaaggccacgggccagtgtctccctctccaacaaaatga

SEQ ID NO: 6785 - DNA, 3513 bp, Saccharomyces cerevisiae
atgaacgagctgaacactgtttcgactaactccagtgactccaccaagaacggtggtacatccaatagtcccgacgatatggactccgcagcagcagcaagtcacgcaataaagaaaagaacaaaggcctcccgggcctgcgatcagtgtcgtaaaaagaagattaaatgtgactacaaagatgaaaagggggtctgctcaaactgccaaaggaatggagaccgttgtagttttgatagggttcctttgaaaaggggaccctcgaaaggctatacgaggagcaccagccatccaaggactaacgaaatacaagaccacaataactcaaggtcgtataatacgtttgataatagtaacaataccctgaataataatacgggcaatagcggcgacaacggtataaacagtaacacagttccaagtaccccttcgagatctaattcagttttattgcccccactgacacagtacattccccaggctggtggcattcctcctagtttccaaaatccagcgatacaatcaactatgcccgcgggtaatattggccaacagcagttttggaaagtgccctaccatgagtttcaacaccaaagaaaaggatctatcgattctttgcaaagtgatatatcggtaagaacattaaatcccaacgagcagttgtcttataacaccgttcaacagtctcccataacgaataaacatactaatgattctggaaatgcaaacggaagtgtcaccggctcaggcagtgcctctggtagtggtggttattggtcctttataagaacttctggtttactagctcctactgatgatcataatggggaacagacaagaagatcaagttccataccttctttgctacgaaatacttcaaattctcttttactaggtggccagcctcagcttcccccacctcagcaacaatcgcagccacaagcacaccaacaaaagttgcaacaaggacagaacctatactcgtattctcaattttcccagcagcaaccgtacaacccatcgatatcatcttttggccagttcgctgctaatggttttcattctagacaaggatcagtcgccagcgaggctatgtctcccagtgcacctgccatgtttactagcacatctacaaaccccgtaaatgttgcacagcaaacacaaagacctcaaggacagcaggtaccgcaattttcatctgagttggatggaaataaaaggcgacaatcagcccccgtatcagtaacattatccacggacaggctgaatggtaatgagaataataatggtgaaattaacaacaataatggcagcaataatagcggttcttctaaggatacatctcaacattcccaagaatctgtaactacaccagcggctttggaagcatccagccctggatcaacgccacagagaagtacaaaaaaacgcagaaaaagttacgtatctaagaagacaaaaccaaagagagattcatctatatctataacatcgaaagattctgctcacccaatgaccacttcatcaactatcgcgtatggacagatatccgatgtagatctaatagacacctactatgagttcatacatgtaggatttccgatcatacctttaaacaaaacgaccttgaccagtgacttattgttagttaacacacagccaatttccaatatacacgaagtcaattcatatgttattttgtggtttagaaattcattggaattgttagttcgtgttgctctgaaacaaaagccaggtggcaagtttttcgataatattgttggcgtggctttgtcgccaagtaatgacaacaacaaagctgggttcactacagccacggcaagggatgatgctgaaaaaacaagacgtgattcacataatgaagtacaggatactttggaagtgcaaagcgtttttattgccgccctcaatgaatgtttccaaaaaatcgtggatattcatcccaaattcagagaaaacaacgaccaaatttcgccgaagatcaaagtcatttatttatctacttttattcttttaaattacattttggcatttgttggatacgataactcatttgtacttggaatgtcggtgacaatttttaacgaatttaaattatacaaacttctattatttccggagccggatataaatgatgtgaagcctccagttgatgaagaggtcagcactggtaatgggaatacaaaaacgtccgaatttgaaattggatctgaaagtgctgggcatatgaatccatccaattcaccaaattccatggacgaaaacattagtcactattcagtgttgtttaaaagattatacgttttgctttcagtgtttgattctttacaaagctgtgcattcggtggtcccaagctattaaacatttccatccaaggttctacagaaagatttttttctaatgatttgggctcaaaatggtgcctggaacaaagccaattgagactgaaaagcgtcttgcaaagcttgaaattgggtgaattgatgagtgagcttaccaggaatagaatatcaatgaacggcaataggaagcctgggttcgatattacgaactcgtcttcactcttatcggaatatgtggaaactcaacctctatccgtagcacagttattttgcaagctattaattggcaaacacaatttcatcaattgcttattatcattatacgattcagaagcaggagtctattcagatttgacattggatttgagttcgaaaatagcagactctctgtgctcattgatatcaataattttgcaagtattgacgttgatattaagactgaatcctacgaacagtattgattttaattatagaccaccgaacccacccgctaataatccgacagtgcaagagggcccatctgctatgggctcgtctccagtcgctgggaaccttagcgctgcacctccatcggaggggaatccagatttttacaagaaattactaggcctgaaacaagacactggcactatcctttcagacctttgccgggggataatttccccctttgctattgctatcctgcacgaggtctacaacatcactgaactggtcaagcagatgcctacatcactcattagcattatgatgacggcaactacaacgcagaatactcaggacaccaagaagtcgcaggacctggtcatgaagctgtcaaactcgatgaatgaagtagttcaaatcaccagcgtgctgacaatgatcaagccattcaagatcttcgagcacgagcttaataagcccataatgtccctgacaggaggactttcgtccacgaccagaaacgacgtcatgtggccaaagtcgggccaaggcctccgcgagtcatcagtcatgaagacattgcttgatgaacgccgtacttctggtacacaaccgacaacggcgccagtagccgcagaggaacccaggcttgagaacgttgccctggaaaatttcgttagtatcggctggaagctgttggacgattccgagttaggctggtattga

SEQ ID NO: 6786 - DNA, 3513 bp, Artificial Sequence
  Description of Artificial Sequence: Synthetic polynucleotide
atgaacgagttgaacactgtttccactaactccagtgactccaccaagaacggtggtacatccaatagtcccgacgatatggactccgcagcagcagcaagtcacgcaataaagaaaagaacaaaggcctccagagcctgcgatcagtgtcgtaaaaagaagattaaatgtgactacaaagatgaaaagggggtctgcagcaactgccaaaggaatggagaccgttgtagttttgatagggttcctttgaaaaggggaccctctaaaggctatacgaggagcaccagccatccaaggactaacgaaatacaagaccacaataacagcaggagttataatacgtttgataatagtaacaataccttgaataataatacgggcaatagcggcgacaacggtataaacagtaacacagttccaagtaccccttccagatctaattctgttttattgcccccattaacacagtacattccccaggctggtggcattcctcctagtttccaaaatccagcgatacaatctactatgcccgcgggtaatattggccaacagcagttttggaaagtgccctaccatgagtttcaacaccaaagaaaaggatctatcgattctttgcaaagtgatatatctgtaagaacattaaatcccaacgagcagttgtcttataacaccgttcaacagtctcccataacgaataaacatactaatgattctggaaatgcaaacggaagtgtcaccggcagtggcagtgcctctggtagtggtggttattggtcctttataagaacttctggtttattagctcctactgatgatcataatggggaacagacaagaagaagtagttccataccttctttgttaagaaatacttccaattctcttttattgggtggccagcctcagcttcccccacctcagcaacaatctcagccacaagcacaccaacaaaagttgcaacaaggacagaacctttactcctattctcaattttcccagcagcaaccgtacaacccaagtatatcttcttttggccagttcgctgctaatggttttcattctagacaaggatctgtcgccagcgaggctatgtctcccagtgcacctgccatgtttactagcacatctacaaaccccgtaaatgttgcacagcaaacacaaagacctcaaggacagcaggtaccgcaattttcttctgagttggatggaaataaaaggagacaatctgcccccgtatctgtaacattatccacggacaggttgaatggtaatgagaataataatggtgaaattaacaacaataatggcagcaataatagcggttcttctaaggatacatctcaacattcccaagaatctgtaactacaccagcggctttggaagcatccagccctggaagtacgccacagagaagtacaaaaaaacgcagaaaaagttacgtatctaagaagacaaaaccaaagagagattcttctatatctataacaagtaaagattctgctcacccaatgaccacttcttctactatcgcgtatggacagatatccgatgtagatttgatagacacctactatgagttcatacatgtaggatttccgatcatacctttaaacaaaacgaccttgaccagtgacttattgttagttaacacacagccaatttccaatatacacgaagtcaattcttatgttattttgtggtttagaaattctttggaattgttagttcgtgttgctttgaaacaaaagccaggtggcaagtttttcgataatattgttggcgtggctttgtctccaagtaatgacaacaacaaagctgggttcactacagccacggcaagggatgatgctgaaaaaacaagacgtgattctcataatgaagtacaggatactttggaagtgcaaagcgtttttattgccgccctcaatgaatgtttccaaaaaatcgtggatattcatcccaaattcagagaaaacaacgaccaaatttctccgaagatcaaagtcatttatttatctacttttattcttttaaattacattttggcatttgttggatacgataactcttttgtacttggaatgtctgtgacaatttttaacgaatttaaattatacaaacttttattatttccggagccggatataaatgatgtgaagcctccagttgatgaagaggtcagcactggtaatgggaatacaaaaacgtccgaatttgaaattggatctgaaagtgctgggcatatgaatccatccaattctccaaattccatggacgaaaacattagtcactattctgtgttgtttaaaagattatacgttttgctttctgtgtttgattctttacaaagctgtgcattcggtggtcccaagcttttaaacatttccatccaaggttctacagaaagatttttttctaatgatttgggctctaaatggtgcttagaacaaagccaattgagattgaaaagcgtcttgcaaagcttgaaattgggtgaattgatgagtgagcttaccaggaatagaatatccatgaacggcaataggaagcctgggttcgatattacgaactcttcttctctcttatctgaatatgtggaaactcaacctttatccgtagcacagttattttgcaagcttttaattggcaaacacaatttcatcaattgcttattatctttatacgattctgaagcaggagtctattctgatttgacattggatttgagttctaaaatagcagactctttatgctctttgatatccataattttgcaagtattgacgttgatattaagattgaatcctacgaacagtattgattttaattatagaccaccgaacccacccgctaataatccgacagtgcaagagggcccatctgctatgggctcttctccagtcgctgggaaccttagcgctgcacctccaagtgaggggaatccagatttttacaagaaattattaggcttgaaacaagacactggcactatcctttctgacctttgccgtgggataatttccccctttgctattgctatcttgcacgaggtctacaacatcactgaattggtcaagcagatgcctacatctctcattagcattatgatgacggcaactacaacgcagaatactcaggacaccaagaagtctcaggacttggtcatgaagttatctaactccatgaatgaagtagttcaaatcaccagcgtgttaacaatgatcaagccattcaagatcttcgagcacgagcttaataagcccataatgtccttaacaggaggactttcctccacgaccagaaacgacgtcatgtggccaaagtctggccaaggcctccgcgagtcttctgtcatgaagacattgcttgatgaacgccgtacttctggtacacaaccgacaacggcgccagtagccgcagaggaacccaggcttgagaacgttgccttggaaaatttcgttagtatcggctggaagttgttggacgattccgagttaggctggtattga

SEQ ID NO: 6787 - DNA, 357 bp, Saccharomyces cerevisiae
atgcagacaatgggcggggagcaccttcttctttcacagctaaaggggtctttctttctcctacttttggcatactttttcaggggcagaagtccttattacgcacgttgctaccgccggcttgctgttacacctggtgccatcactattgccattgccattgctacagattcaattccggcgcttgcaaagtccaaagttctggtgtcggtttgttctcacacagatccctgtacagcgtcttgtaacctgatccccttcccccgccccttctcgaacagcctgacgcgcttcctcttttgtttgggctcggcccgtttttgcatttcctttccctgttttggattgagtatataa

SEQ ID NO: 6788 - DNA, 357 bp, Artificial Sequence
  Description of Artificial Sequence: Synthetic polynucleotide
atgcagacaatgggcggggagcaccttcttctttctcagttgaaggggtctttctttctcttacttttggcatactttttcaggggcagaagtccttattacgcacgttgctaccgcagacttgctgttacacctggtgccatcactattgccattgccattgctacagattctattccggcgcttgcaaagtccaaagttttggtgtctgtttgttctcacacagatccctgtacagcgtcttgtaacttgatccccttcccccgccccttcagtaacagcttaacgcgcttcctcttttgtttgggctctgcccgtttttgcatttcctttccctgttttggattgagtatatga

SEQ ID NO: 6789 - DNA, 1500 bp, Saccharomyces cerevisiae
atgtccactaagaagcacaccaaaacacattccacttatgcattcgagagcaacacaaacagcgttgctgcctcacaaatgagaaacgccttaaacaagttggcggactctagtaaacttgacgatgctgctcgcgctaagtttgagaacgaactggattcgtttttcacgcttttcaggagatatttggtagagaagtcttctagaaccaccttggaatgggacaagatcaagtctcccaacccggatgaagtggttaagtatgaaattatttctcagcagcccgagaatgtctcaaacctttccaaattggctgttttgaagttgaacggtgggctgggtacctccatgggctgcgttggccctaaatctgttattgaagtgagagagggaaacacctttttggatttgtctgttcgtcaaattgaatacttgaacagacagtacgatagcgacgtgccattgttattgatgaattctttcaacactgacaaggatacggaacacttgattaagaagtattccgctaacagaatcagaatcagatctttcaatcaatccaggttcccaagagtctacaaggattctttattgcctgtccccaccgaatacgattctccactggatgcttggtatccaccaggtcacggtgatttgtttgaatctttacacgtatctggtgaactggatgccttaattgcccaaggaagagaaatattatttgtttctaacggtgacaacttgggtgctaccgtcgacttaaaaattttaaaccacatgatcgagactggtgccgaatatataatggaattgactgataagaccagagccgatgttaaaggtggtactttgatttcttacgatggtcaagtccgtttattggaagtcgcccaagttccaaaagaacacattgacgaattcaaaaatatcagaaagtttaccaacttcaacacgaataacttatggatcaatctgaaagcagtaaagaggttgatcgaatcgagcaatttggagatggaaatcattccaaaccaaaaaactataacaagagacggtcatgaaattaatgtcttacaattagaaaccgcttgtggtgctgctatcaggcattttgatggtgctcacggtgttgtcgttccaagatcaagattcttgcctgtcaagacctgttccgatttgttgctggttaaatcagatctattccgtctggaacacggttctttgaagttagacccatcccgttttggtccaaacccattaatcaagttgggctcgcatttcaaaaaggtttctggttttaacgcaagaatccctcacatcccaaaaatcgtcgagctagatcatttgaccatcactggtaacgtctttttaggtaaagatgtcactttgaggggtactgtcatcatcgtttgctccgacggtcataaaatcgatattccaaacggctccatattggaaaatgttgtcgttactggtaatttgcaaatcttggaacattga

SEQ ID NO: 6790 - DNA, 1500 bp, Artificial Sequence
  Description of Artificial Sequence: Synthetic polynucleotide
atgtccactaagaagcacaccaaaacacattccacttatgcattcgagagcaacacaaacagcgttgctgcctctcaaatgagaaacgccttaaacaagttggcggactctagtaaacttgacgatgctgctcgcgctaagtttgagaacgaattagattcttttttcacgcttttcaggagatatttggtagagaagtcttctagaaccaccttggaatgggacaagatcaagtctcccaacccggatgaagtggttaagtatgaaattatttctcagcagcccgagaatgtctccaacctttccaaattggctgttttgaagttgaacggtgggttaggtacctccatgggctgcgttggccctaaatctgttattgaagtgagagagggaaacacctttttggatttgtctgttcgtcaaattgaatacttgaacagacagtacgatagcgacgtgccattgttattgatgaattctttcaacactgacaaggatacggaacacttgattaagaagtattccgctaacagaatcagaatcagatctttcaatcaatccaggttcccaagagtctacaaggattctttattgcctgtccccaccgaatacgattctccattagatgcttggtatccaccaggtcacggtgatttgtttgaatctttacacgtatctggtgaattagatgccttaattgcccaaggaagagaaatattatttgtttctaacggtgacaacttgggtgctaccgtcgacttaaaaattttaaaccacatgatcgagactggtgccgaatatataatggaattgactgataagaccagagccgatgttaaaggtggtactttgatttcttacgatggtcaagtccgtttattggaagtcgcccaagttccaaaagaacacattgacgaattcaaaaatatcagaaagtttaccaacttcaacacgaataacttatggatcaatttgaaagcagtaaagaggttgatcgaaagtagcaatttggagatggaaatcattccaaaccaaaaaactataacaagagacggtcatgaaattaatgtcttacaattagaaaccgcttgtggtgctgctatcaggcattttgatggtgctcacggtgttgtcgttccaagatctagattcttgcctgtcaagacctgttccgatttgttgttggttaaatctgatcttttccgtttagaacacggttctttgaagttagacccatcccgttttggtccaaacccattaatcaagttgggctctcatttcaaaaaggtttctggttttaacgcaagaatccctcacatcccaaaaatcgtcgagttagatcatttgaccatcactggtaacgtctttttaggtaaagatgtcactttgaggggtactgtcatcatcgtttgctccgacggtcataaaatcgatattccaaacggctccatattggaaaatgttgtcgttactggtaatttgcaaatcttggaacattga

SEQ ID NO: 6791 - DNA, 2277 bp, Saccharomyces cerevisiae
atggaaatcgatggcaacactctggtgttcataatagtgatccttttcctatttttctcctcaccgggtggtgatggtgtgtcttctcaatatgagttcaatcaactccagagactcaagcagcagttccgaacagagcacaatacgttcgtcaatatgacatatacagatagttttcgaaatattaccgggcttaaactcagctaccaagacatgctgaataatcctctccaaaatgccacttacccactaccaggaaaagattatgatcgatggtttcccaatcaaaactacatggttttgcccaacgatgtcatagaggccataaatactgaagtctggaatacttcgaatgatgacgcttccaaccttttccctcccaatattacaagcaccctgttaggtaaaatcgaccttgtatcaaataacaagtacgaaaagataaggatgcctgtacccagattctatgagccggcaactgatttttcagaggatattcctcctgaaggtgagacgtactggtctgagtggccttcgtatggcgaacttcataatgtgagttttcagcatggcgaaatagctattcaaatttctcatatgagcaatcttcaggacaataataattacttaaggagaaatttcataaataagaaaaatgaccgttggaagttgttaaatcttcagattgatttctcagataaggctgaaaaggaaaagcattccatatactcgaaggctgtatatgacattcaacgtggtagaattctttctatttctcagagttctaaatttcattcattgttcgcccttcctcattacatgtccttccagaatgattataatgagaaaatatttaatgatgtcaaggaactcgttgatgaattttggaatttcacggattacacagatgtcatgaccatgaaagacgtacaggatgcttataataatgccaactttaaatgtgagtatttgatttttcttcagttggaaccatggaatcagtacacaagagatcagatcaagttaatagatgatgaattgaattggcccctggggcgtccggcaaatctgtctagtttaccgcccataaatgttgtctctggattactgtattctccagactgtggcgtacgattagggcttcataacgtaaagggtacacggtacgaattaaaaataatgtcgatcagaaaacatctattgttcggtattgcattatttgcagcccagatatacttattgcttactcagatgcatcatacaaataccccctccatggtcaacaaaatctcattctattgtttctcaatgataaacttagtcgatggttccttggccactttgtactttgtcgcagctagtgtcgttcccgaattgtacttacccctagttataagtgctttttcgtgctttatcttggcatctatttttgaaatacgctacttaatttcaatttacgcttcacaggttaacgaacagaatgttgggattatcaacctcctgcgtggtaacactggcacatatgatgagaataggccaagacccgcattcattcccgatgaagggtctatcggtggctcgttatatggtaggtttttctttatgctaatcattttcacgtttttaatattgagttcaacttcatggccccgtcagctaaggatggtatttgagtatatcctaatcttcatattaaactcatattggatccctcaaattttccgtaacgccgttaaaggtattccttcaagaagagaaagagcaagatctagcattggaggaaatagaagtcaaaacaaaatgccattattgtggagttttgtaattggtacaacaataattagaagcttgcccgttgtgtatgttttcacttactcctctaatgtgttcaggcaccataaagatgttcatttcgtcgtatttttatcattgtggctactgtttcaaattagtatactgtattctcaagatgtattgggatcgcgctggttcttgcctaagcacacaatacctgatggatattcgtatttcaagcccctttcaaacgagtatatatcggagcatggtggtggaactgctgaacataccgttgattgcgcgatatgtatgtctgatgttccaatttacatagaggaaattccagaaactcataaggtggatcagcactcttacatggtaacgccttgtaatcacgtatttcatacttcgtgtctagaaaactggatgaattataagttacaatgtcctgtgtgtaggtcaccattacctccgttgtag

SEQ ID NO: 6792 - DNA, 2277 bp, Artificial Sequence
  Description of Artificial Sequence: Synthetic polynucleotide
atggaaatcgatggcaacactttggtgttcataatagtgatccttttcttatttttctcctctccgggtggtgatggtgtgtcttctcaatatgagttcaatcaactccagagactcaagcagcagttcagaacagagcacaatacgttcgtcaatatgacatatacagatagttttagaaatattaccgggcttaaactcagctaccaagacatgttgaataatcctctccaaaatgccacttacccattaccaggaaaagattatgatagatggtttcccaatcaaaactacatggttttgcccaacgatgtcatagaggccataaatactgaagtctggaatacttccaatgatgacgcttccaaccttttccctcccaatattacaagcaccttattaggtaaaatcgaccttgtatctaataacaagtacgaaaagataaggatgcctgtacccagattctatgagccggcaactgatttttctgaggatattcctcctgaaggtgagacgtactggtctgagtggccttcttatggcgaacttcataatgtgagttttcagcatggcgaaatagctattcaaatttctcatatgagcaatcttcaggacaataataattacttaaggagaaatttcataaataagaaaaatgaccgttggaagttgttaaatcttcagattgatttcagtgataaggctgaaaaggaaaagcattccatatactccaaggctgtatatgacattcaacgtggtagaattctttctatttctcagagttctaaatttcattctttgttcgcccttcctcattacatgtccttccagaatgattataatgagaaaatatttaatgatgtcaaggaactcgttgatgaattttggaatttcacggattacacagatgtcatgaccatgaaagacgtacaggatgcttataataatgccaactttaaatgtgagtatttgatttttcttcagttggaaccatggaatcagtacacaagagatcagatcaagttaatagatgatgaattgaattggcccttagggcgtccggcaaatttatctagtttaccgcccataaatgttgtctctggattattatattctccagactgtggcgtaaggttagggcttcataacgtaaagggtacaagatacgaattaaaaataatgtccatcagaaaacatcttttgttcggtattgcattatttgcagcccagatatacttattgcttactcagatgcatcatacaaataccccctccatggtcaacaaaatctctttctattgtttctccatgataaacttagtcgatggttccttggccactttgtactttgtcgcagctagtgtcgttcccgaattgtacttacccttagttataagtgctttttcttgctttatcttggcatctatttttgaaatacgctacttaatttccatttacgcttctcaggttaacgaacagaatgttgggattatcaacctcttacgtggtaacactggcacatatgatgagaataggccaagacccgcattcattcccgatgaagggtctatcggtggctctttatatggtaggtttttctttatgttgatcattttcacgtttttaatattgagttctacttcttggccccgtcagttgaggatggtatttgagtatatcttaatcttcatattaaacagttattggatccctcaaattttccgtaacgccgttaaaggtattccttccagaagagaaagagcaagatctagcattggaggaaatagaagtcaaaacaaaatgccattattgtggagttttgtaattggtacaacaataattagaagcttgcccgttgtgtatgttttcacttactcctctaatgtgttcaggcaccataaagatgttcatttcgtcgtatttttatctttgtggttgttatttcaaattagtatactttattctcaagatgtattgggatctcgctggttcttgcctaagcacacaatacctgatggatattcttatttcaagcccctttccaacgagtatatatctgagcatggtggtggaactgctgaacataccgttgattgcgcgatatgtatgtctgatgttccaatttacatagaggaaattccagaaactcataaggtggatcagcactcttacatggtaacgccttgtaatcacgtatttcatacttcttgtttagaaaactggatgaattataagttacaatgtcctgtgtgtaggtctccattacctccgttgtga

SEQ ID NO: 6793 - DNA, 711 bp, Saccharomyces cerevisiae
atgacacatcctgtagcagtgaaggcatgtctatttgacatggatggtcttctcatcaacacagaggatatttatactgaaactttaaatgaaactctcgcagaatttggtaagggacctttaacttgggatgtgaagattaaattgcaagggcttccgggaccggaagcaggaaaaagggtgatcgaacactacaaattaccaataactttagatgagtacgacgaaagaaatgttgcattgcaatctcttaaatggggtacttgcgaatttcttcccggtgcattgaatttgttgaaatacttaaagttaaagaacattcctattgcattatgtacgtcttcgaacaagactaaatttcgcggcaaaacaagtcatttagaggaaggttttgatcttttcgataccattgtcactggtgatgatccaagaattgcaaaaggtaggggtaagcctttcccggacatttggcagttgggtttaaaggaattgaatgagaagtttcataccgatattaagcccgatgagtgtatagtgttcgaagatggtattccaggcgtaaaatcagccaaggcatttggtgcacacgttatttgggtcccccatccagaagcacatgctgttttgggggacacagaagctttgttagccggtaaaggtgaactattgtcttctttggaaaaactggaaatgtccaaatatggactgtga

SEQ ID NO: 6794 - DNA, 711 bp, Artificial Sequence
  Description of Artificial Sequence: Synthetic polynucleotide
atgacacatcctgtagcagtgaaggcatgtttatttgacatggatggtcttctcatcaacacagaggatatttatactgaaactttaaatgaaactctcgcagaatttggtaagggacctttaacttgggatgtgaagattaaattgcaagggcttccgggaccggaagcaggaaaaagggtgatcgaacactacaaattaccaataactttagatgagtacgacgaaagaaatgttgcattgcaatctcttaaatggggtacttgcgaatttcttcccggtgcattgaatttgttgaaatacttaaagttaaagaacattcctattgcattatgtacgtcttccaacaagactaaatttcgcggcaaaacaagtcatttagaggaaggttttgatcttttcgataccattgtcactggtgatgatccaagaattgcaaaaggtaggggtaagcctttcccggacatttggcagttgggtttaaaggaattgaatgagaagtttcataccgatattaagcccgatgagtgtatagtgttcgaagatggtattccaggcgtaaaaagtgccaaggcatttggtgcacacgttatttgggtcccccatccagaagcacatgctgttttgggggacacagaagctttgttagccggtaaaggtgaattattgtcttctttggaaaaattagaaatgtccaaatatggattatga

SEQ ID NO: 6795 - DNA, 3117 bp, Saccharomyces cerevisiae
atgaattcagacacgaatgcatttaaggacataagaatttcatgtgttgaactttctaggatcgcttttttacccaccgaatcatttgatccaaattcattaacgctattggcatgtttaaaaaaagttgaagagaagttatcagcatacgaagacgattcactttcgccaaaatttgcagattatgtttttgttcctatcgcgagtttattgaaacagccagctctcggcgagtctcaaacagaatacgtcctactaattatatttcatctcttacggacatgttggtcatctaatggtaaattctccgagcaattgggacaacaactgttccccttaatcacatttttagtcagttctgataaagataatcaaaaattaattactagatcagacgagttcaagtacgctggttgtttagtcttgcatcagtttttcaaatcagtaagatcgcaaaggtaccataaagagttcttttcgaactcaaaacctaatttacttcccgctctaggacattctgttaccattctgttgaaaattctggagcaatcgccccaaaataatgagcttcaattcaaagctttggcatccttagaagtactatttcaggacataatatctgatggtgaaatgctttcctttattcttccggggaacgtttctgttttcgctaagatacttactaaaccaggccgtcaaatacattataaggtgtgtgttcgcacgctagaggttctggcaaaattattggttttggtttacgatgattttagtttggatatcaaagtaaataagttaacagatattcgagagttgagcgatacaaagttaaaacacgagataaatcaatcatttatgtttaatggacctattgttttgttacgcacagatgggaagacgcatagagatacaagttggttgacggcaacttctgggcaaatcaatattgctttggaggcctttatacccaaactattaaaacgtaataatgaatcaattgatgaggcattagcgacatttgtatcaatccttttaactagatgtgaaaattctttaaataattgtgagaaagtgttggtatccactttagtacatttggagcgtgatccgatgtccaaattaccatcgcatttggtaaaattaaaggaagttgtcaatgaagacctgcacaagctaagtgacattattcggtttgaaaatgcagataggttatcatctttatcatttgcaatcactattctagagaaaaataacgaaagagatacaatgatcaatgaggtagttagatgtttatttgaatcgcttaatgaatctattgagccaccaagtttgatcaatcataaagagagaataattgaacaaagtagtcaattaacaactacagtaaatttcgaaaacttggaaagtacgaatgctctgattgctttaccaagattatcagaagacatgtcactcaaactgaaaaaatttacataccatatgggttctttgttgttagaaagacatattctcaacgatgtggtgacagagttgatttcagaacaagttgattcaccaagaacgcagaagatagttgcgctgtggttaagcaccaattttataaaggctatggaaaagcaaccgaaggaggaagaagtctatctacaatttgaatctgatgccaactattcctcttccatggttgaagaagtgtgtttgattgtattggaattttgcaatgaactttctcaagacattagcatggagattgaaggtaaaggcataaaaaaaagtgatgagtttgccgtatgtacagttttattctctattgaaacgatttgtgcggtaatgagagaagaatttcaaccagaattgattgactatatatacacagtagttgacgccttggcatcaccgtccgaagccattaggtatgtgagccaatcctgtgcattgaggatagcagataccctatatcatgggtctatcccaaacatgatcttaagcaacgtagattatcttgtagaatctatttcctcaagattgaattctgggatgactgaacgagtgagccaaatattaatggtgatttgccaattggctggctatgaaaccattgaaaattttaaagatgttattgaaacgatatttaaactactggattattatcatggatatagtgatctctgtcttcaatttttccaactatttaaaatcatcattttggagatgaagaaaaaatatatcaatgatgatgagatgattttgaaaatagctaatcaacacatttcacaaagtactttttcgccctggggtatgaccgattttcagcaagtactcaatatactagataaagagacacaggttaaagatgacataacagacgagaacgacgtcgattttttgaaggatgataatgagcccagtaattttcaagaatatttcgactccaaattaagagagccagatagcgacgacgatgaagaagaaagagaagaagaggtggaaggaagttctaaagagtatactgaccagtggacctcacctataccatcagattcatacaaaatactattgcaaattttgggttatggggaaagattattaacccatccatcaaaacgattaagagtgcaaattcttattgttatgaggcttatatttcccttgctatcaacacagcataatctgttgataagggaggttgctagtacatgggactccatcatacagtgcgtcctatgctctgattattcgatcgttcagcccgcatgttcatgcgtggagcagatgataaaatattctggtgattttgtcgccaagagattcattgaactttggcagaaactgtgtcaggattcttttatattgaaagaactgaggattgatccaacggtgcacaaccatgagaaaaaatcgattagtaagcatgtcaaattcccaccagtaactgaaaatgcgctagtatcgatggtacatatggtgctagaaggggtcaaaattacagagtatttaatttctgaagcggtacttgaacaaataatatattgttgtattcaggttgttccagtggagaaaatatcatctatgtcattgatagtgggggatatcgtgtggaaaataagaaatataaattaa

SEQ ID NO: 6796 - DNA, 3117 bp, Artificial Sequence
  Description of Artificial Sequence: Synthetic polynucleotide
atgaatagtgacacgaatgcatttaaggacataagaattagttgtgttgaactttctaggatcgcttttttacccaccgaaagttttgatccaaattctttaacgttattggcatgtttaaaaaaagttgaagagaagttaagtgcatacgaagacgattctctttctccaaaatttgcagattatgtttttgttcctatcgcgagtttattgaaacagccagctctcggcgagtctcaaacagaatacgtcttgttaattatatttcatctcttaagaacatgttggtcttctaatggtaaattctccgagcaattgggacaacaattattccccttaatcacatttttagtcagttctgataaagataatcaaaaattaattactagaagtgacgagttcaagtacgctggttgtttagtcttgcatcagtttttcaaatctgtaagatctcaaaggtaccataaagagttcttttccaactccaaacctaatttacttcccgctttaggacattctgttaccattttattgaaaattttagagcaatctccccaaaataatgagcttcaattcaaagctttggcatccttagaagtattatttcaggacataatatctgatggtgaaatgctttcctttattcttccggggaacgtttctgttttcgctaagatacttactaaaccaggccgtcaaatacattataaggtgtgtgttcgcacgttggaggttttagcaaaattattggttttggtttacgatgattttagtttggatatcaaagtaaataagttaacagatattagagagttgagcgatacaaagttaaaacacgagataaatcaaagttttatgtttaatggacctattgttttgttacgcacagatgggaagacgcatagagatacaagttggttgacggcaacttctgggcaaatcaatattgctttggaggcctttatacccaaattattaaaacgtaataatgaaagtattgatgaggcattagcgacatttgtatctatccttttaactagatgtgaaaattctttaaataattgtgagaaagtgttggtatccactttagtacatttggagcgtgatccgatgtccaaattaccatctcatttggtaaaattaaaggaagttgtcaatgaagacttgcacaagttgagtgacattattagatttgaaaatgcagataggttatcttctttatcttttgcaatcactattttagagaaaaataacgaaagagatacaatgatcaatgaggtagttagatgtttatttgaatctcttaatgaatctattgagccaccaagtttgatcaatcataaagagagaataattgaacaaagtagtcaattaacaactacagtaaatttcgaaaacttggaaagtacgaatgctttgattgctttaccaagattatctgaagacatgagtctcaaattgaaaaaatttacataccatatgggttctttgttgttagaaagacatattctcaacgatgtggtgacagagttgatttctgaacaagttgattctccaagaacgcagaagatagttgcgctttggttaagcaccaattttataaaggctatggaaaagcaaccgaaggaggaagaagtctatttacaatttgaatctgatgccaactattcctcttccatggttgaagaagtgtgtttgattgtattggaattttgcaatgaactttctcaagacattagcatggagattgaaggtaaaggcataaaaaaaagtgatgagtttgccgtatgtacagttttattctctattgaaacgatttgtgcggtaatgagagaagaatttcaaccagaattgattgactatatatacacagtagttgacgccttggcaagtccgtccgaagccattaggtatgtgagccaatcctgtgcattgaggatagcagataccttatatcatgggtctatcccaaacatgatcttaagcaacgtagattatcttgtagaatctatttccagcagattgaattctgggatgactgaaagagtgagccaaatattaatggtgatttgccaattggctggctatgaaaccattgaaaattttaaagatgttattgaaacgatatttaaattattagattattatcatggatatagtgatctctgtcttcaatttttccaattatttaaaatcatcattttggagatgaagaaaaaatatatcaatgatgatgagatgattttgaaaatagctaatcaacacatttctcaaagtactttttctccctggggtatgaccgattttcagcaagtactcaatatattggataaagagacacaggttaaagatgacataacagacgagaacgacgtcgattttttgaaggatgataatgagcccagtaattttcaagaatatttcgactccaaattaagagagccagatagcgacgacgatgaagaagaaagagaagaagaggtggaaggaagttctaaagagtatactgaccagtggacctctcctataccaagtgattcttacaaaatattattgcaaattttgggttatggggaaagattattaacccatccatctaaaagattaagagtgcaaattcttattgttatgaggcttatatttcccttgttatctacacagcataatttattgataagggaggttgctagtacatgggactccatcatacagtgcgtcttatgctctgattattctatcgttcagcccgcatgtagttgcgtggagcagatgataaaatattctggtgattttgtcgccaagagattcattgaactttggcagaaattatgtcaggattcttttatattgaaagaattgaggattgatccaacggtgcacaaccatgagaaaaaatccattagtaagcatgtcaaattcccaccagtaactgaaaatgcgttggtatctatggtacatatggtgttggaaggggtcaaaattacagagtatttaatttctgaagcggtacttgaacaaataatatattgttgtattcaggttgttccagtggagaaaatatcttctatgtctttgatagtgggggatatcgtgtggaaaataagaaatataaattga

SEQ ID NO: 6797 - DNA, 1794 bp, Saccharomyces cerevisiae
atgaacaccggtatctcgcccaaacaggacgacgcctctaactccaacttactcaacataggccaagaccattcgctgcagtatcagggtctcgaacacaacgactcccagtacagagatgcttctcaccagacacctcaccaatacttgaaccagtttcaagcccagcctcaacaacaacaacagcagcagcagcagcaacaacagcaacaacaacaagcgccttatcaaggtcacttccagcagtcgcctcaacaacaacagcaaaatgtttattatccactacctccacaatctttgacgcaacctacttcgcagtcgcaacaacaacaacagcaacaacaacaacaacagtatgctaattcgaactcaaattcaaacaacaatgttaatgttaacgcgctacctcaggatttcggttacatgcaacaaaccggatcgggccaaaactatccgacgatcaatcaacaacaattttccgagttttacaactcctttttaagtcatttaactcaaaaacagacaaacccttctgtcacgggtacaggcgcgtctagtaacaacaacagtaacaacaacaatgttagtagcggcaataacagcactagcagtaatcctgcccagctggcagcctcccaattaaaccctgccacggctgctgcggccgccgcaaacaatgctgctggcccggcttcgtacttgtctcagctcccacaggtgcagagatactacccgaacaacatgaacgctctgtctagtcttttggacccttcctctgcaggaaatgctgcaggaaatgccaacaccgctactcatcctggtttgttaccacccaatctgcaacctcaattgactcaccaccagcagcagatgcagcaacagctgcaattacaacaacaacagcagttgcagcaacagcagcagctacaacagcaacaccagttgcaacaacaacaacaacttcaacaacaacatcatcatctacaacagcaacagcagcaacaacagcatccagtggtgaagaaattatcttccactcaaagcagaattgagagaagaaaacaactgaaaaagcaaggcccaaagagaccttcttccgcttatttcctgttttctatgtccataagaaatgagttgcttcaacaattccctgaagcaaaggtccccgaattgtctaaattggcttctgcaaggtggaaagagttaacggatgatcaaaaaaaaccattctacgaagaattcagaaccaactgggagaagtacagagttgtgagagatgcttacgaaaagactttgcccccaaagagaccctctggtccctttattcagttcacccaggagattagacctaccgtcgtcaaggaaaatcctgataaaggtttaatcgaaattaccaagataatcggtgaaagatggcgcgagttagaccctgccaaaaaggcggaatacactgaaacttacaagaaaagattaaaggaatgggaaagttgttatcccgacgaaaatgatccaaacggtaacccaaccggtcactcacataaggccatgaacatgaatttgaatatggacactaaaatcatggagaaccaagacagtatcgagcacataaccgcaaatgccatcgactcagttaccggaagcaacagtaacagtaccaacccaaatacgcccgtttctcctccgatttcattacagcagcagccgctccaacaacaacaacaacagcagcaacaacaacaacacatgttattggctgaccccactacaaatggttcgatcataaaaaatgaataa

SEQ ID NO: 6798 - DNA, 1794 bp, Artificial Sequence
  Description of Artificial Sequence: Synthetic polynucleotide
atgaacaccggtatctcccccaaacaggacgacgcctctaactccaacttactcaacataggccaagaccattctttgcagtatcagggtctcgaacacaacgactcccagtacagagatgcttctcaccagacacctcaccaatacttgaaccagtttcaagcccagcctcaacaacaacaacagcagcagcagcagcaacaacagcaacaacaacaagcgccttatcaaggtcacttccagcagtctcctcaacaacaacagcaaaatgtttattatccattgcctccacaatctttgacgcaacctacttctcagtctcaacaacaacaacagcaacaacaacaacaacagtatgctaatagcaacagtaatagcaacaacaatgttaatgttaacgcgttacctcaggatttcggttacatgcaacaaaccggatctggccaaaactatccgacgatcaatcaacaacaattttccgagttttacaactcctttttaagtcatttaactcaaaaacagacaaacccttctgtcacgggtacaggcgcgtctagtaacaacaacagtaacaacaacaatgttagtagcggcaataacagcactagcagtaatcctgcccagttagcagcctcccaattaaaccctgccacggctgctgcggccgccgcaaacaatgctgctggcccggcttcttacttgtctcagctcccacaggtgcagagatactacccgaacaacatgaacgctttatctagtcttttggacccttcctctgcaggaaatgctgcaggaaatgccaacaccgctactcatcctggtttgttaccacccaatttacaacctcaattgactcaccaccagcagcagatgcagcaacagttacaattacaacaacaacagcagttgcagcaacagcagcagttacaacagcaacaccagttgcaacaacaacaacaacttcaacaacaacatcatcatttacaacagcaacagcagcaacaacagcatccagtggtgaagaaattatcttccactcaaagcagaattgagagaagaaaacaattgaaaaagcaaggcccaaagagaccttcttccgcttatttcttattttctatgtccataagaaatgagttgcttcaacaattccctgaagcaaaggtccccgaattgtctaaattggcttctgcaaggtggaaagagttaacggatgatcaaaaaaaaccattctacgaagaattcagaaccaactgggagaagtacagagttgtgagagatgcttacgaaaagactttgcccccaaagagaccctctggtccctttattcagttcacccaggagattagacctaccgtcgtcaaggaaaatcctgataaaggtttaatcgaaattaccaagataatcggtgaaagatggcgcgagttagaccctgccaaaaaggcggaatacactgaaacttacaagaaaagattaaaggaatgggaaagttgttatcccgacgaaaatgatccaaacggtaacccaaccggtcactctcataaggccatgaacatgaatttgaatatggacactaaaatcatggagaaccaagacagtatcgagcacataaccgcaaatgccatcgactctgttaccggaagcaacagtaacagtaccaacccaaatacgcccgtttctcctccgatttctttacagcagcagccgctccaacaacaacaacaacagcagcaacaacaacaacacatgttattggctgaccccactacaaatggttctatcataaaaaatgaatga

SEQ ID NO: 6799 - DNA, 2010 bp, Saccharomyces cerevisiae
atgcttagaaccagactatccgtttccgttgctgctagatcgcaactaaccagatccttgacagcatcaaggacagcaccattaagaagatggcctattcagcaatcgcgtttatattcttctaacactagatcgcataaagctaccacaacaagagaaaatactttccaaaagccatacagcgacgaggaggtcactaaaacacccgtcggttctcgcgccagaaagatcttcgaagctcctcacccacatgccactcgtttgactgtagaaggtgccatagaatgtcccttggagagctttcaacttttaaactctcctttatttaacaagggttctgcatttacacaagaagaaagggaagcgtttaatttagaagcattgctaccaccacaagtgaacactttggacgaacaactggaaagaagctacaagcagttatgctatttgaagacgcccttggccaaaaacgacttcatgacgtctttgagagtacagaacaaagtcctatattttgcattaataaggagacatatcaaggaattagttcctatcatttacaccccaaccgaaggtgatgctattgctgcctattcccacaggttcagaaagccagaaggtgtgtttttagacattaccgaacctgattccatcgaatgtagattggctacatacggtggagacaaagatgtagactacatcgttgtgtcggattcggaaggtattctgggaattggtgaccaaggtatcggtggtgtacgtattgctatctccaaattggcattgatgacgctgtgcggtggtattcatcccggccgtgtgctacctgtgtgtttggacgtcggtactaacaacaagaaactagcccgtgacgaattgtacatgggtaacaagttctccagaatcaggggtaagcaatatgacgacttcttggaaaaattcatcaaggccgttaagaaagtgtatccaagcgccgttctgcatttcgaagatttcggtgttaagaacgctagaagattactagaaaagtacaggtacgaattgccatcattcaacgatgacattcagggcaccggtgccgtcgtgatggcctcgttgattgctgctttgaaacataccaacagagacttgaaagacaccagagtgcttatttacggtgccgggtctgcgggcctcggtatcgcagatcaaattgtgaatcatatggtcacgcacggcgttgacaaggaagaagcgcgcaagaaaatcttcttgatggacagacgtgggttaattctacaatcttacgaggctaactccactcccgcccaacacgtatacgctaagagtgatgcggaatgggctggtatcaacacccgctctttacatgatgtggtggagaacgtcaaaccaacgtgtttggttggctgctccacacaagcaggcgcattcactcaagatgtcgtagaagaaatgcacaagcacaatcctagaccgatcattttcccattatccaaccctactagactacacgaagccgttcctgccgatttaatgaagtggaccaacaacaacgctcttgtagctaccggatctcctttcccacctgttgatggttaccgtatctcggagaacaacaattgttactctttcccaggtatcggtttaggtgccgtactatcgcgtgccaccaccatcacagacaagatgatctccgctgcagtggaccaactagccgaattgtcgccactaagagagggcgactcgagacctgggttgctacccggcctggacaccatcaccaacacttctgcgcgtctagctaccgctgtgatcttgcaagcactcgaggagggaaccgcccgtatcgagcaagaacaagtaccgggaggagctcccggcgaaactgtcaaggttcctcgtgactttgacgaatgtttacagtgggtcaaagcccaaatgtgggagcctgtgtacagacctatgatcaaggtccaacatgacccatcggtgcacaccaaccaattgtag

SEQ ID NO: 6800 - DNA, 2010 bp, Artificial Sequence
  Description of Artificial Sequence: Synthetic polynucleotide
atgcttagaaccagattatccgtttccgttgctgctagatctcaattgaccagatccttgacagcaagcaggacagcaccattaagaagatggcctattcagcaatcccgtttatattcttctaacactagaagccataaagctaccacaacaagagaaaatactttccaaaagccatacagcgacgaggaggtcactaaaacacccgtcggttctcgcgccagaaagatcttcgaagctcctcacccacatgccactcgtttgactgtagaaggtgccatagaatgtcccttggagagctttcaacttttaaactctcctttatttaacaagggttctgcatttacacaagaagaaagggaagcgtttaatttagaagcattgttaccaccacaagtgaacactttggacgaacaattggaaagaagctacaagcagttatgctatttgaagacgcccttggccaaaaacgacttcatgacgtctttgagagtacagaacaaagtcctttattttgcattaataaggagacatatcaaggaattagttcctatcatttacaccccaaccgaaggtgatgctattgctgcctattcccacaggttcagaaagccagaaggtgtgtttttagacattaccgaacctgattccatcgaatgtagattggctacatacggtggagacaaagatgtagactacatcgttgtgtctgattctgaaggtattttaggaattggtgaccaaggtatcggtggtgtacgtattgctatctccaaattggcattgatgacgttatgcggtggtattcatcccggccgtgtgttgcctgtgtgtttggacgtcggtactaacaacaagaaattggcccgtgacgaattgtacatgggtaacaagttctccagaatcaggggtaagcaatatgacgacttcttggaaaaattcatcaaggccgttaagaaagtgtatccaagcgccgttttgcatttcgaagatttcggtgttaagaacgctagaagattattggaaaagtacaggtacgaattgccatctttcaacgatgacattcagggcaccggtgccgtcgtgatggcctctttgattgctgctttgaaacataccaacagagacttgaaagacaccagagtgcttatttacggtgccgggtctgcgggcctcggtatcgcagatcaaattgtgaatcatatggtcacgcacggcgttgacaaggaagaagcgcgcaagaaaatcttcttgatggacagacgtgggttaattttacaatcttacgaggctaactccactcccgcccaacacgtatacgctaagagtgatgcggaatgggctggtatcaacacccgctctttacatgatgtggtggagaacgtcaaaccaacgtgtttggttggctgctccacacaagcaggcgcattcactcaagatgtcgtagaagaaatgcacaagcacaatcctagaccgatcattttcccattatccaaccctactagattgcacgaagccgttcctgccgatttaatgaagtggaccaacaacaacgctcttgtagctaccggatctcctttcccacctgttgatggttaccgtatctctgagaacaacaattgttactctttcccaggtatcggtttaggtgccgtattatctcgtgccaccaccatcacagacaagatgatctccgctgcagtggaccaattggccgaattgtctccattgagagagggcgacagtagacctgggttgttgcccggccttgacaccatcaccaacacttctgcgcgtttggctaccgctgtgatcttgcaagcactcgaggagggaaccgcccgtatcgagcaagaacaagtaccgggaggagctcccggcgaaactgtcaaggttcctcgtgactttgacgaatgtttacagtgggtcaaagcccaaatgtgggagcctgtgtacagacctatgatcaaggtccaacatgacccatctgtgcacaccaaccaattgtga

SEQ ID NO: 6801 - DNA, 1449 bp, Saccharomyces cerevisiae
atggatagacctatagatgatattgtgaaaaatcttttaaagttcgtcgttagggggttttatggtggctcctttgtactggtactcgatgctatactatttcactcggtcctagctgaagatgacttgaaacaattgttgagcataaataagacggaactggggccgctaattgctagactaagatcagacaggttaatatccatacacaaacaaagagaataccctccaaactcaaaaagtgtggaaagagtttactactatgtaaaatatcctcatgctattgacgcaatcaaatggaaggtccatcaagtcgtacaaagattgaaggatgacttggacaaaaattcagaacctaatggttacatgtgtccgatttgtttgaccaagtacacacaattggaagctgtacaattattgaattttgataggacagaatttttatgttccctatgtgatgaaccgttggtggaagatgattctggtaaaaaaaacaaagagaagcaagataaattaaataggttaatggaccaaattcagccaatcattgattctttgaaaaagattgatgattcaagaattgaggagaatactttcgaaattgcattggctcgcttgataccacctcaaaatcaatcacatgcagcatacacgtacaatccaaagaaaggcagcaccatgttcagaccgggagattctgctccattgccaaatcttatgggtactgctcttggtaacgacagtagtagacgtgccggtgctaactctcaagccacattacacatcaacattaccacggcaagtgatgaagtggctcaaagggaattgcaagagagacaggctgaagagaaaagaaaacaaaacgctgtccctgaatggcataaacagagtaccatcggtaaaactgctcttggtagactggataatgaagaggagttcgatcctgtagttactgcatctgccatggattctataaatcctgataatgaacctgcacaggaaacatcctatcaaaataacagaactctgaccgagcaagaaatggaagaaagagagaatgaaaagacgttgaatgattactacgctgctttggctaaaaagcaagcaaagctcaataaagaagaagaggaggaggaagaagaagaagaggatgaggaagaagaagaggaagaagagatggaagatgttatggatgataacgatgaaactgctagagaaaatgcattggaagatgaatttgaagacgtaacggatacagctggcaccgcaaagacagaatcaaacacctccaacgacgtaaaacaagaatcgattaatgataagactgaagacgctgtaaatgctactgccactgcttcaggtccgagtgcaaacgctaaaccaaatgatggtgatgatgatgatgatgatgatgatgatgagatggacattgagtttgaggacgtttga

SEQ ID NO: 6802 - DNA, 1449 bp, Artificial Sequence
  Description of Artificial Sequence: Synthetic polynucleotide
atggatagacctatagatgatattgtgaaaaatcttttaaagttcgtcgttagggggttttatggtggctcctttgtattggtactcgatgctatattgtttcactctgtcttggctgaagatgacttgaaacaattgttgagcataaataagacggaattggggccgttgattgctagattgagaagtgacaggttaatatccatacacaaacaaagagaataccctccaaactccaaaagtgtggaaagagtttactactatgtaaaatatcctcatgctattgacgcaatcaaatggaaggtccatcaagtcgtacaaagattgaaggatgacttggacaaaaattctgaacctaatggttacatgtgtccgatttgtttgaccaagtacacacaattggaagctgtacaattattgaattttgataggacagaatttttatgttccttatgtgatgaaccgttggtggaagatgattctggtaaaaaaaacaaagagaagcaagataaattaaataggttaatggaccaaattcagccaatcattgattctttgaaaaagattgatgattccagaattgaggagaatactttcgaaattgcattggctcgcttgataccacctcaaaatcaatctcatgcagcatacacgtacaatccaaagaaaggcagcaccatgttcagaccgggagattctgctccattgccaaatcttatgggtactgctcttggtaacgacagtagtagacgtgccggtgctaactctcaagccacattacacatcaacattaccacggcaagtgatgaagtggctcaaagggaattgcaagagagacaggctgaagagaaaagaaaacaaaacgctgtccctgaatggcataaacagagtaccatcggtaaaactgctcttggtagattagataatgaagaggagttcgatcctgtagttactgcatctgccatggattctataaatcctgataatgaacctgcacaggaaacatcctatcaaaataacagaactttgaccgagcaagaaatggaagaaagagagaatgaaaagacgttgaatgattactacgctgctttggctaaaaagcaagcaaagctcaataaagaagaagaggaggaggaagaagaagaagaggatgaggaagaagaagaggaagaagagatggaagatgttatggatgataacgatgaaactgctagagaaaatgcattggaagatgaatttgaagacgtaacggatacagctggcaccgcaaagacagaatctaacacctccaacgacgtaaaacaagaaagtattaatgataagactgaagacgctgtaaatgctactgccactgcttctggtccgagtgcaaacgctaaaccaaatgatggtgatgatgatgatgatgatgatgatgatgagatggacattgagtttgaggacgtttga

SEQ ID NO: 6803 - DNA, 1344 bp, Saccharomyces cerevisiae
atggtagagaaggatacatggaaactgataactgccactgcactattcactgtggcagtgacgacgattacagattatgcttggaccagttggcaagcacaaaagcaagtaattgcgcaacaaaaaaataagaataaaggtgggcaaacaaaatctgacacggataaatatcatcaatatgatgaacagtttattcgccaatctttgaaaaacaatgttgaatttcttggtgaggacacaattgaaaaactatccaatcaatatgttgttgtcgtgggagcaggtggagttggatcttgggtggttaactctttggtgcggtccggatgccgaaagatcagggtcgttgattttgaccaggtctcactaagttcactaaatagacacagctgtgccatactaaatgatgttggcacgccaaaagtggaatgtctacgaaggcatatgcgggaaattgcaccatggtgtgagattgatccgattaatgaattatggacgttacaaaatggcgaaagactgacccttggtaatggaactcctgactttatcgtggactgcattgataatattgatacaaaggtcgacttacttgagtttgcctataatcatggtatcaaagtgatctcttccatgggtgcttccgcgaaaagtgatcctacaaaacttaatgtgggggacttggctaccacggaggaggatcctcttgcaagggtagtgagaaggaaattaaagaaaagaggtatcttatccggaattcctgtagtatttagtgccgaaaaaccagatccgaagaaggctaaattattacccttaccagatgaggaatatgaaagaggaaaggtcgacgagctgagcgccctgaaggacttccgtgtaagaatcctacccgttttaggtactatgccaagtttgtttggattgaccatcactacgtggattttatctaatatatccgataaacctctagaacctgttgagggtaagaatagaattaaggtatacgatggtatatatcaatcgttggcaggtcaaatgagcagagtcggtataccgagccaaagaatcccattggctttgaaggatgttagttaccttgtcgaagaggtgtttaagggtaaatctccaattagcggcatttccactagactaactttaaccaaatgggatccctctaaacctatctctttgcaaaatgtggtagtactaactaaaaacgaacagaaagtgcacgaagaccgtgtcttgaagggtaaggaaagcttacaagatgtttatgatgccaaagttctaaaactggtttcacaaagattcagagaagaagcttattactctcaattcagatga

SEQ ID NO: 6804 - DNA, 1344 bp, Artificial Sequence
  Description of Artificial Sequence: Synthetic polynucleotide
atggtagagaaggatacatggaaattgataactgccactgcattattcactgtggcagtgacgacgattacagattatgcttggaccagttggcaagcacaaaagcaagtaattgcgcaacaaaaaaataagaataaaggtgggcaaacaaaatctgacacggataaatatcatcaatatgatgaacagtttattcgccaatctttgaaaaacaatgttgaatttcttggtgaggacacaattgaaaaactttccaatcaatatgttgttgtcgtgggagcaggtggagttggatcttgggtggttaactctttggtgagatccggatgcagaaagatcagggtcgttgattttgaccaggtctctttgagttctttgaatagacacagctgtgccatattgaatgatgttggcacgccaaaagtggaatgtcttagaaggcatatgagagaaattgcaccatggtgtgagattgatccgattaatgaattatggacgttacaaaatggcgaaagattgacccttggtaatggaactcctgactttatcgtggactgcattgataatattgatacaaaggtcgacttacttgagtttgcctataatcatggtatcaaagtgatctcttccatgggtgcttccgcgaaaagtgatcctacaaaacttaatgtgggggacttggctaccacggaggaggatcctcttgcaagggtagtgagaaggaaattaaagaaaagaggtatcttatccggaattcctgtagtatttagtgccgaaaaaccagatccgaagaaggctaaattattacccttaccagatgaggaatatgaaagaggaaaggtcgacgagttgagcgccttgaaggacttccgtgtaagaatcttgcccgttttaggtactatgccaagtttgtttggattgaccatcactacgtggattttatctaatatatccgataaacctttggaacctgttgagggtaagaatagaattaaggtatacgatggtatatatcaatctttggcaggtcaaatgagcagagtcggtataccgagccaaagaatcccattggctttgaaggatgttagttaccttgtcgaagaggtgtttaagggtaaatctccaattagcggcatttccactagattaactttaaccaaatgggatccctctaaacctatctctttgcaaaatgtggtagtattgactaaaaacgaacagaaagtgcacgaagaccgtgtcttgaagggtaaggaaagcttacaagatgtttatgatgccaaagttttgaaattggtttctcaaagattcagagaagaagcttattactctcaattcagatga

SEQ ID NO: 6805 - DNA, 504 bp, Saccharomyces cerevisiae
atgcaagaattttattctttttcaccaatagatgaaaacggaaatccattccccttcaactccctgcgtaacaaagtggttttgatagtcaatgtagcatctcattgtgcgttcacacctcaatacaaggaattagagtacttgtacgaaaaatacaaatcacatggtctagtgattgtggcctttccctgtggtcaattcggaaatcaagagttcgagaaggataaagagattaataagttctgtcaagataaatatggtgtaaccttccctattctacataagatccgttgcaacgggcaaaagcaagatcccgtctacaagttcttaaagaattcagtaagcgggaagtctggaataaaaatgataaaatggaattttgaaaagtttgtggtagaccgaaatgggaaggtggttaaaaggttttcatgcatgactaggccactagagctttgtccaataatcgaagaattactgaatcaaccaccagaagaacagatttaa

SEQ ID NO: 6806 - DNA, 504 bp, Artificial Sequence
  Description of Artificial Sequence: Synthetic polynucleotide
atgcaagaattttattctttttctccaatagatgaaaacggaaatccattccccttcaactccttacgtaacaaagtggttttgatagtcaatgtagcatctcattgtgcgttcacacctcaatacaaggaattagagtacttgtacgaaaaatacaaatctcatggtttagtgattgtggcctttccctgtggtcaattcggaaatcaagagttcgagaaggataaagagattaataagttctgtcaagataaatatggtgtaaccttccctattttgcataagatccgttgcaacgggcaaaagcaagatcccgtctacaagttcttaaagaattctgtaagcgggaagtctggaataaaaatgataaaatggaattttgaaaagtttgtggtagacagaaatgggaaggtggttaaaaggttttcttgcatgactaggccattggagctttgtccaataatcgaagaattattgaatcaaccaccagaagaacagatttga

SEQ ID NO: 6807 - DNA, 2040 bp, Saccharomyces cerevisiae
atggacaaaatcaatcctgattgggcgaaggatattccgtgcagaaatatcactatttatggctactgcaaaaaggagaaagaaggttgccctttcaaacacagcgataacactaccgctactaccataaatgacgttcctcctccaatagatgtgggtgaggctacaactccgaccatgacatcagttcctaagttcaatgctaaagtatccgcaagtttcactccgatgacagtcggtagtgactccttaaccactgtgacgaataccacctccgctgctacaaatgctactggcaatatcgccatggcagctacctctgctactgcttctacagttaatccgatgattaatccgatagttaatagctcgttagtgaataacaataacaataatagtaatataagcatatcaataccaactaccgcttcgagttccaattacgaccccttcaatgcccccattttcactccgtcttcaacctcctcaattcacactaatgcaaatgcacattcttttccatttccctccattgcaaattctggtggcataaatataaacgccactgatgataatagtaacaatatgagtatggctaataatgtgccacctcctatgcaaccgccacccatagagagtagtaatcttaagtacccacgtatttatccgcctcctcacagtcttctacagtatcacctatatgcacctgaacagccatcatcattgaaatcattattaaagcctaatgaaaggtctgcagatcagcttttcattccaaacaatattagagaagatttaaccaagaaaaacttatcgattttgcaggttttcccctcttcaggtaaagttataccaagtattgtacaagattattttaatttggttccattgaacttcaataataacgattttttaaataaaactacgctcttcaaagttttttccaattatgacggtaaagcctacgttttgaagaggcttcctaacatcgataagtcaatgaatccaaacaaaatatccaaaatatatcagatatggtcaaaaattaattgtacaaatttgataaagtttagggacatttttcaaactactaaatttggtgatctgtctatttgtttggtctttgactactacccaaactcgctatctttgtatgattaccactttgttaatttccctaagtttccaataacgaataattatttatggatatatttagttcaactcaccaatgtaataaactctatccattcacaaaacttgagtattggcaatacattaaactggagaaaagttttgattactggggacccagggagaatcaagttatcacactgcaattttatggaccttttgttcaatgatgatactgataccgtagtatcttccggcggaagtaccatagagggacaacaacagctagactacaaatatttaggagagctattatttaacctatccattaatattgaaaactctaataacaacactgcccctaaagaatatcgattggaggaaataacccctcaatcaattgatgacatgagacagatcgatgataagttcaaggatgtactcaagtatctgatatcagacaacggcgattccaaaaagagcattcatgatcttactagtcacttttatgataagatgttcatggtcctggaatcgtcacaaacctatacagaatacatggagtctgtcttatcaagagaactagaaaatggcagattatttaggctggtcaacaagctaaattgcatttttggtagaatcgaatcaagaatagacataaattggtccgaatctgggactaaattccccattatactattttatgactacgtattccatcaagtggattcgaatgggaaaccaataatggatttaactcatgtcctaagatgtttgaacaaattagacgctggtattcaagaaaagttaatgttggtaacgcccgatgagttaaactgtattattatatcctataaggagttgaaggacttgatagaatccacctttcgatccatcacccaataa

SEQ ID NO: 6808 - DNA, 2040 bp, Artificial Sequence
  Description of Artificial Sequence: Synthetic polynucleotide
atggacaaaatcaatcctgattgggcgaaggatattccgtgcagaaatatcactatttatggctactgcaaaaaggagaaagaaggttgccctttcaaacacagcgataacactaccgctactaccataaatgacgttcctcctccaatagatgtgggtgaggctacaactccgaccatgacatctgttcctaagttcaatgctaaagtatccgcaagtttcactccgatgacagtcggtagtgactccttaaccactgtgacgaataccacctccgctgctacaaatgctactggcaatatcgccatggcagctacctctgctactgcttctacagttaatccgatgattaatccgatagttaatagctctttagtgaataacaataacaataatagtaatataagcatatccataccaactaccgcttccagttccaattacgaccccttcaatgcccccattttcactccgtcttccacctccagtattcacactaatgcaaatgcacattcttttccatttccctccattgcaaattctggtggcataaatataaacgccactgatgataatagtaacaatatgagtatggctaataatgtgccacctcctatgcaaccgccacccatagagagtagtaatcttaagtacccacgtatttatccgcctcctcacagtcttttacagtatcacttgtatgcacctgaacagccatcttctttgaaatctttattaaagcctaatgaaaggtctgcagatcagcttttcattccaaacaatattagagaagatttaaccaagaaaaacttatccattttgcaggttttcccctcttctggtaaagttataccaagtattgtacaagattattttaatttggttccattgaacttcaataataacgattttttaaataaaactacgctcttcaaagttttttccaattatgacggtaaagcctacgttttgaagaggcttcctaacatcgataagtctatgaatccaaacaaaatatccaaaatatatcagatatggtccaaaattaattgtacaaatttgataaagtttagggacatttttcaaactactaaatttggtgatttatctatttgtttggtctttgactactacccaaactctttatctttgtatgattaccactttgttaatttccctaagtttccaataacgaataattatttatggatatatttagttcaactcaccaatgtaataaactctatccattctcaaaacttgagtattggcaatacattaaactggagaaaagttttgattactggggacccagggagaatcaagttatcccactgcaattttatggaccttttgttcaatgatgatactgataccgtagtatcttccggcggaagtaccatagagggacaacaacagttagactacaaatatttaggagagttattatttaacctttccattaatattgaaaactctaataacaacactgcccctaaagaatatagattggaggaaataacccctcaatctattgatgacatgagacagatcgatgataagttcaaggatgtactcaagtatttgatatctgacaacggcgattccaaaaagagcattcatgatcttactagtcacttttatgataagatgttcatggtcttggaatcttctcaaacctatacagaatacatggagtctgtcttatctagagaattggaaaatggcagattatttaggttggtcaacaagttgaattgcatttttggtagaatcgaatctagaatagacataaattggtccgaatctgggactaaattccccattatattgttttatgactacgtattccatcaagtggattctaatgggaaaccaataatggatttaactcatgtcttgagatgtttgaacaaattagacgctggtattcaagaaaagttaatgttggtaacgcccgatgagttaaactgtattattatatcctataaggagttgaaggacttgatagaatccacctttagatccatcacccaatga

SEQ ID NO: 6809 - DNA, 615 bp, Saccharomyces cerevisiae
atgacagctgccactacatcacagccagctttctcgcctgaccaagtttccgtgatcttcgttctaggaggacccggtgcaggcaagggtactcagtgtgaaaaactagttaaggactattcatttgtccatttgtcagccggagaccttctacgtgctgagcagggcagagcaggttcccaatatggggaattgatcaagaactgcatcaaagagggccagattgtccctcaagagattactttggcgcttttacgcaacgctatttccgataacgtcaaggcgaacaagcataagttcttaattgacggatttcctaggaagatggatcaagccatttcctttgaaagagacatcgttgaaagcaaattcatcctgttctttgactgccctgaagatatcatgttagagagactattggagcgtggcaagaccagtggtagaagcgatgacaacattgagtccattaagaagagatttaacactttcaaggagactagtatgcccgtcatcgagtactttgaaaccaaatcgaaagtcgtccgtgttcgttgcgacagatccgtcgaagatgtgtacaaagacgtccaagacgctatccgtgatagcttatag

SEQ ID NO: 6810 - DNA, 615 bp, Artificial Sequence
  Description of Artificial Sequence: Synthetic polynucleotide
atgacagctgccactacatctcagccagctttcagtcctgaccaagtttccgtgatcttcgttttaggaggacccggtgcaggcaagggtactcagtgtgaaaaattggttaaggactattcttttgtccatttgagtgccggagaccttttgcgtgctgagcagggcagagcaggttcccaatatggggaattgatcaagaactgcatcaaagagggccagattgtccctcaagagattactttggcgcttttacgcaacgctatttccgataacgtcaaggcgaacaagcataagttcttaattgacggatttcctaggaagatggatcaagccatttcctttgaaagagacatcgttgaaagcaaattcatcttattctttgactgccctgaagatatcatgttagagagattattggagcgtggcaagaccagtggtagaagcgatgacaacattgagtccattaagaagagatttaacactttcaaggagactagtatgcccgtcatcgagtactttgaaaccaaatctaaagtcgtccgtgttcgttgcgacagatccgtcgaagatgtgtacaaagacgtccaagacgctatccgtgatagcttatga

SEQ ID NO: 6811 - DNA, 228 bp, Saccharomyces cerevisiae
atgaatccacgctacaggtttatactgagattttattcttcgaaaaaaccaactttccacaatacagcaccttcgaagaccaacgtaaacgtaccacgcgctaacaaaagtcaaagcaagggtaaacacaaaggcaaattgttggtactcgtaggaactttagcactcgtgacatcagttatttcggtaaactatcaaaagaacgaaccagttgaatttcttgaataa

SEQ ID NO: 6812 - DNA, 228 bp, Artificial Sequence
  Description of Artificial Sequence: Synthetic polynucleotide
atgaatccacgctacaggtttatattaagattttattcttctaaaaaaccaactttccacaatacagcaccttctaagaccaacgtaaacgtaccacgcgctaacaaaagtcaaagcaagggtaaacacaaaggcaaattgttggtactcgtaggaactttagcactcgtgacatctgttattagtgtaaactatcaaaagaacgaaccagttgaatttcttgaatga

SEQ ID NO: 6813 - DNA, 834 bp, Saccharomyces cerevisiae
atgaataaagaagaattattgggttttctactagatgacagtattgatagccaaaaaagatgcgtcacggatcagcaggcctactctaattggttaaagaatgataatgatgaacgtacggcccatgaggaaagctcttcacaaagtacgatagccgcattgaataagaagaagcagacagaagctgctcaagaagatatagaagaactgttaaacggcttagaaggcattattggaggagccgacccccgtaatctcaagagtaagtcaaagaggaaaaccaaaaagggcggatcgaaaccaagggaagaaaacgtgaatacggagaaacatattgtaatgctcgaggtagaagattttagtgatatgagcacccacgaagatgtcaacggagcaagtccgtcgccaaatctggaccggtcgaagaagaatgagaagcgaaggaaaaacgccaaggagctgtcatacgatgaactaaaagacaaactagaagttaccactcgcaaatcacgtcttgagtgcaaagacttgaaaaagaaagttcatgggctcgaaagaaggaaccttgaacttgaacagcgtttagaagagctgaagattgagaaccagactttgatagagattaacaataaactgttgaaaaacactaatgaggatgagattaacaagagccagaggaacaaggagaaggaccgaaagcggagggaaagaagaacggcaaggagaaaagatgaaagaaagcaggaaaaaaagcaggaaaaaaagcaggataataaaacatctcaatcttttccttcctcaactgacatgaatggacagcctatagaattttga

SEQ ID NO: 6814 - DNA, 834 bp, Artificial Sequence
  Description of Artificial Sequence: Synthetic polynucleotide
atgaataaagaagaattattgggttttttattagatgacagtattgatagccaaaaaagatgcgtcacggatcagcaggcctactctaattggttaaagaatgataatgatgaacgtacggcccatgaggaaagctcttctcaaagtacgatagccgcattgaataagaagaagcagacagaagctgctcaagaagatatagaagaattattaaacggcttagaaggcattattggaggagccgacccccgtaatctcaagagtaagtccaagaggaaaaccaaaaagggcggatctaaaccaagggaagaaaacgtgaatacggagaaacatattgtaatgctcgaggtagaagattttagtgatatgagcacccacgaagatgtcaacggagcaagtccgtctccaaatttggacagatccaagaagaatgagaagagaaggaaaaacgccaaggagttatcttacgatgaattgaaagacaaattagaagttaccactcgcaaatctcgtcttgagtgcaaagacttgaaaaagaaagttcatgggctcgaaagaaggaaccttgaacttgaacagcgtttagaagagttgaagattgagaaccagactttgatagagattaacaataaacttttgaaaaacactaatgaggatgagattaacaagagccagaggaacaaggagaaggacagaaagagaagggaaagaagaacggcaaggagaaaagatgaaagaaagcaggaaaaaaagcaggaaaaaaagcaggataataaaacatctcaatcttttccttccagcactgacatgaatggacagcctatagaattttga

SEQ ID NO: 6815 - DNA, 2523 bp, Saccharomyces cerevisiae
atgaagttttgtctttattgctgtcattgttatatcgttatttgtggaaaggctacacattattacaagtcatcaaaagccacatcaaacttgaaatcgtcaaacagggtacttatgagaaaccccatgtcgccttcggagcaacattcacaacataattctacattggccgcctcgccatttgtttctaacgtatctgcagcaagaacacaacagagtttaccaaccgatgctcagaatgatcgtttgcagcaaccctggaacagaaccaatacggctacgagtccctaccagtcgttagcaaatagccctttaatacagaagttgcaagcgaatattatgactccgcaccagccatctgctaattctaattctaattccaattccattacgggcaatgttgtgaacgacaataatttgttagcttctatgtctaagaatagtatgttcggttctaccataccgtccacattaaggaaggtgagcttacagcgtgaatataaggattcagttgatggtgtggttcgtgatgaagataatgatgaggatgttcataacaatggcgatgcagctgcgaatgctaataatgatcgggagagtaaactagggcataatgggccattgacgacaacaacattaacgacaacaactacagcaactcaactagatgtttctgaattgtcagctatagaaagattgagactttggaggttcgacgcattgatgcagcatatgtataggaccgcagaatatattgctgataaagtgtataacatatccaatgatcctgatgatgccttctggctcggccaagtatattacaataataatcagtacgtaagggctgtagaacttattaccaggaacaacttggatggcgttaatatcctgtgtcgatatctgttgggactctcctttgttaaattacagagatttgatgacgctctagatgttataggcgaatacaatccattcagcgaggacccatctacgacggcagcaaacaccatgagcaataatggcaataacagcaatacgtcacagccagttactgacggcggtataaaaatggagtcatcattatgttttctgagagggaaaatatattttgcacaaaataattttaacaaggcaagggatgcatttcgtgaagcgattttggtagatataaaaaattttgaagctttcgaaatgctcctgtccaagaacctgttaactccacaagaggaatgggacctgtttgactctttggatttcaaagaatttggggaagataaagagattatgaagaatctttataagatcaacctatctaaatacatcaacacggaagatataacgaagtccaatgagattttagcgaaagattataaattagctgacaatgtagatgtcgtaagaagtaaggtggatatctgctatacgcaatgcaaattcaacgaatgcttagagttgtgcgagaccgttttggaaaacgacgaatttaatacgaatatcttgccagcatacattggatgtctatatgaactatcaaataaaaataagcttttccttctgtcgcatcgattagcggaaactttcccgaagtctgcgataacatggtttagcgttgcgacctattatatgagcttggacagaattagtgaagcacagaaatactattccaaatcctcaatactggatccaagctttgctgccgcatggctgggatttgcacacacgtatgccctagaaggtgaacaagaccaagcattaacagcatactctacagcctccagattctttcctggaatgcacttaccaaaactgtttctcgggatgcagtttatggcgatgaattcattaaatttagcagaatcgtattttgttctggcatatgacatttgtccaaacgatccattagtactcaatgaaatgggtgtaatgtattttaagaagaacgaatttgtcaaagccaagaaatacctgaagaaggcgttggaagtggtgaaagatcttgatccaagttcaagaacgacaatatcaattcaattaaatctaggacacacttacagaaagttaaatgagaacgaaattgccattaaatgttttagatgcgttttggagaaaaatgataaaaactctgaaattcattgttccttaggttacttatatttgaagacgaagaaattacaaaaggccattgatcatttgcacaaatcattgtacctaaagcctaataattcatctgcaacagcgcttttgaaaaatgccctagagctaaacgtgacgttatcattggatgccagccacccacttattgacaagtcgaatttaatgagtcaggcaagtaaggacaaggcttcgctcaataaaaaaagatcttcattgacttatgaccctgtcaacatggctaaaaggttgagaacacaaaaggagatctttgatcagaataacaaagctctaagaaagggaggtcatgacagcaaaactggaagtaataatgccgacgatgattttgacgcagatatggaactggaataa

SEQ ID NO: 6816 - DNA, 2523 bp, Artificial Sequence
  Description of Artificial Sequence: Synthetic polynucleotide
atgaagttttgtctttattgctgtcattgttatatcgttatttgtggaaaggctacacattattacaagagttctaaagccacaagtaacttgaaatcttccaacagggtacttatgagaaaccccatgtctccttctgagcaacattctcaacataattctacattggccgcctctccatttgtttctaacgtatctgcagcaagaacacaacagagtttaccaaccgatgctcagaatgatcgtttgcagcaaccctggaacagaaccaatacggctacgagtccctaccagtctttagcaaatagccctttaatacagaagttgcaagcgaatattatgactccgcaccagccatctgctaattctaattctaattccaattccattacgggcaatgttgtgaacgacaataatttgttagcttctatgtctaagaatagtatgttcggttctaccataccgtccacattaaggaaggtgagcttacagcgtgaatataaggattctgttgatggtgtggttcgtgatgaagataatgatgaggatgttcataacaatggcgatgcagctgcgaatgctaataatgatagagagagtaaattggggcataatgggccattgacgacaacaacattaacgacaacaactacagcaactcaattggatgtttctgaattgtctgctatagaaagattgagactttggaggttcgacgcattgatgcagcatatgtataggaccgcagaatatattgctgataaagtgtataacatatccaatgatcctgatgatgccttctggctcggccaagtatattacaataataatcagtacgtaagggctgtagaacttattaccaggaacaacttggatggcgttaatatcttgtgtagatatcttttgggactctcctttgttaaattacagagatttgatgacgctttagatgttataggcgaatacaatccattcagcgaggacccatctacgacggcagcaaacaccatgagcaataatggcaataacagcaatacgagccagccagttactgacggcggtataaaaatggagtcttctttatgttttttaagagggaaaatatattttgcacaaaataattttaacaaggcaagggatgcatttcgtgaagcgattttggtagatataaaaaattttgaagctttcgaaatgctcttatccaagaacttattaactccacaagaggaatgggacttatttgactctttggatttcaaagaatttggggaagataaagagattatgaagaatctttataagatcaacttatctaaatacatcaacacggaagatataacgaagtccaatgagattttagcgaaagattataaattagctgacaatgtagatgtcgtaagaagtaaggtggatatctgctatacgcaatgcaaattcaacgaatgcttagagttgtgcgagaccgttttggaaaacgacgaatttaatacgaatatcttgccagcatacattggatgtttgtatgaattatccaataaaaataagcttttccttttatctcatagattagcggaaactttcccgaagtctgcgataacatggtttagcgttgcgacctattatatgagcttggacagaattagtgaagcacagaaatactattccaaatcctccatattggatccaagctttgctgccgcatggttaggatttgcacacacgtatgccttggaaggtgaacaagaccaagcattaacagcatactctacagcctccagattctttcctggaatgcacttaccaaaattatttctcgggatgcagtttatggcgatgaattctttaaatttagcagaaagttattttgttttagcatatgacatttgtccaaacgatccattagtactcaatgaaatgggtgtaatgtattttaagaagaacgaatttgtcaaagccaagaaatacttgaagaaggcgttggaagtggtgaaagatcttgatccaagtagtagaacgacaatatctattcaattaaatttaggacacacttacagaaagttaaatgagaacgaaattgccattaaatgttttagatgcgttttggagaaaaatgataaaaactctgaaattcattgttccttaggttacttatatttgaagacgaagaaattacaaaaggccattgatcatttgcacaaatctttgtacttgaagcctaataattcttctgcaacagcgcttttgaaaaatgccttagagttgaacgtgacgttatctttggatgccagccacccacttattgacaagagcaatttaatgagtcaggcaagtaaggacaaggcttctctcaataaaaaaagatcttctttgacttatgaccctgtcaacatggctaaaaggttgagaacacaaaaggagatctttgatcagaataacaaagctttgagaaagggaggtcatgacagcaaaactggaagtaataatgccgacgatgattttgacgcagatatggaattggaatga

SEQ ID NO: 6817 - DNA, 1407 bp, Saccharomyces cerevisiae
atgttactgaatactacttatactgtcttcattttttttttgcttagaattataaagttcaagatcaaggccgaaaattttttagaacatgaaaaattgaaaactcatggtacctcatctcgaaaagatcctaagggccaagtcaagaattcgtgtagaaaaatgagtgctataggcgacaagaaccaatttcgtatcattgtgggctcatacgagcacaacattttgtgtttatccttagatatcccaaatcaaaaggaaaatgatgcagcaaagacaccacattttatgccaatatttcattttcaagcccattcgttgagtattaaatgtttggctgtttcaagaagatacctagtttctggatccaatgacgagcacatcagaatttatgatttgcaaaagaggaaggaactgggtactttgttaagtcatcagggctctattactgctctacaattctcacatccagcttcttccagtgaggatgctgctgtttcaaaggggagcaagaatagcaaatggttattatcagcatcagaagaccacaaaattatggtttggagagtaaaggactgggaaacagtggggactttaaagggacacacggcaagggttaatgatgtggatattcaccccaccaatagaattgccatcagtgttagtgatgaccattctatacgtctttggaatttgatgactctaagaaatgctgctgtactaaaactaagaaaatataatacaaacgggacttgtgttagatggttaggcgccaaaggtgattattttgccgtgggtttaagggatagggtgcttatttatgaaactggatcggctaaagtttttaaagaaatagtctttcaaaggaaaactcttatgcatattgaaacacatattttaccattcgataataaggaatacctttctgttggtatcagcgatggtaatgttcatttctatccttgtgaggagttattcgaaaaagttgaagaaaatgaaaagcaggaagatgatgacgacaaggaggatatcagccccgctttttctttattgggtcacacaaaccgtattaaagatttcaagttttatacgaatgaatttggtacctacctagtcaccattggttctgatggtaaaattgtcgtatgggatatgtctacaaaagaacaagtagcagtctacgactgtggcgaaaggctaaattgcttaacgctatgcgatgaaagcattgagaaatacaacacaatgaagaagagggatgctgaaacagctgatataggtgaccaaagtgaggtggaaagtgataccgaagaattaaagaagataatgtttggtgagaagaagaaactcaataaaaagaagcggaagcaattgaagaagagtaaagtatcagtagaacttgaataa

SEQ ID NO: 6818 - DNA, 1407 bp, Artificial Sequence
  Description of Artificial Sequence: Synthetic polynucleotide
atgttattgaatactacttatactgtcttcattttttttttgcttagaattataaagttcaagatcaaggccgaaaattttttagaacatgaaaaattgaaaactcatggtacctcttctagaaaagatcctaagggccaagtcaagaattcttgtagaaaaatgagtgctataggcgacaagaaccaatttcgtatcattgtgggctcttacgagcacaacattttgtgtttatccttagatatcccaaatcaaaaggaaaatgatgcagcaaagacaccacattttatgccaatatttcattttcaagcccattctttgagtattaaatgtttggctgtttctagaagatacttggtttctggatccaatgacgagcacatcagaatttatgatttgcaaaagaggaaggaattgggtactttgttaagtcatcagggctctattactgctttacaattctctcatccagcttcttccagtgaggatgctgctgtttccaaggggagcaagaatagcaaatggttattaagtgcatctgaagaccacaaaattatggtttggagagtaaaggactgggaaacagtggggactttaaagggacacacggcaagggttaatgatgtggatattcaccccaccaatagaattgccatcagtgttagtgatgaccattctatacgtctttggaatttgatgactttgagaaatgctgctgtattgaaattgagaaaatataatacaaacgggacttgtgttagatggttaggcgccaaaggtgattattttgccgtgggtttaagggatagggtgcttatttatgaaactggatctgctaaagtttttaaagaaatagtctttcaaaggaaaactcttatgcatattgaaacacatattttaccattcgataataaggaatacctttctgttggtatcagcgatggtaatgttcatttctatccttgtgaggagttattcgaaaaagttgaagaaaatgaaaagcaggaagatgatgacgacaaggaggatatcagccccgctttttctttattgggtcacacaaaccgtattaaagatttcaagttttatacgaatgaatttggtacctacttagtcaccattggttctgatggtaaaattgtcgtatgggatatgtctacaaaagaacaagtagcagtctacgactgtggcgaaaggttgaattgcttaacgttatgcgatgaaagcattgagaaatacaacacaatgaagaagagggatgctgaaacagctgatataggtgaccaaagtgaggtggaaagtgataccgaagaattaaagaagataatgtttggtgagaagaagaaactcaataaaaagaagagaaagcaattgaagaagagtaaagtatctgtagaacttgaatga

SEQ ID NO: 6819 - DNA, 3249 bp, Saccharomyces cerevisiae
atgatgagtggcacaggaaacgtttcctcgatgctccacagctatagcgccaacatacagcacaacgatggctctccggacttggatttactagaatcagaattactggatattgctctgctcaactctgggtcctctctgcaagaccctggtttattgagtctgaaccaagagaaaatgataacagcaggtactactacaccaggtaaggaagatgaaggggagctcagggatgacatcgcatctttgcaaggattgcttgatcgacacgttcaatttggcagaaagctacctctgaggacgccatacgcgaatccactggattttatcaacattaacccgcagtcccttccattgtctctagaaattattgggttgccgaaggtttctagggtggaaactcagatgaagctgagttttcggattagaaacgcacatgcaagaaaaaacttctttattcatctgccctctgattgtatagcgaaggacaagtttttcaccagctcggacgatcccaccaacttgacaatacccaatagggacatcaacgaaaggactcttttcttggacgcctttcttttgtgtgcatctaacaacaatagcaacaacttcaagcagacctatgtttgtaatagatgtatcaacagggaaaaaagaagagcgtcgagaagaaagtctgggttgaacgacaactccatctggcaaaataacgaaaacaaaagagcaatcatattcaatagtaaacaacttttcatcattagtaataacggtttgagtggtaactctaactgtatcaatttcgacttaccgacgagaatcgtctgttactgcagacaccacaaggcaactaacgggtttgtagttttgttccttctaagggaccataacggcgatatcttggcgaaaactataacagatcccataatgatcatggacaagaaaaatgccagcaataccacaactccaaccagcaccagcaatgcccaggtttcgccaatgacaaatgacactagatccttttcatcgccgcaaagtgacttaaacttcccatccgaattccccctgccttctaacagtaaaaattttgtcatttctacgaactgtatgcttgatagcaattgtaataacaacaacaatgataatgataacaaaaacaacattaagactaataccgcaatgatgaacaacaacagacactttccatcaccaaattcctccagtgaggacagcaaccattctttttcagatattcatttttctaataacaacgacaacaatttacatcgttcactagactcttggtcgtccacaggttttaatagttcatctaatcccgctcttactacattaactagtgatttcagtgcggcctctgcgagacacactggcaagaggcagcgttcggtaaacgagccttttatgtctacgcctaatacgttttcccgtcttccccagaaattcatcgattcttccaaagatatatcgaaccataatagtgtccccgtggcgctaaataacaagccttctattcagcgtgtcatccccgcacaaggttccatcaacggaggtatagaagtgactctacttggctcaaagtttaagcagggcttaatcatcaagtttggcgaaaatatagcattgtccagccaatgctggaatgaatctacgatggtgacttatttaccgccttcatctaaacctggaccggttttggtaaccatagtcgacccaagtgaaacgtctatgagaaataatagcaatagtagtgtttccaccagcaatagtaccaatgacattctgcacttaaacaagtataccggtgagaaagcaatctttacttatgttgatgatactgataggcaactaattgaattggctctgcaaattgtggggctgaaaatgaacggtaaactggaagatgcaagaaatattgctaaaaggattgttggcagtgattcatctccatctaataataacgcaggattacactcacagaatagctctttaaattcgtacacgaatatgatgcgaaatataaacgatgaacaattgatcactgaagttattaagtcatttaagagaaataataatctctctaccgtcaatctttccatgtgtgacgttaggggtagaactctattacatctggcagcattcaataactggtatagtcttgtctcattactaatcaaatatgggtcgcatttgaacgaccaagatttatttggttttactccgctacatatggcgtgtattaatggtgacttgagaattataagactattgttagaatgcaacgttaatattatgaagaaaaccagaaacggctttatcgctaaacagttcttcctgatgaattatactgtcaacaagaccagatattctaattatgaaaccagtctgtttgacgacattctgactagattaacgaagaatacaacaggatccagtgatactcaaccgtttgagagaaatgtatcccagtcaagtttcaactcaagtttatttgatgatgacgatgctgatcatgactatgtccaagaaagaaaatatttattggcggattccgctgcccttgcccccgaacaatccaactgtaatgacaatacgtcattctcaatcctagattcggattcaggttatgacataagtgattgtgaatcatcttcagatgagattgctttggagttctttaacacccacaaaatcaaggacttctcttcaaagccaaatgaaataccaaaaactactaagactagcatagagcctgacggatctttatggaacagaatgctaactcgtttaaatgacgagctcccaaagtatgaagacttgttcccaaaaaaacccaaaaactgggaacttggtagcaaatctgtggagattgggccagataattctgcccaaatgaccgtggatgattctcaaacttcttctgaagacgatgaattagaagctttacaggtcgggttcaacacaatcttttccaagaagcaaaactttcagaatgataagatgctcctattcttttggatccccttaactttagtactcttattatgtttcacattatcgaatttggggaaagatgatgatatgtttcataatttatccaaaattgttcaggaatatttaagaattggtttagccaaggtactactaggcaacgaaaggatgaaaacctcttttaaaatgcagttatcgaagtttcaaaacaataacattctaaacgacatgcgagtcaattaa

SEQ ID NO: 6820 - DNA, 3249 bp, Artificial Sequence
  Description of Artificial Sequence: Synthetic polynucleotide
atgatgagtggcacaggaaacgtttcctctatgctccacagctatagcgccaacatacagcacaacgatggctctccggacttggatttattggaaagtgaattattagatattgctttactcaactctgggtcctctttacaagaccctggtttattgagtttgaaccaagagaaaatgataacagcaggtactactacaccaggtaaggaagatgaaggggagctcagggatgacatcgcatctttgcaaggattgcttgatcgtcacgttcaatttggcagaaagttacctttaaggacgccatacgcgaatccattagattttatcaacattaacccgcagtcccttccattgtctttggaaattattgggttgccgaaggtttctagggtggaaactcagatgaagttgagttttagaattagaaacgcacatgcaagaaaaaacttctttattcatctcccctctgattgtatagcgaaggacaagtttttcaccagcagtgacgatcccaccaacttgacaatacccaatagggacatcaacgaaaggactcttttcttggacgcctttcttttgtgtgcatctaacaacaatagcaacaacttcaagcagacctatgtttgtaatagatgtatcaacagggaaaaaagaagagcgtccagaagaaagtctgggttgaacgacaactccatctggcaaaataacgaaaacaaaagagcaatcatattcaatagtaaacaacttttcatcattagtaataacggtttgagtggtaactctaactgtatcaatttcgacttaccgacgagaatcgtctgttactgcagacaccacaaggcaactaacgggtttgtagttttgttccttttgagggaccataacggcgatatcttggcgaaaactataacagatcccataatgatcatggacaagaaaaatgccagcaataccacaactccaaccagcaccagcaatgcccaggtttctccaatgacaaatgacactagatccttttcttctccgcaaagtgacttaaacttcccatccgaattccccttaccttctaacagtaaaaattttgtcatttctacgaactgtatgcttgatagcaattgtaataacaacaacaatgataatgataacaaaaacaacattaagactaataccgcaatgatgaacaacaacagacactttccatctccaaattcctccagtgaggacagcaaccattctttttctgatattcatttttctaataacaacgacaacaatttacatcgttctttggactcttggtcttccacaggttttaatagttcttctaatcccgctcttactacattaactagtgatttcagtgcggcctctgcgagacacactggcaagaggcagcgttctgtaaacgagccttttatgtctacgcctaatacgttttcccgtcttccccagaaattcatcgattcttccaaagatataagcaaccataatagtgtccccgtggcgttgaataacaagccttctattcagcgtgtcatccccgcacaaggttccatcaacggaggtatagaagtgactttacttggctccaagtttaagcagggcttaatcatcaagtttggcgaaaatatagcattgtccagccaatgctggaatgaatctacgatggtgacttatttaccgccttcttctaaacctggaccggttttggtaaccatagtcgacccaagtgaaacgtctatgagaaataatagcaatagtagtgtttccaccagcaatagtaccaatgacattttacacttaaacaagtataccggtgagaaagcaatctttacttatgttgatgatactgataggcaattgattgaattggctttacaaattgtggggttgaaaatgaacggtaaattagaagatgcaagaaatattgctaaaaggattgttggcagtgattcttctccatctaataataacgcaggattacactctcagaatagctctttaaattcttacacgaatatgatgagaaatataaacgatgaacaattgatcactgaagttattaagagctttaagagaaataataatctctctaccgtcaatctttccatgtgtgacgttaggggtagaactttattacatttagcagcattcaataactggtatagtcttgtctctttattgatcaaatatgggtctcatttgaacgaccaagatttatttggttttactccgcttcatatggcgtgtattaatggtgacttgagaattataagattattgttagaatgcaacgttaatattatgaagaaaaccagaaacggctttatcgctaaacagttcttcttaatgaattatactgtcaacaagaccagatattctaattatgaaaccagtttatttgacgacattttgactagattaacgaagaatacaacaggatccagtgatactcaaccgtttgagagaaatgtatcccagagcagtttcaacagtagtttatttgatgatgacgatgctgatcatgactatgtccaagaaagaaaatatttattggcggattccgctgcccttgcccccgaacaatccaactgtaatgacaatacgtccttctccatcttagattctgattctggttatgacataagtgattgtgaaagctcttctgatgagattgctttggagttctttaacacccacaaaatcaaggacttctcttccaagccaaatgaaataccaaaaactactaagactagcatagagcctgacggatctttatggaacagaatgttgactcgtttaaatgacgagctcccaaagtatgaagacttgttcccaaaaaaacccaaaaactgggaacttggtagcaaatctgtggagattgggccagataattctgcccaaatgaccgtggatgattctcaaacttcttctgaagacgatgaattagaagctttacaggtcgggttcaacacaatcttttccaagaagcaaaactttcagaatgataagatgctcttgttcttttggatccccttaactttagtactcttattatgtttcacattatccaatttggggaaagatgatgatatgtttcataatttatccaaaattgttcaggaatatttaagaattggtttagccaaggtattattaggcaacgaaaggatgaaaacctcttttaaaatgcagttatccaagtttcaaaacaataacattttgaacgacatgagagtcaattga

SEQ ID NO: 6821 - DNA, 951 bp, Saccharomyces cerevisiae
atggaggagtacgattattcagacgttaaacctttgcccattgagacagacttgcaggatgaactgtgcaggattatgtataccgaggattataagcggttgatgggactcgcaagggctctgatcagccttaacgaactgtcacccagggcactacagctaacagccgaaattatcgacgtggcgccagccttctacaccatatggaactaccgattcaatatcgtcaggcacatgatgagtgaatccgaagacactgtcttgtacctgaacaaggaattagactggctagatgaagttacgctgaataatccaaagaactatcagatctggtcctatagacagtctcttttgaagctacatccgtctccttccttcaaaagagagctgcctatcttaaaactgatgattgatgatgattccaagaattatcacgtttggtcgtacagaaagtggtgctgtttgttcttcagtgactttcaacatgagctcgcctacgccagcgacctcatcgagacagacatttataacaacagcgcatggactcataggatgttttactgggtgaacgctaaagatgtcatttcaaaagtggaattggccgacgagctccagttcattatggacaagattcaattggttccgcagaacatcagtccgtggacctacctccgtggtttccaagagctattccatgataggctacagtgggatagcaaagtagtcgacttcgccacaaccttcatcggtgacgtattgtcacttccaattggctcaccagaggatttgcccgagatcgagtcctcatatgccctggaattcctggcatatcactggggggcagacccttgtacccgagacaacgctgttaaggcctatagcttgctagcaatcaaatacgatcctattagaaaaaacttgtggcaccacaaaataaataatctgaactga

SEQ ID NO: 6822 - DNA, 951 bp, Artificial Sequence
  Description of Artificial Sequence: Synthetic polynucleotide
atggaggagtacgattattctgacgttaaacctttgcccattgagacagacttgcaggatgaattgtgcaggattatgtataccgaggattataagagattgatgggactcgcaagggctttgatcagccttaacgaattatctcccagggcattacagttgacagccgaaattatcgacgtggcgccagccttctacaccatatggaactacagattcaatatcgtcaggcacatgatgagtgaatccgaagacactgtcttgtacttgaacaaggaattagactggcttgatgaagttacgttgaataatccaaagaactatcagatctggtcctatagacagtctcttttgaagttgcatccgtctccttccttcaaaagagagcttcctatcttaaaattaatgattgatgatgattccaagaattatcacgtttggagttacagaaagtggtgctgtttgttcttcagtgactttcaacatgagctcgcctacgccagcgacctcatcgagacagacatttataacaacagcgcatggactcataggatgttttactgggtgaacgctaaagatgtcatttccaaagtggaattggccgacgagctccagttcattatggacaagattcaattggttccgcagaacatcagtccgtggacctacctccgtggtttccaagagcttttccatgataggttacagtgggatagcaaagtagtcgacttcgccacaaccttcatcggtgacgtattgtctcttccaattggctctccagaggatttgcccgagatcgagtccagctatgccttggaattcttggcatatcactggggggcagacccttgtaccagagacaacgctgttaaggcctatagcttgttggcaatcaaatacgatcctattagaaaaaacttgtggcaccacaaaataaataatttgaactga

SEQ ID NO: 6823 - DNA, 300 bp, Saccharomyces cerevisiae
atgttgggaatgataaggtgggtagtagaggggacgttggtagctatgctcctatcggcaataagaagggagacgggaatgatattcttttacaaccagtatcagttgggcggctggatacatagatatctgtcatggggagagatgtgctacacaaggacgctgaagatggttaaacgttctaaatttttcagaaagcagttgaacgaggacgggtttggacgcatcaatgatagcggtccaaaacgaaggggaagagatcaatctcaatacagcagtaggtttgtagaactagattaa

SEQ ID NO: 6824 - DNA, 300 bp, Artificial Sequence
  Description of Artificial Sequence: Synthetic polynucleotide
atgttgggaatgataaggtgggtagtagaggggacgttggtagctatgctcttgagtgcaataagaagggagacgggaatgatattcttttacaaccagtatcagttgggcggctggatacatagatatttatcttggggagagatgtgctacacaaggacgttgaagatggttaaacgttctaaatttttcagaaagcagttgaacgaggacgggtttggacgcatcaatgatagcggtccaaaaagaaggggaagagatcaatctcaatacagcagtaggtttgtagaattagattga

SEQ ID NO: 6825 - DNA, 990 bp, Saccharomyces cerevisiae
atgaccaccgtgtccatcaataagcccaacctgctgaaattcaagcatgttaaaagctttcaacctcaagaaaaagactgcggacccgtaacctcattgaatttcgacgataatggccagtttctactgacctcttcttccaacgatacaatgcaattgtacagtgccacgaactgcaaattcttggacactatagcctctaagaaatatggctgtcactccgctatctttacgcacgcacaaaacgaatgtatctattcctctacaatgaaaaattttgacattaaataccttaatctggaaacaaaccaatatctaagatatttttccggtcatggcgccctagtgaatgatttgaagatgaaccccgtgaacgatacgtttctatcgtcgtcatacgatgaatccgttaggctttgggatttgaagatctctaaaccgcaagttattataccaagtctcgtaccaaattgtatcgcatatgatccaagtggccttgtattcgcattggggaacccagagaatttcgaaatagggctatataatctgaaaaaaattcaggagggtcctttcttgataattaaaattaatgatgcgactttcagtcaatggaataaattagaattttctaacaatggaaagtatttattagttggctcctcgataggaaagcatttaatttttgacgcattcacaggtcaacaattattcgaactaataggaacaagggccttcccgatgagagaatttctagattctggatctgcttgtttcacaccagatggtgaattcgtccttggaaccgattatgacggtaggattgccatttggaatcattctgattcaataagtaacaaagtattaaggccgcaagggttcattccctgtgtttctcatgagacctgccccaggtcaattgcattcaaccctaaatattcgatgtttgttaccgcagacgaaacagtagatttttacgtgtacgatgaatga

SEQ ID NO: 6826 - DNA, 990 bp, Artificial Sequence
  Description of Artificial Sequence: Synthetic polynucleotide
atgaccaccgtgtccatcaataagcccaacttattgaaattcaagcatgttaaaagctttcaacctcaagaaaaagactgcggacccgtaacctctttgaatttcgacgataatggccagtttttattaacctcttcttccaacgatacaatgcaattgtacagtgccacgaactgcaaattcttggacactatagcctctaagaaatatggctgtcactccgctatctttacgcacgcacaaaacgaatgtatctattcctctacaatgaaaaattttgacattaaataccttaatttggaaacaaaccaatatttaagatatttttccggtcatggcgccttagtgaatgatttgaagatgaaccccgtgaacgatacgtttttatcttcttcctacgatgaatccgttaggctttgggatttgaagatctctaaaccgcaagttattataccaagtctcgtaccaaattgtatcgcatatgatccaagtggccttgtattcgcattggggaacccagagaatttcgaaatagggttatataatttgaaaaaaattcaggagggtcctttcttgataattaaaattaatgatgcgactttcagtcaatggaataaattagaattttctaacaatggaaagtatttattagttggctcctccataggaaagcatttaatttttgacgcattcacaggtcaacaattattcgaattgataggaacaagggccttcccgatgagagaatttttggattctggatctgcttgtttcacaccagatggtgaattcgtccttggaaccgattatgacggtaggattgccatttggaatcattctgattctataagtaacaaagtattaaggccgcaagggttcattccctgtgtttctcatgagacctgccccaggtctattgcattcaaccctaaatattccatgtttgttaccgcagacgaaacagtagatttttacgtgtacgatgaatga

SEQ ID NO: 6827 - DNA, 2052 bp, Saccharomyces cerevisiae
atgaacaaagaattggcttctaagtttttatcaagcatcaagcatgaacgtgaacaagacattcaaacaacttctaggctattaacaacgctatctatccaacaattggtgcaaaatggcttggcaataaacaacatacatctagaaaacataagatccggtctcattggcaaattatatatggaactgggacctaacttggcggttaacgacaaaattcaaaggggtgatattaaggttggtgatattgttttggtacgccctgcaaaaaccaaagtaaataccaagactaagcccaaagtcaaaaaggtgtctgaagactccaatggcgagcaagcggaatgctcaggcgttgtctacaaaatgagtgatactcaaatcaccatagctctagaagaatctcaagatgttattgctaccacattttattcttatagcaaactttacattttaaagactaccaatgtcgtcacgtataatagaatggaatccacaatgagaaaactgtctgaaattagttcacccatacaagacaaaattatacaatacttggtaaacgaacgccccttcatccccaatacaaacagctttcaaaacattaaatcttttttaaacccgaatctgaatgactcccagaaaactgccattaattttgccattaacaatgacttgaccattatacatggtcctcctggtacgggtaaaacattcacattaattgaattgatccagcaattgctaattaaaaatcctgaggagagaatcttaatttgtgggccttccaatatttctgtggatacgattctggagaggctaacgcctcttgtgccgaataatttattattaagaatcggtcatcctgctaggctattagactctaataaaagacactctcttgatatacttagtaaaaagaatactattgtgaaggacatttcccaggagattgacaaattaattcaggagaataaaaaactaaaaaactataagcaacgtaaagaaaactggaacgaaattaaactgctgcgcaaagatttaaagaaaagagagttcaaaaccattaaggacttaataatacaatcgagaatagtcgtcaccactttacacggttcatcatcgagagaactatgctccctttatagagatgatccaaatttccagcttttcgataccttgatcatcgatgaagtctcacaggccatggaaccacaatgctggatcccactaattgcacatcaaaatcagttccacaaactagtccttgctggtgacaataaacaattgccacccacaatcaaaacagaagacgacaaaaatgtcattcacaatttggaaaccacactatttgacagaataatcaaaatattcccgaaaagggatatggtaaaatttcttaacgttcaatacaggatgaatcaaaaaattatggaatttccatcgcactcaatgtataatgggaaactattggccgatgcaacggtcgcgaacagacttttgatagacctaccgaccgtcgatgctacgccatctgaggatgatgacgatacaaaaattcctttaatttggtatgatacgcaaggtgatgaatttcaagagactgcagatgaagctactatccttggatctaagtataatgagggcgaaattgccattgtaaaagaacacattgagaatttaaggtcattcaacgtcccggagaactctataggtgttatttctccatacaatgcacaagtttctcatctgaaaaaattgatccatgatgaattaaaattaactgatattgaaatatcaactgtagatgggttccagggccgtgaaaaagatgttatcatattgagtttagttcgtagcaatgaaaaatttgaagttggtttccttaaggaagaacgaagactgaacgtcgccatgacaagacccagaaggcaactagttgttgttggcaatatagaagttctgcaaaggtgcggtaacaagtacctaaaaagttggtcagaatggtgtgaagagaacgctgacgtaaggtaccccaacattgacgattatttgtaa

SEQ ID NO: 6828 - DNA, 2052 bp, Artificial Sequence
  Description of Artificial Sequence: Synthetic polynucleotide
atgaacaaagaattggcttctaagtttttatccagcatcaagcatgaacgtgaacaagacattcaaacaacttctaggttattaacaacgttgtctatccaacaattggtgcaaaatggcttggcaataaacaacatacatttggaaaacataagatccggtctcattggcaaattatatatggaattaggacctaacttggcggttaacgacaaaattcaaaggggtgatattaaggttggtgatattgttttggtacgccctgcaaaaaccaaagtaaataccaagactaagcccaaagtcaaaaaggtgtctgaagactccaatggcgagcaagcggaatgctctggcgttgtctacaaaatgagtgatactcaaatcaccatagctttggaagaatctcaagatgttattgctaccacattttattcttatagcaaactttacattttaaagactaccaatgtcgtcacgtataatagaatggaatccacaatgagaaaattatctgaaattagttctcccatacaagacaaaattatacaatacttggtaaacgaacgccccttcatccccaatacaaacagctttcaaaacattaaatcttttttaaacccgaatttgaatgactcccagaaaactgccattaattttgccattaacaatgacttgaccattatacatggtcctcctggtacgggtaaaacattcacattaattgaattgatccagcaattgttaattaaaaatcctgaggagagaatcttaatttgtgggccttccaatatttctgtggatacgattttagagaggttgacgcctcttgtgccgaataatttattattaagaatcggtcatcctgctaggttattagactctaataaaagacactctcttgatatacttagtaaaaagaatactattgtgaaggacatttcccaggagattgacaaattaattcaggagaataaaaaattgaaaaactataagcaacgtaaagaaaactggaacgaaattaaattacttcgcaaagatttaaagaaaagagagttcaaaaccattaaggacttaataatacaatctagaatagtcgtcaccactttacacggttcttcttctagagaattgtgctccctttatagagatgatccaaatttccagcttttcgataccttgatcatcgatgaagtctcccaggccatggaaccacaatgctggatcccattgattgcacatcaaaatcagttccacaaattggtccttgctggtgacaataaacaattgccacccacaatcaaaacagaagacgacaaaaatgtcattcacaatttggaaaccacattatttgacagaataatcaaaatattcccgaaaagggatatggtaaaatttcttaacgttcaatacaggatgaatcaaaaaattatggaatttccatctcactccatgtataatgggaaacttttggccgatgcaacggtcgcgaacagacttttgatagacttgccgaccgtcgatgctacgccatctgaggatgatgacgatacaaaaattcctttaatttggtatgatacgcaaggtgatgaatttcaagagactgcagatgaagctactatccttggatctaagtataatgagggcgaaattgccattgtaaaagaacacattgagaatttaaggtctttcaacgtcccggagaactctataggtgttatttctccatacaatgcacaagtttctcatttgaaaaaattgatccatgatgaattaaaattaactgatattgaaatatctactgtagatgggttccagggccgtgaaaaagatgttatcatattgagtttagttcgtagcaatgaaaaatttgaagttggtttccttaaggaagaaagaagattgaacgtcgccatgacaagacccagaaggcaattggttgttgttggcaatatagaagttttgcaaaggtgcggtaacaagtacttgaaaagttggtctgaatggtgtgaagagaacgctgacgtaaggtaccccaacattgacgattatttgtga

SEQ ID NO: 6829 - DNA, 525 bp, Saccharomyces cerevisiae
atgtctttggccaaatccgctgctaacaaacttgactgggcaaaagtcatctcttctctacgtataacagggtcgactgccactcaattatcgagttttaaaaagagaaacgatgaggcacgtagacaattactagagctgcaaagtcaacccaccgaagtagatttcagtcattatagatctgtgttgaaaaacacttcagtcattgacaagatagaatcatacgttaagcaatataagccggtcaaaatcgatgcctccaaacaattacaagtgattgagtcttttgaaaagcacgcaatgaccaacgccaaggagacagaatccttagtttccaaggagttaaaggatttgcaaagcaccttagataatattcaatctgcaagacctttcgatgaattaactgttgacgacctgacaaagatcaaacctgaaattgatgctaaggtagaagagatggtcaagaagggtaaatgggacgtacctggttacaaggacagattcggcaatttgaatgtgatgtag

SEQ ID NO: 6830 - DNA, 525 bp, Artificial Sequence
  Description of Artificial Sequence: Synthetic polynucleotide
atgtctttggccaaatccgctgctaacaaacttgactgggcaaaagtcatctcttctttacgtataacagggtccactgccactcaattatccagttttaaaaagagaaacgatgaggcacgtagacaattattggagttacaaagtcaacccaccgaagtagatttcagtcattatagatctgtgttgaaaaacactagtgtcattgacaagatagaatcttacgttaagcaatataagccggtcaaaatcgatgcctccaaacaattacaagtgattgagtcttttgaaaagcacgcaatgaccaacgccaaggagacagaatccttagtttccaaggagttaaaggatttgcaaagcaccttagataatattcaatctgcaagacctttcgatgaattaactgttgacgacttgacaaagatcaaacctgaaattgatgctaaggtagaagagatggtcaagaagggtaaatgggacgtacctggttacaaggacagattcggcaatttgaatgtgatgtga

SEQ ID NO: 6831 - DNA, 2940 bp, Saccharomyces cerevisiae
atggtgaccgaccaaggcagtaggcattcgatacaatctaagcaaccagcctacgttaataaacaaccgcaaaaaaggcagcagagatcttctgtcgcatgcctttcttgtaggaaacgtcatataaaatgtcctggtggtaacccttgccaaaaatgtgttacgagcaatgccatatgtgagtacttggagccgtcaaaaaaaattgttgtgtcgacaaagtatctgcaacaactgcaaaaagacttgaatgataaaactgaagagaataaccgcctgaaagctttgctcttggagagaccagtgagtgtacgtggtaaggataacagcgatgatgacgagaggcatataaacaatgcaccctcaagtgacacattggaagtatccagcgctccggcggctcctatatttgacctcatgtccaatagtaacactgcgtccgataacgataacgacgatgacaacagcaacagaatcacaaataataggagctatgatcatagtttggaaaaatactacaaaaaggccatcagcatctttaaacaaccagctaatgctaatggcgaaaatggcaacggtgccaatggtcatgaggatgatgatgaagatgatgaagaaatatcaacaaattttgctcaaagaagtggtaggctcatagaatctcacaatggattccattattttgttggatcttcttcaatgacattatttgggttagaaattcaatctttggttacaaagtatatttcggtcaagaattttcgacctttgccaataaacaccaaaaacaagattttaaattcaaacctgaacccggctataagttcttttatcaattcaaacaactatcttttctcgtcctataattttttgaaccctatatcgactattgtcaacttaaactcaatcaacgataatttatctccattgatgtttaagataattttgaaaagcgatacggatggtagtagtggccaggaagaggtaatacagtttcagttgccttcgtataattacacaaaactattaattgactgctttataaattataacgatggttgtttttactttttcaacgaaggcctggttaaatgtggcattaacaaattgtacttggaaaataaatggctatactatgataataccaaaaaagctttggacaatgagaatgatccaattttacaagctgtttggttttgcaaaattttgttaattttagcagtaggtgaaatgtatctgggttccatcaataatgaaatgttgaagaattattctaatcagccaaaattgcccggttcaaaattttttcaaatgggttctaaaatttttaattgtttgttctcaagtgaaagattagaaaatgtgactaagaaaggcggtattgaagtcctgttgttatacgcgttcttcttacaggtggctgattacactttagcctcttatttttacttcggtcaagccctaaggacgtgcttaattctaggcttacatgttgattctcaaagcgacactctatccaggtatgaaatcgagcatcataggagactttggtggacagtttacatgtttgaacgaatgcttagctcaaaagctgggttaccattaagtttcactgattatacaatctctacagcactgccagcggatattgatgatgaaactatcgaagagaaaaatagtcactatgttttcagaaaggcagaattgatttctaactgcgttactattgtgaaaatcaatgcacaaattttgagcaaattatatcaaaggcaacctgagacaaacatcataattactttgaaagttgtcatcaagcagttgttggaatggaggaacaatttgtccgattccttacaggtggattttacgcaaaaggatgaagatttcaaaatatcgagattgtcaaccaatatgtttacggaatattttcaaggaataaacttggccgtgagacctttattatttcattttgcatccattcaattgaaaaggttcaaaacgagcaatactttcgtcaacttacaaaactattctgccacaatatcttccttattaacatgttctttgcatgcttctgtgaatactattaggtctctgtggagtttattacagaatagtatgcttgctatgtttagttatatggacagagagtatctttttacttcttcttgtactttattactattcaacactgcttttggtattcatgaacaaacactatatcatttggatcattctctggaaattttcacacaaatgagaaacttaggcaacattccagcaggcttaagaagagcacaattattaacattaatggcaaatttggatttccacggcataatgaatgacttgattactaaatataacgatattttgaaatttgattctatgaattgtgaaaacgataacatagtagaagatagcaatgaacccaaaagagaaaccgaaaagtgtaaacctcacaaagatggcgatcgcattgacccttcaattatagactgtgataaatcaaacaccaatacaaatatgatcaagaacgaatctatatcgaacattgttagcatacttccggaaggcgcgaaaccaacgctgactgattatagtaatggtaataatgatgttaatgatattaacgtcaataactcggaaccttctactttttttgatatcataactgcgagcttggaaaattcataccaaaccacgctaactgaaaagggctctcaggtgatggaaaaaaacatggatcagttggattccgttcataatctaaatgatgacgatttacaacaattgttggaggatttaggcaatattgatcattccgatgaaaaactttggaaggaaatcactgatcaagcaatgtggctgggaaatactatggatccaactgcagctgctggtagtgaaattgactttactgattatttaggaccataa

SEQ ID NO: 6832 - DNA, 2940 bp, Artificial Sequence
  Description of Artificial Sequence: Synthetic polynucleotide
atggtgaccgaccaaggcagtaggcattccatacaatctaagcaaccagcctacgttaataaacaaccgcaaaaaaggcagcagagatcttctgtcgcatgcctttcttgtaggaaacgtcatataaaatgtcctggtggtaacccttgccaaaaatgtgttacgagcaatgccatatgtgagtacttggagccgtccaaaaaaattgttgtgtctacaaagtatttacaacaattacaaaaagacttgaatgataaaactgaagagaataaccgcttaaaagctttgctcttggagagaccagtgagtgtacgtggtaaggataacagcgatgatgacgagaggcatataaacaatgcacccagtagtgacacattggaagtatccagcgctccggcggctcctatatttgacctcatgtccaatagtaacactgcgtccgataacgataacgacgatgacaacagcaacagaatcacaaataataggagctatgatcatagtttggaaaaatactacaaaaaggccatcagcatctttaaacaaccagctaatgctaatggcgaaaatggcaacggtgccaatggtcatgaggatgatgatgaagatgatgaagaaatatctacaaattttgctcaaagaagtggtaggctcatagaatctcacaatggattccattattttgttggatcttcttctatgacattatttgggttagaaattcaatctttggttacaaagtatatttctgtcaagaattttagacctttgccaataaacaccaaaaacaagattttaaatagcaacttgaacccggctataagttcttttatcaatagcaacaactatcttttctcttcctataattttttgaaccctatatctactattgtcaacttaaactctatcaacgataatttatctccattgatgtttaagataattttgaaaagcgatacggatggtagtagtggccaggaagaggtaatacagtttcagttgccttcttataattacacaaaattattaattgactgctttataaattataacgatggttgtttttactttttcaacgaaggccttgttaaatgtggcattaacaaattgtacttggaaaataaatggttatactatgataataccaaaaaagctttggacaatgagaatgatccaattttacaagctgtttggttttgcaaaattttgttaattttagcagtaggtgaaatgtatttgggttccatcaataatgaaatgttgaagaattattctaatcagccaaaattgcccggttccaaattttttcaaatgggttctaaaatttttaattgtttgttctctagtgaaagattagaaaatgtgactaagaaaggcggtattgaagtcttattgttatacgcgttcttcttacaggtggctgattacactttagcctcttatttttacttcggtcaagccttaaggacgtgcttaattttgggcttacatgttgattctcaaagcgacactttatccaggtatgaaatcgagcatcataggagactttggtggacagtttacatgtttgaaagaatgcttagcagtaaagctgggttaccattaagtttcactgattatacaatctctacagcattgccagcggatattgatgatgaaactatcgaagagaaaaatagtcactatgttttcagaaaggcagaattgatttctaactgcgttactattgtgaaaatcaatgcacaaattttgagcaaattatatcaaaggcaacctgagacaaacatcataattactttgaaagttgtcatcaagcagttgttggaatggaggaacaatttgtccgattccttacaggtggattttacgcaaaaggatgaagatttcaaaatatctagattgtccaccaatatgtttacggaatattttcaaggaataaacttggccgtgagacctttattatttcattttgcatccattcaattgaaaaggttcaaaacgagcaatactttcgtcaacttacaaaactattctgccacaatatcttccttattaacatgttctttgcatgcttctgtgaatactattaggtctctttggagtttattacagaatagtatgcttgctatgtttagttatatggacagagagtatctttttacttcttcttgtactttattattattcaacactgcttttggtattcatgaacaaacattatatcatttggatcattctttggaaattttcacacaaatgagaaacttaggcaacattccagcaggcttaagaagagcacaattattaacattaatggcaaatttggatttccacggcataatgaatgacttgattactaaatataacgatattttgaaatttgattctatgaattgtgaaaacgataacatagtagaagatagcaatgaacccaaaagagaaaccgaaaagtgtaaacctcacaaagatggcgatcgcattgacccttctattatagactgtgataaaagtaacaccaatacaaatatgatcaagaacgaatctataagcaacattgttagcatacttccggaaggcgcgaaaccaacgttgactgattatagtaatggtaataatgatgttaatgatattaacgtcaataactctgaaccttctactttttttgatatcataactgcgagcttggaaaattcttaccaaaccacgttgactgaaaagggctctcaggtgatggaaaaaaacatggatcagttggattccgttcataatttgaatgatgacgatttacaacaattgttggaggatttaggcaatattgatcattccgatgaaaaactttggaaggaaatcactgatcaagcaatgtggttaggaaatactatggatccaactgcagctgctggtagtgaaattgactttactgattatttaggaccatga

SEQ ID NO: 6833 - DNA, 5295 bp, Saccharomyces cerevisiae
atgagtaatcatagcgaagcctatggatctcgcgaccagagaagggagaagtacacccaagggaaagagttcgaagacggtacattagaaacactagaaagtataatcagtgcagtcgaagatgaaactctctccaaagattaccaacctctaatagtgttcttccaaagaggatttggtgctcaattggtacagacttggtcatattatgctcaagtaaataaccatgggaaattctcgaaaactacctcattactgactaaaaccttacgagttttgtcatctgatactagtacagtgactattgggagcggtctaattagattgatattgaccgattacacaaaagttctctatagagggttgaacaatatgcgtgcgcaattaactaatccaattcttcgtctactcaaacaaatagtcaatttcaacaatgggcaacatatagaggaattagtttcatatttcgatttttcattacctattttaccaagactgttggtaccaagcaagtctgagttagccaatgggaattcatctgctgattcatccaaacatgactcattaagatttacatttatcaagttttggttgacattgatctcaaatgcttccccattcgtgagaaaagaacttttgacagaaaactttaagattatgagcaacctatttaaattcatgaataaggctgattctgacaagttatctgagcacatactatcggtattcataaacgacattttaaaggagaaatccttcaagagaactactaaaaccaaaattttaaatgaactagcggcttcaaagattcatcacttttattattcatcaaacaagaatttggttaagaaggcaaatgagtttttcttaacttttggagcttcccgtgactttagcgtagcatttcctgataattgcgtttggttcaaaaattcagttgctgatggagcttctcatggagctccgataaccgtcaaccaagtggaatttcaaattcataataaacttttgttcaacactttacgccttttcaaaccttgggaagatacgctgcaattaggtacgttgatcaaaatattggagaacgttcccgaacttgttgctccttacagcatctttttaacgacgaatggtaactatgaccctaagatgacttcgtattggtttggtataacgttactgattaacaagattattaatcttaagataccgcaatttatggagaaagttgatagcaatattccacctgccacttcattagttatagaaaacattctgccatctttgctcaccaaatcctcgttggttaaatccctacaatttgaaacacccatcataagacaattagcctgtcaatcaatagttctagcgttaaaaaaattagaaaaagtttccacattttatgatcaaaaaggctggagaaatgaaaaaactattttactcaacgagtttcatactagaattcctgatttaccaatcttcgtatctactttgagcaattctttggcttccaataaggataatagaattttacctctgtccatatccatcatattcaactactatagtaaaatgttccccaacctcttctcaattaacctaccatcatcaaatatttacacagatatcatgcaaaaatccaagatttctggcatagaatttgctattctggacaactacttacaatttcaagaatttaactctactcaaaccaggtggtggaatccaagttctggtggaaattctttattcaccctactattaaagctagcatcctccaaaaatgcttctaacgtgataactacaagaatatccaacttgctcgatgagctgacgagaacaaacgttatcttcaacatatctttaatttcaccagtgatggctttagtgaatagtcttcaagggctttcccttcaagtttctgaaattgacaacatggaacaagtctggaagtggtttgacgaaactatatctcgtgtcgtaaaaacaccatacaagtacgtcgatatggcaaaagagtataactacatttctcccttcataatgtgcctttcagagcaatggaaatacgttgacaagagtggaaacccagagtttttaattaaatggcttatactttttcttagaaacatgattttcattggtgaagaccatataggcatagataaacttgttaaaaatgtctttcctgaggtctctgatcatgatgttaatatatacttgaaacttgactcatttgaagaaaacataaagaaaactaatagctctaattctttaatttcttcaatgaagagctcatcttttttccagtatatttcggcgcttccatctaaaaatctaatgaatatttctagattaccagtgaacaaattagatgcggcaggaatcctttttagagttcagttattggtagaagacgattctgttgtatatgacaattggttcgaagcaactgcctgtgagttaactggcaagattgctagctacatggtaacagacacagaattcccaattatcaaagttttggaaaggtatataaatttcgctttaccaaaactggccattgaaaaaagaaatgctctactcatgaaaaaatcaaggttcatgtgcaatttaatcggtgcagtatgctttgaaacaggccatcaattagtggaattccgagaaataattcaaaaagtcgtgtttagtggtgaaaatgtcgaagagtatgccaactataatgagttgtatcagaaagaagatgtaaatgctttcttaacaagtgttagtgagtatttaagtacttcagctttaacttcgctactcatgtgtagcaccaaactagagtccacaagaaacattctccaaaaattattcaacgaaggaaaaactataaaaatatcccttgtaaagaatatactgaacaaagctgcaaatgaagatcctgcttcaattaaggaagtaaacatctctttggctaaattttttgaagaaaacaaagtttgtgttgatgcttcatctgatcctatgggtaagctatccctttcagaaactacttctctgataaatagttttgtgtctagtgatttgaattatctagtactgaaagctttttacagatgggaacatttttctttcccatctttcataccaagtatctggaggatcaaggattcacctttactaagtattgtaacaacggctgctttgttcaagcacatgcaggataaagattttagcgcatttgcgcatgaaaccatttccaagtatggtaatgaaattgcgaaaagtacttacactacctcgaaaagtgagatttttgacgaaatattaaatatgattaccacttatattgatttctatgacgaaacgaaacgaaatgaaattttgaaatgtgttttatcacagagcgaccataaatatcatgctgctacagtaagatacatagctgcacacaataattttacttatccaggggtagaaacatggttacataaaactcttctttaccttacaaagtacctttcagaaagaaaagttatctccaattctttttttgagttactaagagcgatggctgagctcttaaaacttgaagaggtaccaaataagttgaatgtcaaaatcattaattctcaattagaggctattctaggcagtgagtggatcaaacaaattaaggttcttgaatacgttattgtattaattttttgtgtgagcaaaaagtcaattcaatcgcaaagaatggttcaacttttattaagcaatgacagttactcatcaataatgattaaagacaatgatgaagattcatcgtatcgaaagttcttaagcacaatgatattattctctttattcagcatcgacccggtcgtaaattcgacgccaatagttcaagagaaattattgactttttactccggtactatttccagtaacgacaagttgatactgaaaattctagaaactatcgaatctcacaccgctacttcatggacaaacatgattttttcttgggaatttatcaaagacgaagaggaagaaatcttggaagccattggagacacgaggctgattaccaaagaaagggaggggttgatactaacactacaaaaaaacatgatcaaaaagtccattgacagatacgtattggaaaggcctcaagtccctgaattatataccgattctaatacaaacaattatgatgctactacaaggtgtgacctagtcaaaaagtactacgatgataccgaacgatctggtgttgatatgtacgatccattatttttactgctattaataatccataacaaagagctggtaaaaatggtcaaagatgacgagggcaatgtaacatacagatatgaatttgaaaatttccttgattgcaaaatatttcagtttattatttgctcattaagcgattgtcataccgttgccaatataagttacgaacatttatcaaatttagcttcttctttggagaagaaaactgcccagatgaatcttgaaaagcaaataactagcaaggataatgaaagaaaagaatctgatagcgatttaatcaaatataatagcatttaccaagtgttgattaaaaggattttataccagagacaacaaaatcaagatcctatcaatccgttaatttggttttctatctctagaattgttgatctattgggaagtccaactgcgcccttacatgagaaggcataccgctgggtattatcaaattctaccatacgtagttgggacatccctatggtatctgatgtgatgatgtcctacaataagagacaacaagatgacaataagaaagaaattgatatggaaatatactatggagaattgagttgggttttaacaaccatttgtaagggaattaaaacggatgaagattacaagatgttagagaagaaaggtgtatttgaatggttgttaaacttgatcaatatgccatacttgaaagaaagattacgcgaactaatctattttattttttacaaagtccaaagggtagcagatgatggtggtttgaatttaattagcagaaacggtattgtgtcgtttttcgaggttttgaacaataacatcaaatctagactaccacaggacgatatactgaacaacattggtactttacggaacgaaaacagaggtacattaaatactactttgaggttagcccaagaacaaaacggaattgaaaaactactattaggctacaacgagcttgtcaaatcacaaaaaaggctaatattatggacagaaggtgatagcgacaatgttgtcaagaggctacgtaaatga

SEQ ID NO: 6834 - DNA, 5295 bp, Artificial Sequence
  Description of Artificial Sequence: Synthetic polynucleotide
atgagtaatcatagcgaagcctatggatctcgcgaccagagaagggagaagtacacccaagggaaagagttcgaagacggtacattagaaacattagaaagtataatcagtgcagtcgaagatgaaactctctccaaagattaccaacctttgatagtgttcttccaaagaggatttggtgctcaattggtacagacttggagttattatgctcaagtaaataaccatgggaaattctccaaaactaccagtttattaactaaaaccttaagagttttgtcttctgatactagtacagtgactattgggagcggtttgattagattgatattgaccgattacacaaaagttctctatagagggttgaacaatatgcgtgcgcaattaactaatccaattcttcgtttgctcaaacaaatagtcaatttcaacaatgggcaacatatagaggaattagtttcttatttcgatttttctttacctattttaccaagattattggtaccaagcaagtctgagttagccaatgggaattcttctgctgattcttccaaacatgactctttaagatttacatttatcaagttttggttgacattgatctctaatgcttccccattcgtgagaaaagaacttttgacagaaaactttaagattatgagcaacttgtttaaattcatgaataaggctgattctgacaagttatctgagcacatattaagtgtattcataaacgacattttaaaggagaaatccttcaagagaactactaaaaccaaaattttaaatgaattggcggcttccaagattcatcacttttattattcttccaacaagaatttggttaagaaggcaaatgagtttttcttaacttttggagcttcccgtgactttagcgtagcatttcctgataattgcgtttggttcaaaaattctgttgctgatggagcttctcatggagctccgataaccgtcaaccaagtggaatttcaaattcataataaacttttgttcaacactttacgccttttcaaaccttgggaagatacgttacaattaggtacgttgatcaaaatattggagaacgttcccgaacttgttgctccttacagcatctttttaacgacgaatggtaactatgaccctaagatgacttcttattggtttggtataacgttattgattaacaagattattaatcttaagataccgcaatttatggagaaagttgatagcaatattccacctgccacttctttagttatagaaaacattttaccatctttgctcaccaaatcctctttggttaaatccttacaatttgaaacacccatcataagacaattagcctgtcaaagtatagttttggcgttaaaaaaattagaaaaagtttccacattttatgatcaaaaaggctggagaaatgaaaaaactattttactcaacgagtttcatactagaattcctgatttaccaatcttcgtatctactttgagcaattctttggcttccaataaggataatagaattttacctttatccatatccatcatattcaactactatagtaaaatgttccccaacctcttctccattaacttaccatcttccaatatttacacagatatcatgcaaaaatccaagatttctggcatagaatttgctattttggacaactacttacaatttcaagaatttaactctactcaaaccaggtggtggaatccaagttctggtggaaattctttattcaccttattattaaagttagcatcctccaaaaatgcttctaacgtgataactacaagaatatccaacttgctcgatgagcttacgagaacaaacgttatcttcaacatatctttaatttctccagtgatggctttagtgaatagtcttcaagggctttcccttcaagtttctgaaattgacaacatggaacaagtctggaagtggtttgacgaaactatatctcgtgtcgtaaaaacaccatacaagtacgtcgatatggcaaaagagtataactacatttctcccttcataatgtgcctttctgagcaatggaaatacgttgacaagagtggaaacccagagtttttaattaaatggcttatactttttcttagaaacatgattttcattggtgaagaccatataggcatagataaacttgttaaaaatgtctttcctgaggtctctgatcatgatgttaatatatacttgaaacttgactcttttgaagaaaacataaagaaaactaatagctctaattctttaatttcttctatgaagagctcttcttttttccagtatattagtgcgcttccatctaaaaatttaatgaatatttctagattaccagtgaacaaattagatgcggcaggaatcctttttagagttcagttattggtagaagacgattctgttgtatatgacaattggttcgaagcaactgcctgtgagttaactggcaagattgctagctacatggtaacagacacagaattcccaattatcaaagttttggaaaggtatataaatttcgctttaccaaaattggccattgaaaaaagaaatgctttactcatgaaaaaatctaggttcatgtgcaatttaatcggtgcagtatgctttgaaacaggccatcaattagtggaattcagagaaataattcaaaaagtcgtgtttagtggtgaaaatgtcgaagagtatgccaactataatgagttgtatcagaaagaagatgtaaatgctttcttaacaagtgttagtgagtatttaagtactagtgctttaacttctttactcatgtgtagcaccaaattagagtccacaagaaacattctccaaaaattattcaacgaaggaaaaactataaaaatatcccttgtaaagaatatattaaacaaagctgcaaatgaagatcctgcttccattaaggaagtaaacatctctttggctaaattttttgaagaaaacaaagtttgtgttgatgcttcttctgatcctatgggtaagttatccctttctgaaactacttctttgataaatagttttgtgtctagtgatttgaattatttggtattgaaagctttttacagatgggaacatttttctttcccatctttcataccaagtatctggaggatcaaggattctcctttattaagtattgtaacaacggctgctttgttcaagcacatgcaggataaagattttagcgcatttgcgcatgaaaccatttccaagtatggtaatgaaattgcgaaaagtacttacactacctccaaaagtgagatttttgacgaaatattaaatatgattaccacttatattgatttctatgacgaaacgaaaagaaatgaaattttgaaatgtgttttatctcagagcgaccataaatatcatgctgctacagtaagatacatagctgcacacaataattttacttatccaggggtagaaacatggttacataaaactcttctttaccttacaaagtacctttctgaaagaaaagttatctccaattctttttttgagttattaagagcgatggctgagctcttaaaacttgaagaggtaccaaataagttgaatgtcaaaatcattaattctcaattagaggctattttgggcagtgagtggatcaaacaaattaaggttcttgaatacgttattgtattaattttttgtgtgagcaaaaagtctattcaatctcaaagaatggttcaacttttattaagcaatgacagttactcttctataatgattaaagacaatgatgaagattcttcttatagaaagttcttaagcacaatgatattattctctttattcagcatcgacccggtcgtaaattctacgccaatagttcaagagaaattattgactttttactccggtactatttccagtaacgacaagttgatattgaaaattttggaaactatcgaatctcacaccgctacttcttggacaaacatgattttttcttgggaatttatcaaagacgaagaggaagaaatcttggaagccattggagacacgaggttgattaccaaagaaagggaggggttgatattaacattacaaaaaaacatgatcaaaaagtccattgacagatacgtattggaaaggcctcaagtccctgaattatataccgattctaatacaaacaattatgatgctactacaaggtgtgacttggtcaaaaagtactacgatgataccgaaagatctggtgttgatatgtacgatccattatttttattattattaataatccataacaaagagttggtaaaaatggtcaaagatgacgagggcaatgtaacatacagatatgaatttgaaaatttccttgattgcaaaatatttcagtttattatttgctctttaagcgattgtcataccgttgccaatataagttacgaacatttatccaatttagcttcttctttggagaagaaaactgcccagatgaatcttgaaaagcaaataactagcaaggataatgaaagaaaagaatctgatagcgatttaatcaaatataatagcatttaccaagtgttgattaaaaggattttataccagagacaacaaaatcaagatcctatcaatccgttaatttggttttctatctctagaattgttgatttattgggaagtccaactgcgcccttacatgagaaggcataccgctgggtattatccaattctaccatacgtagttgggacatccctatggtatctgatgtgatgatgtcctacaataagagacaacaagatgacaataagaaagaaattgatatggaaatatactatggagaattgagttgggttttaacaaccatttgtaagggaattaaaacggatgaagattacaagatgttagagaagaaaggtgtatttgaatggttgttaaacttgatcaatatgccatacttgaaagaaagattacgcgaattgatctattttattttttacaaagtccaaagggtagcagatgatggtggtttgaatttaattagcagaaacggtattgtgtcctttttcgaggttttgaacaataacatcaaatctagattaccacaggacgatatattaaacaacattggtactttaagaaacgaaaacagaggtacattaaatactactttgaggttagcccaagaacaaaacggaattgaaaaattattattaggctacaacgagcttgtcaaatctcaaaaaaggttgatattatggacagaaggtgatagcgacaatgttgtcaagaggttacgtaaatga

SEQ ID NO: 6835 - DNA, 516 bp, Saccharomyces cerevisiae
atgtcacaatcattacgtccgtatctaacggctgttcgttattccctggaagctgcgttgactttgagcaatttctcttcgcaggaagtggagaggcacaacagaccggaagttgaagtccctaacactagcgccgaattgttgctccaaccgatgcatatatctcgtaatgaaaatgaacaagtattgattgagcccagtgtaaactcggtgcgtatgagtttaatggtgaaacaggcagatgaaattgagcagattttagttcacaagtttactagatttttggaacagcgtgctgaagcattctacattctgagacgtgtaccaatacctggctacagtatttcttttctaataactaataagcatactgaatcaatgaaaactgggaaattggttgattttattattgaattcatggaggacgtggataaggaaatcagtgaaattaaactgtttttgaatgccagagcaagatttgttgcggaagcatatcttgatgaatttgtctattag

SEQ ID NO: 6836 - DNA, 516 bp, Artificial Sequence
  Description of Artificial Sequence: Synthetic polynucleotide
atgtctcaatctttacgtccgtatttgacggctgttcgttattccttagaagctgcgttgactttgagcaatttctcttctcaggaagtggagaggcacaacagaccggaagttgaagtccctaacactagcgccgaattgttgctccaaccgatgcatatatctcgtaatgaaaatgaacaagtattgattgagcccagtgtaaactctgtgcgtatgagtttaatggtgaaacaggcagatgaaattgagcagattttagttcacaagtttactagatttttggaacagcgtgctgaagcattctacattttaagacgtgtaccaatacctggctacagtatttcttttttaataactaataagcatactgaaagtatgaaaactgggaaattggttgattttattattgaattcatggaggacgtggataaggaaatcagtgaaattaaattatttttgaatgccagagcaagatttgttgcggaagcatatcttgatgaatttgtctattga

SEQ ID NO: 6837 - DNA, 1752 bp, Saccharomyces cerevisiae
atgtctatttggaaggaagctaaagatgcaagtggaaggatatattattacaatactttgacaaagaaatctacgtgggagaagcccaaggaactaatttctcaggaggagctacttcttcgagaaaatggctggaaggcggccaagacggcagacggcaaagtatactattataatccaacaacaagagaaaccagctggactattccggccttcgagaagaaagtagaacccatcgcagaacaaaaacatgatacagtatcccatgcacaggttaatggaaatagaatagcccttacggctggagaaaaacaagagccgggacgaactataaacgaggaggaaagccaatatgctaataactctaaactgcttaatgtcaggagaaggactaaagaagaagcagagaaggaatttattaccatgctgaaggaaaatcaagtagactctacttggtcattcagtagaattatttcagaactggggaccagagatccaaggtattggatggtcgatgatgaccccttatggaagaaagaaatgtttgagaaatatctttccaatagatcagccgatcaacttcttaaggaacacaatgaaacaagcaaattcaaagaagcctttcagaaaatgttgcaaaacaattctcatataaaatattacacccgttggcctaccgcaaagagactaattgccgacgaaccaatatacaaacactccgtggtcaatgaaaagacaaagagacagacctttcaagattatatagataccctcatcgacactcagaaagaatcaaaaaaaaaattgaaaacacaggccctaaaagaactaagagagtatttaaacggtattataacaacatcatcctctgaaactttcataacctggcagcagcttttaaatcactatgtttttgataagagtaagagatatatggcgaaccggcacttcaaagtcttaacccacgaagatgttttaaacgagtatctgaaaatagtaaatacgattgaaaacgatcttcaaaacaaactaaatgagctccgactgcgcaattataccagagaccgtattgctagagataactttaaaagcttattaagagaagtgccaatcaaaatcaaagcaaatactagatggtcagatatttatcctcatataaagtctgatccgcgctttttacatatgcttggaaggaatggctcgtcctgccttgatttatttttagattttgttgatgaacaaaggatgtacatctttgcacaaagatcaatagcccaacagacgttgatagatcaaaattttgaatggaatgatgccgatagcgacgagatcaccaagcaaaacatagaaaaagttctggaaaatgaccggaaatttgacaaggtggataaagaagacatcagtttgattgttgatggtttgataaagcaaagaaacgaaaagatacaacagaaactccaaaatgagcgtaggatattggagcaaaagaagcactatttttggttacttttgcaaaggacatatacaaaaaccggtaagcccaagcctagtacgtgggatttagcttccaaagagcttggcgaatctcttgaatacaaggcactaggcgatgaagataacataagaagacaaattttcgaggattttaagcctgaaagctctgcaccgactgccgaaagcgctactgcaaacttaacgttgaccgcgtcaaaaaagaggcatttaactccggctgtggaattggactattga

SEQ ID NO: 6838 - DNA, 1752 bp, Artificial Sequence
  Description of Artificial Sequence: Synthetic polynucleotide
atgtctatttggaaggaagctaaagatgcaagtggaaggatatattattacaatactttgacaaagaaatctacgtgggagaagcccaaggaattgatttctcaggaggagttgcttcttagagaaaatggctggaaggcggccaagacggcagacggcaaagtatactattataatccaacaacaagagaaaccagctggactattccggccttcgagaagaaagtagaacccatcgcagaacaaaaacatgatacagtatcccatgcacaggttaatggaaatagaatagcccttacggctggagaaaaacaagagccgggaagaactataaacgaggaggaaagccaatatgctaataactctaaattacttaatgtcaggagaaggactaaagaagaagcagagaaggaatttattaccatgttgaaggaaaatcaagtagactctacttggagtttcagtagaattatttctgaattggggaccagagatccaaggtattggatggtcgatgatgaccccttatggaagaaagaaatgtttgagaaatatctttccaatagatctgccgatcaacttcttaaggaacacaatgaaacaagcaaattcaaagaagcctttcagaaaatgttgcaaaacaattctcatataaaatattacacccgttggcctaccgcaaagagattgattgccgacgaaccaatatacaaacactccgtggtcaatgaaaagacaaagagacagacctttcaagattatatagataccctcatcgacactcagaaagaaagtaaaaaaaaattgaaaacacaggccttgaaagaattgagagagtatttaaacggtattataacaacatcttcctctgaaactttcataacctggcagcagcttttaaatcactatgtttttgataagagtaagagatatatggcgaacagacacttcaaagtcttaacccacgaagatgttttaaacgagtatttgaaaatagtaaatacgattgaaaacgatcttcaaaacaaattgaatgagctcagattacgcaattataccagagaccgtattgctagagataactttaaaagcttattaagagaagtgccaatcaaaatcaaagcaaatactagatggtctgatatttatcctcatataaagtctgatccgcgctttttacatatgcttggaaggaatggcagctcctgccttgatttatttttagattttgttgatgaacaaaggatgtacatctttgcacaaagaagtatagcccaacagacgttgatagatcaaaattttgaatggaatgatgccgatagcgacgagatcaccaagcaaaacatagaaaaagttttggaaaatgacagaaaatttgacaaggtggataaagaagacatcagtttgattgttgatggtttgataaagcaaagaaacgaaaagatacaacagaaactccaaaatgagcgtaggatattggagcaaaagaagcactatttttggttacttttgcaaaggacatatacaaaaaccggtaagcccaagcctagtacgtgggatttagcttccaaagagcttggcgaatctcttgaatacaaggcattgggcgatgaagataacataagaagacaaattttcgaggattttaagcctgaaagctctgcaccgactgccgaaagcgctactgcaaacttaacgttgaccgcgtccaaaaagaggcatttaactccggctgtggaattggactattga

SEQ ID NO: 6839 - DNA, 1062 bp, Saccharomyces cerevisiae
atgtcgacagcacagaaagctaagatattgcaactcatcgattcctgctgccaaaatgcaaaaagcacacaactgaaatctttatcatttgttattggagcagtaaatggcacgacgaaagaagctaaaagaacctacattcaagaacagtgtgaatttttggagaagttacgacaacaaaagataagagagggaagaattaacatattgtctatggatgctggtgtttctaactttgctttctctaagatgcaattgctcaataatgatccgctccctaaagtactagactggcaaaagataaatctagaggagaaattttttcaaaacctcaaaaagttaagcttgaatcctgctgaaacttctgagcttgtatttaaccttacggagtatttatttgaatctatgccgataccagatatgtttacaattgaaaggcaacgtaccagaactatgtcttcgaggcatattttagacccaattttaaaagtgaatattctcgaacagattcttttctctaacttggaaaataaaatgaagtatacgaataaaataccgaatacgtccaagttgaggtatatggtatgttcgtccgatccacatcggatgacttcatattggtgcattccaagagaagagacaccgaccagttcaaaaaagttaaaatctaacaaacatagcaaagattctcgaataaagctagtgaaaaaaatactttcaacctcaatactagaaggtaattcaactagttctacaaaactggtcgagttcataggagtttggaataataggataagaaatgcccttaccaaaaaaaaaagtttcaagctatgtgatatactagagatccaagataattcgggggtgagaaaagatgacgatttggcagattcattcctccattgtttgtcttggatggagtggttaaaaaattatgaaagtattactgaactcttgaattcaaaaacactggttaaaacacagttcggacaggtgtttgaattttgtgaaaataaggtacaaaagctgaaatttttgcagaacacttacaacaatgactaa

SEQ ID NO: 6840 - DNA, 1062 bp, Artificial Sequence
  Description of Artificial Sequence: Synthetic polynucleotide
atgtctacagcacagaaagctaagatattgcaactcatcgattcctgctgccaaaatgcaaaaagcacacaattgaaatctttatcttttgttattggagcagtaaatggcacgacgaaagaagctaaaagaacctacattcaagaacagtgtgaatttttggagaagttaagacaacaaaagataagagagggaagaattaacatattgtctatggatgctggtgtttctaactttgctttctctaagatgcaattgctcaataatgatccgctccctaaagtattggactggcaaaagataaatttggaggagaaattttttcaaaacctcaaaaagttaagcttgaatcctgctgaaacttctgagcttgtatttaaccttacggagtatttatttgaatctatgccgataccagatatgtttacaattgaaaggcaacgtaccagaactatgtcttccaggcatattttagacccaattttaaaagtgaatattctcgaacagattcttttctctaacttggaaaataaaatgaagtatacgaataaaataccgaatacgtccaagttgaggtatatggtatgttcttccgatccacatagaatgacttcttattggtgcattccaagagaagagacaccgaccagttctaaaaagttaaaatctaacaaacatagcaaagattctagaataaagttagtgaaaaaaatactttctaccagtatattggaaggtaattctactagttctacaaaattggtcgagttcataggagtttggaataataggataagaaatgcccttaccaaaaaaaaaagtttcaagttatgtgatatattggagatccaagataatagtggggtgagaaaagatgacgatttggcagattctttcctccattgtttgtcttggatggagtggttaaaaaattatgaaagtattactgaactcttgaattctaaaacattagttaaaacacagttcggacaggtgtttgaattttgtgaaaataaggtacaaaagttgaaatttttgcagaacacttacaacaatgactga

SEQ ID NO: 6841 - DNA, 4452 bp, Saccharomyces cerevisiae
atgtctgaaaataattcgcacaaccttgatgaacatgagtcccatagcgaaaacagtgattatatgatggatacgcaggtagaagatgactatgatgaggatggccatgtacagggtgagtactcttattatcctgatgaagatgaagatgaacatatgctttctagcgtcggaagttttgaggcagatgatggtgaagatgacgataacgattaccatcatgaagatgattctggacttttatatggatatcatagaactcagaatggcagtgacgaagacagaaatgaagaagaagatggacttgaacgttctcacgataataatgaatttggcagcaaccccctacatttacctgacattttggaaacattcgcacaaagactagaacaaagaagacaaacaagtgaaggacttgggcaacacccggttggaagaacactacccgagattttatcgatgattggaggaaggatggagaggagcgcagagagttcggcaaggaatgagcggatttctaaattgatagagaatactgggaatgcctccgaggatccttatattgcaatggagagtttaaaagaactttctgaaaacatattaatgatgaatcaaatggttgtcgatagaattataccgatggaaaccttaataggtaatatagctgccatactctctgataaaattttacgggaagaattagaattacaaatgcaagcttgtagatgcatgtataatctttttgaggtctgccctgaatctatttcaatagctgttgatgaacacgttataccaattttacaaggaaaattggtagagatcagttacattgacctcgcagaacaagttttagaaacggtggaatatatttctagagtacatgggagagacattttaaaaacgggccaattatcaatctacgtccaattcttcgattttttaactatacatgcgcagaggaaggctatcgcaattgtttcgaacgcctgtagcagtatccgaacggatgactttaagaccattgttgaagtacttccaacgctgaagccaattttctcgaatgcgacagaccaaccaatattaaccaggcttgtaaatgccatgtacggtatttgcggggcgttgcatggggttgacaaatttgagactttgttttcgttggatttaatcgaaagaatagttcagctagtttctattcaggatacccccttggagaataaactgaaatgtttggatattttaaccgtattagcgatgagtagtgatgtactttcaagagaactgagagagaaaactgacattgtcgacatggcaacacgatcattccagcattatagtaaaagtcctaacgcagggttacatgaaacactgatttatgtcccaaacagtttattgattagcatttctagatttatagttgtattgtttcctcccgaggatgaaagaatactgtcagcggataaatataccggaaatagcgaccgtggcgtaatttctaaccaggaaaagtttgattccctagttcaatgtctaattccaattctcgttgaaatttatacaaatgctgctgactttgacgtaagaagatacgtacttattgctttactgagggttgtatcatgcataaataattccacagcaaaggcaatcaatgatcaacttattaagttaatcggatctatcctggcccaaaaagaaacagcgtctaacgctaatggtacttactcatcagaagctggtacactgttggttggtggtctctcgttgcttgacttaatttgtaaaaagttttccgaactgttctttccttccatcaaaagagagggcatttttgatttggttaaggatttgtctgtggatttcaataacattgatttaaaggaagacgggaatgaaaatatttcactttctgacgaagaaggggatttgcatagcagtattgaggaatgtgatgagggtgatgaagaatatgattacgaatttactgatatggaaattcctgattcagtaaaaccaaagaaaatttcaatacacattttcagaactctatctctagcttatattaaaaacaagggtgtgaacctagttaatagagtactttctcagatgaacgttgagcaagaagcaataacagaggagctccatcaaatcgaaggcgttgtttctattttagaaaatccttccactccggacaaaactgaagaggattggaagggaatttggtctgttttaaaaaaatgtattttccatgaagatttcgacgtgtcaggtttcgaatttacttctacagggctagcttcctccataactaaaagaattacatcctcaacggtatcccatttcattcttgctaaatcatttttagaggtatttgaggattgtattgacagatttttagaaatcctacaatctgctctcacaaggctggagaatttctctatagttgattgcggtttacacgatggtggtggtgtatcttcactggctaaagagataaaaattaagttggtttatgatggcgatgcaagcaaagataatattggtactgatttatcatctactatcgtttcggtccattgcatagcttcttttacctcacttaatgagtttttgagacacagaatggtaagaatgcgttttttgaattcattaatcccaaaccttacatcttccagtaccgaagctgatagggaagaagaagaaaattgcttggatcatatgagaaaaaagaactttgactttttttatgataatgaaaaagttgacatggagtctacagtatttggtgtgatatttaatacattcgtcaggcgaaatcgtgacttaaaaactttatgggatgatacacatacaatcaaattttgcaaaagtttagaaggtaacaatagagagagtgaggcagccgaggaagctaatgaggggaaaaagttaagagatttttataaaaaaagagaattcgcacaggttgatactggatcttcagcggatattctgacattgctggattttctacatagctgcggtgttaaaagcgacagttttatcaactcaaaactaagcgctaagctcgctagacaactagatgaaccattggtagtagcaagtggagctttgccggattggtcactatttttgaccaggagattcccatttttgtttccgtttgataccaggatgcttttcctacaatgtacttcatttggttacggaagattgattcaactttggaagaataagagtaaaggctcgaaagatttaaggaatgacgaagctttacaacaacttgggagaattactaggcgtaagctgcggatttcaagaaaaacaatattcgctaccggtctcaagattttatccaagtacggaagtagccctgacgtactggaaattgaatatcaagaagaagcaggaacaggtttaggaccgactttggaattttactccgtagtttccaagtattttgcaagaaagtcgttaaatatgtggcgttgtaactcttatagttacagaagcgaaatggatgttgatactactgacgattatattaccactttattgttcccagagcccctcaacccgttttccaataatgaaaaagttattgaactttttggatatttggggacatttgttgccagatcgttgcttgataatagaattcttgactttagatttagcaaagtcttttttgagttattgcacagaatgtctacgcccaatgtgacgacagtgccgagcgacgttgaaacctgtctgttaatgatcgaattggtagatccgttactcgcaaaatcccttaaatacatagtagcgaataaggatgacaatatgaccctagaatcgttgtccttgacatttaccgttcctggaaatgatgacattgagttgattccggggggttgtaataaatccttgaactcttctaatgttgaagaatatatccatggcgttatcgaccaaatattaggtaagggcattgaaaaacagttaaaagcatttattgaaggtttttcaaaggtgttttcctatgagaggatgctaatactttttccggatgaattagtggatattttcggacgagttgaggaagactggtctatggcaactttatacacaaacttgaacgctgaacatggctatacaatggattcttcaatcattcatgattttatatcaataatatccgcgtttggtaagcatgaaagaagattatttttgcaatttttaacgggatctcccaagcttccaattgggggatttaaaagtttgaacccaaagtttacagttgtgttaaagcatgctgaagatggcctaacagcagacgaatatctaccaagtgtaatgacatgtgctaattatttgaaattgccgaagtatactagcaaagatattatgcggtctcgtctttgtcaagccattgaagagggtgcaggagcttttctactttcctaa

SEQ ID NO: 6842 - DNA, 4452 bp, Artificial Sequence
  Description of Artificial Sequence: Synthetic polynucleotide
atgtctgaaaataattctcacaaccttgatgaacatgagtcccatagcgaaaacagtgattatatgatggatacgcaggtagaagatgactatgatgaggatggccatgtacagggtgagtactcttattatcctgatgaagatgaagatgaacatatgctttctagcgtcggaagttttgaggcagatgatggtgaagatgacgataacgattaccatcatgaagatgattctggacttttatatggatatcatagaactcagaatggcagtgacgaagacagaaatgaagaagaagatggacttgaacgttctcacgataataatgaatttggcagcaacccccttcatttacctgacattttggaaacattcgcacaaagattagaacaaagaagacaaacaagtgaaggacttgggcaacacccggttggaagaacattacccgagattttatctatgattggaggaaggatggagaggagcgcagagagttctgcaaggaatgagagaatttctaaattgatagagaatactgggaatgcctccgaggatccttatattgcaatggagagtttaaaagaactttctgaaaacatattaatgatgaatcaaatggttgtcgatagaattataccgatggaaaccttaataggtaatatagctgccatactctctgataaaattttaagagaagaattagaattacaaatgcaagcttgtagatgcatgtataatctttttgaggtctgccctgaatctatttctatagctgttgatgaacacgttataccaattttacaaggaaaattggtagagatcagttacattgacctcgcagaacaagttttagaaacggtggaatatatttctagagtacatgggagagacattttaaaaacgggccaattatctatctacgtccaattcttcgattttttaactatacatgcgcagaggaaggctatcgcaattgtttctaacgcctgtagcagtatcaggacggatgactttaagaccattgttgaagtacttccaacgttgaagccaattttcagtaatgcgacagaccaaccaatattaaccaggcttgtaaatgccatgtacggtatttgcggggcgttgcatggggttgacaaatttgagactttgttttctttggatttaatcgaaagaatagttcagttggtttctattcaggatacccccttggagaataaattgaaatgtttggatattttaaccgtattagcgatgagtagtgatgtactttctagagaattgagagagaaaactgacattgtcgacatggcaacaagatctttccagcattatagtaaaagtcctaacgcagggttacatgaaacattaatttatgtcccaaacagtttattgattagcatttctagatttatagttgtattgtttcctcccgaggatgaaagaatattatctgcggataaatataccggaaatagcgaccgtggcgtaatttctaaccaggaaaagtttgattccttggttcaatgtttaattccaattctcgttgaaatttatacaaatgctgctgactttgacgtaagaagatacgtacttattgctttattgagggttgtaagttgcataaataattccacagcaaaggcaatcaatgatcaacttattaagttaatcggatctatcttggcccaaaaagaaacagcgtctaacgctaatggtacttactcttctgaagctggtacattattggttggtggtctctctttgcttgacttaatttgtaaaaagttttccgaattattctttccttccatcaaaagagagggcatttttgatttggttaaggatttgtctgtggatttcaataacattgatttaaaggaagacgggaatgaaaatatttctctttctgacgaagaaggggatttgcatagcagtattgaggaatgtgatgagggtgatgaagaatatgattacgaatttactgatatggaaattcctgattctgtaaaaccaaagaaaatttctatacacattttcagaactttatctttggcttatattaaaaacaagggtgtgaacttggttaatagagtactttctcagatgaacgttgagcaagaagcaataacagaggagctccatcaaatcgaaggcgttgtttctattttagaaaatccttccactccggacaaaactgaagaggattggaagggaatttggtctgttttaaaaaaatgtattttccatgaagatttcgacgtgagtggtttcgaatttacttctacagggttggcttcctccataactaaaagaattacatcctctacggtatcccatttcattcttgctaaaagttttttagaggtatttgaggattgtattgacagatttttagaaatcttgcaatctgctctcacaaggttagagaatttctctatagttgattgcggtttacacgatggtggtggtgtatcttctttggctaaagagataaaaattaagttggtttatgatggcgatgcaagcaaagataatattggtactgatttatcttctactatcgtttctgtccattgcatagcttcttttacctctcttaatgagtttttgagacacagaatggtaagaatgcgttttttgaattctttaatcccaaaccttacatcttccagtaccgaagctgatagggaagaagaagaaaattgcttggatcatatgagaaaaaagaactttgactttttttatgataatgaaaaagttgacatggagtctacagtatttggtgtgatatttaatacattcgtcaggagaaatcgtgacttaaaaactttatgggatgatacacatacaatcaaattttgcaaaagtttagaaggtaacaatagagagagtgaggcagccgaggaagctaatgaggggaaaaagttaagagatttttataaaaaaagagaattcgcacaggttgatactggatcttctgcggatattttaacattgttggattttttacatagctgcggtgttaaaagcgacagttttatcaactccaaattaagcgctaagctcgctagacaattggatgaaccattggtagtagcaagtggagctttgccggattggtctttatttttgaccaggagattcccatttttgtttccgtttgataccaggatgcttttcttacaatgtacttcttttggttacggaagattgattcaactttggaagaataagagtaaaggctctaaagatttaaggaatgacgaagctttacaacaacttgggagaattactaggcgtaagttgagaatttctagaaaaacaatattcgctaccggtctcaagattttatccaagtacggaagtagccctgacgtattggaaattgaatatcaagaagaagcaggaacaggtttaggaccgactttggaattttactccgtagtttccaagtattttgcaagaaagtctttaaatatgtggcgttgtaactcttatagttacagaagcgaaatggatgttgatactactgacgattatattaccactttattgttcccagagcccctcaacccgttttccaataatgaaaaagttattgaactttttggatatttggggacatttgttgccagaagtttgcttgataatagaattcttgactttagatttagcaaagtcttttttgagttattgcacagaatgtctacgcccaatgtgacgacagtgccgagcgacgttgaaacctgtcttttaatgatcgaattggtagatccgttactcgcaaaatcccttaaatacatagtagcgaataaggatgacaatatgaccttagaatctttgtccttgacatttaccgttcctggaaatgatgacattgagttgattccggggggttgtaataaatccttgaactcttctaatgttgaagaatatatccatggcgttatcgaccaaatattaggtaagggcattgaaaaacagttaaaagcatttattgaaggtttttccaaggtgttttcctatgagaggatgttgatactttttccggatgaattagtggatattttcggaagagttgaggaagactggtctatggcaactttatacacaaacttgaacgctgaacatggctatacaatggattcttctatcattcatgattttatatccataatatccgcgtttggtaagcatgaaagaagattatttttgcaatttttaacgggatctcccaagcttccaattgggggatttaaaagtttgaacccaaagtttacagttgtgttaaagcatgctgaagatggcttaacagcagacgaatatttaccaagtgtaatgacatgtgctaattatttgaaattgccgaagtatactagcaaagatattatgagatctcgtctttgtcaagccattgaagagggtgcaggagcttttttactttcctga

SEQ ID NO: 6843 - DNA, 711 bp, Saccharomyces cerevisiae
atgccaagatcaaaacgttccaagctagtcactttagcacaaaccgataaaaagggcagagaaaataaagaaagaattttcgatgaagtgagggaagccttagatacttatagatacgtctgggtcctacatcttgacgacgtaagaactccagttttacaagaaatcagaacatcttgggcaggctctaagttaattatgggtaagaggaaagttttacaaaaagcattgggagaaaagagggaagaagaatacaaagaaaatctgtatcaattgagtaagctttgtagcggtgtcactggtttattgttcactgatgaggatgtcaacactgtcaaggaatactttaagtcatacgttcgttcagactattcaagaccgaacacgaaagcaccactaacatttacaattcctgagggcattgtctactcacgtggtggtcaaattccagctgaggaagatgttccaatgattcattctttagagccaactatgagaaacaaatttgaaattccaactaaaatcaaagctggtaagatcaccattgacagtccatatttagtttgcactgaaggagaaaaattagatgttcgtcaagctttaatactgaaacaattcggtatcgctgcttctgaattcaaagtcaaggtgtcggcctactatgacaacgatagctccactgttgaaagcactaacatcaacatggaataa

SEQ ID NO: 6844 - DNA, 711 bp, Artificial Sequence
  Description of Artificial Sequence: Synthetic polynucleotide
atgccaagaagtaaacgttccaagttggtcactttagcacaaaccgataaaaagggcagagaaaataaagaaagaattttcgatgaagtgagggaagccttagatacttatagatacgtctgggtcttgcatcttgacgacgtaagaactccagttttacaagaaatcagaacatcttgggcaggctctaagttaattatgggtaagaggaaagttttacaaaaagcattgggagaaaagagggaagaagaatacaaagaaaatttatatcaattgagtaagctttgtagcggtgtcactggtttattgttcactgatgaggatgtcaacactgtcaaggaatactttaagtcctacgttcgttccgactattctagaccgaacacgaaagcaccattaacatttacaattcctgagggcattgtctactctcgtggtggtcaaattccagctgaggaagatgttccaatgattcattctttagagccaactatgagaaacaaatttgaaattccaactaaaatcaaagctggtaagatcaccattgacagtccatatttagtttgcactgaaggagaaaaattagatgttcgtcaagctttaatattgaaacaattcggtatcgctgcttctgaattcaaagtcaaggtgtctgcctactatgacaacgatagctccactgttgaaagcactaacatcaacatggaatga

SEQ ID NO: 6845 - DNA, 1257 bp, Saccharomyces cerevisiae
atgtcgacaataaagccaagcccttcaaacaacaatttgaaagtgaggtcaagaccaagacgcaagtcttccataggtaagatcgacctcggggacactgtacctagtttaggtactatgttcgagacaaaagaatctaaaacggctgctaaaaggcgtatgcagagattatctgaagccaccaaaaatgatagcgacctggtcaagaaaatctggttttcattccgagagataagttaccgtcatgcctggatagctcccttgatgattttaatcgcggtatatagtgcctatttcacttctggtaacactacaaagacaaatgtgttacatagatttgtcgctgtgtcataccaaataggtgataccaacgcatatggtaaaggtattaacgatttgtgctttgtattttactatatgatttttttcacattcttacgtgaattcctaatggatgttgtcattagaccgttcgctattaggttacacgtcacttctaagcacagaataaaaagaatcatggaacaaatgtacgctattttctacaccggtgtttccggtcctttcgggatatattgtatgtaccattcggatttatggtttttcaacacaaaggcaatgtacagaacatatccagatttcactaatcccttcttattcaaggtattctatttgggtcaagctgcattttgggctcaacaagcctgcattcttgtattgcaactagaaaagccaagaaaagatcataacgagttgactttccatcatattgttactttactattgatttggtcttcctacgtatttcatttcactaaaatgggactgccaatctatatcacaatggatgtttctgattttcttttgtcattctccaaaactctaaattatttggactctggattggcttttttttcttttgctatctttgttgttgcgtggatttatttgcgtcattacataaatttaaagatcctatggtccgttttaacgcaatttcgcacggaaggtaactatgtcttgaattttgccactcagcaatataaatgttggatttccttaccaattgtctttgtattgataggcgctttgcaattagtgaatctttattggctgttccttatttttagagttctttacaggattctatggagaggtattctcaaggatgacagaagtgatagtgaatcagacgaagaaagtgatgaaagttccactactccaactgacagtactccaacgaaaaaggatatttga

SEQ ID NO: 6846 - DNA, 1257 bp, Artificial Sequence
  Description of Artificial Sequence: Synthetic polynucleotide
atgtctacaataaagccaagcccttccaacaacaatttgaaagtgaggagcagaccaagacgcaagtcttccataggtaagatcgacctcggggacactgtacctagtttaggtactatgttcgagacaaaagaatctaaaacggctgctaaaaggcgtatgcagagattatctgaagccaccaaaaatgatagcgacttggtcaagaaaatctggttttctttcagagagataagttaccgtcatgcctggatagctcccttgatgattttaatcgcggtatatagtgcctatttcacttctggtaacactacaaagacaaatgtgttacatagatttgtcgctgtgtcttaccaaataggtgataccaacgcatatggtaaaggtattaacgatttgtgctttgtattttactatatgatttttttcacattcttacgtgaattcttaatggatgttgtcattagaccgttcgctattaggttacacgtcacttctaagcacagaataaaaagaatcatggaacaaatgtacgctattttctacaccggtgtttccggtcctttcgggatatattgtatgtaccattctgatttatggtttttcaacacaaaggcaatgtacagaacatatccagatttcactaatcccttcttattcaaggtattctatttgggtcaagctgcattttgggctcaacaagcctgcattcttgtattgcaattggaaaagccaagaaaagatcataacgagttgactttccatcatattgttactttattattgatttggtcttcctacgtatttcatttcactaaaatgggattaccaatctatatcacaatggatgtttctgattttcttttgagtttctccaaaactttgaattatttggactctggattggcttttttttcttttgctatctttgttgttgcgtggatttatttgcgtcattacataaatttaaagatcttatggtccgttttaacgcaatttcgcacggaaggtaactatgtcttgaattttgccactcagcaatataaatgttggatttccttaccaattgtctttgtattgataggcgctttgcaattagtgaatctttattggcttttccttatttttagagttctttacaggattttatggagaggtattctcaaggatgacagaagtgatagtgaaagtgacgaagaaagtgatgaaagttccactactccaactgacagtactccaacgaaaaaggatatttga

SEQ ID NO: 6847 - DNA, 807 bp, Saccharomyces cerevisiae
atgtctagtagtaaattcgaagaggtcatcaacaagatcatcaatgacagccctccaggagaattaagggaagtatacgacgatctaatcaagatcacaagtgaaaactccaaaaatactattttggatgctattgagaattacaacgtgcagaattgcatccctatagaagtcaacgggaactctgtaattatttccaaatacaacaaggaaggagcaaagttttttgatcccgtaaattccgtaatattttcagttaaccatttagagcgcaagggccttgacattgaaccatatgagttcacgcatgcaaagatagagaaagggcaattgaaagaactgcacgataaattgcacgaatatcttcttcagagctttccaggtgatgtcagttttgctgtttacccagtccctgaggaaataagtaaaatttctattattattgttagcaccaaatataatccaaacaatttctggaacggccattggagatcaagctacatctacgatttggagaccagggagttatccggtcaaatctctacgcaagtccactattacgaagacggtaacgttagtttccaatctgggaaggatatcaatcaatctaacgttgatgacgttgtttgcacaataagggatattgagacgaatttcgaaaatgatctagatctttcatttttcgacttgaacgaaaaacagtttaaggccttaagaagaagattaccagtcacgagatccaaaattaactggggtagtgcgattggcagttatagattgggtaagaatgcggcagaaggcaaatga

SEQ ID NO: 6848 - DNA, 807 bp, Artificial Sequence
  Description of Artificial Sequence: Synthetic polynucleotide
atgtctagtagtaaattcgaagaggtcatcaacaagatcatcaatgacagccctccaggagaattaagggaagtatacgacgatttgatcaagatcacaagtgaaaactccaaaaatactattttggatgctattgagaattacaacgtgcagaattgcatccctatagaagtcaacgggaactctgtaattatttccaaatacaacaaggaaggagcaaagttttttgatcccgtaaattccgtaatattttctgttaaccatttagagcgcaagggccttgacattgaaccatatgagttcacgcatgcaaagatagagaaagggcaattgaaagaattgcacgataaattgcacgaatatcttcttcagagctttccaggtgatgtcagttttgctgtttacccagtccctgaggaaataagtaaaatttctattattattgttagcaccaaatataatccaaacaatttctggaacggccattggagaagcagctacatctacgatttggagaccagggagttatccggtcaaatctctacgcaagtccactattacgaagacggtaacgttagtttccaatctgggaaggatatcaatcaatctaacgttgatgacgttgtttgcacaataagggatattgagacgaatttcgaaaatgatttggatctttcttttttcgacttgaacgaaaaacagtttaaggccttaagaagaagattaccagtcacgagatccaaaattaactggggtagtgcgattggcagttatagattgggtaagaatgcggcagaaggcaaatga

SEQ ID NO: 6849 - DNA, 294 bp, Saccharomyces cerevisiae
atgtcaaattctaggtattctcagaccgaatcaaacaatgataggaaactagaggggttagccaataaattagctacattcagaaacataaaccaagagattggagaccgagcggtctctgacagttctgtcataaaccaaatgacagattcattgggatcgatgtttaccgatatcaaaaattcgtcctcaaggttaacccgatcattaaaggctggtaatagcatatggagaatggtgggtttggcgttattaatattcttcattctatataccctgtttaagttattttag

SEQ ID NO: 6850 - DNA, 294 bp, Artificial Sequence
  Description of Artificial Sequence: Synthetic polynucleotide
atgagtaattctaggtattctcagaccgaatctaacaatgataggaaattagaggggttagccaataaattagctacattcagaaacataaaccaagagattggagacagggcggtctctgacagttctgtcataaaccaaatgacagattctttgggatccatgtttaccgatatcaaaaattcttccagcaggttaaccagatctttaaaggctggtaatagcatatggagaatggtgggtttggcgttattaatattcttcattctttataccttatttaagttattttga

SEQ ID NO: 6851 - DNA, 417 bp, Saccharomyces cerevisiae
atgtccaccgattctattgtcaaggcttctaactggagattagtcgaagttggccgtgtggttttgatcaagaagggtcaatccgcaggtaaattggccgctatcgtcgaaattattgaccaaaagaaggttttgattgacggtccaaaagctggtgttccacgtcaagccatcaacttgggtcaagttgtcttaactccattgacctttgctctaccaagaggtgctagaactgctaccgtttctaagaagtgggctgctgctgctgtctgcgaaaagtgggctgcttcatcttgggctaagaagattgctcaacgtgaaagacgtgctgctttgactgactttgaaagattccaagttatggttttaagaaagcaaaagagatacactgtcaagaaggctttggctaaggcttaa

SEQ ID NO: 6852 - DNA, 417 bp, Artificial Sequence
  Description of Artificial Sequence: Synthetic polynucleotide
atgtccaccgattctattgtcaaggcttctaactggagattagtcgaagttggccgtgtggttttgatcaagaagggtcaatccgcaggtaaattggccgctatcgtcgaaattattgaccaaaagaaggttttgattgacggtccaaaagctggtgttccacgtcaagccatcaacttgggtcaagttgtcttaactccattgacctttgctttgccaagaggtgctagaactgctaccgtttctaagaagtgggctgctgctgctgtctgcgaaaagtgggctgcttcttcttgggctaagaagattgctcaacgtgaaagacgtgctgctttgactgactttgaaagattccaagttatggttttaagaaagcaaaagagatacactgtcaagaaggctttggctaaggcttga

SEQ ID NO: 6853 - DNA, 1785 bp, Saccharomyces cerevisiae
atgtctgtccgtacttcttcaagatctaataagggtcagaataaatatattgagtatttgttacaggaggagactgaagcaccaaagaaaaaaagaactaaaaagaaagttgattcagccatagagaagaataagaagtctgattcttctcaggagccaaggaaagatactgaaaatgtaagaacagacgaagtagacgaagcggatgagggctatgttagatgtctgtgtggggcgaacaatgaaaactacgatgctgcagaatattcgcatggcgacatggtacagtgcgatggctgtgacacttggcagcatattaaatgtatgactgatggtaaagacaccatagatgggctaatgagtgaagattctaagtactactgtgaattgtgcgacccatcattgtatgcacatttggaaacgtcaaaggaggcagaggtttcagaggatgaagattaccatgatgatgtttacaagcccgtaaatgaccatgatgacaatgatgcagatgtctttcttgatgaggaaagccctaggaaacgaaaaaggagccccgatagtgccaaaggaattcatatcaaatccaaacaggtgaagaaatccaatgggtcaaaaaaaaggaataaaagcattgatgccgccaagtctgatactgccgaaaacgaaatgcctactaggaaagattttgaaagcgaaaaagaacacaaactgaggtataatgcagaaaaaatgttctctaccttatttagcaaattcatcgttcccgaaacaattgaggcaaaactttatgagcttcctgatgggaaagacgttatatcgatatcgcaagagtttgcgcacaatctggaagaagaactttacaaagcttgccttaacgtcgagtttggtactttggacaagatatacacagagaaagtgaggtcgttatactctaatttaaaggataaaaaaaatttggaactgaaggcacacgttgtcgagggcaaattgcctttaaataaactggtgaacatgaacgcatctgaactcgcaaatcctgacttacaagaatttaaagagaaaagggataagattatcttagaaaattttatcgtggaggtacctgacaaacccatgtacgttaagacccacaagggtgatgagctgatcgaagatatcgctgaacctcaagaggatattttgtactcaaaagacagcataagattacacaacattgacagtatcgacagcgataagagtaaaatagaacagactcatgccatttcgaaagaacccagcccaagtacaataatcaacgaagaatctttaaactgcgcatttttgtatcccggcttaggacttgagtttacaggttacctaaactacattggggcttcacaaaagttaagacgggatattttcaaggaagccattggtgacggaaaactgtatgtagaagggcgcttacctacaaccactgctgcaccatatcttaaggaaatttcttgctctagagctatattagtataccaattatttccttcgaatgatagtgaaagtaagacaacttttgccgacgttgtagactccctggaaaacaaaggtcgcattgcaggtataaagccaaaaactagatacgagaaggatttttatatcgttccatcgaagggcggtgaaattcctgaaattttgaaagatattttaggcagtcacaatgatgaaagatctgagagattttcgcgaatgaaatcagatgaaagaacattattcgcatttgttgtcgtgaaacaggaatttatccattaa

SEQ ID NO: 6854 - DNA, 1785 bp, Artificial Sequence
  Description of Artificial Sequence: Synthetic polynucleotide
atgtctgtccgtacttcttctagatctaataagggtcagaataaatatattgagtatttgttacaggaggagactgaagcaccaaagaaaaaaagaactaaaaagaaagttgattctgccatagagaagaataagaagtctgattcttctcaggagccaaggaaagatactgaaaatgtaagaacagacgaagtagacgaagcggatgagggctatgttagatgtttatgtggggcgaacaatgaaaactacgatgctgcagaatattctcatggcgacatggtacagtgcgatggctgtgacacttggcagcatattaaatgtatgactgatggtaaagacaccatagatgggttgatgagtgaagattctaagtactactgtgaattgtgcgacccatctttgtatgcacatttggaaacgtccaaggaggcagaggtttctgaggatgaagattaccatgatgatgtttacaagcccgtaaatgaccatgatgacaatgatgcagatgtctttcttgatgaggaaagccctaggaaaagaaaaaggagccccgatagtgccaaaggaattcatatcaaatccaaacaggtgaagaaatccaatgggtctaaaaaaaggaataaaagcattgatgccgccaagtctgatactgccgaaaacgaaatgcctactaggaaagattttgaaagcgaaaaagaacacaaattgaggtataatgcagaaaaaatgttctctaccttatttagcaaattcatcgttcccgaaacaattgaggcaaaactttatgagcttcctgatgggaaagacgttatatccatatctcaagagtttgcgcacaatttggaagaagaactttacaaagcttgccttaacgtcgagtttggtactttggacaagatatacacagagaaagtgaggtctttatactctaatttaaaggataaaaaaaatttggaattgaaggcacacgttgtcgagggcaaattgcctttaaataaattagtgaacatgaacgcatctgaactcgcaaatcctgacttacaagaatttaaagagaaaagggataagattatcttagaaaattttatcgtggaggtacctgacaaacccatgtacgttaagacccacaagggtgatgagttgatcgaagatatcgctgaacctcaagaggatattttgtactctaaagacagcataagattacacaacattgacagtatcgacagcgataagagtaaaatagaacagactcatgccatttccaaagaacccagcccaagtacaataatcaacgaagaatctttaaactgcgcatttttgtatcccggcttaggacttgagtttacaggttacttgaactacattggggcttctcaaaagttaagaagagatattttcaaggaagccattggtgacggaaaactttatgtagaagggcgcttacctacaaccactgctgcaccatatcttaaggaaatttcttgctctagagctatattagtataccaattatttccttccaatgatagtgaaagtaagacaacttttgccgacgttgtagactccttagaaaacaaaggtcgcattgcaggtataaagccaaaaactagatacgagaaggatttttatatcgttccatctaagggcggtgaaattcctgaaattttgaaagatattttaggcagtcacaatgatgaaagatctgagagattttctagaatgaaatctgatgaaagaacattattcgcatttgttgtcgtgaaacaggaatttatccattga

SEQ ID NO: 6855 - DNA, 1206 bp, Saccharomyces cerevisiae
atggcaaaccctttttcgagatggtttctatcagagagacctccaaactgccatgtagccgatttagaaacaagtttagatccccatcaaacgttgttgaaggtgcaaaaatacaaacccgctttaagcgactgggtgcattacatcttcttgggatccatcatgctgtttgtgttcattactaatcccgcaccttggatcttcaagatccttttttattgtttcttgggcactttattcatcattccagctacgtcacagtttttcttcaatgccttgcccatcctaacatgggtggcgctgtatttcacttcatcgtactttccagatgaccgcaggcctcctattactgtcaaagtgttaccagcggtggaaacaattttatacggcgacaatttaagtgatattcttgcaacatcgacgaattcctttttggacattttagcatggttaccgtacggactatttcattttggggccccatttgtcgttgctgccatcttattcgtatttggtccaccaactgttttgcaaggttatgcttttgcatttggttatatgaacctgtttggtgttatcatgcaaaatgtctttccagccgctcccccatggtataaaattctctatggattgcaatcagccaactatgatatgcatggctcgcctggtggattagctagaattgataagctactcggtattaatatgtatactacagctttttcaaattcctccgtcattttcggtgcttttccttcactgcattccgggtgtgctactatggaagccctgtttttctgttattgttttccaaaattgaagcccttgtttattgcttatgtttgctggttatggtggtcaactatgtatctgacacaccattattttgtagaccttatggcaggttctgtgctgtcatacgttattttccagtacacaaagtacacacatttaccaattgtagatacatctcttttttgcagatggtcatacacttcaattgagaaatacgatatatcaaagagtgatccattggctgcagattcaaacgatatcgaaagtgtccctttgtccaacttggaacttgactttgatcttaatatgactgatgaacccagtgtaagcccttcgttatttgatggatctacttctgtttctcgttcgtccgccacgtctataacgtcactaggtgtaaagagggcttaa

SEQ ID NO: 6856 - DNA, 1206 bp, Artificial Sequence
  Description of Artificial Sequence: Synthetic polynucleotide
atggcaaaccctttttccagatggtttttatctgagagacctccaaactgccatgtagccgatttagaaacaagtttagatccccatcaaacgttgttgaaggtgcaaaaatacaaacccgctttaagcgactgggtgcattacatcttcttgggatccatcatgttatttgtgttcattactaatcccgcaccttggatcttcaagatccttttttattgtttcttgggcactttattcatcattccagctacgagccagtttttcttcaatgccttgcccatcttaacatgggtggcgttatatttcacttcttcctactttccagatgaccgcaggcctcctattactgtcaaagtgttaccagcggtggaaacaattttatacggcgacaatttaagtgatattcttgcaacaagtacgaattcctttttggacattttagcatggttaccgtacggattatttcattttggggccccatttgtcgttgctgccatcttattcgtatttggtccaccaactgttttgcaaggttatgcttttgcatttggttatatgaacttgtttggtgttatcatgcaaaatgtctttccagccgctcccccatggtataaaattctctatggattgcaatctgccaactatgatatgcatggctctcctggtggattagctagaattgataagttactcggtattaatatgtatactacagctttttctaattcctccgtcattttcggtgcttttccttctttgcattccgggtgtgctactatggaagccttatttttctgttattgttttccaaaattgaagcccttgtttattgcttatgtttgctggttatggtggtctactatgtatttgacacaccattattttgtagaccttatggcaggttctgtgctttcttacgttattttccagtacacaaagtacacacatttaccaattgtagatacatctcttttttgcagatggagttacacttctattgagaaatacgatatatccaagagtgatccattggctgcagattccaacgatatcgaaagtgtccctttgtccaacttggaacttgactttgatcttaatatgactgatgaacccagtgtaagcccttctttatttgatggatctacttctgtttctcgttcttccgccacgtctataacgtctttgggtgtaaagagggcttga

SEQ ID NO: 6857 - DNA, 396 bp, Saccharomyces cerevisiae
atgctttatgagctgatcggacttgttcgcataaccaactccaatgcgccaaagttggaagcaaaagaattgtcttccacaatcgggaaactgattattcaaaacagaggtgtggtgagggacattgtacccatgggcataaggtatcttcctaaaataatgaagaaagaccaggaaaaacattttcgagcatatcactttttaatgctgtttgattcatcagctgcggtacagtctgaaattctaagaactttaaagaaagatccccgtgtcataagatcatccatcgttaaagttgatttagataagcagctggatagagcctcatcgttacaccgttctttggggaagaagtctattttagaattagtgaatgaagattatcaatccatttag

SEQ ID NO: 6858 - DNA, 396 bp, Artificial Sequence
  Description of Artificial Sequence: Synthetic polynucleotide
atgctttatgagttgatcggacttgttcgcataaccaactccaatgcgccaaagttggaagcaaaagaattgtcttccacaatcgggaaattgattattcaaaacagaggtgtggtgagggacattgtacccatgggcataaggtatcttcctaaaataatgaagaaagaccaggaaaaacattttagagcatatcactttttaatgttatttgattcttctgctgcggtacagtctgaaattttaagaactttaaagaaagatccccgtgtcataagaagttccatcgttaaagttgatttagataagcagttagatagagcctcttctttacaccgttctttggggaagaagtctattttagaattagtgaatgaagattatcaatccatttga

SEQ ID NO: 6859 - DNA, 699 bp, Saccharomyces cerevisiae
atgagtttgtttgagtgggtatttggaaagaatgtcactccgcaagagaggttaaaaaaaaatcaaagggctttagaaaggactcagagggagcttgaaagagaaaagagaaaattggaactacaagataaaaaacttgtatcagaaattaaaaaatcggcaaagaatgggcaagttgcagctgcgaaagttcaagcaaaagatttagtaagaacccggaattacatccaaaaatttgacaacatgaaagctcaacttcaggcgatatcattgagaatacaggccgttcgaagtagtgaccaaatgacacgttctatgagcgaggccactggtcttttggctggaatgaacagaacaatgaatctacctcagttgcaaaggatatcgatggagtttgaaaagcagagtgatttgatgggtcaacgacaggaattcatggacgaagctattgataacgtcatgggtgatgaggtggatgaagacgaagaagctgacgaaattgtaaataaagttcttgatgagattggagtggatttgaattcacagttgcaaagcacgcctcaaaatctggtttctaatgcgccgatcgcagaaacagcgatggggattcctgaacctattggcgccggatcagaatttcacggtaatcctgacgatgacttgcaagctcggttgaacactttgaagaagcagacttga

SEQ ID NO: 6860 - DNA, 699 bp, Artificial Sequence
  Description of Artificial Sequence: Synthetic polynucleotide
atgagtttgtttgagtgggtatttggaaagaatgtcactccgcaagagaggttaaaaaaaaatcaaagggctttagaaaggactcagagggagcttgaaagagaaaagagaaaattggaattacaagataaaaaacttgtatctgaaattaaaaaatctgcaaagaatgggcaagttgcagctgcgaaagttcaagcaaaagatttagtaagaaccagaaattacatccaaaaatttgacaacatgaaagctcaacttcaggcgatatctttgagaatacaggccgttagaagtagtgaccaaatgacacgttctatgagcgaggccactggtcttttggctggaatgaacagaacaatgaatttacctcagttgcaaaggatatccatggagtttgaaaagcagagtgatttgatgggtcaaagacaggaattcatggacgaagctattgataacgtcatgggtgatgaggtggatgaagacgaagaagctgacgaaattgtaaataaagttcttgatgagattggagtggatttgaattctcagttgcaaagcacgcctcaaaatttggtttctaatgcgccgatcgcagaaacagcgatggggattcctgaacctattggcgccggatctgaatttcacggtaatcctgacgatgacttgcaagctagattgaacactttgaagaagcagacttga

SEQ ID NO: 6861 - DNA, 609 bp, Saccharomyces cerevisiae
atggctactaatattacttggcatccaaatcttacttacgacgaacgcaaggcattgagaaaacaggacggttgtactatttggttaacaggtctaagtgcgtcaggtaaaagtacaatcgcctgtgcgctagaacagttactgctccaaaaaaacttgtctgcatatagattggatggtgacaacattcgttttggattgaacaaggatttgggtttctcagaaaaggacagaaatgaaaacattcgtagaattagcgaagtttctaagctatttgctgattcatgtgctatttcaatcacctcatttatctctccatacagagttgacagagatagagctcgtgaactacataaggaggctggtttgaagttcattgaaatatttgttgatgttccattagaagtcgctgagcaaagggaccctaagggtttatacaagaaagctagggagggtgtaatcaaggagtttacaggtatttctgccccatatgaagcgccaaaagctccagagctacatttgagaaccgaccagaagacggttgaagaatgtgctaccattatttatgagtacttaatcagtgaaaaaatcatccgtaagcatttgtaa

SEQ ID NO: 6862 - DNA, 609 bp, Artificial Sequence
  Description of Artificial Sequence: Synthetic polynucleotide
atggctactaatattacttggcatccaaatcttacttacgacgaacgcaaggcattgagaaaacaggacggttgtactatttggttaacaggtttgagtgcgtctggtaaaagtacaatcgcctgtgcgttagaacagttacttctccaaaaaaacttgtctgcatatagattggatggtgacaacattcgttttggattgaacaaggatttgggtttctctgaaaaggacagaaatgaaaacattcgtagaattagcgaagtttctaagttatttgctgattcttgtgctatttccatcacctcttttatctctccatacagagttgacagagatagagctcgtgaattacataaggaggctggtttgaagttcattgaaatatttgttgatgttccattagaagtcgctgagcaaagggaccctaagggtttatacaagaaagctagggagggtgtaatcaaggagtttacaggtatttctgccccatatgaagcgccaaaagctccagagttacatttgagaaccgaccagaagacggttgaagaatgtgctaccattatttatgagtacttaatcagtgaaaaaatcatccgtaagcatttgtga

SEQ ID NO: 6863 - DNA, 2115 bp, Saccharomyces cerevisiae
atggatgagcatttaatttctactattaacaagcttcaggacgctttggcgcccttaggaggaggatctcaatctcctattgatttaccacagatcactgttgtcggttcccagtcgtcaggaaagtcgtccgttttggagaacattgttggtagggatttcttgccaagaggtactggtattgtcaccaggagacctttagtgttacaattgattaataggagaccaaaaaagtcagaacatgctaaagtaaaccaaactgctaatgaattgattgacttgaacatcaacgatgatgacaagaaaaaggatgaatcaggaaagcaccagaacgagggacaatctgaagacaataaagaggaatggggtgaatttttgcatttacctggtaagaagttttataattttgacgaaattagaaaggaaatcgtcaaagaaactgacaaagtgacaggtgccaattcaggtatttcttctgtgcccattaacttgagaatttattctccgcatgttcttactttgacgttagtggatttgcctgggttgacgaaggttcccgtaggtgaccaacctcctgatattgaaagacaaattaaggacatgttgttaaagtatatttcgaaaccaaacgctatcatattatctgttaatgccgctaacaccgatttagccaacagcgatggtttgaagctggctagagaggtcgatccagaaggaacgagaactattggtgtcttgacaaaagtcgatttgatggatcaaggtacagatgtcatagatattttggctggaagagtcattcctttgagatatggttatatcccagttatcaatagaggtcaaaaggatattgaacacaaaaaaacaatcagagaagcccttgaaaacgaaagaaaattttttgagaaccatccctcttacagttctaaagctcattactgtggtacaccatatttggctaaaaagttaaactcaatcttattacaccacattaggcaaactctgccagaaatcaaagcgaaaatcgaagccacattgaaaaaatatcaaaacgaacttataaacttgggcccagaaactatggattcagctagttcggttgttttgagcatgattactgatttttccaatgaatatgccggtatcttggacggtgaggcgaaggagctttccagtcaggaactttctggtggtgctagaatttcttacgtattccatgaaactttcaaaaatggtgtagactctttggatccattcgaccagatcaaagattctgatatcagaaccattatgtacaatagttcaggttctgccccatctttgtttgtcggtaccgaagcttttgaagttttagttaaacagcaaattagaagatttgaagaaccatctctacgtttagttactctggtgtttgatgaacttgttcgtatgctaaaacagattatttcacaaccaaagtactcaaggtatcctgctctaagagaagcgatttctaatcagttcattcagttcttaaaggatgctactattcctacgaatgagtttgttgtcgatatcatcaaagctgaacaaacttacatcaatacagcccatcccgaccttttgaagggttctcaagcaatggttatggtggaagaaaaattacatcctcgccaagtcgctgttgacccaaagacgggtaaaccattaccaacccaaccatcgtctagtaaggcgccagttatggaagagaaatcaggattttttggtgggttcttctccactaaaaacaagaagaaattggcagctttggaatccccacctcctgttttaaaagctactggccaaatgacagagagggaaacaatggaaacagaagtaatcaagttgttgattagtagttatttctctattgtcaaaagaaccattgccgatattataccaaaggctttgatgcttaaattgattgtgaaaagtaaaactgatattcagaaagttttactcgaaaaactttacggaaagcaagatattgaagaattaacgaaagaaaacgacataaccattcaaagaagaaaagaatgtaagaagatggtcgagatattgagaaacgctagtcaaatcgtctcctctgtttag

SEQ ID NO: 6864 - DNA, 2115 bp, Artificial Sequence
  Description of Artificial Sequence: Synthetic polynucleotide
atggatgagcatttaatttctactattaacaagcttcaggacgctttggcgcccttaggaggaggatctcaatctcctattgatttaccacagatcactgttgtcggttcccagtcttctggaaagtcttccgttttggagaacattgttggtagggatttcttgccaagaggtactggtattgtcaccaggagacctttagtgttacaattgattaataggagaccaaaaaagtctgaacatgctaaagtaaaccaaactgctaatgaattgattgacttgaacatcaacgatgatgacaagaaaaaggatgaatctggaaagcaccagaacgagggacaatctgaagacaataaagaggaatggggtgaatttttgcatttacctggtaagaagttttataattttgacgaaattagaaaggaaatcgtcaaagaaactgacaaagtgacaggtgccaattctggtatttcttctgtgcccattaacttgagaatttattctccgcatgttcttactttgacgttagtggatttgcctgggttgacgaaggttcccgtaggtgaccaacctcctgatattgaaagacaaattaaggacatgttgttaaagtatatttccaaaccaaacgctatcatattatctgttaatgccgctaacaccgatttagccaacagcgatggtttgaagttggctagagaggtcgatccagaaggaacgagaactattggtgtcttgacaaaagtcgatttgatggatcaaggtacagatgtcatagatattttggctggaagagtcattcctttgagatatggttatatcccagttatcaatagaggtcaaaaggatattgaacacaaaaaaacaatcagagaagcccttgaaaacgaaagaaaattttttgagaaccatccctcttacagttctaaagctcattactgtggtacaccatatttggctaaaaagttaaactctatcttattacaccacattaggcaaactttaccagaaatcaaagcgaaaatcgaagccacattgaaaaaatatcaaaacgaacttataaacttgggcccagaaactatggattctgctagttctgttgttttgagcatgattactgatttttccaatgaatatgccggtatcttggacggtgaggcgaaggagctttccagtcaggaactttctggtggtgctagaatttcttacgtattccatgaaactttcaaaaatggtgtagactctttggatccattcgaccagatcaaagattctgatatcagaaccattatgtacaatagttctggttctgccccatctttgtttgtcggtaccgaagcttttgaagttttagttaaacagcaaattagaagatttgaagaaccatctttacgtttagttactttggtgtttgatgaacttgttcgtatgttgaaacagattatttctcaaccaaagtactctaggtatcctgctttgagagaagcgatttctaatcagttcattcagttcttaaaggatgctactattcctacgaatgagtttgttgtcgatatcatcaaagctgaacaaacttacatcaatacagcccatcccgaccttttgaagggttctcaagcaatggttatggtggaagaaaaattacatcctcgccaagtcgctgttgacccaaagacgggtaaaccattaccaacccaaccatcttctagtaaggcgccagttatggaagagaaaagtggattttttggtgggttcttctccactaaaaacaagaagaaattggcagctttggaatccccacctcctgttttaaaagctactggccaaatgacagagagggaaacaatggaaacagaagtaatcaagttgttgattagtagttatttctctattgtcaaaagaaccattgccgatattataccaaaggctttgatgcttaaattgattgtgaaaagtaaaactgatattcagaaagttttactcgaaaaactttacggaaagcaagatattgaagaattaacgaaagaaaacgacataaccattcaaagaagaaaagaatgtaagaagatggtcgagatattgagaaacgctagtcaaatcgtctcctctgtttga

SEQ ID NO: 6865 - DNA, 1707 bp, Saccharomyces cerevisiae
atgagctctcaaaaggtttttggtattactggacctgtttccaccgtgggcgccacagcagcagaaaataaattaaatgatagtttaatccaagaactgaaaaaggaaggatcgttcgaaacagagcaagaaactgccaatagggtacaagtgttgaaaatattgcaggaattggcacaaagatttgtttatgaagtatcgaagaagaaaaatatgtcagacgggatggcaagggatgctggtgggaagatttttacgtatgggtcctatagactaggagtccatgggcctggtagtgatatcgatactttggtagttgttccaaaacatgtaactcgggaagatttttttacggtatttgattcactactgagagagaggaaggaactggatgaaattgcacctgtacctgatgcgtttgtcccgattatcaagataaagttcagtggtatttctatcgatttaatctgtgcacgtctagaccaacctcaagtgcctttatccttgactttatcagataaaaatctactgcgaaatctagacgagaaggacttgagagctttgaatggtaccagagtaacagatgagatattagaactggtaccaaagccgaatgttttcagaatcgctttaagagctattaagctatgggcccaaagaagggctgtttatgctaatatttttggttttcctggtggtgtggcttgggccatgctagtggctagaatttgtcaactataccctaacgcctgtagcgcagttatattgaacagatttttcatcattttgtcggaatggaattggccacaacctgttatcttgaaaccaattgaggatggcccgttacaagttcgtgtatggaatccaaagatatatgcccaagacaggtctcatagaatgcccgtcattacaccagcttatccatcaatgtgtgctacccataacatcacggaatctactaaaaaagtcattttacaggaattcgtaagaggcgttcaaattacgaatgatattttttccaataagaagtcctgggccaatttattcgaaaaaaacgattttttctttcgatacaagttctatttagaaattactgcatatacaaggggcagtgacgagcagcatttaaaatggagtggtcttgttgaaagtaaggtaaggcttctagttatgaaactggaggtgttagctggaataaaaattgcacatcctttcaccaaaccctttgaaagtagttattgttgtccaaccgaggatgactatgaaatgattcaagacaaatacggtagtcataaaactgagacagcactgaacgcccttaaactggtaacagatgaaaataaagaggaagaaagtattaaagatgcaccaaaggcatatttaagcaccatgtacataggccttgactttaatattgaaaacaaaaaggaaaaagttgacattcacattccctgcactgaatttgtgaatttatgtcgaagtttcaatgaggattatggtgaccacaaagtattcaatctagccctccgcttcgtaaagggttacgatttgccagatgaagttttcgatgaaaatgaaaagagaccatcaaagaagagtaaaaggaagaatttagatgctagacatgaaaccgtgaagagatctaaatcagatgctgcttcaggtgacaacatcaatggcacaaccgcagctgttgacgtaaactaa

SEQ ID NO: 6866 - DNA, 1707 bp, Artificial Sequence
  Description of Artificial Sequence: Synthetic polynucleotide
atgagctctcaaaaggtttttggtattactggacctgtttccaccgtgggcgccacagcagcagaaaataaattaaatgatagtttaatccaagaattgaaaaaggaaggaagtttcgaaacagagcaagaaactgccaatagggtacaagtgttgaaaatattgcaggaattggcacaaagatttgtttatgaagtatccaagaagaaaaatatgtctgacgggatggcaagggatgctggtgggaagatttttacgtatgggtcctatagattaggagtccatgggcctggtagtgatatcgatactttggtagttgttccaaaacatgtaactagagaagatttttttacggtatttgattctttattaagagagaggaaggaattagatgaaattgcacctgtacctgatgcgtttgtcccgattatcaagataaagttcagtggtatttctatcgatttaatctgtgcacgtttagaccaacctcaagtgcctttatccttgactttaagtgataaaaatttacttagaaatttggacgagaaggacttgagagctttgaatggtaccagagtaacagatgagatattagaattggtaccaaagccgaatgttttcagaatcgctttaagagctattaagttatgggcccaaagaagggctgtttatgctaatatttttggttttcctggtggtgtggcttgggccatgttggtggctagaatttgtcaattgtaccctaacgcctgtagcgcagttatattgaacagatttttcatcattttgagtgaatggaattggccacaacctgttatcttgaaaccaattgaggatggcccgttacaagttcgtgtatggaatccaaagatatatgcccaagacaggtctcatagaatgcccgtcattacaccagcttatccaagcatgtgtgctacccataacatcacggaatctactaaaaaagtcattttacaggaattcgtaagaggcgttcaaattacgaatgatattttttccaataagaagtcctgggccaatttattcgaaaaaaacgattttttctttagatacaagttctatttagaaattactgcatatacaaggggcagtgacgagcagcatttaaaatggagtggtcttgttgaaagtaaggtaaggcttttggttatgaaattagaggtgttagctggaataaaaattgcacatcctttcaccaaaccctttgaaagtagttattgttgtccaaccgaggatgactatgaaatgattcaagacaaatacggtagtcataaaactgagacagcattgaacgcccttaaattagtaacagatgaaaataaagaggaagaaagtattaaagatgcaccaaaggcatatttaagcaccatgtacataggccttgactttaatattgaaaacaaaaaggaaaaagttgacattcacattccctgcactgaatttgtgaatttatgtaggagtttcaatgaggattatggtgaccacaaagtattcaatttggccctccgcttcgtaaagggttacgatttgccagatgaagttttcgatgaaaatgaaaagagaccatctaagaagagtaaaaggaagaatttagatgctagacatgaaaccgtgaagagatctaaatctgatgctgcttctggtgacaacatcaatggcacaaccgcagctgttgacgtaaactga

SEQ ID NO: 6867 - DNA, 1347 bp, Saccharomyces cerevisiae
atgggctccaaaaaactgaccgtaggatctgattcgcaccggttgagcaaatccagtttttcaagtaataagtcgtcacattcagcaacaaaagatcagccaattgataccgacgatattgatgaagacgatgaatctggtcataatattatcttgaacatcatctcacaattgagaccaggctgcgatttgaccaggatcaccttgcctacttttattttagaaaaaaaatcgatgcttgaacgtgtcacaaatcagttacaattccctgagtttttgttacaggcgcattcagaaaaggaccccttgaaaagatttttgtacgtaatgaaatggtatttggcaggctggcatattgctccaaaggctgtaaaaaaaccattgaacccagtccttggtgaatattttacagcttattgggatctaccaaacaagcagcaggcatattatatatctgaacagacaagtcaccatcctccagaatgtgcatatttttacatgattcctgaatcttcgattagagtggatggggtcgttattcctaaatctagatttttaggtaattcaagtgcggccatgatggatggatcaacagtcttgcaatttctggacataaaggatggaaacggaaagcccgaaaagtatgttcttacacaaccaaatgtatatgtaagaggaattctttttggaaaaatgagaatcgaacttggagatcatatgataattaaatctcctaacttccaagctgatatagagttcaagacaaagggatatgtttttggaacttacgatgcaatcgaagggactgtaaaggattatgatggcaatgcgtattacgaaatatctggtaaatggaatgacgttatgtatttaaaggacttaaagcaacctcgttcttcaccaaaagttttccttgatactcataaagagtcaccattgagaccaaaagttcggccattgagcgagcaaggtgaatatgaatccagaaaactgtggaaaaaggttacagatgcgttggccgttcgcaatcatcctgttgcgacagaagaaaaatttcagattgaagatcaccaaagacagttagccaaaaaacgcattgaagatggcgtagaatttcatccaaagttgtttagaagatcaaagcctggcgaagatcttgactattgtatttataaaaatatccctgtcgacgaggaccctgagaagcaaatacgaagcatattgcaaatagcacctattttacctggtcaacaatttaccgacaaatttttcatccccgcatttgagaaaataaaatcacaaaagaagatgattgaaaacgaaaagcagaacccagcaaaacaatag

SEQ ID NO: 6868 - DNA, 1347 bp, Artificial Sequence
  Description of Artificial Sequence: Synthetic polynucleotide
atgggctccaaaaaattgaccgtaggatctgattctcacagattgagcaaatccagtttttctagtaataagagttctcattctgcaacaaaagatcagccaattgataccgacgatattgatgaagacgatgaatctggtcataatattatcttgaacatcatctctcaattgagaccaggctgcgatttgaccaggatcaccttgcctacttttattttagaaaaaaaatctatgcttgaacgtgtcacaaatcagttacaattccctgagtttttgttacaggcgcattctgaaaaggaccccttgaaaagatttttgtacgtaatgaaatggtatttggcaggctggcatattgctccaaaggctgtaaaaaaaccattgaacccagtccttggtgaatattttacagcttattgggatttaccaaacaagcagcaggcatattatatatctgaacagacaagtcaccatcctccagaatgtgcatatttttacatgattcctgaatcttccattagagtggatggggtcgttattcctaaatctagatttttaggtaatagtagtgcggccatgatggatggaagtacagtcttgcaatttttggacataaaggatggaaacggaaagcccgaaaagtatgttcttacacaaccaaatgtatatgtaagaggaattctttttggaaaaatgagaatcgaacttggagatcatatgataattaaatctcctaacttccaagctgatatagagttcaagacaaagggatatgtttttggaacttacgatgcaatcgaagggactgtaaaggattatgatggcaatgcgtattacgaaatatctggtaaatggaatgacgttatgtatttaaaggacttaaagcaacctcgttcttctccaaaagttttccttgatactcataaagagtctccattgagaccaaaagttagaccattgagcgagcaaggtgaatatgaatccagaaaattatggaaaaaggttacagatgcgttggccgttcgcaatcatcctgttgcgacagaagaaaaatttcagattgaagatcaccaaagacagttagccaaaaaacgcattgaagatggcgtagaatttcatccaaagttgtttagaagatccaagcctggcgaagatcttgactattgtatttataaaaatatccctgtcgacgaggaccctgagaagcaaataagaagcatattgcaaatagcacctattttacctggtcaacaatttaccgacaaatttttcatccccgcatttgagaaaataaaatctcaaaagaagatgattgaaaacgaaaagcagaacccagcaaaacaatga

SEQ ID NO: 6869 - DNA, 1134 bp, Saccharomyces cerevisiae
atgcaatcttctcttcccctttgcagagaattttttgaaaaaataactgcatatttagattatcatgatttcaggttaaccattactgccaatcagccttcaattactctcccttactacgtagacgaaaaagcccattccatagaactaattatcttcaaaacaacatttttatctcttttccaagaagcacatacatattttaacaaaactttctctgatcaaagcggcatttctaatgagaatatttattacatgactgttggatttctacttacaacacctgaaaacaaaacggtatataatgtacacgaagatttactcaagagatacttccaggacaacagtgttttagtaataccggatttattggtcaaagaagtaagactgattcaacggcttctttgttcatcaaacaatcgtatcaacaagtcgtcatctctttggatattataccgaaaactattcgttttatctcttgatgctaatacactggttcttccagatattttatttgtatttcattcttctggatcccaacatttctctaattactactgttggaatactgctaggtggttctacgataatttaccttacaataaaagaattgagctcttcaatttgactaagagattttgctttcaaaatgttaaggattgttcctcatggagcgcattagcatatatggtatgccagcaggaggaaaaaaaaaccgataatatacgtgattttcaaagactaacaagctcttttaatgttccgttcaagataaataaagtggatttgaattttcaagtacagcctgcggatgcatttactcaggaattagtaaaatggattgatcgaacgtatgctgcagattggcctccatatctgtgtcttctgcaaattacgaaatttaatatcacccttagaattgaaatggactctgtcttattgacttggagaaatgaaattctgaattttgaagagaacagtggtcatatcaaaatgataaataatactccaatagtacctgagaaattttcaaacgatcttctaacttctgtgaattttgcacattttggctataaaaagcttttcttaaataagtttttggataaaaataagaaagaacaatcagatagttag

SEQ ID NO: 6870 - DNA, 1134 bp, Artificial Sequence
  Description of Artificial Sequence: Synthetic polynucleotide
atgcaatcttctcttcccctttgcagagaattttttgaaaaaataactgcatatttagattatcatgatttcaggttaaccattactgccaatcagccttctattactctcccttactacgtagacgaaaaagcccattccatagaattgattatcttcaaaacaacatttttatctcttttccaagaagcacatacatattttaacaaaactttctctgatcaaagcggcatttctaatgagaatatttattacatgactgttggatttttacttacaacacctgaaaacaaaacggtatataatgtacacgaagatttactcaagagatacttccaggacaacagtgttttagtaataccggatttattggtcaaagaagtaagattgattcaaaggcttctttgttcttccaacaatcgtatcaacaagagttcttctctttggatattatacagaaaattattcgttttatctcttgatgctaatacattagttcttccagatattttatttgtatttcattcttctggatcccaacatttctctaattactactgttggaatactgctaggtggttctacgataatttaccttacaataaaagaattgagctcttcaatttgactaagagattttgctttcaaaatgttaaggattgttcctcttggagcgcattagcatatatggtatgccagcaggaggaaaaaaaaaccgataatatacgtgattttcaaagattgacaagctcttttaatgttccgttcaagataaataaagtggatttgaattttcaagtacagcctgcggatgcatttactcaggaattagtaaaatggattgatagaacgtatgctgcagattggcctccatatttatgtcttttacaaattacgaaatttaatatcacccttagaattgaaatggactctgtcttattgacttggagaaatgaaattttgaattttgaagagaacagtggtcatatcaaaatgataaataatactccaatagtacctgagaaattttccaacgatcttttgacttctgtgaattttgcacattttggctataaaaagcttttcttaaataagtttttggataaaaataagaaagaacaatctgatagttga

SEQ ID NO: 6871 - DNA, 1578 bp, Saccharomyces cerevisiae
atgttggaatgtctaagcgctctgctggttctctttgccggtggtggtgggagcgttctcgcagcggttcaaagcaaaactgtggcagatcctaacttatgtccaggttacaattcacaactgatttcccccttcctctccagttgcaaacgaaatttaagtgaatgcgtgtcccgttattttgatgaacaatatgcattttgtcggtcatgcgttactgtgaataatgaaacaatggaggacttggataactgcaaatgtttacagtgtgccttgagttcccttaataatagctgctttcacgattactgtacctccaaagatgagtatgacaagttgcagatcgttgttgaacaatttcaattgacaaatggagttttagatgacggagagattttgaaacctagaggcaacaaattttctagtagaaaattgtcttatttcgttggtcaaaacaatactctttttaggaaccctttgcagttcgaaaaaaaccaattaatttctgcactattaacctctttaaccaataatcaaaagactatatcatcagttgacatgttcgaagtggttgacgctaataatgaagttcaatatttgcgcgaaagaacgataagtggtaaaactctgtctccagctactggttatgaagaagaaaacgacggtgactgtagtgtgaaagataagaagtgggaaggtaaaatcgaataccatgagaacaagaaagttagttctgaaaactgtagtaaggataccgatgataaaagtggcagtaaaaaagaacgaaatacgaaggccccattatttcacactgccaccgaaattcatatgacaaggtggagttcttggaggccaaagaaaatttttactcgttacttagtgaatgaataccaaagtcctaaaataataaccacagtgaacaggttttacaggaccaagactgatactgaaacagggacgactttaatcacgtcgacaaaagccaaaagaagatggtttccaagaactaaaatcgtaacaagtaccgcaacttcgacgtttttgagtatcacgactactacgacaacaaatgctatcgcaacgaagtcgttagtagcagtacttaatccggatggattgaataaaaaagcgggaataaattttggtctctttagcgctaatggtgagctcgcttcaccagatgaaggaggtacaccaacagtagtaagaagagataagatttctgatccaggcgctgctaatgagcaggccacactgttctctacaaccttttcgcaagtgccgcacttaccagaactagattctggtgaattcatatcggcggcatctcaattagacaaaaggattttcatattcactgccatcacagtatcaattactacattgatgatgttggggttttcttaccggtcgcgggtatcttttagagatcatagtatcgatgactcagatgatgataacgattggtcagatgacgaagttgaatttgacgaagagtatttctattctcttcctgtaagcataccagaaaaggggatcagcttagataaaatggcgcaacaacttggtgtagaatag

SEQ ID NO: 6872 - DNA, 1578 bp, Artificial Sequence
  Description of Artificial Sequence: Synthetic polynucleotide
atgttggaatgtttgagcgctttattggttctctttgccggtggtggtgggagcgttctcgcagcggttcaaagcaaaactgtggcagatcctaacttatgtccaggttacaattctcaattgatttcccccttcctctccagttgcaaaagaaatttaagtgaatgcgtgtcccgttattttgatgaacaatatgcattttgtagatcttgcgttactgtgaataatgaaacaatggaggacttggataactgcaaatgtttacagtgtgccttgagttcccttaataatagctgctttcacgattactgtacctccaaagatgagtatgacaagttgcagatcgttgttgaacaatttcaattgacaaatggagttttagatgacggagagattttgaaacctagaggcaacaaattttctagtagaaaattgtcttatttcgttggtcaaaacaatactctttttaggaaccctttgcagttcgaaaaaaaccaattaatttctgcattattaacctctttaaccaataatcaaaagactatatcttctgttgacatgttcgaagtggttgacgctaataatgaagttcaatatttgcgcgaaagaacgataagtggtaaaactttatctccagctactggttatgaagaagaaaacgacggtgactgtagtgtgaaagataagaagtgggaaggtaaaatcgaataccatgagaacaagaaagttagttctgaaaactgtagtaaggataccgatgataaaagtggcagtaaaaaagaaagaaatacgaaggccccattatttcacactgccaccgaaattcatatgacaaggtggagttcttggaggccaaagaaaatttttactcgttacttagtgaatgaataccaaagtcctaaaataataaccacagtgaacaggttttacaggaccaagactgatactgaaacagggacgactttaatcacgagtacaaaagccaaaagaagatggtttccaagaactaaaatcgtaacaagtaccgcaacttccacgtttttgagtatcacgactactacgacaacaaatgctatcgcaacgaagtctttagtagcagtacttaatccggatggattgaataaaaaagcgggaataaattttggtctctttagcgctaatggtgagctcgcttctccagatgaaggaggtacaccaacagtagtaagaagagataagatttctgatccaggcgctgctaatgagcaggccacattgttctctacaaccttttctcaagtgccgcacttaccagaattagattctggtgaattcatatctgcggcatctcaattagacaaaaggattttcatattcactgccatcacagtatctattactacattgatgatgttggggttttcttacagatctagagtatcttttagagatcatagtatcgatgacagtgatgatgataacgattggtctgatgacgaagttgaatttgacgaagagtatttctattctcttcctgtaagcataccagaaaaggggatcagcttagataaaatggcgcaacaacttggtgtagaatga

SEQ ID NO: 6873 - DNA, 795 bp, Saccharomyces cerevisiae
atgtcgtcactgcttaaattacattgtattagaccattgccgcaaaggtcggtctggctctctggctacaagcagaaagccagatgtattcacagttccgctgcaaacggggactttatgtcatggttcaagaggaagaagcaagaagagcaccaagagcctgtcaaggacaccaaacagttgataaaggatattgaagaaggcactaacgaggcttcctctcaatcctcttccaataacaaaaacagattggagctaataccagaaaattttattggcgaagggtctagacggtgtaagagacagaaggagttgaagcttgcggtctcctctgcgccattcaatcagtggttatccagggataagattacgtctgataatcagttagatgatatgatattgcaggcaacggaaaaaacattgggcaaagtagaccaggacgtccaattctctgatttggtagctaaatttcagttcaccaaatttttgcaatctaaatctggctatctaattcctgattatgaactgaccactttaagcacacccttgcagtttaaaaggtatattaaggaaaaaattttgccatctgccaacgatcctaaactcgcttataaagaagctgagccaaatgctatccacccattttctgataattacgcgtcaccaaacatatatgttgttaacgatgttacttctaaagagcaaaaaagtaaatatgatactattatgaaagaaattcaaaagttagaggatgatgcaacaagaaaagctttggaaacagcaagatccgcttag

SEQ ID NO: 6874 - DNA, 795 bp, Artificial Sequence
  Description of Artificial Sequence: Synthetic polynucleotide
atgtcttctttacttaaattacattgtattagaccattgccgcaaaggtccgtctggctctctggctacaagcagaaagccagatgtattcacagttccgctgcaaacggggactttatgtcttggttcaagaggaagaagcaagaagagcaccaagagcctgtcaaggacaccaaacagttgataaaggatattgaagaaggcactaacgaggcttcctctcaatcctcttccaataacaaaaacagattggagttgataccagaaaattttattggcgaagggtctagaagatgtaagagacagaaggagttgaagcttgcggtctcctctgcgccattcaatcagtggttatccagggataagattacgtctgataatcagttagatgatatgatattgcaggcaacggaaaaaacattgggcaaagtagaccaggacgtccaattctctgatttggtagctaaatttcagttcaccaaatttttgcaatctaaatctggctatttgattcctgattatgaattgaccactttaagcacacccttgcagtttaaaaggtatattaaggaaaaaattttgccatctgccaacgatcctaaactcgcttataaagaagctgagccaaatgctatccacccattttctgataattacgcgtctccaaacatatatgttgttaacgatgttacttctaaagagcaaaaaagtaaatatgatactattatgaaagaaattcaaaagttagaggatgatgcaacaagaaaagctttggaaacagcaagatccgcttga

SEQ ID NO: 6875 - DNA, 555 bp, Saccharomyces cerevisiae
atgggagccgtactcagctgttgtagaaaccattccggcgaagagaatgaagctttgctgagggaacagcaggcaggctatggaagtcaaggaaacgcaaatgacgaatacgatgccgaacaaatgcggttgaaggaacacgaacacgaacagaaactgctggccagggaacaagagttaagagacattgttgcaaacaccaacgataaactaatagacatatcgatgataaacaatagtggcattgtaattcaagggacagacctgcaagaagctcttgataaaagacaacaggaagaaggtggagattcccgggaagacgaaaggagtgcaggtgatgacaacctcagtgggcactcagtgccttcaagcggatccgcacaggcaactactcaccaaactgcaccaaggactaatacgtttactctgcttacatcaccggattcagcgaaaatatcaaaggaacagttaaagaagttgcactctaatatactaaatgaaattttcagccagtcccaggtaaacaaaccaggccccttgacggttcccttttaa

SEQ ID NO: 6876 - DNA, 555 bp, Artificial Sequence
  Description of Artificial Sequence: Synthetic polynucleotide
atgggagccgtactcagctgttgtagaaaccattccggcgaagagaatgaagctttgttgagggaacagcaggcaggctatggaagtcaaggaaacgcaaatgacgaatacgatgccgaacaaatgagattgaaggaacacgaacacgaacagaaattattagccagggaacaagagttaagagacattgttgcaaacaccaacgataaattgatagacatatccatgataaacaatagtggcattgtaattcaagggacagacttgcaagaagctcttgataaaagacaacaggaagaaggtggagattccagagaagacgaaaggagtgcaggtgatgacaacctcagtgggcactctgtgccttccagcggatccgcacaggcaactactcaccaaactgcaccaaggactaatacgtttactttacttacatctccggattctgcgaaaatatccaaggaacagttaaagaagttgcactctaatatattgaatgaaattttcagccagtcccaggtaaacaaaccaggccccttgacggttcccttttga

SEQ ID NO: 6877 - DNA, 1878 bp, Saccharomyces cerevisiae
atggtagttaagaagcgtaagttggcaactgaggccggtggcagtgatgaaaggcctaaatacttgccgggaaaacatcctaaaaaccaagagaaaactccgcatgtggattataacgccccattaaaccctaaatctgaactttttctagatgactggcatatacctaaatttaatcgatttattagtttcactttggatgttcttatcgacaaatacaaagatattttcaaagatttcatcaaactaccaagtaggaagtttcatccacagtattattacaagatccagcagccaatgtctattaatgaaatcaagtcaagagattatgaatacgaagatggtccaagtaattttcttttggatgttgagctactgacaaagaattgtcaagcttacaatgaatatgacagtttgattgtaaaaaactccatgcaagtagtaatgttgattgaatttgaagtattgaaggcaaaaaatttgaaaagaaattacttaattaacagcgaggtcaaagccaaattactgcactatcttaataagctagttgacgccacggaaaagaaaatcaaccaggctctgctgggtgcgtcatctcctaaaaacttagacgacaaagtcaagctaagtgaaccgtttatggaattagtcgataaagatgaacttcctgaatattatgaaatagtgcatagccccatggctttatcgatcgtaaagcagaacctcgaaattggtcagtattccaagatatatgatttcatcattgatatgcttttagtttttcagaatgctcatatattcaatgatccaagcgctttgatttacaaagacgcaacaactttaacaaattattttaactacttaatacaaaaggaattcttcccagagttacaggatttaaatgaacgtggcgaaattaatttagaatttgacaaattcgaattcgaaaactacttagctattggtggtggtggtccagccgcagcaggtgcgttagctatatctgctcttgataatgatattgagccagaatctaaccgtgaagatcttattgatcaagcagattatgatttcaatcatttcgaaggtctcggcaatggttataatcgttctctcctaactgaagattatttactgaacccaaacaacttcaaaaagttaatagccaaaccggaaacagtgcaatccgaagtcaaaaatgaaagatcaacgacatctgatattgagaagacaaactccttagagagcgaacatttaaaaatccccaaatacaatgttataaaatccatgcaaaaagaaatgcaatcactctcagagcaacacaccatggagtataagccctataaattaatacaacaaatttacattttttcttctaaaaatttgtattcgcaggcaactaagcctttactgggttcaaggccatcatgcaatcaaaattgggtagagtatattttcaatggtaatgaattgagtcaaaatgaaaacgctttctccttcatgttacaacccatgcaaacttttttaacattacagtctcatttgacctcatcattaaaggatacagagactttattaaccattaataaagagccagtgaagtctagaacttcaaatgtaaacagtaacctttcccaacctcagcaacaagaaaatgatgttattggaaacgatacgaagcaagatatagaaaatttgacaatcggcggcggcaacaataacgatattgttggtaacgataatgataaacgtaataatataaccgaaatctttgatattcgcttatcagaaggtttaaatcatttgatgtttaggtgtgaggacaaaatatctcatgaaacggaattcatgaatttctggataaatgtcttaccatga

SEQ ID NO: 6878 - DNA, 1878 bp, Artificial Sequence
  Description of Artificial Sequence: Synthetic polynucleotide
atggtagttaagaagcgtaagttggcaactgaggccggtggcagtgatgaaaggcctaaatacttgccgggaaaacatcctaaaaaccaagagaaaactccgcatgtggattataacgccccattaaaccctaaatctgaactttttttggatgactggcatatacctaaatttaatagatttattagtttcactttggatgttcttatcgacaaatacaaagatattttcaaagatttcatcaaattaccaagtaggaagtttcatccacagtattattacaagatccagcagccaatgtctattaatgaaatcaagtctagagattatgaatacgaagatggtccaagtaattttcttttggatgttgagttattaacaaagaattgtcaagcttacaatgaatatgacagtttgattgtaaaaaactccatgcaagtagtaatgttgattgaatttgaagtattgaaggcaaaaaatttgaaaagaaattacttaattaacagcgaggtcaaagccaaattattacactatcttaataagttggttgacgccacggaaaagaaaatcaaccaggctttattgggtgcgtcttctcctaaaaacttagacgacaaagtcaagttgagtgaaccgtttatggaattagtcgataaagatgaacttcctgaatattatgaaatagtgcatagccccatggctttatctatcgtaaagcagaacctcgaaattggtcagtattccaagatatatgatttcatcattgatatgcttttagtttttcagaatgctcatatattcaatgatccaagcgctttgatttacaaagacgcaacaactttaacaaattattttaactacttaatacaaaaggaattcttcccagagttacaggatttaaatgaacgtggcgaaattaatttagaatttgacaaattcgaattcgaaaactacttagctattggtggtggtggtccagccgcagcaggtgcgttagctatatctgctcttgataatgatattgagccagaatctaaccgtgaagatcttattgatcaagcagattatgatttcaatcatttcgaaggtctcggcaatggttataatcgttctctcttaactgaagattatttattaaacccaaacaacttcaaaaagttaatagccaaaccggaaacagtgcaatccgaagtcaaaaatgaaagatctacgacatctgatattgagaagacaaactccttagagagcgaacatttaaaaatccccaaatacaatgttataaaatccatgcaaaaagaaatgcaatctctcagtgagcaacacaccatggagtataagccctataaattaatacaacaaatttacattttttcttctaaaaatttgtattctcaggcaactaagcctttattgggttctaggccaagttgcaatcaaaattgggtagagtatattttcaatggtaatgaattgagtcaaaatgaaaacgctttctccttcatgttacaacccatgcaaacttttttaacattacagtctcatttgacctcttctttaaaggatacagagactttattaaccattaataaagagccagtgaagtctagaacttccaatgtaaacagtaacctttcccaacctcagcaacaagaaaatgatgttattggaaacgatacgaagcaagatatagaaaatttgacaatcggcggcggcaacaataacgatattgttggtaacgataatgataaacgtaataatataaccgaaatctttgatattcgcttatctgaaggtttaaatcatttgatgtttaggtgtgaggacaaaatatctcatgaaacggaattcatgaatttctggataaatgtcttaccatga

SEQ ID NO: 6879 - DNA, 2703 bp, Saccharomyces cerevisiae
atgcctggaaatttatccttcaaagatagagttgttgtaatcacgggcgctggagggggcttaggtaaggtgtatgcactagcttacgcaagcagaggtgcaaaagtggtcgtcaatgatctaggtggcactttgggtggttcaggacataactccaaagctgcagacttagtggtggatgagataaaaaaagccggaggtatagctgtggcaaattacgactctgttaatgaaaatggagagaaaataattgaaacggctataaaagaattcggcagggttgatgtactaattaacaacgctggaatattaagggatgtttcatttgcaaagatgacagaacgtgagtttgcatctgtggtagatgttcatttgacaggtggctataagctatcgcgtgctgcttggccttatatgcgctctcagaaatttggtagaatcattaacaccgcttcccctgccggtctatttggaaattttggtcaagctaattattcagcagctaaaatgggcttagttggtttggcggaaaccctcgcgaaggagggtgccaaatacaacattaatgttaattcaattgcgccattggctagatcacgtatgacagaaaacgtgttaccaccacatatcttgaaacagttaggaccggaaaaaattgttcccttagtactctatttgacacacgaaagtacgaaagtgtcaaactccatttttgaactcgctgctggattctttggacagctcagatgggagaggtcttctggacaaattttcaatccagaccccaagacatatactcctgaagcaattttaaataagtggaaggaaatcacagactatagggacaagccatttaacaaaactcagcatccatatcaactctcggattataatgatttaatcaccaaagcaaaaaaattacctcccaatgaacaaggctcagtgaaaatcaagtcgctttgcaacaaagtcgtagtagttacgggtgcaggaggtggtcttgggaagtctcatgcaatctggtttgcacggtacggtgcgaaggtagttgtaaatgacatcaaggatcctttttcagttgttgaagaaataaataaactatatggtgaaggcacagccattccagattcccatgatgtggtcaccgaagctcctctcattatccaaactgcaataagtaagtttcagagagtagacatcttggtcaataacgctggtattttgcgtgacaaatcttttttaaaaatgaaagatgaggaatggtttgctgtcctgaaagtccaccttttttccacattttcattgtcaaaagcagtatggccaatatttaccaaacaaaagtctggatttattatcaatactacttctacctcaggaatttatggtaattttggacaggccaattatgccgctgcaaaagccgccattttaggattcagtaaaactattgcactggaaggtgccaagagaggaattattgttaatgttatcgctcctcatgcagaaacggctatgacaaagactatattctcggagaaggaattatcaaaccactttgatgcatctcaagtctccccacttgttgttttgttggcatctgaagaactacaaaagtattctggaagaagggttattggccaattattcgaagttggcggtggttggtgtgggcaaaccagatggcaaagaagttccggttatgtttctattaaagagactattgaaccggaagaaattaaagaaaattggaaccacatcactgatttcagtcgcaacactatcaacccgagctccacagaggagtcttctatggcaaccttgcaagccgtgcaaaaagcgcactcttcaaaggagttggatgatggattattcaagtacactaccaaggattgtatcttgtacaatttaggacttggatgcacaagcaaagagcttaagtacacctacgagaatgatccagacttccaagttttgcccacgttcgccgtcattccatttatgcaagctactgccacactagctatggacaatttagtcgataacttcaattatgcaatgttactgcatggagaacaatattttaagctctgcacgccgacaatgccaagtaatggaactctaaagacacttgctaaacctttacaagtacttgacaagaatggtaaagccgctttagttgttggtggcttcgaaacttatgacattaaaactaagaaactcatagcttataacgaaggatcgttcttcatcaggggcgcacatgtacctccagaaaaggaagtgagggatgggaaaagagccaagtttgctgtccaaaattttgaagtgccacatggaaaggtaccagattttgaggcggagatttctacgaataaagatcaagccgcattgtacaggttatctggcgatttcaatcctttacatatcgatcccacgctagccaaagcagttaaatttcctacgccaattctgcatgggctttgtacattaggtattagtgcgaaagcattgtttgaacattatggtccatatgaggagttgaaagtgagatttaccaatgttgttttcccaggtgatactctaaaggttaaagcttggaagcaaggctcggttgtcgtttttcaaacaattgatacgaccagaaacgtcattgtattggataacgccgctgtaaaactatcgcaggcaaaatctaaactataa

SEQ ID NO: 6880 - DNA, 2703 bp, Artificial Sequence
  Description of Artificial Sequence: Synthetic polynucleotide
atgcctggaaatttatccttcaaagatagagttgttgtaatcacgggcgctggagggggcttaggtaaggtgtatgcattggcttacgcaagcagaggtgcaaaagtggtcgtcaatgatttaggtggcactttgggtggttctggacataactccaaagctgcagacttagtggtggatgagataaaaaaagccggaggtatagctgtggcaaattacgactctgttaatgaaaatggagagaaaataattgaaacggctataaaagaattcggcagggttgatgtacttattaacaacgctggaatattaagggatgtttcttttgcaaagatgacagaacgtgagtttgcatctgtggtagatgttcatttgacaggtggctataagctttctcgtgctgcttggccttatatgcgctctcagaaatttggtagaatcattaacaccgcttcccctgccggtttatttggaaattttggtcaagctaattattctgcagctaaaatgggcttagttggtttggcggaaaccctcgcgaaggagggtgccaaatacaacattaatgttaattctattgcgccattggctagatctcgtatgacagaaaacgtgttaccaccacatatcttgaaacagttaggaccggaaaaaattgttcccttagtactctatttgacacacgaaagtacgaaagtgtctaactccatttttgaactcgctgctggattctttggacagctcagatgggagaggtcttctggacaaattttcaatccagaccccaagacatatactcctgaagcaattttaaataagtggaaggaaatcacagactatagggacaagccatttaacaaaactcagcatccatatcaactctctgattataatgatttaatcaccaaagcaaaaaaattacctcccaatgaacaaggctctgtgaaaatcaagtctctttgcaacaaagtcgtagtagttacgggtgcaggaggtggtcttgggaagtctcatgcaatctggtttgcaagatacggtgcgaaggtagttgtaaatgacatcaaggatcctttttctgttgttgaagaaataaataaactttatggtgaaggcacagccattccagattcccatgatgtggtcaccgaagctcctctcattatccaaactgcaataagtaagtttcagagagtagacatcttggtcaataacgctggtattttgcgtgacaaatcttttttaaaaatgaaagatgaggaatggtttgctgtcttgaaagtccaccttttttccacattttctttgagtaaagcagtatggccaatatttaccaaacaaaagtctggatttattatcaatactacttctacctctggaatttatggtaattttggacaggccaattatgccgctgcaaaagccgccattttaggattcagtaaaactattgcattggaaggtgccaagagaggaattattgttaatgttatcgctcctcatgcagaaacggctatgacaaagactatattcagtgagaaggaattatctaaccactttgatgcatctcaagtctccccacttgttgttttgttggcatctgaagaattacaaaagtattctggaagaagggttattggccaattattcgaagttggcggtggttggtgtgggcaaaccagatggcaaagaagttccggttatgtttctattaaagagactattgaaccggaagaaattaaagaaaattggaaccacatcactgatttcagtcgcaacactatcaacccgagctccacagaggagtcttctatggcaaccttgcaagccgtgcaaaaagcgcactcttccaaggagttggatgatggattattcaagtacactaccaaggattgtatcttgtacaatttaggacttggatgcacaagcaaagagcttaagtacacctacgagaatgatccagacttccaagttttgcccacgttcgccgtcattccatttatgcaagctactgccacattggctatggacaatttagtcgataacttcaattatgcaatgttattacatggagaacaatattttaagctctgcacgccgacaatgccaagtaatggaactttgaagacacttgctaaacctttacaagtacttgacaagaatggtaaagccgctttagttgttggtggcttcgaaacttatgacattaaaactaagaaactcatagcttataacgaaggaagtttcttcatcaggggcgcacatgtacctccagaaaaggaagtgagggatgggaaaagagccaagtttgctgtccaaaattttgaagtgccacatggaaaggtaccagattttgaggcggagatttctacgaataaagatcaagccgcattgtacaggttatctggcgatttcaatcctttacatatcgatcccacgttggccaaagcagttaaatttcctacgccaattttgcatgggctttgtacattaggtattagtgcgaaagcattgtttgaacattatggtccatatgaggagttgaaagtgagatttaccaatgttgttttcccaggtgatactttgaaggttaaagcttggaagcaaggctctgttgtcgtttttcaaacaattgatacgaccagaaacgtcattgtattggataacgccgctgtaaaattatctcaggcaaaatctaaattgtga

SEQ ID NO: 6881 - DNA, 2316 bp, Saccharomyces cerevisiae
atgataaaaatgtggaggttacagattgtactggtgccgccaagtgctcaagatattatcacatttctcgaagcacgcttgaatactccacaatcagtgtctcctatggtccagtataatgaagatataattacgcacaacaacagtatcaataactgtagcgacccctctcctacgagcccgtcttcgcaaaattctattcagtcgaatcgtagtagtgatttcattaactacctcccgaattgtaaaaagtttttacattttacggacggtgacaatacccttttacaactatctaatgaaattttaactaaatttgatagactttatccaaatttcaaagaatccattgaaatcgtatctctacaagataggcatggttgtgatttggactctgaatttataataaaagacgtatttgaaaatgatggtgtggttttggtaattttaaaagatgaattagactggagtagaaatcaacatatttcacttttacaattggcaagacagcggagacggcaggacaacaagccatccacaaaatccatcgttactgaaaagagaaaaaagatctctaaggaagacttatcttctatatcaaataaagatacaatgcatctaatagctaaaagctcgctcaagaataacttcattaataaatcaagagtatcaacgccgctaatgaacgaaattctaccgcttgcaagcaagtatgatgcactgaataaagaaaagtgtcccatgccacttacttccacagtagtggcatcaaatgtacacaaagacgtaaaagatcacgctcgtgctaaagagggagttgtaacgcaagggagtgataacaataaagaaaatataccttcatccactcaacaacagaaaaatgatggcgctaaaagggccgaatcaaaggatttagatcttttacgcaattcgtcagaagatgctgattatgaacccgcagatgaaaactcccctcaaatttcgtttgattcgattgataccgacttccaattgagcactacttctcatactaattctgatatgcatatacaatattctaacccctctagtggtgctcatagtcccaggaagagttccttagaaattaaagttcaaaacaaaaaaggtgatgatctgccattgaacgacaaagatataggtgagaattgtagaaggatagaagcattttcagatgaagaggattttaatgaaaccgataatgatcgtgcggattcgtttatcaacaattctaagaaggcatcgatgggatttcgggatatcaattccgacttggatagcgtttcattcaacagtgatattgaaaatgcagtacaaagtactcaaagtaccaaaaatgttgtttctcctcccttttttcctgaaaaagaattgaataatcggttacatcaaagtcaaggtaaggaagccctatttcgacttgttgagaaggagtttcctgataaatcattgggtgctgcgtcatctacttcgcatgcaaaagacgtaaaaatacaagaaactattcggaaactaaataggttcaagccaactggggaaactaaggtccaaaaaaggaatagtattacggaaccatattacggaaaatttggaataatgaagaaagataaacccaaatccataacttcaaaaggggtaagtctggaaacaaagcactttgatgatcccaataccattatttccggtgagaaattcgcaaaatttggtaaaataaaagtgaaacgaaaaactgatgatgttggatcgaaagttatagagtttaaaagaaaaagaaatatggggaatagatccctaaaagatatttttgccaatgctgggaaaccgccaaatgcagcttcgaccataaaagtagtcaaattaatgagagatcctgttgataatagtaaagacaaagtggaggcaacttctaatagtacggctcaggaacaagaacaagtctcacccaagttgccagttatgaattcaactcctggaaaaagaaaaaatggccaagcgataccgtccagtttagaaagaacaccgcagctcaagaaagtcaaggttaccaggtcgcattcttcaccttcttcttcttcttccatgtcacttgaatcttcattggatagctcttcctcagatgattcggatgatgattctgattcgaggaacgtgcaagttaaaaaaattaatttcaaaacaagtcatggaccagctggaaattctaatggaaaaccaatgctggatgtggatgacaatgaaataaatacaaagaagtaccaaacacctaaatatgttgaaagtgatgaagacgaccagtaa

SEQ ID NO: 6882 - DNA, 2316 bp, Artificial Sequence
  Description of Artificial Sequence: Synthetic polynucleotide
atgataaaaatgtggaggttacagattgtattggtgccgccaagtgctcaagatattatcacatttctcgaagcacgcttgaatactccacaatctgtgtctcctatggtccagtataatgaagatataattacgcacaacaacagtatcaataactgtagcgacccctctcctacgagcccgtcttctcaaaattctattcagtctaatcgtagtagtgatttcattaactacctcccgaattgtaaaaagtttttacattttacggacggtgacaatacccttttacaattatctaatgaaattttaactaaatttgatagactttatccaaatttcaaagaatccattgaaatcgtatctttacaagataggcatggttgtgatttggactctgaatttataataaaagacgtatttgaaaatgatggtgtggttttggtaattttaaaagatgaattagactggagtagaaatcaacatatttctcttttacaattggcaagacagagaagaagacaggacaacaagccatccacaaaatccatcgttactgaaaagagaaaaaagatctctaaggaagacttatcttctatatccaataaagatacaatgcatttgatagctaaaagctctctcaagaataacttcattaataaatctagagtatctacgccgttaatgaacgaaattttaccgcttgcaagcaagtatgatgcattgaataaagaaaagtgtcccatgccacttacttccacagtagtggcatctaatgtacacaaagacgtaaaagatcacgctcgtgctaaagagggagttgtaacgcaagggagtgataacaataaagaaaatataccttcttccactcaacaacagaaaaatgatggcgctaaaagggccgaatccaaggatttagatcttttacgcaattcttctgaagatgctgattatgaacccgcagatgaaaactcccctcaaatttcctttgattctattgataccgacttccaattgagcactacttctcatactaattctgatatgcatatacaatattctaacccctctagtggtgctcatagtcccaggaagagttccttagaaattaaagttcaaaacaaaaaaggtgatgatttaccattgaacgacaaagatataggtgagaattgtagaaggatagaagcattttctgatgaagaggattttaatgaaaccgataatgatcgtgcggattcttttatcaacaattctaagaaggcatctatgggatttagagatatcaattccgacttggatagcgtttctttcaacagtgatattgaaaatgcagtacaaagtactcaaagtaccaaaaatgttgtttctcctcccttttttcctgaaaaagaattgaataatagattacatcaaagtcaaggtaaggaagccttatttagacttgttgagaaggagtttcctgataaatctttgggtgctgcgtcttctacttctcatgcaaaagacgtaaaaatacaagaaactattagaaaattgaataggttcaagccaactggggaaactaaggtccaaaaaaggaatagtattacggaaccatattacggaaaatttggaataatgaagaaagataaacccaaatccataacttctaaaggggtaagtttagaaacaaagcactttgatgatcccaataccattatttccggtgagaaattcgcaaaatttggtaaaataaaagtgaaaagaaaaactgatgatgttggatctaaagttatagagtttaaaagaaaaagaaatatggggaatagatccttgaaagatatttttgccaatgctgggaaaccgccaaatgcagctagcaccataaaagtagtcaaattaatgagagatcctgttgataatagtaaagacaaagtggaggcaacttctaatagtacggctcaggaacaagaacaagtctctcccaagttgccagttatgaattctactcctggaaaaagaaaaaatggccaagcgataccgtccagtttagaaagaacaccgcagctcaagaaagtcaaggttaccaggagccattcttctccttcttcttcttcttccatgtctcttgaatcttctttggatagctcttccagtgatgattctgatgatgattctgatagtaggaacgtgcaagttaaaaaaattaatttcaaaacaagtcatggaccagctggaaattctaatggaaaaccaatgcttgatgtggatgacaatgaaataaatacaaagaagtaccaaacacctaaatatgttgaaagtgatgaagacgaccagtga

SEQ ID NO: 6883 - DNA, 1062 bp, Saccharomyces cerevisiae
atgtccaagttagaaaccgtttacttatacgctggtgaagaacaaccacgtgttaaattgacctgtattaaggaaggtctcactttaactcaggttatcaagttcgtgcattctattcaagaattgtacgggattgagttgcaaacttctgagaccataacagaaaatttgaagatagattgtgcacccgcatatttgaagccgaattgtattccccatttctacattctcgaatatgaagaaataagtgacacctttttcatttggaaatctgatggtcgttggcaattaaataagttgtctgccttgttgtacgtggataacgacgctaacgtggttaagaacacttcctggaaggaggttttccagaatgatcaacgatttaaaaattatgataaacgggcctggttacaaaattgtctagaaaaaatgaatagagatctctcaaaactaaacgttgaacaattttggtctcaatatgataaaatatgtcaaagcattgccaaacaaaagaaaaaacaggaacagttcaacatggaggttttcgataacttcaaaaatattgtttctattgctatcataaagaccaaagttttatcgaataagcgacttttgacaacaactttaaaaaattatcataactcgatgaagaaaaagtataacatccaggaacaaaatcttaaggaaaatagtttggcatcgtgctcaaacaatgagccttccgcatctctggaaagcgaatcaagacatttttctccggtaaattcgctgtctccttcatctttgagtaccgatgatgaggctgtctcgacagactacatctataaaggtcctgagtctaaaccaaacgtgaatttcatgcattcaagtgctacaaacgatctgatcaagtcaaattttgaaagctattttaaattgatggccgaagactatgaaacttttgacttgagagcctggtcgagacaaagacctcgaaaatttcagcttgtggaaaaaaaaaaaatcactaaaaaccctcctaatagccatcatccgcataaaaatggcaaaatatcattttaa

SEQ ID NO: 6884 - DNA, 1062 bp, Artificial Sequence
  Description of Artificial Sequence: Synthetic polynucleotide
atgtccaagttagaaaccgtttacttatacgctggtgaagaacaaccacgtgttaaattgacctgtattaaggaaggtctcactttaactcaggttatcaagttcgtgcattctattcaagaattgtacgggattgagttgcaaacttctgagaccataacagaaaatttgaagatagattgtgcacccgcatatttgaagccgaattgtattccccatttctacattctcgaatatgaagaaataagtgacacctttttcatttggaaatctgatggtcgttggcaattaaataagttgtctgccttgttgtacgtggataacgacgctaacgtggttaagaacacttcctggaaggaggttttccagaatgatcaaagatttaaaaattatgataaaagagcctggttacaaaattgtttagaaaaaatgaatagagatctctctaaattgaacgttgaacaattttggtctcaatatgataaaatatgtcaaagcattgccaaacaaaagaaaaaacaggaacagttcaacatggaggttttcgataacttcaaaaatattgtttctattgctatcataaagaccaaagttttatccaataagagacttttgacaacaactttaaaaaattatcataactccatgaagaaaaagtataacatccaggaacaaaatcttaaggaaaatagtttggcatcttgcagcaacaatgagccttccgcatctttggaaagcgaatctagacatttttctccggtaaattctttatctccttcttctttgagtaccgatgatgaggctgtctctacagactacatctataaaggtcctgagtctaaaccaaacgtgaatttcatgcattctagtgctacaaacgatttgatcaagagcaattttgaaagctattttaaattgatggccgaagactatgaaacttttgacttgagagcctggtccagacaaagacctagaaaatttcagcttgtggaaaaaaaaaaaatcactaaaaaccctcctaatagccatcatccgcataaaaatggcaaaatatccttttga

SEQ ID NO: 6885 - DNA, 990 bp, Saccharomyces cerevisiae
atgaaattttctaaagtctcactactggccgcatctgcatctgtcgctttatctgccccagttgctgtgactgtcacgcaacatgtccaccaagctgccactgtagtggtacaaggtatagttcgtgtagaaaatggccagactctaacgacgttcattaccaagggcactcaaacggcttctgctagtcccgttgccacaacatcagctcctattgtggttgctaatgctcaagtggacagcatagctacttccgttatccaagaaagcgctgtcgtggctgaatctgcaacatttgaagaatcctctacagaaacatctgaagcattttctacagcaactgcaaccatacaagcggtgcaaacctccgcaagtgccacacaggatgatgtaaccacaactttaacatcttcaacacaacctaccagcacaactactccaacaaccactaccactagcccaaccactaccactagcccaactactaccgctagtccaactactactgctagcccaaccaccgctaccaccactcaatctaccgcctcaagcactcaatcctcaagctccgatttctcaacgtcaatggttaacgaacacaacactaaaagggcgttgcacaaggataccggttctttgacatggtctgacacactagcaacatatgcacaaaactacgctgactcctacgattgttcaggcaacctagtccactccggcggtccatacggtgaaaacttggcacttggttacggtacgaccggctctgttgatgcctggtataacgaaattaccagctacgactattccaaccctggttttagtgaaagcgcaggtcacttcacccaagtcgtatggaagggaacttctgaagttggttgcggtttgaaatcttgcggtggcgaatggggcgattacatcatttgttcctacaaagccgctggtaatgtcattggtgagtttgctgacaacgttatgccattagcttaa

SEQ ID NO: 6886 - DNA, 990 bp, Artificial Sequence
  Description of Artificial Sequence: Synthetic polynucleotide
atgaaattttctaaagtctctttattagccgcatctgcatctgtcgctttatctgccccagttgctgtgactgtcacgcaacatgtccaccaagctgccactgtagtggtacaaggtatagttcgtgtagaaaatggccagactttaacgacgttcattaccaagggcactcaaacggcttctgctagtcccgttgccacaacatctgctcctattgtggttgctaatgctcaagtggacagcatagctacttccgttatccaagaaagcgctgtcgtggctgaatctgcaacatttgaagaatcctctacagaaacatctgaagcattttctacagcaactgcaaccatacaagcggtgcaaacctccgcaagtgccacacaggatgatgtaaccacaactttaacatcttctacacaacctaccagcacaactactccaacaaccactaccactagcccaaccactaccactagcccaactactaccgctagtccaactactactgctagcccaaccaccgctaccaccactcaatctaccgcctccagcactcaatcctctagctccgatttcagtacgtctatggttaacgaacacaacactaaaagggcgttgcacaaggataccggttctttgacatggtctgacacattagcaacatatgcacaaaactacgctgactcctacgattgttctggcaacttggtccactccggcggtccatacggtgaaaacttggcacttggttacggtacgaccggctctgttgatgcctggtataacgaaattaccagctacgactattccaaccctggttttagtgaaagcgcaggtcacttcacccaagtcgtatggaagggaacttctgaagttggttgcggtttgaaatcttgcggtggcgaatggggcgattacatcatttgttcctacaaagccgctggtaatgtcattggtgagtttgctgacaacgttatgccattagcttga

SEQ ID NO: 6887 - DNA, 705 bp, Saccharomyces cerevisiae
atgttgcaatttaaactagttttattgggtgactcatccgtgggtaaatcttccattgttcatcgttttgttaaggatacattcgatgaactacgtgaaagtacgattggtgctgcttttttatctcaatcaatcactattcacccaaacgatggtaatgaaacaaaggatgtcgttataaaatttgaaatctgggatactgctggtcaagaaagatacaagtcattggcaccaatgtattatagaaacgctaatgcagcattagttgtttatgacattacgcaggaagattcactacaaaaggcaaggaactgggttgatgagctgaaaaataaggtaggcgacgacgacttggttatttatttactgggaaacaaagtggatttatgtcaagaaacgcctagcactgagacaagcccagattcaaacgaaggtggagatgaagaacaaaaagtaagagcaattagcactgaagaagcgaaacagtacgcacaagaacaagggttgctgttccgagaagttagtgctaagacaggtgaaggggttaaggaaatttttcaagatattggtgaaaaattatacgatttaaagaaagacgaaattctctctaagcaaaatagacaaatcggtggaggcaataacggacaagtagacattaatttgcaaaggccatccacaaatgatccaacatcttgttgcagttga

SEQ ID NO: 6888 - DNA, 705 bp, Artificial Sequence
  Description of Artificial Sequence: Synthetic polynucleotide
atgttgcaatttaaattggttttattgggtgactcttccgtgggtaaatcttccattgttcatcgttttgttaaggatacattcgatgaattgcgtgaaagtacgattggtgctgcttttttatctcaatccatcactattcacccaaacgatggtaatgaaacaaaggatgtcgttataaaatttgaaatctgggatactgctggtcaagaaagatacaagtctttggcaccaatgtattatagaaacgctaatgcagcattagttgtttatgacattacgcaggaagattctttacaaaaggcaaggaactgggttgatgagttgaaaaataaggtaggcgacgacgacttggttatttatttattaggaaacaaagtggatttatgtcaagaaacgcctagcactgagacaagcccagattccaacgaaggtggagatgaagaacaaaaagtaagagcaattagcactgaagaagcgaaacagtacgcacaagaacaagggttgttattcagagaagttagtgctaagacaggtgaaggggttaaggaaatttttcaagatattggtgaaaaattatacgatttaaagaaagacgaaattctctctaagcaaaatagacaaatcggtggaggcaataacggacaagtagacattaatttgcaaaggccatccacaaatgatccaacatcttgttgcagttga

SEQ ID NO: 6889 - DNA, 1707 bp, Saccharomyces cerevisiae
atgtttctggactattctggatatgaggctcttactgaaatcaactcttcctttggaaagtatgttcttctattgcaacaatttgaaggctgtcgaagtttgaaagatcggcttcaaatgcttaaggatctggggagggaatttatgatattcgagaacttgaatgtggaagatttcagagaatctaaaaatatgattcacagattttatactatggttatttctttaagacagattatggaaattgggcccttagtcaggcgtagccctgctgttttagttgtggaattcgattgtccggtagaggattgcctagatgaactggatccgttgcatccattgaacagggcctttatatttattcataaacaatggacctattatcatcaatattatatagttgaaaaggtaaaaaaggtgattcttgatatggccccggtaaaggaagatgattggagcatccttcacaaggttgtttattcagaaggttttgtcgaaagacgatataaaaagaagaaatacctcggtgatatttacattccacaaccattaatgaaaagcaataaaatcactactatctcaaatttttcccaacttaccaaaatttccaacgtcagagtttacagattcaacgctacagcagcgtgtgatccgcagaacttgaacaaaaaaaacttgagtatcaaagagcttaaagataaagaccttcctaatcttatttggactttagaaccagaaaaattctatgttgacatgagaccttacaaggaacacgaggaaaggaaaaaacggagagaagaagaagccaaggtgaggatgcaaggtgaggaacaggagaacattatgatagagagaaaaaaaatggatagtattgaagttgaagcgtcatcaggattgaaaaatatcataaaaacacctctcgctaatagggttgtcaatacttttaataactgcgctgctgtggtaataggctatgtaacagaagtggataaagtaaaggatgacaatgaagagaaaaataacgacagacctaaaattgcgaacgacggaatagctcaaaagtctagaagcgaaagtgaagataatgcaggaacaccgatggaaaacgcgtactttcaacctgaaccccaagataatgaccaaaacaacatatcttggaataccactatgaaagatattgatccaatttacatgagtgaaagatgtgctagagtttggagaaaggagcaacaaatgctaggattggagaaggctcagacatttgagaaaaaatattgtaaagatcagatggttatggacgaaaatcaggtcgaagaacctggtaagcactcggagagacatacaaaaaatcaggtagttagacctaggaccaaaatagcatcttccgccagtaaaaatgataatagtaataataaaaatagtaaatcatgcaaaaattgccataaagaggaagcgcacggtctagtgagagaataccttaagattaaactcaacatatcacctcatggagaaaggaatcagcgaacaaaggacaagagaaaatgtataatgaaatacaatgcgagcagtaacaacatcaacaaaatgcctggggagagtgaagtacttgggtcaactattttaacagatatccactttaaggatgtcgtaactgtgaaatttagggattttaaagccaaatttagaaaagtcaaaataaacgcttga

SEQ ID NO: 6890 - DNA, 1707 bp, Artificial Sequence
  Description of Artificial Sequence: Synthetic polynucleotide
atgtttttggactattctggatatgaggctcttactgaaatcaactcttcctttggaaagtatgttcttttattgcaacaatttgaaggctgtaggagtttgaaagatagacttcaaatgcttaaggatttagggagggaatttatgatattcgagaacttgaatgtggaagatttcagagaatctaaaaatatgattcacagattttatactatggttatttctttaagacagattatggaaattgggcccttagtcaggcgtagccctgctgttttagttgtggaattcgattgtccggtagaggattgcttagatgaattagatccgttgcatccattgaacagggcctttatatttattcataaacaatggacctattatcatcaatattatatagttgaaaaggtaaaaaaggtgattcttgatatggccccggtaaaggaagatgattggagcatccttcacaaggttgtttattctgaaggttttgtcgaaagaagatataaaaagaagaaatacctcggtgatatttacattccacaaccattaatgaaaagcaataaaatcactactatctctaatttttcccaacttaccaaaatttccaacgtcagagtttacagattcaacgctacagcagcgtgtgatccgcagaacttgaacaaaaaaaacttgagtatcaaagagcttaaagataaagaccttcctaatcttatttggactttagaaccagaaaaattctatgttgacatgagaccttacaaggaacacgaggaaaggaaaaaaagaagagaagaagaagccaaggtgaggatgcaaggtgaggaacaggagaacattatgatagagagaaaaaaaatggatagtattgaagttgaagcgagtagtggattgaaaaatatcataaaaacacctctcgctaatagggttgtcaatacttttaataactgcgctgctgtggtaataggctatgtaacagaagtggataaagtaaaggatgacaatgaagagaaaaataacgacagacctaaaattgcgaacgacggaatagctcaaaagtctagaagcgaaagtgaagataatgcaggaacaccgatggaaaacgcgtactttcaacctgaaccccaagataatgaccaaaacaacatatcttggaataccactatgaaagatattgatccaatttacatgagtgaaagatgtgctagagtttggagaaaggagcaacaaatgcttggattggagaaggctcagacatttgagaaaaaatattgtaaagatcagatggttatggacgaaaatcaggtcgaagaacctggtaagcacagcgagagacatacaaaaaatcaggtagttagacctaggaccaaaatagcatcttccgccagtaaaaatgataatagtaataataaaaatagtaaaagttgcaaaaattgccataaagaggaagcgcacggtttagtgagagaataccttaagattaaactcaacatatctcctcatggagaaaggaatcagagaacaaaggacaagagaaaatgtataatgaaatacaatgcgagcagtaacaacatcaacaaaatgcctggggagagtgaagtacttgggtccactattttaacagatatccactttaaggatgtcgtaactgtgaaatttagggattttaaagccaaatttagaaaagtcaaaataaacgcttga

SEQ ID NO: 6891 - DNA, 1623 bp, Saccharomyces cerevisiae
atgatgctaagaactactgcctcacgaaaaattgtgctaaggaggggtctagccagcataaacacagggactaccgttgcatcaaaaaaggcttcgcacaaatttcgcaataccctttggactattgctttgtcagcgacagctttctacgctggaggtatcatatattcgcaaaaaaatgacaaatttggtgactttttctctaataacgttccttttgccgaggatttactagaaacatatgaacactatcacgataggccaacattgtttttagaagattcttgggacggcttgaaggcaaagagcaatgatttattatctggattaactggtagttcacaaacgcgcagatctaatagggaaaatattgaagtaaaaaaaatcttatcattagaaccactaaatattgaaacagaaaattctgatccgcaactgaaagaaatcattggctctttgaatgatctcatcaacagtctaaatgactcaaacctctccatccccgaatcagaattcaattcaatcaaaaaatctaaccagaatatgcttacgaatctatcccaattaaatgaaacgttaaaagaggctttatccaattacatgatacaaagaacatcagaagtaatcacggaattgaacacacaatatgaaaactcgaaaagggagtttgaaaagaatcttcaaaaaaacctattacaagaagtagacgaattcaaagaaaacttgaccaagcaaaaggacaaagaactagaagaaaaattaaaggcgaacgaagaattgttacaagccaaacatgcaaatgaagtgggcttactatccatcactcaagtcaaagaatttaataaaattatcaaagacaaaattgagaaggaaagaaatggcagattagcccatttagaggaaataaattctgaagttaacgacctcagcaaatccatcgacagatcgagcaaaatcttaagtaaaaacgaggctctagtgcaattaactttccaagtagatgagatcaaatctaggattaacaacaataacttacccgatgtgaatatcgacaaggaactatccagattgaaacttctttccaatcttctctctaccttcaacaaaaaatcttgttgcgacgatggcgactgctgctcctgcaaaaagggtaataagaatgaaggcaaggaagggaagatatcatgcaaatgcaaaccaaagacaaaccctccatcgctattaagcgtagctttagatgaattagaatccacatgtagcggtaaaaaaatcttatcgaatgagcagatctataacaggtggaacttactggcagatgactttaagacagcctctttattgccaccaaattccggtattttggggcaattaaccgccaaagttttttcccttttcttattcacaaagacaggtaatccttcaaatgccacggatttcgattctgtttatgcaagagtcggcgataacttgagggtatccaacctcaacgatgctgtagaagaggttgtctccctaaagggttggcctcataaagtttgcgaaagctggatcgaagatgctagaagaaaattagaagtccagcgcctggtagagattcttgactgtgaaataaggacgttgtga

SEQ ID NO: 6892 - DNA, 1623 bp, Artificial Sequence
  Description of Artificial Sequence: Synthetic polynucleotide
atgatgttgagaactactgccagtagaaaaattgtgttaaggaggggtttagccagcataaacacagggactaccgttgcatccaaaaaggcttctcacaaatttcgcaataccctttggactattgctttgagtgcgacagctttctacgctggaggtatcatatattctcaaaaaaatgacaaatttggtgactttttctctaataacgttccttttgccgaggatttattggaaacatatgaacactatcacgataggccaacattgtttttagaagattcttgggacggcttgaaggcaaagagcaatgatttattatctggattaactggtagttctcaaacgcgcagatctaatagggaaaatattgaagtaaaaaaaatcttatctttagaaccattgaatattgaaacagaaaattctgatccgcaattgaaagaaatcattggctctttgaatgatctcatcaacagtttgaatgactccaacctctccatccccgaaagtgaattcaattccatcaaaaaatctaaccagaatatgcttacgaatttatcccaattaaatgaaacgttaaaagaggctttatccaattacatgatacaaagaacaagtgaagtaatcacggaattgaacacacaatatgaaaactccaaaagggagtttgaaaagaatcttcaaaaaaacttattacaagaagtagacgaattcaaagaaaacttgaccaagcaaaaggacaaagaattggaagaaaaattaaaggcgaacgaagaattgttacaagccaaacatgcaaatgaagtgggcttattatccatcactcaagtcaaagaatttaataaaattatcaaagacaaaattgagaaggaaagaaatggcagattagcccatttagaggaaataaattctgaagttaacgacctcagcaaatccatcgacagaagcagcaaaatcttaagtaaaaacgaggctttggtgcaattaactttccaagtagatgagatcaaatctaggattaacaacaataacttacccgatgtgaatatcgacaaggaattatccagattgaaacttctttccaatcttctctctaccttcaacaaaaaatcttgttgcgacgatggcgactgctgctcctgcaaaaagggtaataagaatgaaggcaaggaagggaagatatcttgcaaatgcaaaccaaagacaaaccctccatctttattaagcgtagctttagatgaattagaatccacatgtagcggtaaaaaaatcttatccaatgagcagatctataacaggtggaacttattggcagatgactttaagacagcctctttattgccaccaaattccggtattttggggcaattaaccgccaaagttttttcccttttcttattcacaaagacaggtaatccttccaatgccacggatttcgattctgtttatgcaagagtcggcgataacttgagggtatccaacctcaacgatgctgtagaagaggttgtctccttgaagggttggcctcataaagtttgcgaaagctggatcgaagatgctagaagaaaattagaagtccagcgcttggtagagattcttgactgtgaaataaggacgttgtga

SEQ ID NO: 6893 - DNA, 1656 bp, Saccharomyces cerevisiae
atgagtagtggtaccgaaaatgatcaattttatagttttgatgaaagtgattccagctctattgaactttatgaatctcacaatacatctgaatttactatacatggactagttttcccgaagttaattagtgtaacaagccaagattcagaatttgacatcaatgaagatgaagatggagtcgataccatatatgaggggatgctagatgctcctcttacgaaaaacaacaaaagaatactgtgtgaagggagtgtaccgaatctcagttatgaatgcttaaccaccaagggtatatttgaaagaatgcttcaaagggttgaccatttacaacctatttttgcaattccatctgcggatatattgatattactacagcattatgattggaacgaggaacgtttgctagaagtttggaccgaaaaaatggacgaattgcttgtggagcttggcttaagtaccacagcaaatatcaagaaagataatgattataattcacatttcagagaagttgaattcaaaaatgactttacatgtattatttgttgtgataaaaaggatacggaaacatttgcgttggaatgtggccatgaatattgtatcaattgctaccgtcattacatcaaggataagttgcatgaggggaacatcattacatgcatggactgttccctggcattgaaaaatgaagatatagataaagtgatgggacatccttcgagtagtaagttgatggattcttcaatcaaaagttttgttcaaaaacataatcgtaactataaatggtgcccgtttgctgactgtaaatccatcgtgcacttgcgagatacgtcatcattaccagaatatacccgtttgcattattcacctttcgttaagtgtaattcatttcatagattctgtttcaattgcggattcgaagttcattccccagcagattgtaaaataaccactgcttgggttaaaaaagccagaaaagaatcagaaattttgaattgggtcttgtcccacactaaagaatgtccaaaatgttctgttaatattgaaaaaaatggtggctgcaaccacatggtttgctcaagttgtaaatacgaattctgttggatttgtgagggcccctgggcgccccacggtaagaacttttttcaatgtacaatgtataagaataatgaggataataaaagtaagaaccctcaagacgctaataaaaccttgaagaaatacactttctactatagattgtttaacgaacatgaagtttcagccaagcttgattggaacctggggcaaactttgggcacgaaagttcatgcactacaagaaagaataggtatctcatggattgatggacagttcctatcagaaagtttaaaagtgttgaatgagggacgaaccgtattaaaatggtcatttgccgtggcatattactcggatgcatctcataatttgacgaagattttcgttgataaccaaatgctcttagccaacgcagtggaatcgctatcggagctattgcaaataaaaacccccgaagtgatcatgaaacgaagaccagagttttataataaggccggatatgtggaaaatagaaccactgcattaatggaatgcggtagagaactgctatgtaagggaatttgcaaagctgcagaatga

SEQ ID NO: 6894 - DNA, 1656 bp, Artificial Sequence
  Description of Artificial Sequence: Synthetic polynucleotide
atgagtagtggtaccgaaaatgatcaattttatagttttgatgaaagtgattccagctctattgaactttatgaatctcacaatacatctgaatttactatacatggattggttttcccgaagttaattagtgtaacaagccaagattctgaatttgacatcaatgaagatgaagatggagtcgataccatatatgaggggatgcttgatgctcctcttacgaaaaacaacaaaagaatattatgtgaagggagtgtaccgaatctcagttatgaatgcttaaccaccaagggtatatttgaaagaatgcttcaaagggttgaccatttacaacctatttttgcaattccatctgcggatatattgatattattgcagcattatgattggaacgaggaacgtttgttggaagtttggaccgaaaaaatggacgaattgcttgtggagcttggcttaagtaccacagcaaatatcaagaaagataatgattataattctcatttcagagaagttgaattcaaaaatgactttacatgtattatttgttgtgataaaaaggatacggaaacatttgcgttggaatgtggccatgaatattgtatcaattgctaccgtcattacatcaaggataagttgcatgaggggaacatcattacatgcatggactgttccttggcattgaaaaatgaagatatagataaagtgatgggacatccttctagtagtaagttgatggattcttctatcaaaagttttgttcaaaaacataatcgtaactataaatggtgcccgtttgctgactgtaaatccatcgtgcacttgagagatacgtcttctttaccagaatatacccgtttgcattattctcctttcgttaagtgtaattcttttcatagattctgtttcaattgcggattcgaagttcattccccagcagattgtaaaataaccactgcttgggttaaaaaagccagaaaagaaagtgaaattttgaattgggtcttgtcccacactaaagaatgtccaaaatgttctgttaatattgaaaaaaatggtggctgcaaccacatggtttgcagcagttgtaaatacgaattctgttggatttgtgagggcccctgggcgccccacggtaagaacttttttcaatgtacaatgtataagaataatgaggataataaaagtaagaaccctcaagacgctaataaaaccttgaagaaatacactttctactatagattgtttaacgaacatgaagtttctgccaagcttgattggaacttggggcaaactttgggcacgaaagttcatgcattacaagaaagaataggtatcagttggattgatggacagttcttatctgaaagtttaaaagtgttgaatgagggaagaaccgtattaaaatggtcttttgccgtggcatattactctgatgcatctcataatttgacgaagattttcgttgataaccaaatgctcttagccaacgcagtggaatctttatctgagttattgcaaataaaaacccccgaagtgatcatgaaaagaagaccagagttttataataaggccggatatgtggaaaatagaaccactgcattaatggaatgcggtagagaattattatgtaagggaatttgcaaagctgcagaatga

SEQ ID NO: 6895 - DNA, 2178 bp, Saccharomyces cerevisiae
atgtttaaagtgtttggttttggtgcgaaggaagagattcctgagctttcacaggaagaaaaaactaaagccattctaaaacaagctcatgatttcgaacaggcactgcgtgcgatggactatgtcttagatgataatgctgacgagggtttggctttgctggatgagagtgatgctaaagaagcttccgaccaaactataaatgcgttagctcgtggtgtcattgaatttttggaggccactttaggttttgaagctgaagagatgaaaaaagcttctgcgactttggccaaggcagaagctttatctttgaaaagtagagagagggctcaaaaaattggattgaagagcagttctttatatcctccaggaacagtttatgccgtgacttatacagaatcatgccttctacatgccctattgatgattttcagtgaaagtatgatggaggcggccaaggccattttaaagctcagaaagtcgtactatatgttacaagaaatcttggaaactattaaagctgctaacaaagccaagaaattgaaaattacgtcaggcagtgaagataaggagtccaccccagcgactttcataactggtggcgatgcgttcaattccgttgatataccttatgaactgactcctgaagaacaaaaggataaggatcttttacaatttgctgaacaaattcatagcatgaggactgaaagattatctggcgcccacattggcaactctcctgcaattaacaggttgagaggtgagctaggactacaagcaatggaagacttgccagaagaggaaataacagatcataaagttctttcggatgatatagatttaagtcaagcaacaattgatgagtttgtccattctggtgtcaatttatgctttggtattttacaggttgtgatatcactattaccacccgctattggcgcggtcctatctgtggttggattcaggggttccagagaagaaggtttgagacttgtttggaaagccacaaagcaaagaaacgtgcatggttgtattggtttgttagccctgatgttttactatgatggacctttccaattcactgacgatgattttgatattcctgcagcagttaaggattccagtaacagtgaagattctgaagatgaagagatggatggccctacgttgttgcatcctgggaaaatactggaagatgcgttgctgcaatcaagagcgctatttcccaatagtgcgctatggttattgaatgaggcaaggatgctatctggtaaagggcgtttagaggaagcagtcgcattgatggattcgattgatgttagcaagatacggatgagacaggtcaaatccttgatgatttttgaccgtgctataacattgatccatttgcatcaatacgatagagctgcagaagatattttatcgctattagacatcagtgattggtcacacgctttttacacatattttgctggctgctgttatttagaaaattggagaatgtgcgaaatgggattaatgaagtcagacaaaaaggatgaataccaaaagaaggccgaagaacttatcttcacctctgtgaatttgctaggtaagaaaaccttcaaatcgaagaacctgccattagataggtttattctgagaaaagttgagcaatttaaagcgaaaaaggaggaacttggggtggaaaatcctctggatggtatcgctacttcaccagtacacgaaattgcgtacttctacaatggttataatagaatgtctgaagagcatttggagctaacaaagaaaatgctaactgagtatagaaatcccgccattgaagctttagactcagatcaggagttaatcaaagatctcttggtctctttgacattaagaagattaggtcatatccaagaaggttgtgatatattggatgaaaaggttctacctaagtttttctccattcaaaatggcaaggtcaaatatataaagaaaactgaagatccatgggcctatccgactgcactttatgaacgtgctctatttacatggaagttggagggcatggatggccttccagagagtaaagaatggttactgagggctcagggctacgcagatgattatgaattgagtacgagagtaggtatgaaaattaaggctgccattgaccgcgttgaccattcattgtaa

SEQ ID NO: 6896 - DNA, 2178 bp, Artificial Sequence
  Description of Artificial Sequence: Synthetic polynucleotide
atgtttaaagtgtttggttttggtgcgaaggaagagattcctgagctttctcaggaagaaaaaactaaagccattttgaaacaagctcatgatttcgaacaggcattgcgtgcgatggactatgtcttagatgataatgctgacgagggtttggctttgttggatgagagtgatgctaaagaagcttccgaccaaactataaatgcgttagctcgtggtgtcattgaatttttggaggccactttaggttttgaagctgaagagatgaaaaaagcttctgcgactttggccaaggcagaagctttatctttgaaaagtagagagagggctcaaaaaattggattgaagagcagttctttatatcctccaggaacagtttatgccgtgacttatacagaaagttgccttttacatgccttattgatgattttcagtgaaagtatgatggaggcggccaaggccattttaaagctcagaaagtcctactatatgttacaagaaatcttggaaactattaaagctgctaacaaagccaagaaattgaaaattacgtctggcagtgaagataaggagtccaccccagcgactttcataactggtggcgatgcgttcaattccgttgatataccttatgaattgactcctgaagaacaaaaggataaggatcttttacaatttgctgaacaaattcatagcatgaggactgaaagattatctggcgcccacattggcaactctcctgcaattaacaggttgagaggtgagttaggattacaagcaatggaagacttgccagaagaggaaataacagatcataaagttctttctgatgatatagatttaagtcaagcaacaattgatgagtttgtccattctggtgtcaatttatgctttggtattttacaggttgtgatatctttattaccacccgctattggcgcggtcttgtctgtggttggattcaggggttccagagaagaaggtttgagacttgtttggaaagccacaaagcaaagaaacgtgcatggttgtattggtttgttagccttgatgttttactatgatggacctttccaattcactgacgatgattttgatattcctgcagcagttaaggattccagtaacagtgaagattctgaagatgaagagatggatggccctacgttgttgcatcctgggaaaatattggaagatgcgttgttgcaatctagagcgttatttcccaatagtgcgctttggttattgaatgaggcaaggatgctttctggtaaagggcgtttagaggaagcagtcgcattgatggattctattgatgttagcaagataagaatgagacaggtcaaatccttgatgatttttgaccgtgctataacattgatccatttgcatcaatacgatagagctgcagaagatattttaagtttgttagacatcagtgattggtctcacgctttttacacatattttgctggctgctgttatttagaaaattggagaatgtgcgaaatgggattaatgaagagtgacaaaaaggatgaataccaaaagaaggccgaagaacttatcttcacctctgtgaatttgttgggtaagaaaaccttcaaatccaagaacttaccattagataggtttattttaagaaaagttgagcaatttaaagcgaaaaaggaggaacttggggtggaaaatcctttggatggtatcgctacttctccagtacacgaaattgcgtacttctacaatggttataatagaatgtctgaagagcatttggagttgacaaagaaaatgttgactgagtatagaaatcccgccattgaagctttagacagtgatcaggagttaatcaaagatctcttggtctctttgacattaagaagattaggtcatatccaagaaggttgtgatatattggatgaaaaggttttacctaagtttttctccattcaaaatggcaaggtcaaatatataaagaaaactgaagatccatgggcctatccgactgcactttatgaacgtgctttgtttacatggaagttggagggcatggatggccttccagagagtaaagaatggttattgagggctcagggctacgcagatgattatgaattgagtacgagagtaggtatgaaaattaaggctgccattgaccgcgttgaccattctttgtga

SEQ ID NO: 6897 - DNA, 1848 bp, Saccharomyces cerevisiae
atgagactttcgtttggtaaacagcgttatcatggcggtacaacagtaactttgactgaacaaggagcttcagattcccttcgcgctgcgcaagctatcttccagaaccattccaatgaggtcagcagtccatgccctccagtaacggtgagcaggaatcctcaaactaggttatcagagccatcgctacaaaagtcagggcggaaacaagaacaaaagaaggcacgcatacgaacaaaacaggtacctaagattaaaacaacggcgcctaatgatgttgagttgtctaagaaacacaggtcaagccctgcaggtaaagataatgttagtagtactgctcaaatggcagctgctttagcgcattcacaatcgaaacttagttctgacaataactcctcccattcttcggcattggatacactaaaagttctagaaactccgaacttgaatggcttgctgggcattcattcacgctcaagctcaagaaacggctccaatgaatcactgacgcctggccaaagaactcccgacaatagatctcaagagaatttacttacttcctttagtagcggtagaaggctatcctcgagctctatggagcctgcaactaataaagacagcaacaaagctctgcccaaacgcaggccgtctcctcccttgcaatcatcacttgtcggcagtggtcagcttcatgaaaatgaaaacctatcatcaattagcatcgattccagacatagtctcaatccggacacttcagacgttatttctaataggtcacaaacaagtctatctcaaacaattaatcaactctcgttatgtgaatcagagccatctattgcaagctcaaacactactactacaacgagcaaccagggaagtggtttgcccaacttggttccgaactattcatccgatatgaggaagaagaagcttgttaacaagttcaaaaggaaagtatttggtagtaagcccaagcacttatcttcacaatatgaaatggatgcaagcagcgaagaactgggacaacatgaacaacaaccgagtatgagatttaaaacaacattacgtaaaacctctgtaagtacaaacgcagaaaatgatcatgcatcctctctacatgagggaaatctgaggtataagtacaatccgtccaacgacacgtatgatgtgtatgacgatactgattctgattctgaatctgatcagaaccaggacgccttgaccaagccacgcaaaagagatagaattaagagaaagatcaggaattctgccaataaaactgcacatcataggcctatccaccgcacgagagatcggaaattcaatgaggataaaccctggaaatcacatacagatataactttcgtaacagacaacgaaaggaagcgttacgaaagcatgtgggtaagcaacagacaccgtcatttgaacctgttgagctggtggccctctataacgggtgattccggagcaattaatactttacccgaagatggattgatattgggtatcatagtccgtgatatctggaagcggtctaacttgcccaatagtctattggcagaaatttacacgaaggtagacacaagaaaagatggtactttagataggaaatcttttattgtgggtatgtggctggtcgatcagtgcctgtatggcagaaaacttcccaatgttgtcgagcaatgcgtttgggatagcgtagatagatatgcttccaccacggttgtgccagtgagtacgctaaaggcgatggccaaacaaaagagaaaacagatgaaagaagaaatcaagaatatcaagaaggaaaaccgtgtagttcttgtagaccacaatagctcgtcgtga

SEQ ID NO: 6898 - DNA, 1848 bp, Artificial Sequence
  Description of Artificial Sequence: Synthetic polynucleotide
atgagactttcttttggtaaacagcgttatcatggcggtacaacagtaactttgactgaacaaggagcttctgattcccttcgcgctgcgcaagctatcttccagaaccattccaatgaggtcagcagtccatgccctccagtaacggtgagcaggaatcctcaaactaggttatctgagccatctttacaaaagagtgggagaaaacaagaacaaaagaaggcacgcataagaacaaaacaggtacctaagattaaaacaacggcgcctaatgatgttgagttgtctaagaaacacaggagcagccctgcaggtaaagataatgttagtagtactgctcaaatggcagctgctttagcgcattctcaaagtaaacttagttctgacaataactcctcccattcttctgcattggatacattaaaagttttggaaactccgaacttgaatggcttgttgggcattcattctcgcagcagcagcagaaacggctccaatgaatctttgacgcctggccaaagaactcccgacaatagatctcaagagaatttacttacttcctttagtagcggtagaaggctttcctctagctctatggagcctgcaactaataaagacagcaacaaagctcttcccaaacgcaggccgtctcctcccttgcaatcttctcttgtcggcagtggtcagcttcatgaaaatgaaaacttatcttccattagcatcgattccagacatagtctcaatccggacacttctgacgttatttctaataggtctcaaacaagtttatctcaaacaattaatcaactctctttatgtgaaagtgagccatctattgcaagcagtaacactactactacaacgagcaaccagggaagtggtttgcccaacttggttccgaactattcttccgatatgaggaagaagaagcttgttaacaagttcaaaaggaaagtatttggtagtaagcccaagcacttatcttctcaatatgaaatggatgcaagcagcgaagaattaggacaacatgaacaacaaccgagtatgagatttaaaacaacattacgtaaaacctctgtaagtacaaacgcagaaaatgatcatgcatcctctttgcatgagggaaatttaaggtataagtacaatccgtccaacgacacgtatgatgtgtatgacgatactgattctgattctgaatctgatcagaaccaggacgccttgaccaagccacgcaaaagagatagaattaagagaaagatcaggaattctgccaataaaactgcacatcataggcctatccaccgcacgagagataggaaattcaatgaggataaaccctggaaatctcatacagatataactttcgtaacagacaacgaaaggaagcgttacgaaagcatgtgggtaagcaacagacaccgtcatttgaaccttttgagctggtggccctctataacgggtgattccggagcaattaatactttacccgaagatggattgatattgggtatcatagtccgtgatatctggaagagatctaacttgcccaatagtttattggcagaaatttacacgaaggtagacacaagaaaagatggtactttagataggaaatcttttattgtgggtatgtggttagtcgatcagtgcttatatggcagaaaacttcccaatgttgtcgagcaatgcgtttgggatagcgtagatagatatgcttccaccacggttgtgccagtgagtacgttgaaggcgatggccaaacaaaagagaaaacagatgaaagaagaaatcaagaatatcaagaaggaaaaccgtgtagttcttgtagaccacaatagctccagctga

SEQ ID NO: 6899 - DNA, 495 bp, Saccharomyces cerevisiae
atggcagaacaaattagtcacaaaaagtccctgagggtgagcagtctgaacaaagatagaagattgctcttaagagaattctacaacttggaaaatgaaccgaataaaggtcgtcaagaagcacgtataggggaaaaagccagcgaggctcattctggggaggagcaagtcacagatgtgaatatagataccgaagcaaacactgagaaaccagtgaaagatgacgaattgagtgcaactgaagaggatctcaaggaggggtcagaagatgcagaagaagagataaagaacctgccctttaagaggctagtacaaattcacaataagctcttgggcaaagaaaccgagactaacaattctatcaagaataccatttacgaaaactattatgacctaataaaagtcaacgaccttctcaaagaaattacaaacgccaatgaagaccaaattaacaagttgaagcaaacagtagaatctttaatcaaggaactgtaa

SEQ ID NO: 6900 - DNA, 495 bp, Artificial Sequence
  Description of Artificial Sequence: Synthetic polynucleotide
atggcagaacaaattagtcacaaaaagtccttaagggtgagcagtttgaacaaagatagaagattgctcttaagagaattctacaacttggaaaatgaaccgaataaaggtcgtcaagaagcacgtataggggaaaaagccagcgaggctcattctggggaggagcaagtcacagatgtgaatatagataccgaagcaaacactgagaaaccagtgaaagatgacgaattgagtgcaactgaagaggatctcaaggaggggagtgaagatgcagaagaagagataaagaacttgccctttaagaggttagtacaaattcacaataagctcttgggcaaagaaaccgagactaacaattctatcaagaataccatttacgaaaactattatgacttgataaaagtcaacgaccttctcaaagaaattacaaacgccaatgaagaccaaattaacaagttgaagcaaacagtagaatctttaatcaaggaattatga

SEQ ID NO: 6901 - DNA, 2748 bp, Saccharomyces cerevisiae
atgctccaattcaatacagaaaatgatactgtagctccagtgtttcccatggagcaagatataaatgcagcacctgatgccgtcccactggtgcagacaacaacactacaagtctttgtaaagcttgccgaacccatagtgtttttaaaaggatttgaaactaacggactgtctgaaatagcccccagtatcttacgaggatctcttatcgtcagggtgttgaaaccgaataaattaaaaagtatatcgataaccttcaaaggaatatccagaacagagtggccggaaggtataccaccgaagagagaagaattttcagatgttgaaactgttgtcaatcacacatggccattttatcaggcggatgacggcatgaattctttcaccttagaacatcacagctcaaataattcgtccaatcgcccatctatgagcgatgaagattatctacttgaaaaaagcggtgcttcagtatatatcccaccaaccgctgaaccccctaaagataatagcaatctaagtctggatgcctatgagcgcaactcattgtcatccgataatttgagtaacaagccagtatcaagtgatgtttcccatgacgacagtaaactgttggctattcaaaagacaccattaccatcatctagtcgaagaggatcggtaccggcaaattttcacggtaactctttgtcacctcataccttcatatctgatttgtttacaaaaacattcagtaatagtggcgctactccaagtcctgagcaagaggataactatcttacaccatccaaagattctaaagaagtttttatttttcgaccgggcgattatatttacacttttgaacagccaatatcgcaatcttatccagaaagtataaaagccaattttggttccgtggagtataaactgtcaatagacatagagaggtttggcgcattcaaatcaactatacatactcaattacccatcaaagtcgtaaggcttccttctgatggatccgtagaagagactgaagctattgcaatttccaaggactggaaagatcttcttcattatgacgtggtaattttctcgaaagagatcgttttgaatgcatttttacccatcgatttccatttcgctcctctagataaagttactctgcatcgtattagaatttatctaacagagtctatggaatacacttgtaatagtaatggaaatcacgagaaggctcgtagattagagccaactaaaaagtttctgttggctgaacataacggtcctaaactgcctcatataccagctggttcgaatcctttgaaggctaaaaatagagggaacatcctcttggatgaaaaatccggcgatctagttaacaaagattttcagttcgaggtgtttgtcccaagcaagtttacaaacagtatacggttacaccctgatacaaattatgataaaatcaaagcccaccattggataaaaatttgccttcgtctttccaagaagtacggggacaatagaaaacatttcgaaataagtattgattctccaatccatattttaaatcaactatgctcacacgcgaatactttgctaccgagctacgagagtcatttccagtattgtgatgaagatggtaatttcgcaccagcagcagatcaacaaaattacgcaagtcatcatgattccaatattttcttcccaaaagaagttctttcgtctcccgttctttcacctaacgtgcagaagatgaacattagaataccgtctgatcttccagtagtgcgtaatagagctgaaagcgtaaagaaaagcaagtcagataatacctccaagaagaatgatcaaagtagcaatgtcttcgcatccaaacagctggtcgcaaacatttataagcccaatcagattccaagagaattaacttctcctcaggcgttaccattatcgcccatcacctcaccaattctcaattaccaaccattatcaaactccccgcctccagattttgattttgatctagctaagcgcggcgcagccgattctcatgctattcctgtggatcctccatcatattttgatgtattaaaggccgatgggattgaattgccatactacgatacaagttcatctaaaattcctgaactaaaactaaacaaatctagagagacattggccagcattgaggaggactcattcaatggttggtctcaaattgatgacttatccgacgaagatgacaatgatggcgatatagcatctggtttcaacttcaagctgtcaaccagtgctccgagtgagaacgttaattcacacactcctattttgcagtctttaaacatgagtcttgatgggagaaaaaaaaatcgtgccagtctacacgcaacatcagtgttacctagtacaataagacagaacaatcagcatttcaatgacataaaccagatgctaggcagtagtgacgaagatgcctttcccaaaagccaatcattaaatttcaataagaaactaccaatacttaaaattaatgataacgtcatacaatcaaacagcaatagtaataacagagttgataatccagaagatacagtggattcttcagtcgatattacagcattttatgatccaagaatgtcatcagattccaaatttgattgggaggtaagcaagaaccatgttgacccagcagcctactcggttaacgttgctagtgaaaaccgtgtactggacgactttaagaaagcatttcgcgaaaagagaaaataa

SEQ ID NO: 6902 - DNA, 2748 bp, Artificial Sequence
  Description of Artificial Sequence: Synthetic polynucleotide
atgctccaattcaatacagaaaatgatactgtagctccagtgtttcccatggagcaagatataaatgcagcacctgatgccgtcccattggtgcagacaacaacattacaagtctttgtaaagcttgccgaacccatagtgtttttaaaaggatttgaaactaacggattatctgaaatagcccccagtatcttaagaggatctcttatcgtcagggtgttgaaaccgaataaattaaaaagtatatccataaccttcaaaggaatatccagaacagagtggccggaaggtataccaccgaagagagaagaattttctgatgttgaaactgttgtcaatcacacatggccattttatcaggcggatgacggcatgaattctttcaccttagaacatcacagcagtaataattcttccaatcgcccatctatgagcgatgaagattatttacttgaaaaaagcggtgcttctgtatatatcccaccaaccgctgaaccccctaaagataatagcaatttgagtttggatgcctatgagcgcaactctttgtcttccgataatttgagtaacaagccagtatctagtgatgtttcccatgacgacagtaaacttttggctattcaaaagacaccattaccatcttctagtagaagaggaagtgtaccggcaaattttcacggtaactctttgtctcctcataccttcatatctgatttgtttacaaaaacattcagtaatagtggcgctactccaagtcctgagcaagaggataactatcttacaccatccaaagattctaaagaagtttttatttttagaccgggcgattatatttacacttttgaacagccaatatctcaatcttatccagaaagtataaaagccaattttggttccgtggagtataaattatctatagacatagagaggtttggcgcattcaaatctactatacatactcaattacccatcaaagtcgtaaggcttccttctgatggatccgtagaagagactgaagctattgcaatttccaaggactggaaagatcttcttcattatgacgtggtaattttctccaaagagatcgttttgaatgcatttttacccatcgatttccatttcgctcctttggataaagttactttacatcgtattagaatttatttgacagagtctatggaatacacttgtaatagtaatggaaatcacgagaaggctcgtagattagagccaactaaaaagtttttattggctgaacataacggtcctaaattacctcatataccagctggtagtaatcctttgaaggctaaaaatagagggaacatcctcttggatgaaaaatccggcgatttggttaacaaagattttcagttcgaggtgtttgtcccaagcaagtttacaaacagtataagattacaccctgatacaaattatgataaaatcaaagcccaccattggataaaaatttgccttcgtctttccaagaagtacggggacaatagaaaacatttcgaaataagtattgattctccaatccatattttaaatcaattatgctcccacgcgaatactttgttaccgagctacgagagtcatttccagtattgtgatgaagatggtaatttcgcaccagcagcagatcaacaaaattacgcaagtcatcatgattccaatattttcttcccaaaagaagttctttcttctcccgttctttctcctaacgtgcagaagatgaacattagaataccgtctgatcttccagtagtgcgtaatagagctgaaagcgtaaagaaaagcaagagtgataatacctccaagaagaatgatcaaagtagcaatgtcttcgcatccaaacagttggtcgcaaacatttataagcccaatcagattccaagagaattaacttctcctcaggcgttaccattatctcccatcacctctccaattctcaattaccaaccattatctaactccccgcctccagattttgattttgatttggctaagcgcggcgcagccgattctcatgctattcctgtggatcctccatcttattttgatgtattaaaggccgatgggattgaattgccatactacgatacaagttcttctaaaattcctgaattgaaattgaacaaatctagagagacattggccagcattgaggaggactctttcaatggttggtctcaaattgatgacttatccgacgaagatgacaatgatggcgatatagcatctggtttcaacttcaagttatctaccagtgctccgagtgagaacgttaattctcacactcctattttgcagtctttaaacatgagtcttgatgggagaaaaaaaaatcgtgccagtttacacgcaacatctgtgttacctagtacaataagacagaacaatcagcatttcaatgacataaaccagatgcttggcagtagtgacgaagatgcctttcccaaaagccaatctttaaatttcaataagaaattaccaatacttaaaattaatgataacgtcatacaaagtaacagcaatagtaataacagagttgataatccagaagatacagtggattcttctgtcgatattacagcattttatgatccaagaatgtcttctgattccaaatttgattgggaggtaagcaagaaccatgttgacccagcagcctactctgttaacgttgctagtgaaaaccgtgtattggacgactttaagaaagcatttcgcgaaaagagaaaatga

SEQ ID NO: 6903 - DNA, 969 bp, Saccharomyces cerevisiae
atggcgatcaagaaaagaaataaaattaggttaccaagtggttctcctgaggaggttggaattgatggttctgcgcataagccaatgcagcaaattaagcccctagtgtcgaacgattctgaagatgatgacaacgacatttgtgtattacaaccaataaagtttaaaaaagttcctaagcgcgacattacctttgatggcgaacaagcaataaaggaggataattcgcattatgaagatctttaccattcaaagaaaaataccaatgcatcgacgcgaaacaaagatgatttgctaattctcaatatggaggacttgatggaggggaatcatcatctattaagtgattcttcagaggctggcagtagctccgaaggtgagcacattagtagtataccaacccgaggagaaattgcaaaactgaaagcacagaagtcattatctagaaggaaaattagtgagagtgatgttacaacagaaagagattatgtaaaattgttggacagtgaggataaacgcgaaattatggagacaataagattaaatggtggtctgaaacgtaacaatgaaaaggagattacgaacttcagtgacgatgaaatgcaaggctttcaagacgaaatgctagccctcacggataatcaaattgctattcaaaaggattctaaaagaaagattatagagaaggccataaatgaagtgccctacagaactaatgaagaatgggaaacccagcttttaagcaaaggaaatataaacaaatcgaatgagaaaatcatcacgcccttaccggtacttttcccagacgatgatgaaagtgggaacagcattgagagaataaacgagatggtttcgaagatctgcttgcaaaggaagaaggttgagatgaggttgcaagcgttagaaaaaacaaaaattgacttggaaaaatctaaagcaagcctaataaataagctcattggtaactga

SEQ ID NO: 6904 - DNA, 969 bp, Artificial Sequence
  Description of Artificial Sequence: Synthetic polynucleotide
atggcgatcaagaaaagaaataaaattaggttaccaagtggttctcctgaggaggttggaattgatggttctgcgcataagccaatgcagcaaattaagcccttagtgtctaacgattctgaagatgatgacaacgacatttgtgtattacaaccaataaagtttaaaaaagttcctaagcgcgacattacctttgatggcgaacaagcaataaaggaggataattctcattatgaagatctttaccattctaagaaaaataccaatgcaagcacgagaaacaaagatgatttgttaattctcaatatggaggacttgatggaggggaatcatcatcttttaagtgattcttctgaggctggcagtagctccgaaggtgagcacattagtagtataccaaccagaggagaaattgcaaaattgaaagcacagaagtctttatctagaaggaaaattagtgagagtgatgttacaacagaaagagattatgtaaaattgttggacagtgaggataaacgcgaaattatggagacaataagattaaatggtggtttgaaacgtaacaatgaaaaggagattacgaacttcagtgacgatgaaatgcaaggctttcaagacgaaatgttggccctcacggataatcaaattgctattcaaaaggattctaaaagaaagattatagagaaggccataaatgaagtgccctacagaactaatgaagaatgggaaacccagcttttaagcaaaggaaatataaacaaatctaatgagaaaatcatcacgcccttaccggtacttttcccagacgatgatgaaagtgggaacagcattgagagaataaacgagatggtttccaagatctgcttgcaaaggaagaaggttgagatgaggttgcaagcgttagaaaaaacaaaaattgacttggaaaaatctaaagcaagcttgataaataagctcattggtaactga

SEQ ID NO: 6905 - DNA, 1593 bp, Saccharomyces cerevisiae
atgacaagaaagcaggctattgactatgcaatcaaacaagttccgcaaatattgcctttggaagagtctgatgtaaaagcgctgtgcgaacaagtactgagtacatcatctgatgatccagaacaaattgcttcaaaatttttggagttcctaggtcatgaagatctatcgtttgaatttgtaatgaagttcaatgaattattgaatcagaatgataaaaaagaggaaaaaaaaacgaaaaatgtgcatcttgaacatactgcccccacttcatggaaaaatgaatcaaaacagcccactaataactatatcaataagaagggagatgaaaaaccaaaaaaattaaaggatgagaagaaaagctcgacaacgaggcctaccgttcaaccatcaaatcaatctacgcaatcaaaccccataaaggagaaaaaagagcacagatcaaaggggaaattacaatcgttacaagaaatagacgaagcaatcaagatgctagagcttcgagatagcggttcttctaaaaattgtaattgtcaaggtacaaggcatccagttttcgacatcgcgccaaactgtcttcactgtggtaaagtggtttgtgttatagagggattgaataaaggtaaatgcggtcattgccatgaacagttgatttctgataacgaaagaacccaaatggtagaaattttaaatcaggaaaaaaacgaactaaacggttcatcatcgtccttatccaatgcgtcaaatggagctaatgtcccaaagaagaagactaaaacctacaaaataacttccggtatgggtaaaaatttatttgctgaacaggacaaattatttgatttcatcgaaaggaaaagagaaagagaaagaaagcgtaatgaagtgttgaaattgcaggaggaaaaagaagagagcgaagcaaaggaaagacaagcgagcgagcatgaccataaagctgaggaaaacccggagttgttagcagcacaagaacgattagatagacttttatatttccaagacacttcggcagaaagaacaaaaattattgataatgccagcgattttgacatgaatcaggaggtgggtttatggggcagcgcaagagaaagagctcttgcgttgaagaagcaacaacgtaatttgagaaagtgggaaaaagtagaaaaggaacggaatggcaggcgcgagaagtacgttgttagcatgaatataggttcaaacggtaaagttactatgacagaagtccctaaggatacagagaacgtaattgcaggttcagatgatgacatcagtgatataagtgacgaagaagatatcagcgaccttaaacatatacacgctctgaaaagtgaaataaatacaacgaaatccttggagaatttgcatttacagtccaaagcatgggattacgaacgtgataaaaaacaattcgataggcctacgtatgtgaaaaaaaattcagatactgcacaacagaatagaaaaacggaagaaaaggctcacgacatgcaagcttatgatttaaagtcaagagtacaagtggaccaaaatgcagacgcatcagtagaacagaatattcttgctgtactttga

SEQ ID NO: 6906 - DNA, 1593 bp, Artificial Sequence
  Description of Artificial Sequence: Synthetic polynucleotide
atgacaagaaagcaggctattgactatgcaatcaaacaagttccgcaaatattgcctttggaagagtctgatgtaaaagcgttatgcgaacaagtattgagtacatcttctgatgatccagaacaaattgcttccaaatttttggagttcttgggtcatgaagatttatcttttgaatttgtaatgaagttcaatgaattattgaatcagaatgataaaaaagaggaaaaaaaaacgaaaaatgtgcatcttgaacatactgcccccacttcttggaaaaatgaaagtaaacagcccactaataactatatcaataagaagggagatgaaaaaccaaaaaaattaaaggatgagaagaaaagctctacaacgaggcctaccgttcaaccatccaatcaatctacgcaaagtaaccccataaaggagaaaaaagagcacagatccaaggggaaattacaatctttacaagaaatagacgaagcaatcaagatgttagagcttagagatagcggttcttctaaaaattgtaattgtcaaggtacaaggcatccagttttcgacatcgcgccaaactgtcttcactgtggtaaagtggtttgtgttatagagggattgaataaaggtaaatgcggtcattgccatgaacagttgatttctgataacgaaagaacccaaatggtagaaattttaaatcaggaaaaaaacgaattgaacggttcttcttcttccttatccaatgcgtctaatggagctaatgtcccaaagaagaagactaaaacctacaaaataacttccggtatgggtaaaaatttatttgctgaacaggacaaattatttgatttcatcgaaaggaaaagagaaagagaaagaaagcgtaatgaagtgttgaaattgcaggaggaaaaagaagagagcgaagcaaaggaaagacaagcgagcgagcatgaccataaagctgaggaaaacccggagttgttagcagcacaagaaagattagatagacttttatatttccaagacacttctgcagaaagaacaaaaattattgataatgccagcgattttgacatgaatcaggaggtgggtttatggggcagcgcaagagaaagagctcttgcgttgaagaagcaacaacgtaatttgagaaagtgggaaaaagtagaaaaggaaagaaatggcaggcgcgagaagtacgttgttagcatgaatataggttccaacggtaaagttactatgacagaagtccctaaggatacagagaacgtaattgcaggttctgatgatgacatcagtgatataagtgacgaagaagatatcagcgaccttaaacatatacacgctttgaaaagtgaaataaatacaacgaaatccttggagaatttgcatttacagtccaaagcatgggattacgaacgtgataaaaaacaattcgataggcctacgtatgtgaaaaaaaattctgatactgcacaacagaatagaaaaacggaagaaaaggctcacgacatgcaagcttatgatttaaagtctagagtacaagtggaccaaaatgcagacgcatctgtagaacagaatattcttgctgtactttga

SEQ ID NO: 6907 - DNA, 2229 bp, Saccharomyces cerevisiae
atgagcgatgaagattctatgctgttaaacttcactaccaatgaggacactgcaggaagttcctataagcaagctgccaaggtgacaggcggtagatggaaggatagaagaagaatgaaaatgaagcttgagggcaagacagtctcgaggaaaagaaaggcgaacactacaggggacgaagggataattccgggtagaggcgagaattctattaaaaaattgcataaggagagttcctatagttctgaagagcaggaaaaatataagggtagaaatgctcataacactcaagggagaactctaccagccgattctcagtttgtttcatccctgtttacatctaacagagagattacaactgcggtaaacactaatattcatgatgaaaacgttgccatcaatccgtctaacgcgcccttgaaaggtgatcagtttgcgtctttaggtgtctctagtcttcttgtttctcatctggagcaaaaaatgcgtattaaaaagcctacgagcatccagaagcaggccatacctcaaataataggtaacgcggggaagaacgattttttcattcacgcccaaacaggctcaggtaagactttatcgtatcttttacctataatatctactattttgaacatggatactcatgttgatcgtacttctggtgcatttgcattggttattgctcctacacgagaactagcatcacaaatatatcatgtttgttccacgcttgtgtcatgttgtcactacttggtcccatgtttattgattggtggagaacgtaagaaatcagaaaaagctagattgcgtaagggttgcaatttcataatcggtacaccaggtcgtgttttggatcatttacaaaatacaaaagttatcaaggagcaattgagtcaatctctaaggtatatcgtattggatgaaggagataagttaatggaattgggttttgatgagacgatcagtgaaattattaaaattgttcacgatattcccatcaactccgaaaaatttcccaagctaccgcataagttagtgcacatgttatgtagtgctacacttactgatggtgttaataggttaagaaacgtggcgttgaaagattacaaattgattagcaacggtaccaagaaagattctgatatagtaacggttgcgcccgatcaactattgcagaggattactattgtcccaccaaagttgcgtcttgtaacattagctgctactttgaacaacattaccaaagatttcatcgcttccggtcaacagtccaaaacgctgcgtacaatcgtattcgtatcatgttcagacagcgtggagtttcattatgacgcattttcaggaagtgacgggcaccataaaaatctaacgggtgattctgtaagactattgacaaaaggaaacactatgtttccttgtttttcagattctagggacccagatgtagtgatttataaattgcacggttctttatcccaacaaatgagaacctctacattgcagcattttgctcgtgataatgaagccaccaagggaaaacatcttattatgttctgtacagatgtcgcaagtagaggcctagaccttccccacgttggatctgttattgagttggatccaccatttgctgttgaagaccatttacatagagttggtcgtacagcaagggccggtgagaagggtgaaagtttgttatttttacttcctggcgaagaagaaaaatatatggactatatccagccgtatcatccgatgggttgggaattactgaaattcgataaagaaatactaatgccggctttcaaagatgtgaatgtcaacagaaatgataaattcattagaaaagatgagaaatcgtccaaaaataaagacgtgggcgataaagaatatgagtgggataccaatgctacgacatggcatttgaatatagaaagacgagtagtgggagattccgcattcaaaaatttggccgttaaaggtttcattagtcatgtgagggcttacgcaacgcatatctctcaagaaaagaagtttttcaacgtgaagttcttacatctaggccatttagctaaaagttttgggttacgtgaaaggccaaaggctatgggattgcaaagtagtaaggatggtaatagtgaaaagaagccaactaaggaaaactctaaaaataaaatgtttcgtatggctcgtatggcagagaagcaaatagcaagtgagtttaactactaa

SEQ ID NO: 6908 - DNA, 2229 bp, Artificial Sequence
  Description of Artificial Sequence: Synthetic polynucleotide
atgagcgatgaagattctatgcttttaaacttcactaccaatgaggacactgcaggaagttcctataagcaagctgccaaggtgacaggcggtagatggaaggatagaagaagaatgaaaatgaagcttgagggcaagacagtctccaggaaaagaaaggcgaacactacaggggacgaagggataattccgggtagaggcgagaattctattaaaaaattgcataaggagagttcctatagttctgaagagcaggaaaaatataagggtagaaatgctcataacactcaagggagaactttaccagccgattctcagtttgtttcttccttatttacatctaacagagagattacaactgcggtaaacactaatattcatgatgaaaacgttgccatcaatccgtctaacgcgcccttgaaaggtgatcagtttgcgtctttaggtgtctctagtcttcttgtttctcatttagagcaaaaaatgcgtattaaaaagcctacgagcatccagaagcaggccatacctcaaataataggtaacgcggggaagaacgattttttcattcacgcccaaacaggcagtggtaagactttatcttatcttttacctataatatctactattttgaacatggatactcatgttgatcgtacttctggtgcatttgcattggttattgctcctacaagagaattggcatctcaaatatatcatgtttgttccacgcttgtgagctgttgtcactacttggtcccatgtttattgattggtggagaacgtaagaaaagtgaaaaagctagattgcgtaagggttgcaatttcataatcggtacaccaggtcgtgttttggatcatttacaaaatacaaaagttatcaaggagcaattgagtcaatctttgaggtatatcgtattggatgaaggagataagttaatggaattgggttttgatgagacgatcagtgaaattattaaaattgttcacgatattcccatcaactccgaaaaatttcccaagttaccgcataagttagtgcacatgttatgtagtgctacacttactgatggtgttaataggttaagaaacgtggcgttgaaagattacaaattgattagcaacggtaccaagaaagattctgatatagtaacggttgcgcccgatcaattattgcagaggattactattgtcccaccaaagttgcgtcttgtaacattagctgctactttgaacaacattaccaaagatttcatcgcttccggtcaacagtccaaaacgttgcgtacaatcgtattcgtatcttgttctgacagcgtggagtttcattatgacgcattttctggaagtgacgggcaccataaaaatttaacgggtgattctgtaagattattgacaaaaggaaacactatgtttccttgtttttctgattctagggacccagatgtagtgatttataaattgcacggttctttatcccaacaaatgagaacctctacattgcagcattttgctcgtgataatgaagccaccaagggaaaacatcttattatgttctgtacagatgtcgcaagtagaggccttgaccttccccacgttggatctgttattgagttggatccaccatttgctgttgaagaccatttacatagagttggtcgtacagcaagggccggtgagaagggtgaaagtttgttatttttacttcctggcgaagaagaaaaatatatggactatatccagccgtatcatccgatgggttgggaattattgaaattcgataaagaaatattaatgccggctttcaaagatgtgaatgtcaacagaaatgataaattcattagaaaagatgagaaatcttccaaaaataaagacgtgggcgataaagaatatgagtgggataccaatgctacgacatggcatttgaatatagaaagaagagtagtgggagattccgcattcaaaaatttggccgttaaaggtttcattagtcatgtgagggcttacgcaacgcatatctctcaagaaaagaagtttttcaacgtgaagttcttacatttaggccatttagctaaaagttttgggttacgtgaaaggccaaaggctatgggattgcaaagtagtaaggatggtaatagtgaaaagaagccaactaaggaaaactctaaaaataaaatgtttcgtatggctcgtatggcagagaagcaaatagcaagtgagtttaactactga

SEQ ID NO: 6909 - DNA, 849 bp, Saccharomyces cerevisiae
atgagtattgacaacaagttgtttgttactgaagaggatgaggaagacaggacgcaggaccgtgctgatgttgaggatgaatctaacgacattgatatgatagcggatgagaacggaacaaacagcgctatagctaatgagcaagaggaaaaatccgaagaagtaaaagctgaagatgatactggtgaagaagaagaggatgacccagtgatcgaagagtttccattgaagatctccggagaagaggagtcactgcacgtgtttcagtatgctaatagaccaaggctagtaggacgcaaacctgctgagcatccgtttatctctgcagcaagatataaacccaagtcgcacctatgggaaatagatattcctttggatgagcaggccttctataacaaggataaggctgagagcgaatggaatggggttaatgtccaaacattaaaaggcgtgggtgtggaaaacaatggccaatatgcagcatttgtcaaagatatgcaggtttatttggtacctattgagagggtagcacaattgaagccatttttcaaatatatcgacgacgcaaatgtaacaagaaagcaagaggacgccagaaggaaccctaatccttcatcacaacgcgctcaagtggttaccatgtctgtaaagagcgtcaacgacccttcgcaaaacagactcactggctccctgctggcacataaagtcgccgatgaagaggctaatattgaattgacctgggcagaaggcacgtttgaacagttcaaagatactatcgtgaaagaagctgaagataaaactttagtagccttagagaaacaagaagactatatagataatctagtttga

SEQ ID NO: 6910 - DNA, 849 bp, Artificial Sequence
  Description of Artificial Sequence: Synthetic polynucleotide
atgagtattgacaacaagttgtttgttactgaagaggatgaggaagacaggacgcaggaccgtgctgatgttgaggatgaatctaacgacattgatatgatagcggatgagaacggaacaaacagcgctatagctaatgagcaagaggaaaaatccgaagaagtaaaagctgaagatgatactggtgaagaagaagaggatgacccagtgatcgaagagtttccattgaagatctccggagaagaggagtctttacacgtgtttcagtatgctaatagaccaaggttagtaggacgcaaacctgctgagcatccgtttatctctgcagcaagatataaacccaagtctcacctttgggaaatagatattcctttggatgagcaggccttctataacaaggataaggctgagagcgaatggaatggggttaatgtccaaacattaaaaggcgtgggtgtggaaaacaatggccaatatgcagcatttgtcaaagatatgcaggtttatttggtacctattgagagggtagcacaattgaagccatttttcaaatatatcgacgacgcaaatgtaacaagaaagcaagaggacgccagaaggaaccctaatccttcttctcaacgcgctcaagtggttaccatgtctgtaaagagcgtcaacgacccttctcaaaacagactcactggctccttattggcacataaagtcgccgatgaagaggctaatattgaattgacctgggcagaaggcacgtttgaacagttcaaagatactatcgtgaaagaagctgaagataaaactttagtagccttagagaaacaagaagactatatagataatttggtttga

SEQ ID NO: 6911 - DNA, 918 bp, Saccharomyces cerevisiae
atgtcggagtttaatattacagaaacttatctaaggtttttagaagaagatactgagatgacaatgccgattgctgccattgaagcattggtcacgctattaagaataaaaacaccagaaacagcggcagaaatgattaatacaataaaaagctccacggaagaacttattaaatccattccgaactcagtttccctgagagccggttgtgatattttcatgagatttgtcttaagaaatcttcatttatacggtgattgggaaaactgtaaacaacatttgattgaaaatggccagctttttgtatcgagagccaaaaaatcgcgtaacaagattgcagaaataggggtggatttcatagctgatgatgatatcatcttggtacatggttattcgagagcagtattttctttattaaatcatgcagcaaataagtttattaggttcagatgtgtggtgacagaatcaagacctagcaaacaagggaaccagctatatactttacttgaacaaaagggcatacccgtgactcttattgtcgatagcgcggttggagcggtaatcgataaggttgacaaagtgttcgttggtgctgagggtgttgctgaatcaggtggtattataaatctcgtgggtacctattcagtgggtgttttagcacataatgcaagaaaaccattctatgtggtcactgaaagtcacaaatttgttcgtatgtttccattgtcttcagatgatctacctatggccggccctcctttggatttcacacgtcgtacggacgatctagaagatgcattgcgtgggcccacgatcgactataccgcccaagaatacattactgcattgattacagatttaggggtcctcactccaagtgccgtttcagaagagttaatcaagatgtggtatgattaa

SEQ ID NO: 6912 - DNA, 918 bp, Artificial Sequence
  Description of Artificial Sequence: Synthetic polynucleotide
atgtctgagtttaatattacagaaacttatttgaggtttttagaagaagatactgagatgacaatgccgattgctgccattgaagcattggtcacgttattaagaataaaaacaccagaaacagcggcagaaatgattaatacaataaaaagctccacggaagaacttattaaatccattccgaactctgtttccttgagagccggttgtgatattttcatgagatttgtcttaagaaatcttcatttatacggtgattgggaaaactgtaaacaacatttgattgaaaatggccagctttttgtatctagagccaaaaaatctcgtaacaagattgcagaaataggggtggatttcatagctgatgatgatatcatcttggtacatggttattctagagcagtattttctttattaaatcatgcagcaaataagtttattaggttcagatgtgtggtgacagaatctagacctagcaaacaagggaaccagttatatactttacttgaacaaaagggcatacccgtgactcttattgtcgatagcgcggttggagcggtaatcgataaggttgacaaagtgttcgttggtgctgagggtgttgctgaaagtggtggtattataaatctcgtgggtacctattctgtgggtgttttagcacataatgcaagaaaaccattctatgtggtcactgaaagtcacaaatttgttcgtatgtttccattgtcttctgatgatttacctatggccggccctcctttggatttcacacgtcgtacggacgatttggaagatgcattgcgtgggcccacgatcgactataccgcccaagaatacattactgcattgattacagatttaggggtcctcactccaagtgccgtttctgaagagttaatcaagatgtggtatgattga

SEQ ID NO: 6913 - DNA, 2298 bp, Saccharomyces cerevisiae
atgagttttttatgggggtctacaaagtccaagaaaggcaagaataaaaaggctgcaggttctcttccgtcaggtgttgttccacagcaacgtgtgaaaccaacacgtaaaaacgttcctatagattatccaagaactttggaaaaagtacatggtgaaagtttaatctttaggacgtcccttttaagtgaattggtgagcactggtaaatctggtattggtcctccagacttgattcattgtacagagttagataaatttcacgatgagaaaataggtgaattcttttacatcacggggatcgacgcctcgagcgtctctatgccaattgcatttttgaagctgataaaatggaatgatggtaagaaactaaaatcagcatctttgaagaacgacgacatcacaacctactgcactttcaatatctttcaaaaattggacattagattaagatatgaatctgaagatgtttatcaagttaatatcgttgactgtttaaatggcaacaatgaaataccgttgagtgatcttatttgggaagaaactttcgttagctgttgcataagaagcgtaattattaattcagattttgaaagaaaaatacctgggctagtggaattaccatttgtttttgagaacagatgcgcgagtgattataaaagggtgatagattcgttatgcaaatttttgccaagatttttagaatgtggttgggattctacaaagagcgtctatgcaacgatactgaataactacctaactgaatcattattagtatttctgtctataactccagaattcataacagactatgcgatccaggttttagacaacttgatgacgaatgacccgtcaaattctagatattacgctattgtaattatttctatcatggagcgaagtaatgaccgcgatgtagaaatgatcaaacggatacacgagatattagacctattactacccgtactgtatggattgccatccgatgaaccttacatttctgatttgatcaattgcatcaccgatgtattaagcatccaagcaaggtttctattgaacaataacgactatgaactttctttatccatttccacattggccacgaatttatcttctgataattttgaatcttggtatctgttatctaaaggctatattttttcacaacagtatgataaggcactgctctcaatcaattcgatgccctgtttagcggaatatgatatcgttaaacaagcccagattaacgcttttaagttttatatgaactactacaaggcaccactatgtcatagcagagaacactgtaccatgacatcacacgagttaaatcacctcatgaatattatgcattatgaaaatgagttggagttgaagacaataatatttggacgcactgtaatgcccaatgaatctaagtatggatgtattgaagagatatggaataaatcctgtcttgaattaggacctatttgtggaccacagagtgacaatctcataaactttgtatctcagcaggaggtaaatacagtaggagatatgctgttactaaaacgaagcaaagaaaccagacaagagagttggtttataaagcaagtacgtcttctgttgatggaattagtcgctagaatcggctggaacgccttacttcagctaagatctgacgttttcgttatggagagtaaattcaaaatgatagaatcttcggacaagctgtccacagaattacgccagaagaggctctgtcagagatggtttgatgctatgtttctggacgtttacgaagatttaagtattagcacttcatctcaagaaaataaggctacggcgaaatacagcgggttggaatgggaactacttggcttaactctgcttcgagtgagtgacttacccgatgcagtagcgtgtctacgaactagtattttggcaaggtttgaccctattagttgtcaccatctgttgaacttttatttaaccatggattttaatgatgagtttatgagaaggtttgacgtcgatatcattttagatctattagtgaaattgatctcctttcggatacgattctatgatagatttcagatattttcccttcaagtactaaggaaactagagggacagctgggctccgaaattattaagaataaaataattaattctccttacgggcaagctggcatcacttcggtgatagattatatgcttgaatgcctctctaaaaataggaatgaagcctgcctagcctatgaacgccctcttccagatcttccttccactatcaaacctctggcagactaa

SEQ ID NO: 6914 - DNA, 2298 bp, Artificial Sequence
  Description of Artificial Sequence: Synthetic polynucleotide
atgagttttttatgggggtctacaaagtccaagaaaggcaagaataaaaaggctgcaggttctcttccgtctggtgttgttccacagcaacgtgtgaaaccaacacgtaaaaacgttcctatagattatccaagaactttggaaaaagtacatggtgaaagtttaatctttaggacgtcccttttaagtgaattggtgagcactggtaaatctggtattggtcctccagacttgattcattgtacagagttagataaatttcacgatgagaaaataggtgaattcttttacatcacggggatcgacgcctccagcgtctctatgccaattgcatttttgaagttaataaaatggaatgatggtaagaaattgaaatctgcatctttgaagaacgacgacatcacaacctactgcactttcaatatctttcaaaaattggacattagattaagatatgaatctgaagatgtttatcaagttaatatcgttgactgtttaaatggcaacaatgaaataccgttgagtgatcttatttgggaagaaactttcgttagctgttgcataagaagcgtaattattaattctgattttgaaagaaaaatacctgggttagtggaattaccatttgtttttgagaacagatgcgcgagtgattataaaagggtgatagattctttatgcaaatttttgccaagatttttagaatgtggttgggattctacaaagagcgtctatgcaacgatattgaataactacttgactgaatctttattagtatttttatctataactccagaattcataacagactatgcgatccaggttttagacaacttgatgacgaatgacccgtccaattctagatattacgctattgtaattatttctatcatggagagaagtaatgaccgcgatgtagaaatgatcaaaagaatacacgagatattagacttattattgcccgtattatatggattgccatccgatgaaccttacatttctgatttgatcaattgcatcaccgatgtattaagcatccaagcaaggtttttattgaacaataacgactatgaactttctttatccatttccacattggccacgaatttatcttctgataattttgaatcttggtatcttttatctaaaggctatattttttctcaacagtatgataaggcattgctctccatcaattctatgccctgtttagcggaatatgatatcgttaaacaagcccagattaacgcttttaagttttatatgaactactacaaggcaccattatgtcatagcagagaacactgtaccatgacaagtcacgagttaaatcacctcatgaatattatgcattatgaaaatgagttggagttgaagacaataatatttggacgcactgtaatgcccaatgaatctaagtatggatgtattgaagagatatggaataaatcctgtcttgaattaggacctatttgtggaccacagagtgacaatctcataaactttgtatctcagcaggaggtaaatacagtaggagatatgcttttattgaaaagaagcaaagaaaccagacaagagagttggtttataaagcaagtacgtcttttattgatggaattagtcgctagaatcggctggaacgccttacttcagttaagatctgacgttttcgttatggagagtaaattcaaaatgatagaatcttctgacaagttatccacagaattacgccagaagaggctctgtcagagatggtttgatgctatgtttttggacgtttacgaagatttaagtattagcacttcttctcaagaaaataaggctacggcgaaatacagcgggttggaatgggaattgcttggcttaactttacttcgtgtgagtgacttacccgatgcagtagcgtgtcttagaactagtattttggcaaggtttgaccctattagttgtcaccatcttttgaacttttatttaaccatggattttaatgatgagtttatgagaaggtttgacgtcgatatcattttagatttattagtgaaattgatctcctttagaataagattctatgatagatttcagatattttcccttcaagtattgaggaaattagagggacagttaggctccgaaattattaagaataaaataattaattctccttacgggcaagctggcatcacttctgtgatagattatatgcttgaatgcctctctaaaaataggaatgaagcctgcttagcctatgaacgccctcttccagatcttccttccactatcaaacctttggcagactga

SEQ ID NO: 6915 - DNA, 3102 bp, Saccharomyces cerevisiae
atgtcaggttctttctggaagtttggtcaggattactcgatagagtcaccggtttctaagattctaaatagtgcctttattaaaatcaataaggaccaagatgacgacgtacctaccggcacatgtgaagaaaatattgctgatgacgaagataactcttcacatgactacgctgcttctgaagataatgtagttaacgagaacgaagagaaggaagaagaaaatactctgcccactacagaatcggaatatgaaaattatagacctaatttggacgtcttagacgatttgctggatgatgacgaactgtatacggaattaatgtgttcaaatttcaagctactaatattcttgaagtatcctgatgttttatcaaaattgatagaatatgttaccaacgagaagattctcgacgaagaaacagatagcgctaaaaagccagagattattgaaggtgtaaacgatcatcctattttgatagaaagagacagaaaggataaaaaggaggacgctgaagaaggaggcgactcagaagaaactacaaatgatagcgatcatgactctggggacgaaagaagtgttgattctgaagagacaagcattactttgccaccggaatctgaggaacaagtggagactagaagggcaaggatagctgctgaaattttatcggctgatgtatggcctatatccgcagcaataatgcaaaataaggatcttcttggtagattgtggtcgatactagatcacccagctcccttaccgataccagcttccacctacttcatgaaaataaatgaaagacttctcgatatggatataacggggatgttagagtttatattaagccgagacagcttggttgcaaggttcttgacacatgttgacaatccgtctttgatggacttccttttgaaagttatctcgacggataaacctgactctcccacgggtgtcataaagatactaaaatcacaggaattaatacctaaacttttagatcatcttaatccagaatacggtatttccactcagtctgcggcaggcgattttattaaggcattcgtcacgttaagcactaactcaagcaatgaacttgcttcgggaataggtcctaatgaattgacaaggcaattagtatcagaagaaatgatagaaaagttgattaagataatgctaaagggcggtacatccttaagtaatggtgttggaattatcatagagttgatcaggaagaataactcagattatgatttcatccaactagtctacactaccctagaaagtcaccctcccactgatcgagatccaattcacttgatacatttagtcaaactttttgctaagcatatgcctgattttgctgatatgctggataaaaccaagttgccactaatggaaatgccattcggtaatattgaacctctgggatttgagaggtttaaaatctgtgaacttattgcagaactattgcactgttctaatatgacgctgctaaatgagcccaatggtgagatgattgcccaagaacgtgatatagaaagggccaaagaattagaaacttcaaccgaaaaggaaaatataacagctattgtggacaataaatcatcatattatgataaggattgcgtagagaaggatatcacagaaaatttaggcgctcttcaaataaataatcaaggaagtgaagaagatgaattaaatgatactggggtatcaagtgtaaaactagatgtgaaatcagacgcaaaggtagttgaggggctagaaaatgatgcttctggagtagagttgtatgatgaaaccttgtctgacacagaatccgtgagagaatgcctaagggaaaaaccgctagttggagacaggctgaagattgctctagaagacactaagatactgattagtatccttgatatgttcactgagttcccttggaataattttttgcataatgtaatttttgatattgcccagcaaatattcaatggtcccctcaaaactggttataataggttcctcttgaaagattatttggttgatgcatacctaactaaaaagatagtagatgcggataaggcatgtcaagactatgaaaaaaagaccggtttacgttatggttatatgggtcatttgacattagttgccgaagaaatatcgaagttcaaagagtatattgatgaaatgaagctaactttttgcaataccgctgtttcagatcgacttgaggaaccattttggaaagaatatagtgaaacgatcttggctgatacaagagagaagtataacaccgttttgggagattttggcaatgaccaagaaagcgatgacgatgttattaggaattctgattctgaggatataattggtgatacagagggcaacgaaaactacggaaatggagaaaacgatgaacttcttagtaacgggcatgattctgggaacatggatttatattataacttcaataataacgagaatgaagaaaatgaagaagattacgcagagtatagtgatgtggataataaaaattactataataacgtcgagactaacgacgatgattatgatagtgatgatggtaaatccaaaagtgccgaatcagagtttaccgataaaatatctgaacatagggatggcaatagtctctataatgaggacaatgatgaaaacgggagtgacaaatggacatcgggtacttcattgttccctccagaccattttcctagtaggtcacaaccttcagatcctaaactgcaagaccagaatatttttcaccatcagtttgactttgaaggtgttggcgatgacgatgactatatggatcctaatgatgatggccagtcatatgccagacctggtaatccattgtatactaccccgaaaacaccaccaagaccgaagactattcttttcaattctttatccgcattggataataatggcgaagacgaagaagtggcactaggcaccagtgttgatgatcgaatggataacgagatatcaagcgatgaagaagactccgaagatgaagatgaagagaatgatatgggcaatgaggagggctactcattatataggtcaagaagtaaagaagctttctga

SEQ ID NO: 6916 - DNA, 3102 bp, Artificial Sequence
  Description of Artificial Sequence: Synthetic polynucleotide
atgagtggttctttctggaagtttggtcaggattactctatagagtctccggtttctaagattttgaatagtgcctttattaaaatcaataaggaccaagatgacgacgtacctaccggcacatgtgaagaaaatattgctgatgacgaagataactcttctcatgactacgctgcttctgaagataatgtagttaacgagaacgaagagaaggaagaagaaaatactttacccactacagaaagtgaatatgaaaattatagacctaatttggacgtcttagacgatttgttggatgatgacgaattgtatacggaattaatgtgttctaatttcaagttattgatattcttgaagtatcctgatgttttatccaaattgatagaatatgttaccaacgagaagattctcgacgaagaaacagatagcgctaaaaagccagagattattgaaggtgtaaacgatcatcctattttgatagaaagagacagaaaggataaaaaggaggacgctgaagaaggaggcgactctgaagaaactacaaatgatagcgatcatgactctggggacgaaagaagtgttgattctgaagagacaagcattactttgccaccggaatctgaggaacaagtggagactagaagggcaaggatagctgctgaaattttatctgctgatgtatggcctatatccgcagcaataatgcaaaataaggatcttcttggtagattgtggtccatattggatcacccagctcccttaccgataccagcttccacctacttcatgaaaataaatgaaagacttctcgatatggatataacggggatgttagagtttatattaagcagagacagcttggttgcaaggttcttgacacatgttgacaatccgtctttgatggacttccttttgaaagttatctctacggataaacctgactctcccacgggtgtcataaagatattgaaatctcaggaattaatacctaaacttttagatcatcttaatccagaatacggtatttccactcagtctgcggcaggcgattttattaaggcattcgtcacgttaagcactaactccagcaatgaacttgcttctggaataggtcctaatgaattgacaaggcaattagtatctgaagaaatgatagaaaagttgattaagataatgttgaagggcggtacatccttaagtaatggtgttggaattatcatagagttgatcaggaagaataacagtgattatgatttcatccaattggtctacactaccttagaaagtcaccctcccactgatagagatccaattcacttgatacatttagtcaaactttttgctaagcatatgcctgattttgctgatatgcttgataaaaccaagttgccattaatggaaatgccattcggtaatattgaacctttgggatttgagaggtttaaaatctgtgaacttattgcagaattattgcactgttctaatatgacgttattgaatgagcccaatggtgagatgattgcccaagaacgtgatatagaaagggccaaagaattagaaacttctaccgaaaaggaaaatataacagctattgtggacaataaatcttcttattatgataaggattgcgtagagaaggatatcacagaaaatttaggcgctcttcaaataaataatcaaggaagtgaagaagatgaattaaatgatactggggtatctagtgtaaaattggatgtgaaaagtgacgcaaaggtagttgaggggttggaaaatgatgcttctggagtagagttgtatgatgaaaccttgtctgacacagaatccgtgagagaatgcctcagggaaaaaccgttggttggagacaggttaaagattgctttggaagacactaagatattgattagtatccttgatatgttcactgagttcccttggaataattttttgcataatgtaatttttgatattgcccagcaaatattcaatggtcccctcaaaactggttataataggttcctcttgaaagattatttggttgatgcatacttgactaaaaagatagtagatgcggataaggcatgtcaagactatgaaaaaaagaccggtttacgttatggttatatgggtcatttgacattagttgccgaagaaatatccaagttcaaagagtatattgatgaaatgaagttgactttttgcaataccgctgtttctgatagacttgaggaaccattttggaaagaatatagtgaaacgatcttggctgatacaagagagaagtataacaccgttttgggagattttggcaatgaccaagaaagcgatgacgatgttattaggaattctgattctgaggatataattggtgatacagagggcaacgaaaactacggaaatggagaaaacgatgaacttcttagtaacgggcatgattctgggaacatggatttatattataacttcaataataacgagaatgaagaaaatgaagaagattacgcagagtatagtgatgtggataataaaaattactataataacgtcgagactaacgacgatgattatgatagtgatgatggtaaatccaaaagtgccgaaagtgagtttaccgataaaatatctgaacatagggatggcaatagtctctataatgaggacaatgatgaaaacgggagtgacaaatggacatctggtacttctttgttccctccagaccattttcctagtaggtctcaaccttctgatcctaaattacaagaccagaatatttttcaccatcagtttgactttgaaggtgttggcgatgacgatgactatatggatcctaatgatgatggccagagttatgccagacctggtaatccattgtatactaccccgaaaacaccaccaagaccgaagactattcttttcaattctttatccgcattggataataatggcgaagacgaagaagtggcattgggcaccagtgttgatgatagaatggataacgagatatctagcgatgaagaagactccgaagatgaagatgaagagaatgatatgggcaatgaggagggctactctttatataggagcagaagtaaagaagctttctga

SEQ ID NO: 6917 - DNA, 2256 bp, Saccharomyces cerevisiae
atgtcagtacctaattccaaagagcagtcgctcctagatgatgcatccacattgttattgttttcaaaagggaaaaaaagagctgaagaagcttcaaaaataggctctaaaacagatactattgagcatgatgagtctcatgagagagaaaaaaaaggagcaatagaaatggcagcagcagcactggctacagcatccacagtttctttacctttaaagaaagctactgagcaatcggcggcagaagcagcaacatccacggcagcaaaagaagagaccgaaaatcaacctcaaaagcaacctcaatggccggtacctgattcgtatatagtcgatcctgacgcgggtataattacatgtatatgtgatttaaatgatgatgatggattcactatccaatgtgaccactgcaacagatggcagcatgctatttgctatggcatcaaagatattgggatggcacctgatgattacctttgcaactcatgtgatccaagagaggtagacattaacttggctaggaaaatacagcaggaacgcataaacgtaaaaacagtagaaccttcttcatcaaacaatagtgctagtaataagaataacggtcgggacagagcatcgagtacaactattagtgacgttggcgatagcttttcaacggatcaggacaatactaaccacagggacaaaagaaggaaaagaaacccatcaaataatagtatagactccaaaaacgaaagcgcttctgtcaattcttccgatggattgacttctatgcccaagaaaaaagagcatttcctgagtgcaaaagacgcatatggtgcaatatacttgcccttgaaagacaatgtgtttaaaagtgatctgatcgaaccgttcttaaataaacatatggatgataattgggtcatacaatatcctcataagacctttaaatctgtgtcaattgaagtcaaaccgtatgctgacattgcatattccaggacttacccaggcttcacgaaattaggagtttatctcaaaaaggactgcataaaaggtgatttcattcaagaaattttaggcgaattggacttctataaaaattatctcactgacccacgaaaccattacaggatatggggtacagctaaaagaagggtcattttccattcccattggccgatatatatagatgcacgcttatcaggcaattcaactaggtatttgagaagaagttgccagccgaatgttgaattagtaactataaaactgcaagatacagacaataggaatgacaaaagcagtggaagaaaatcaagtagaataaaatttgttttaagagctttgagagatatttcagaggatgaggagttatacatcaaatggcagtgggattcaaaacatcctatattaaaattaataaagggcatgacaatagactctttagatgaccttgaaaggtatgggctgataaattcggtagaaacaattttgagtaacggcgaatgcggctgtggaaataattctaaagattgttatttattgaaagtgaagagatacgcgcaaagtctttataaatctgtgaaatccagaggaaaaatgaacaacagatataaattaaatgaaattctcaaccaatataattgcaaaaagagacgtgagccaccaattttgcataggctagaagaaaaggctcaaaatactatagaaagagctccaatacttttgaataatttttatcgacaaaaattccttaatcgaaataatggtccaaaaattcctcaaaagaatactattgatagtacaaataatcctgatgatattgcaaaacccttcaaattcgccttatttgcacaacattcttctaatatttctgttcccaaaaaaaatgaaacttcagaaaaacctttaataattacgaagagcacagattatgacgaatcacacattaccaatattgaagaattaccaattccagttcttttaccaataaacaagacgtcaaggcaaactgcaaacgatgtcgaagagagtcaatcaaagaatgaacataaattaagtagaaccccttctctttcaaatttcaataaagaactgtcaaaggaagcacaacacagtcaagcaaaaacaaaagaaatcatgacagaagcttcggttaattcaaggcgagaatccactccagaaagtataatgcacttatcagatttttcgtcctcacaactgcattcgaaaaagaaattaagctttgcggattacagaaaaaaactactgaaataa

SEQ ID NO: 6918 - DNA, 2256 bp, Artificial Sequence
  Description of Artificial Sequence: Synthetic polynucleotide
atgtctgtacctaattccaaagagcagagcctcttggatgatgcatccacattgttattgttttccaaagggaaaaaaagagctgaagaagcttccaaaataggctctaaaacagatactattgagcatgatgagtctcatgagagagaaaaaaaaggagcaatagaaatggcagcagcagcattggctacagcatccacagtttctttacctttaaagaaagctactgagcaaagtgcggcagaagcagcaacatccacggcagcaaaagaagagaccgaaaatcaacctcaaaagcaacctcaatggccggtacctgattcttatatagtcgatcctgacgcgggtataattacatgtatatgtgatttaaatgatgatgatggattcactatccaatgtgaccactgcaacagatggcagcatgctatttgctatggcatcaaagatattgggatggcacctgatgattacctttgcaactcttgtgatccaagagaggtagacattaacttggctaggaaaatacagcaggaacgcataaacgtaaaaacagtagaaccttcttcttccaacaatagtgctagtaataagaataacggtagagacagagcaagtagtacaactattagtgacgttggcgatagcttttctacggatcaggacaatactaaccacagggacaaaagaaggaaaagaaacccatccaataatagtatagactccaaaaacgaaagcgcttctgtcaattcttccgatggattgacttctatgcccaagaaaaaagagcatttcttaagtgcaaaagacgcatatggtgcaatatacttgcccttgaaagacaatgtgtttaaaagtgatttgatcgaaccgttcttaaataaacatatggatgataattgggtcatacaatatcctcataagacctttaaatctgtgtccattgaagtcaaaccgtatgctgacattgcatattccaggacttacccaggcttcacgaaattaggagtttatctcaaaaaggactgcataaaaggtgatttcattcaagaaattttaggcgaattggacttctataaaaattatctcactgacccaagaaaccattacaggatatggggtacagctaaaagaagggtcattttccattcccattggccgatatatatagatgcacgcttaagtggcaattctactaggtatttgagaagaagttgccagccgaatgttgaattagtaactataaaattacaagatacagacaataggaatgacaaaagcagtggaagaaaatctagtagaataaaatttgttttaagagctttgagagatatttctgaggatgaggagttatacatcaaatggcagtgggattctaaacatcctatattaaaattaataaagggcatgacaatagactctttagatgaccttgaaaggtatgggttgataaattctgtagaaacaattttgagtaacggcgaatgcggctgtggaaataattctaaagattgttatttattgaaagtgaagagatacgcgcaaagtctttataaatctgtgaaatccagaggaaaaatgaacaacagatataaattaaatgaaattctcaaccaatataattgcaaaaagagacgtgagccaccaattttgcataggttagaagaaaaggctcaaaatactatagaaagagctccaatacttttgaataatttttatagacaaaaattccttaatagaaataatggtccaaaaattcctcaaaagaatactattgatagtacaaataatcctgatgatattgcaaaacccttcaaattcgccttatttgcacaacattcttctaatatttctgttcccaaaaaaaatgaaacttctgaaaaacctttaataattacgaagagcacagattatgacgaatctcacattaccaatattgaagaattaccaattccagttcttttaccaataaacaagacgtctaggcaaactgcaaacgatgtcgaagagagtcaatccaagaatgaacataaattaagtagaaccccttctctttctaatttcaataaagaattatccaaggaagcacaacacagtcaagcaaaaacaaaagaaatcatgacagaagcttctgttaattctaggagagaatccactccagaaagtataatgcacttaagtgatttttcttcctctcaattgcattctaaaaagaaattaagctttgcggattacagaaaaaaattattgaaatga

SEQ ID NO: 6919 - DNA, 822 bp, Saccharomyces cerevisiae
atgtcatatttgccgacttattccaacgacttgccagcaggcccgcaaggccagaggaggcgtaataatggtaatgaaaacgatgcaagacaaggctacggtcagcaatctgtgccgatggtaatcaggaggcttttcaaaacgccaaagaatttagatctcgagacagccagctgggaaatgttccatttgattttccatccaagaaaagcttatagatcaatatattatcagcgacagacgaaaaatcagtgggcgagagatgatccttcctttttcatcttccaaatagccttaatttcactcagttctattatttggtcgatttataattcaggtttcaacaacgacagtgatatgggggccttgagcattataggtcattttttcaaaagtttggtaatgatggtgattttagattttttcatatttggatttattatggcaactattttttaccttttgttgaataggtcacattttaaattcaaatcgagccaaaatagtgtggtagagtgggcttattgtttcgacgttcattgtaattcatttttaatcatcctactgtgcctatacttcattcagtttttactactgcccataattaatttacaaaactggatttccttactcattggtaattcgttatattgttttgctattggccattactttattttaaccttttatggatacaaccagttgccattcttgaaaaatttgaactttatacttttaccaacattaggattatcgataatctatttaatcagtttatttggcatcgacttatccaagaaattaagcttttacaattattaa

SEQ ID NO: 6920 - DNA, 822 bp, Artificial Sequence
  Description of Artificial Sequence: Synthetic polynucleotide
atgtcttatttgccgacttattccaacgacttgccagcaggcccgcaaggccagaggaggcgtaataatggtaatgaaaacgatgcaagacaaggctacggtcagcaatctgtgccgatggtaatcaggaggcttttcaaaacgccaaagaatttagatctcgagacagccagctgggaaatgttccatttgattttccatccaagaaaagcttatagaagtatatattatcagagacagacgaaaaatcagtgggcgagagatgatccttcctttttcatcttccaaatagccttaatttctctcagttctattatttggtctatttataattctggtttcaacaacgacagtgatatgggggccttgagcattataggtcattttttcaaaagtttggtaatgatggtgattttagattttttcatatttggatttattatggcaactattttttaccttttgttgaataggagccattttaaattcaaaagtagccaaaatagtgtggtagagtgggcttattgtttcgacgttcattgtaattcttttttaatcatcttattatgcttatacttcattcagtttttattattgcccataattaatttacaaaactggatttccttactcattggtaattctttatattgttttgctattggccattactttattttaaccttttatggatacaaccagttgccattcttgaaaaatttgaactttatacttttaccaacattaggattatctataatctatttaatcagtttatttggcatcgacttatccaagaaattaagcttttacaattattga

SEQ ID NO: 6921 - DNA, 5052 bp, Saccharomyces cerevisiae
atgtctaacgtgtcaacagcgtctggaactcacttcgctccacctcaggcagatagatcggtgactgaagaagtagatagagtaaattcgagaccagatgagttagaaaaccaagaagtattgcggcaattacctgagaatggcaatctgactagcagtttacaaagagaaaaacgaagaactcccaacggcaaggaggcggagaggaagcatgcattgcccaaatcctttgtagatagaaacctgagtgatgtgtcaccgaaccactcattagaccatattatgcactctaatgaacatgatcctcgtcgaggttctgatgaggaaaatatgcaccggctctacaacaatctccatagcagtaacaataatgttcattctaagcggaattctaaaagagaggaagaaagagcccctcaaaggcgttcttcttctgtagcttacacccaacagcagttcaatggctggaagaaagagtttggccacgcttttaagaaaatctctgctattggtagactgaaatccagcgtaaattctcctacaccggctggaagcggccatcgtcataaccagcaccagcatcaacaagtaaacgaagaagatttgtacacacaaagactagcctctgatttattagattcgttattggcaggatgcccggcctcattgttcgcaagcacgcaatttctgagagacgaacatgggaagagaagggctcctctgctattagctaaactagatgtaagagtgtctcccttgaaaaatgacaacaacattttggatattaccaatagcaaccataaccatcgtggtaacaacaacaacaatactggcgagaattctgataggagaccctctattccaaggagctccagcattataagcatttcttcgaatgtggcggaatttatgtatagcaggaacgaaaactctttatttagaatacacttggaatatgggattgatgaagacaggctcaaatggtctattataagaagttataaagatatcaaatcactacatcacaaattgaaaatcgtcgcgttccaacaactcactataagcaagctttatagtgataacaacagatatcattcgttacaacttccgcatttcccccattataaagaaatggttaaagaaagaaatgtaatggagaaaaaagcagaaaataaaccatcctctgcagcctcagctcctcatacatcggaaaataacaataacgataatggcagcaacattacatcgttagaaactttatcatcttctgaaatatctgagtttaatatagataacgtcaaaatgaaacatttacaagacttaattgacgaacctgacgatttctcccaaccgatacatttgaggctagaaaggtatttgagactactgaacattgcattatgtttgagacctcatgcaaatagattgtttgaattttacgaattatctcccttaggcaatttattaagtcgtgaaagtgggttccagggcaaacaggggtatttagtaattagatctactgccaaggcccaaggttggagagtttctcattttggtaaacatgcgtttaaagacatgatcgacagacatactaccaaatggttcctggtaagaaattcttacctaacttacgtgtcggatctttcttcgacaactcctttagacgtattcttaatagattggaaatttaaggttagattttctgggaacaagaataacatacttgataacgaaaacgagatcaactggatcattcatgatcccaatttagaaataaatgacgaactagaagagttcggtattgaaaatgatgccaataatatcctagacaagaatggaaaatcgaaaacacaccaaaagaagtccaatatatcttcaaaactattattattgaccctagaaaacagtgaaaggaaactgaaaattatttgcaaatcagagagttcgttaaagcaatggatgagttcaattatcaaaatgtctacctcaacaccttggtcgaaaccaaatagatttggtagtttcgcacctgtaagaacaaattcgttttgcaaatttttggtagatgggcgtgattatttttggtcgttaagcgaggccctcttaatggcaaaggatgtcatatatatccatgattggtggctatcccctgaattatacttgcgacgtccggtgaaaggcaaccagggatttagaattgatcgtatgctgaaaagttgtgcagaaaaaggtatcaaaatttttattgtgatttataggaatgtggggaatattgttgggacagatagtctttggaccaagcattctatgctaaatttacatccaaatatacatatcataaggtctcccaatcaatggctacaaaatacatatttttgggcacaccacgagaagtttgtcgttattgatgaaacatttgcatttattggtggtacagatttatgttatggtagatatgatacttttgaacacgttctacgagatgatgcagaatctttattagatcaaaattttcctggtaaggattattcaaatgccagaattgctgattttcatgatttagataaaccattcgaatcaatgtatgatagaaaagtcattccgaggatgccatggcatgatgtgcaaatgatgactttgggtgagccagcaagagacttagcccgacattttgttcaaagatggaattacttattgagagctaagagacctagtaggttaactccattactaaccccgccttcagatttaactgctgaagaattgaagagtttgccgatgttcgaaattctacgcgaaaaatcgacttgtgaaactcaaatacttagaagtgctgggaactggtctcttgggctaaaggaaacggaatgctcaattcaaaatgcttacctgaagttaattgaacaaagtgaacactttatttatattgagaatcaattcttcattacatcaactgtctggaacgggacttgcgttttgaataaaattggtgatgctctcgttgataggatagtcaaagctaatcaggagaaaaaaccttggaaagcctttattcttatcccactaatgccaggattcgattctccagtagatactgcagaagcctcaagtcttcgtttaattatgcaattccaatatcaatcaatttcaagaggtgaacattctacatttagtaaactgaagaaactaaatattgacccagctcaatatattcagttcttttcactaagaaaatggtcgacttttgcgcctaatgaaagattaatcaccgagcagctctacgttcatgctaaaattctgattgctgatgacagaagatgtattatagggtctgctaatattaacgaaagatcacaactgggtaatagagatagtgaggtggcaattcttattagagacaccgacttgataaagaccaaaatgaatggtgacgattactacgcgggaaaatttccttgggaattaaggcagcgattaatgagggaacatttaggttgtgatgtagatcttgttgagtttgttgaaaagaaatttgaaaggtttgaaaagtttgctgcaaagaattatgaaaaacttcataccctaagtaaggagggagatagtggtaacaattggagcgatcgagaaatgatcgattccgctatgattgagctaggttatcgtgaaatatttggttgtaaatttagccctcaatggaagagtggtcatggaaacagtgttgatgatggaagcactcagtgtggcataaatgaaaaagaagtgggaagagaagatgaaaacgtttatgaaaaattcttcaattctgtggactacggtaaatcatcacgtaagagaacgcctctgcccaaacataattttgcatctttagggctaacattcaaccacagggcaggaattgaaaatgtcggtatacgagaccacaaagtcttaagtactgatccaagattaagaaagaatgatgaacataaaaaagaggttgatggctacggtcccgattgttggaaaaaggaatccaacaaaaaattcaaggccgatgcaactgaacagctaaaggagtgggcattgaactcattggcctcgaaagttcttgacgataaagaaatgataaaatcagaaattccagaaggattttcaaattatttgcccaatgagaaagatctagaaatgtatctcacggataaaactgttaccaatagaaacaaatggagtatgctcaaaaggatatgctacttgcaatatttatctcataaactcgacgaaagaaaaacacagagattgaagaaaatcaaagatatgagaagacatttaagttcaagcacagaaagtaccagaaatgggtctaatagtctgccattaaacgaaaagagcaatgaaggagaaagcactaatgtcgaccaagatatcgaaggcgatgaatatcatagattgcacgaagatattttgaaaaatcaagaactagatgatggttcactggacgatctactttctcagataattcctaagatcactaactttaacagtggtgaaattgatgacgcaaaaaaagaagagttattgaaactcaacttcattgacccgtattccttcgaggatcctcttatttcttcgttttctgaagggctatggttcactatagccttgagaaatacattactctataaattagtgtttcattgtcaacccgataatgctgtacaaaattggaaagaatatggagaatttactgaattagaacaagaatttcaaataaaccaggaaaagttgattgacttagaggctgaaaatattaattctactactacaaatgttgtagataaggatagggaaaaggaaaaaatgagaaaagccgctgaattgagaatgaagttatccggtagtttgctttatggattcaatcaaaaggtttttgacaaacatacggcgcagagaatcttggaaaggatccacggtcatttggtcattttcccaaccgaatggttagctaaagaagttgagagtagaaattggatttttaactcggatagactttctccaatggaaatctacaattaa

SEQ ID NO: 6922 - DNA, 5052 bp, Artificial Sequence
  Description of Artificial Sequence: Synthetic polynucleotide
atgtctaacgtgtctacagcgtctggaactcacttcgctccacctcaggcagatagatctgtgactgaagaagtagatagagtaaattctagaccagatgagttagaaaaccaagaagtattgagacaattacctgagaatggcaatttaactagcagtttacaaagagaaaaaagaagaactcccaacggcaaggaggcggagaggaagcatgcattgcccaaatcctttgtagatagaaacttgagtgatgtgtctccgaaccactctttagaccatattatgcactctaatgaacatgatcctcgtcgtggttctgatgaggaaaatatgcacagactctacaacaatctccatagcagtaacaataatgttcattctaagagaaattctaaaagagaggaagaaagagcccctcaaaggcgttcttcttctgtagcttacacccaacagcagttcaatggctggaagaaagagtttggccacgcttttaagaaaatctctgctattggtagattgaaatccagcgtaaattctcctacaccggctggaagcggccatcgtcataaccagcaccagcatcaacaagtaaacgaagaagatttgtacacacaaagattggcctctgatttattagattctttattggcaggatgcccggcctctttgttcgcaagcacgcaatttttaagagacgaacatgggaagagaagggctcctttattattagctaaattggatgtaagagtgtctcccttgaaaaatgacaacaacattttggatattaccaatagcaaccataaccatcgtggtaacaacaacaacaatactggcgagaattctgataggagaccctctattccaaggagctccagcattataagcatttcttccaatgtggcggaatttatgtatagcaggaacgaaaactctttatttagaatacacttggaatatgggattgatgaagacaggctcaaatggtctattataagaagttataaagatatcaaatctttgcatcacaaattgaaaatcgtcgcgttccaacaactcactataagcaagctttatagtgataacaacagatatcattctttacaacttccgcatttcccccattataaagaaatggttaaagaaagaaatgtaatggagaaaaaagcagaaaataaaccatcctctgcagcctctgctcctcatacaagtgaaaataacaataacgataatggcagcaacattacaagtttagaaactttatcttcttctgaaatatctgagtttaatatagataacgtcaaaatgaaacatttacaagacttaattgacgaacctgacgatttctcccaaccgatacatttgaggttagaaaggtatttgagattattaaacattgcattatgtttgagacctcatgcaaatagattgtttgaattttacgaattatctcccttaggcaatttattaagtcgtgaaagtgggttccagggcaaacaggggtatttagtaattagatctactgccaaggcccaaggttggagagtttctcattttggtaaacatgcgtttaaagacatgatcgacagacatactaccaaatggttcttagtaagaaattcttacttgacttacgtgtctgatctttcttctacaactcctttagacgtattcttaatagattggaaatttaaggttagattttctgggaacaagaataacatacttgataacgaaaacgagatcaactggatcattcatgatcccaatttagaaataaatgacgaattggaagagttcggtattgaaaatgatgccaataatatcttggacaagaatggaaaatctaaaacacaccaaaagaagtccaatatatcttctaaattattattattgaccttagaaaacagtgaaaggaaattgaaaattatttgcaaaagtgagagttctttaaagcaatggatgagttctattatcaaaatgtctacctctacaccttggtccaaaccaaatagatttggtagtttcgcacctgtaagaacaaattctttttgcaaatttttggtagatgggcgtgattatttttggtctttaagcgaggccctcttaatggcaaaggatgtcatatatatccatgattggtggttatcccctgaattatacttgagacgtccggtgaaaggcaaccagggatttagaattgatcgtatgttgaaaagttgtgcagaaaaaggtatcaaaatttttattgtgatttataggaatgtggggaatattgttgggacagatagtctttggaccaagcattctatgttgaatttacatccaaatatacatatcataaggtctcccaatcaatggttacaaaatacatatttttgggcacaccacgagaagtttgtcgttattgatgaaacatttgcatttattggtggtacagatttatgttatggtagatatgatacttttgaacacgttttaagagatgatgcagaatctttattagatcaaaattttcctggtaaggattattctaatgccagaattgctgattttcatgatttagataaaccattcgaaagtatgtatgatagaaaagtcattccgaggatgccatggcatgatgtgcaaatgatgactttgggtgagccagcaagagacttagccagacattttgttcaaagatggaattacttattgagagctaagagacctagtaggttaactccattattaaccccgccttctgatttaactgctgaagaattgaagagtttgccgatgttcgaaattttgcgcgaaaaatctacttgtgaaactcaaatacttagaagtgctgggaactggtctcttgggttgaaggaaacggaatgctccattcaaaatgcttacttgaagttaattgaacaaagtgaacactttatttatattgagaatcaattcttcattacatctactgtctggaacgggacttgcgttttgaataaaattggtgatgctctcgttgataggatagtcaaagctaatcaggagaaaaaaccttggaaagcctttattcttatcccattaatgccaggattcgattctccagtagatactgcagaagcctccagtcttcgtttaattatgcaattccaatatcaatctatttctagaggtgaacattctacatttagtaaattgaagaaattgaatattgacccagctcaatatattcagttcttttctttgagaaaatggtctacttttgcgcctaatgaaagattaatcaccgagcagctctacgttcatgctaaaattttaattgctgatgacagaagatgtattatagggtctgctaatattaacgaaagatctcaattgggtaatagagatagtgaggtggcaattcttattagagacaccgacttgataaagaccaaaatgaatggtgacgattactacgcgggaaaatttccttgggaattaaggcagagattaatgagggaacatttaggttgtgatgtagatcttgttgagtttgttgaaaagaaatttgaaaggtttgaaaagtttgctgcaaagaattatgaaaaacttcataccttaagtaaggagggagatagtggtaacaattggagcgatagagaaatgatcgattccgctatgattgagttaggttatcgtgaaatatttggttgtaaatttagccctcaatggaagagtggtcatggaaacagtgttgatgatggaagcactcagtgtggcataaatgaaaaagaagtgggaagagaagatgaaaacgtttatgaaaaattcttcaattctgtggactacggtaaatcttctcgtaagagaacgcctttgcccaaacataattttgcatctttagggttgacattcaaccacagggcaggaattgaaaatgtcggtataagagaccacaaagtcttaagtactgatccaagattaagaaagaatgatgaacataaaaaagaggttgatggctacggtcccgattgttggaaaaaggaatccaacaaaaaattcaaggccgatgcaactgaacagttgaaggagtgggcattgaactctttggcctccaaagttcttgacgataaagaaatgataaaaagtgaaattccagaaggattttctaattatttgcccaatgagaaagatttggaaatgtatctcacggataaaactgttaccaatagaaacaaatggagtatgctcaaaaggatatgctacttgcaatatttatctcataaactcgacgaaagaaaaacacagagattgaagaaaatcaaagatatgagaagacatttaagtagtagcacagaaagtaccagaaatgggtctaatagtttaccattaaacgaaaagagcaatgaaggagaaagcactaatgtcgaccaagatatcgaaggcgatgaatatcatagattgcacgaagatattttgaaaaatcaagaattagatgatggttctttggacgatttactttctcagataattcctaagatcactaactttaacagtggtgaaattgatgacgcaaaaaaagaagagttattgaaactcaacttcattgacccgtattccttcgaggatcctcttatttcttctttttctgaagggttgtggttcactatagccttgagaaatacattactctataaattagtgtttcattgtcaacccgataatgctgtacaaaattggaaagaatatggagaatttactgaattagaacaagaatttcaaataaaccaggaaaagttgattgacttagaggctgaaaatattaattctactactacaaatgttgtagataaggatagggaaaaggaaaaaatgagaaaagccgctgaattgagaatgaagttatccggtagtttgctttatggattcaatcaaaaggtttttgacaaacatacggcgcagagaatcttggaaaggatccacggtcatttggtcattttcccaaccgaatggttagctaaagaagttgagagtagaaattggatttttaacagtgatagactttctccaatggaaatctacaattga

SEQ ID NO: 6923 - DNA, 315 bp, Saccharomyces cerevisiae
atggcgtattcatcgttatgtttgtgtcttttgttcaacccaaagggctgtagcaatcttcacccgtttgtcgttgataacgagtttccaccttatcacttatcactagtgctaatcaaacagcaaagaatgcttgatagaaaccgatcctgggcttatctcgctgcattgtggcggcatccctggactgtaatcagcaagtgttgcttagtatatatatacatccagcgtcagcttgaatttggatacagttactgttttttcgattttctcttggttattctttctgagacagtagtaattttgtattactga

SEQ ID NO: 6924 - DNA, 315 bp, Artificial Sequence
  Description of Artificial Sequence: Synthetic polynucleotide
atggcgtattcttctttatgtttgtgtcttttgttcaacccaaagggctgtagcaatcttcacccgtttgtcgttgataacgagtttccaccttatcacttaagtttagtgttaatcaaacagcaaagaatgcttgatagaaacagatcctgggcttatctcgctgcattgtggagacatccctggactgtaatcagcaagtgttgcttagtatatatatacatccagcgtcagcttgaatttggatacagttactgttttttcgattttctcttggttattctttctgagacagtagtaattttgtattactga

SEQ ID NO: 6925 - DNA, 810 bp, Saccharomyces cerevisiae
atggtgcttagtgattcgttgaagctgccctcgcctacactttcagctgctgctggagtggatgattgtgacggagaggaccaccccacgtgccagaattgtttcactgtcaaaacgcccctatggagaagagatgaacacggtactgttctctgtaatgcatgtggcctcttcctgaagttgcacggggaaccaaggcctatcagcttgaagacggacaccattaagtcaagaaataggaaaaagctgaataacaacaatgtgaacactaatgccaatacccattctaacgacccaaataaaatattcaagagaaagaagagactgcttacaactggtggtggttcattacctacgaataatccgaaggtttctattctggaaaagtttatggtgagcgggtccattaagccactgttaaaaccaaaggaaaccgttcccaacacaaaggagtgctccacgcagcggggaaaattttctttggacccctgcgaacctagtgggaaaaactacctctatcagatcaacggttcagatatatacacgtcaaatatagagctgacaaggctgcctaatttgtcaacattattagaaccctcacctttttcagattccgctgtaccagaaatagaactaacttggaagctacataatgaggaggaggtaatcaaattgaagaccaagataagcgaattggagttggtgacagacctatacaaaaagcacatattccaactgaacgaaaaatgcaagcaactggaagtggaactacactccagagcttcagtacaatctcacccacaacattaa

SEQ ID NO: 6926 - DNA, 810 bp, Artificial Sequence
  Description of Artificial Sequence: Synthetic polynucleotide
atggtgcttagtgattctttgaagttgccctctcctacactttctgctgctgctggagtggatgattgtgacggagaggaccaccccacgtgccagaattgtttcactgtcaaaacgcccctttggagaagagatgaacacggtactgttctctgtaatgcatgtggcctcttcttgaagttgcacggggaaccaaggcctatcagcttgaagacggacaccattaagtctagaaataggaaaaagttgaataacaacaatgtgaacactaatgccaatacccattctaacgacccaaataaaatattcaagagaaagaagagattacttacaactggtggtggttctttacctacgaataatccgaaggtttctattttggaaaagtttatggtgagcgggtccattaagccattattaaaaccaaaggaaaccgttcccaacacaaaggagtgctccacgcagaggggaaaattttctttggacccctgcgaacctagtgggaaaaactacctctatcagatcaacggttctgatatatacacgtccaatatagagttgacaaggttgcctaatttgagtacattattagaaccctctcctttttctgattccgctgtaccagaaatagaattgacttggaagttgcataatgaggaggaggtaatcaaattgaagaccaagataagcgaattggagttggtgacagacttgtacaaaaagcacatattccaattgaacgaaaaatgcaagcaattggaagtggaattgcactccagagcttctgtacaatctcacccacaacattga

SEQ ID NO: 6927 - DNA, 615 bp, Saccharomyces cerevisiae
atgtcacgtaattctgcagcaggtttggaaaacactcttttccaactaaagtttacatcaaaacaattacaaaagcaagccaataaagcctcaaaggaagaaaaacaggaaactaataagctcaaacgtgctcttaatgaaaatgaagatatatctcgtatatatgcatccaatgctataagaaagaaaaatgaaagattacaactgttgaagttggcatcacgggtggattcggtcgcatcaagggtacaaaccgccgtcacgatgaggcaggtgtcagcatcaatggggcaagtttgcaaaggcatggataaggcgttacagaatatgaacctccaacagataaccatgataatggacaagttcgaacagcaattcgaagatttggacaccagtgttaacgtatatgaagatatgggtgtgaattcggatgccatgctggtggacaacgataaggtggatgaactaatgagcaaagttgctgacgaaaatggcatggaattgaagcaaagtgcaaaactggacaatgttccggagataaaggcgaaagaggttaatgttgacgacgaaaaggaagacaaacttgcacaaagactaagagcattgaggggctga

SEQ ID NO: 6928 - DNA, 615 bp, Artificial Sequence
  Description of Artificial Sequence: Synthetic polynucleotide
atgtcccgtaattctgcagcaggtttggaaaacactcttttccaattgaagtttacaagtaaacaattacaaaagcaagccaataaagcctccaaggaagaaaaacaggaaactaataagctcaaacgtgctcttaatgaaaatgaagatatatctcgtatatatgcatccaatgctataagaaagaaaaatgaaagattacaattattgaagttggcaagcagagtggattctgtcgcaagcagggtacaaaccgccgtcacgatgaggcaggtgagcgcatctatggggcaagtttgcaaaggcatggataaggcgttacagaatatgaacctccaacagataaccatgataatggacaagttcgaacagcaattcgaagatttggacaccagtgttaacgtatatgaagatatgggtgtgaattctgatgccatgttggtggacaacgataaggtggatgaattgatgagcaaagttgctgacgaaaatggcatggaattgaagcaaagtgcaaaattagacaatgttccggagataaaggcgaaagaggttaatgttgacgacgaaaaggaagacaaacttgcacaaagattgagagcattgaggggctga

SEQ ID NO: 6929 - DNA, 1932 bp, Saccharomyces cerevisiae
atgggttcgggcgatactagaggagaaagctctctggtagctaaaccaatcgaaattatacttaataagctaccacatgccatactagcgcaacaacaatttcaaaaatatataacgagccccatctacagatatctttccaaacttctactgttcagagaggtggcttggcccgaaagtacaaaagatacccagaaaggacaagtagggatattttcctttcaaaacaattatgcagactctgcaacaactttcagaatacttgctcatttagatgagcagcgatacccgctacccaacggtgccgctgaaaagaatttaccttctttatttgaaggattcaaagctaccgtttccatcattcaacagagactgttgttagacaatgtagacggggccacgaatagtgataaggaaaaatacgttcaattgccggatattaatactggttttgtgaataaaacgtactctagaattgacctaacacatttacttgaggatgtagaaactaacgtggaaaatctgtcaatcaataaaacgttagagatggatgagttgaccagattagattccatgatcaacgaactagaatccaggaaattaaaaatcctggaaagggttaagcacattgatagtaagtctaccaatcttgagaatgatgtaacactgataaaggatagaataaattttatcgaggaatacaatttggaagctgatcgtgaacagagcttacggaagcaaatggaagaagaaagatcatctgaagcgtcgtccttcacgcaaaatgaagaagccatatcgtcgttatgtgatgttgaaagtaaggatacgagattaaaagatttttacaagatgccccatgaaaaaagccacgataaaaacaggcaaattatctcagaaacatatagccgaaataccacggctttcagaatgacaataccccatggcgaacatggaaacagcataaccgcattagactttgatacaccatggggaaccttgtgctcatcaagctaccaagatcgtatagtaaaagtgtgggatttgaaccatgggatacaagttggagagctgcctggtcaccttgctactgttaattgcatgcaaatagataagaaaaattacaatatgttgattactggaagtaaggatgccactctgaagttatgggacttaaatctgagtagagaaatatatttggaccatagtccattgaaggagaagacagaagaaattgttacaccatgtatccataattttgagttacataaagacgaaatcacagccctgtcttttgattctgaagctttggttagcggatctagggacaaaaaaatattccactgggatttaacgacgggcaaatgtattcagcaacttgaccttatcttcacacctacacatagcgacattaaaatgcctgcacgttcattaaacaatggtgcatgtttacttggcacagaagcaccaatgataggagccctccaatgttacaactctgcattagcaacaggaacaaaagatggcattgtgcgactatgggatctaagagttggcaaaccggtgagattactagaaggccataccgatggaattacaagtttgaagtttgattccgaaaaattggtaacaggctcgatggacaatagcgtaaggatttgggatttgaggacaagctcaattcttgacgtgattgcttacgatttaccagtatcgtccttagatttcgatggtaaattaatcactgttggcgcaaacgagggaggggttaatgtctttaacatggagcgcgatgagcattggatgactcctgaaccaccgcattcactagatggggatgagctgagcagaagaattgctattgtcaagtataaagacggatttctgatcaatgggcacaacgatggagacatcaatgtatggacactttag

SEQ ID NO: 6930 - DNA, 1932 bp, Artificial Sequence
  Description of Artificial Sequence: Synthetic polynucleotide
atgggttctggcgatactagaggagaaagctctttagtagctaaaccaatcgaaattatacttaataagttaccacatgccatattggcgcaacaacaatttcaaaaatatataacgagccccatctacagatatctttccaaacttttgttattcagagaggtggcttggcccgaaagtacaaaagatacccagaaaggacaagtagggatattttcctttcaaaacaattatgcagactctgcaacaactttcagaatacttgctcatttagatgagcagagatacccgttgcccaacggtgccgctgaaaagaatttaccttctttatttgaaggattcaaagctaccgtttccatcattcaacagagattattgttagacaatgtagacggggccacgaatagtgataaggaaaaatacgttcaattgccggatattaatactggttttgtgaataaaacgtactctagaattgacttgacacatttacttgaggatgtagaaactaacgtggaaaatttatctatcaataaaacgttagagatggatgagttgaccagattagattccatgatcaacgaattggaatccaggaaattaaaaatcttggaaagggttaagcacattgatagtaagtctaccaatcttgagaatgatgtaacattaataaaggatagaataaattttatcgaggaatacaatttggaagctgatcgtgaacagagcttaagaaagcaaatggaagaagaaagatcttctgaagcgtcttccttcacgcaaaatgaagaagccatatcttctttatgtgatgttgaaagtaaggatacgagattaaaagatttttacaagatgccccatgaaaaaagccacgataaaaacaggcaaattatcagtgaaacatatagcagaaataccacggctttcagaatgacaataccccatggcgaacatggaaacagcataaccgcattagactttgatacaccatggggaaccttgtgctcttctagctaccaagatcgtatagtaaaagtgtgggatttgaaccatgggatacaagttggagagcttcctggtcaccttgctactgttaattgcatgcaaatagataagaaaaattacaatatgttgattactggaagtaaggatgccactttgaagttatgggacttaaatttgagtagagaaatatatttggaccatagtccattgaaggagaagacagaagaaattgttacaccatgtatccataattttgagttacataaagacgaaatcacagccttatcttttgattctgaagctttggttagcggatctagggacaaaaaaatattccactgggatttaacgacgggcaaatgtattcagcaacttgaccttatcttcacacctacacatagcgacattaaaatgcctgcacgttccttaaacaatggtgcatgtttacttggcacagaagcaccaatgataggagccctccaatgttacaactctgcattagcaacaggaacaaaagatggcattgtgagattatgggatttgagagttggcaaaccggtgagattattggaaggccataccgatggaattacaagtttgaagtttgattccgaaaaattggtaacaggctctatggacaatagcgtaaggatttgggatttgaggacaagctctattcttgacgtgattgcttacgatttaccagtatcttccttagatttcgatggtaaattaatcactgttggcgcaaacgagggaggggttaatgtctttaacatggagcgcgatgagcattggatgactcctgaaccaccgcattctttagatggggatgagttgagcagaagaattgctattgtcaagtataaagacggatttttgatcaatgggcacaacgatggagacatcaatgtatggacactttga

SEQ ID NO: 6931 - DNA, 888 bp, Saccharomyces cerevisiae
atgggggaaagcttggatagatgtatagatgatattaatagggcggtggactctatgtccacactctatttcaagccaccaggaatttttcataatgccatcctacagggagcaagcaacaaggcaagcattagaaaagacattactagactaataaaggactgtaaccacgacgaggcgtatcttctgttcaaagtcaaccctgagaaacaatccgtttcacgtagagacggcaaggagggagtattcgactatgttattaaacgagatacggacatgaaaagaaatagaaggctgggcagaccaggggaaaaaccgatcatccatgtgcccaaggaagtatatttgaacaaagatcgtcttgatttgaacaataaaaggagaagaaccgccactacaagtggcggtggcttgaacggttttatttttgataccgatcttataggatcctctgtcatttcaaattcaagttcaggtacattcaaagcattatcagccgtgttcaaggatgatccgcaaattcaaaggctcctatatgccttggaaaatggaagcgtgctcatggaagaagaatccaataaccaaagaagaaaaaccatctttgtcgaggatttccctactgatttaattcttaaagttatggccgaagtaacagatttatggccactaacagagttcaagcaggattacgaccaattgtaccataattatgaacaactttcttccaaattgcgcttcatcaagaaagaagttttgcttcaagatgatcgcttaaagactatgtcacagtaccatccttcttcttctcacgacgttgctaagattattcgaaaagaaaaagatgaaattaggcggctagaaatggagatagccaacttgcaagagtag

SEQ ID NO: 6932 - DNA, 888 bp, Artificial Sequence
  Description of Artificial Sequence: Synthetic polynucleotide
atgggggaaagcttggatagatgtatagatgatattaatagggcggtggactctatgtccacactctatttcaagccaccaggaatttttcataatgccatcttacagggagcaagcaacaaggcaagcattagaaaagacattactagattaataaaggactgtaaccacgacgaggcgtatcttttattcaaagtcaaccctgagaaacaatccgtttctcgtagagacggcaaggagggagtattcgactatgttattaaaagagatacggacatgaaaagaaatagaaggttgggcagaccaggggaaaaaccgatcatccatgtgcccaaggaagtatatttgaacaaagatcgtcttgatttgaacaataaaaggagaagaaccgccactacaagtggcggtggcttgaacggttttatttttgataccgatcttataggatcctctgtcatttctaatagtagttctggtacattcaaagcattatctgccgtgttcaaggatgatccgcaaattcaaaggctcttatatgccttggaaaatggaagcgtgctcatggaagaagaatccaataaccaaagaagaaaaaccatctttgtcgaggatttccctactgatttaattcttaaagttatggccgaagtaacagatttatggccattaacagagttcaagcaggattacgaccaattgtaccataattatgaacaactttcttccaaattgcgcttcatcaagaaagaagttttgcttcaagatgatcgcttaaagactatgtctcagtaccatccttcttcttctcacgacgttgctaagattattagaaaagaaaaagatgaaattaggagattagaaatggagatagccaacttgcaagagtga

SEQ ID NO: 6933 - DNA, 1161 bp, Saccharomyces cerevisiae
atggtcaacttgaacactatcccacccaaaaatggcagggactactacattgcgcttggacttgaaggttctgcaaataaactgggcgttggtatagttaagcatccgcttctgcctaaacatgccaacagcgatctatcttatgattgcgaagctgagatgctttctaatattagagacacatatgtcacacctcctggggagggatttttgcctcgagacacggcaaggcatcacagaaattggtgcataagactcataaaacaagcactggccgaagctgacatcaaaagcccgacactagacattgatgtaatttgctttaccaaaggtcccggcatgggggcccctctgcattcagttgtcatcgccgccagaacgtgctccttactgtgggacgtgccactggtgggagtaaaccactgcattggtcacatcgaaatggggagagaaatcactaaagctcaaaatcctgtggtactgtatgtaagtggtggaaatacacaagttattgcatactcggaaaaaaggtaccgtatctttggtgaaacgcttgatattgctatcggtaattgtcttgatagatttgcaagaactctgaagatacctaatgagccctcgcctggctacaacatcgagcagttagctaaaaaagcccctcacaaagaaaacttggtagaacttccctatacagtaaaggggatggatctttcgatgagtggtatattggcttccatcgatttacttgccaaggatctatttaagggcaataagaaaaataagatcctattcgacaagacaacgggcgagcaaaaagtcactgtagaggatctttgctactctctgcaagagaacctattcgccatgctagttgaaataacagaaagagctatggctcacgttaactccaatcaagttttgatcgtaggcggtgttggttgtaacgtgcgattacaagaaatgatggcgcaaatgtgtaaagacagggccaatgggcaagtacatgctacagataataggttttgtatcgataacggagttatgattgcccaagcaggactactagagtatagaatgggtgggatcgtgaaggacttttctgaaactgttgttacgcagaaattcagaaccgatgaagtatacgcagcctggcgtgattaa

SEQ ID NO: 6934 - DNA, 1161 bp, Artificial Sequence
  Description of Artificial Sequence: Synthetic polynucleotide
atggtcaacttgaacactatcccacccaaaaatggcagggactactacattgcgcttggacttgaaggttctgcaaataaattgggcgttggtatagttaagcatccgcttttacctaaacatgccaacagcgatttatcttatgattgcgaagctgagatgctttctaatattagagacacatatgtcacacctcctggggagggatttttgcctagagacacggcaaggcatcacagaaattggtgcataagactcataaaacaagcattggccgaagctgacatcaaaagcccgacattagacattgatgtaatttgctttaccaaaggtcccggcatgggggcccctttgcattctgttgtcatcgccgccagaacgtgctccttattatgggacgtgccattggtgggagtaaaccactgcattggtcacatcgaaatggggagagaaatcactaaagctcaaaatcctgtggtattatatgtaagtggtggaaatacacaagttattgcatactctgaaaaaaggtaccgtatctttggtgaaacgcttgatattgctatcggtaattgtcttgatagatttgcaagaactttgaagatacctaatgagccctctcctggctacaacatcgagcagttagctaaaaaagcccctcacaaagaaaacttggtagaacttccctatacagtaaaggggatggatctttctatgagtggtatattggcttccatcgatttacttgccaaggatttatttaagggcaataagaaaaataagatcttattcgacaagacaacgggcgagcaaaaagtcactgtagaggatctttgctactctttacaagagaacttgttcgccatgcttgttgaaataacagaaagagctatggctcacgttaactccaatcaagttttgatcgtaggcggtgttggttgtaacgtgagattacaagaaatgatggcgcaaatgtgtaaagacagggccaatgggcaagtacatgctacagataataggttttgtatcgataacggagttatgattgcccaagcaggattattggagtatagaatgggtgggatcgtgaaggacttttctgaaactgttgttacgcagaaattcagaaccgatgaagtatacgcagcctggcgtgattga

SEQ ID NO: 6935 - DNA, 1809 bp, Saccharomyces cerevisiae
atgagtaatacttcttcgtacgagaagaataatccagataatctgaaacacaatggtattaccatagattctgagtttctaactcaggagccaataaccattccctcaaatggctccgctgtttctattgacgaaacaggttcagggtccaaatggcaagactttaaagattctttcaaaagggtaaaacctattgaagttgatcctaatctttcagaagctgaaaaagtggctatcatcactgcccaaactccattgaagcaccacttgaagaatagacatttgcaaatgattgccatcggtggtgccatcggtactggtctgctggttgggtcaggtactgcactaagaacaggtggtcccgcttcgctactgattggatgggggtctacaggtaccatgatttacgctatggttatggctctgggtgagttggctgttatcttccctatttcgggtgggttcaccacgtacgctaccagatttattgatgagtcctttggttacgctaataatttcaattatatgttacaatggttggttgtgctaccattggaaattgtctctgcatctattactgtaaatttctggggtacagatccaaagtatagagatgggtttgttgcgttgttttggcttgcaattgttatcatcaatatgtttggtgtcaaaggttatggtgaagcagaattcgtcttttcatttatcaaggtcatcactgttgttgggttcatcatcttaggtatcattctaaactgtggtggtggtccaacaggtggttacattgggggcaagtactggcatgatcctggtgcctttgctggtgacactccaggtgctaaattcaaaggtgtttgttctgtcttcgtcaccgctgccttttcttttgccggttcagaattggttggtcttgctgccagtgaatccgtagagcctagaaagtccgttcctaaggctgctaaacaagttttctggagaatcaccctattttatattctgtcgctattaatgattggtcttttagtcccatacaacgataaaagtttgattggtgcctcctctgtggatgctgctgcttcacccttcgtcattgccattaagactcacggtatcaagggtttgccaagtgttgtcaacgtcgttatcttgattgccgtgttatctgtcggtaactctgccatttatgcatgttccagaacaatggttgccctagctgaacagagatttctgccagaaatcttttcctacgttgaccgtaagggtagaccattggtgggaattgctgtcacatctgcattcggtcttattgcgtttgttgccgcctccaaaaaggaaggtgaagttttcaactggttactagccttgtctgggttgtcatctctattcacatggggtggtatctgtatttgtcacattcgtttcagaaaggcattggccgcccaaggaagaggcttggatgaattgtctttcaagtctcctaccggtgtttggggttcctactgggggttatttatggttattattatgttcattgcccaattctacgttgctgtattccccgtgggagattctccaagtgcggaaggtttcttcgaagcttatctatccttcccacttgttatggttatgtacatcggacacaagatctataagaggaattggaagcttttcatcccagcagaaaagatggacattgatacgggtagaagagaagtcgatttagatttgttgaaacaagaaattgcagaagaaaaggcaattatggccacaaagccaagatggtatagaatctggaatttctggtgttaa

SEQ ID NO: 6936 - DNA, 1809 bp, Artificial Sequence
  Description of Artificial Sequence: Synthetic polynucleotide
atgagtaatacttcttcctacgagaagaataatccagataatttgaaacacaatggtattaccatagattctgagtttttaactcaggagccaataaccattccctccaatggctccgctgtttctattgacgaaacaggttctgggtccaaatggcaagactttaaagattctttcaaaagggtaaaacctattgaagttgatcctaatctttctgaagctgaaaaagtggctatcatcactgcccaaactccattgaagcaccacttgaagaatagacatttgcaaatgattgccatcggtggtgccatcggtactggtttattggttgggtctggtactgcattgagaacaggtggtcccgcttctttattgattggatgggggtctacaggtaccatgatttacgctatggttatggctttgggtgagttggctgttatcttccctatttctggtgggttcaccacgtacgctaccagatttattgatgagtcctttggttacgctaataatttcaattatatgttacaatggttggttgtgttaccattggaaattgtctctgcatctattactgtaaatttctggggtacagatccaaagtatagagatgggtttgttgcgttgttttggcttgcaattgttatcatcaatatgtttggtgtcaaaggttatggtgaagcagaattcgtcttttcttttatcaaggtcatcactgttgttgggttcatcatcttaggtatcattttgaactgtggtggtggtccaacaggtggttacattgggggcaagtactggcatgatcctggtgcctttgctggtgacactccaggtgctaaattcaaaggtgtttgttctgtcttcgtcaccgctgccttttcttttgccggttctgaattggttggtcttgctgccagtgaatccgtagagcctagaaagtccgttcctaaggctgctaaacaagttttctggagaatcaccttattttatattttaagtttgttaatgattggtcttttagtcccatacaacgataaaagtttgattggtgcctcctctgtggatgctgctgcttctcccttcgtcattgccattaagactcacggtatcaagggtttgccaagtgttgtcaacgtcgttatcttgattgccgtgttatctgtcggtaactctgccatttatgcatgttccagaacaatggttgccttagctgaacagagatttttaccagaaatcttttcctacgttgaccgtaagggtagaccattggtgggaattgctgtcacatctgcattcggtcttattgcgtttgttgccgcctccaaaaaggaaggtgaagttttcaactggttattagccttgtctgggttgtcttctttattcacatggggtggtatctgtatttgtcacattcgtttcagaaaggcattggccgcccaaggaagaggcttggatgaattgtctttcaagtctcctaccggtgtttggggttcctactgggggttatttatggttattattatgttcattgcccaattctacgttgctgtattccccgtgggagattctccaagtgcggaaggtttcttcgaagcttatttatccttcccacttgttatggttatgtacatcggacacaagatctataagaggaattggaagcttttcatcccagcagaaaagatggacattgatacgggtagaagagaagtcgatttagatttgttgaaacaagaaattgcagaagaaaaggcaattatggccacaaagccaagatggtatagaatctggaatttctggtgttga

SEQ ID NO: 6937 - DNA, 753 bp, Saccharomyces cerevisiae
atgagtgacgacgattatatgaacagcgatgacgacaacgacgccgaaaaaagatacgtaaggccaattttcgtcagaaagcgcaggagagaagaagactacgttgcaactagcaaagacaacatccaccaccacccatgcgattggtccgcgaaaccatcgcaacgtcaaaacgaaaatgagcaaaaaagcaccatacggcttgtaccagtggcgatgaatacgccgaagtgtcaagagaaaaaaaagaaaagaaagggcgttggtacaactagtcatgaggctacgcttttcgagtacggtgaaagcatagcaggctacaagtgtgttacaaccgagagcgaaagagaccgcttgaaacgaagtcatgaaagcgaaagcagcagtgaaagcgaggtagacgttttcgcctttgaccaggcaaaaggtatcagctctaaggttgaagccgaagaacgctacgcgcgggccgttcgacagtattggcgcatgaccaaagacgagccggctaccttaccactgccaggcacacctaccctagcggctgtgagtttagatatgattgatgacaaaagcgtagaacaattttacacaatgagcagtgccttgatggatgcaaacagactagacttgattcgccgcgatagaatccggtggcacccggacaaacatcgttatcataagtccaaagtcacaaaactgtttcaggccattaacggcctgtgggagcaagaaaagaccgagaaaaggtaa

SEQ ID NO: 6938 - DNA, 753 bp, Artificial Sequence
  Description of Artificial Sequence: Synthetic polynucleotide
atgagtgacgacgattatatgaacagcgatgacgacaacgacgccgaaaaaagatacgtaaggccaattttcgtcagaaagcgcaggagagaagaagactacgttgcaactagcaaagacaacatccaccaccacccatgcgattggtccgcgaaaccatctcaacgtcaaaacgaaaatgagcaaaaaagcaccataaggcttgtaccagtggcgatgaatacgccgaagtgtcaagagaaaaaaaagaaaagaaagggcgttggtacaactagtcatgaggctacgcttttcgagtacggtgaaagcatagcaggctacaagtgtgttacaaccgagagcgaaagagaccgcttgaaaagaagtcatgaaagcgaaagcagcagtgaaagcgaggtagacgttttcgcctttgaccaggcaaaaggtatcagctctaaggttgaagccgaagaacgctacgcgagggccgttagacagtattggcgcatgaccaaagacgagccggctaccttaccattaccaggcacacctaccttagcggctgtgagtttagatatgattgatgacaaaagcgtagaacaattttacacaatgagcagtgccttgatggatgcaaacagattagacttgattcgccgcgatagaatcagatggcacccggacaaacatcgttatcataagtccaaagtcacaaaattatttcaggccattaacggcttatgggagcaagaaaagaccgagaaaaggtga

SEQ ID NO: 6939 - DNA, 1098 bp, Saccharomyces cerevisiae
atgaaattatccgctctattagctttatcagcctccaccgccgtcttggccgctccagctgtccaccatagtgacaaccaccaccacaacgacaagcgtgccgttgtcaccgttactcagtacgtcaacgcagacggcgctgttgttattccagctgccaccaccgctacctcggcggctgctgatggaaaggtcgagtctgttgctgctgccaccactactttgtcctcgactgccgccgccgctactacctctgccgccgcctcttcttcctcctcttcctcttcctcctcttcctcttcttcctctgttggttctggagattttgaagatggtaccatttcctgttctgatttcccatccggacaaggtgctgtctccttggactggttaggtctaggcggctgggcttccatcatggacatgaacggtaacaccgccacctcttgtcaagacggatactactgttcttacgcttgttctccaggttacgctaagacccaatggccttctgaacaaccttccgatggtagatccgttggtggtttatactgtaagaacggtaaattataccgttccaacaccgacactaacagtttgtgtgtagaaggtcaaggctctgctcaagctgttaacaaggtctccggctccattgctatctgtggtaccgattatccaggttctgaaaacatggtcgttcctaccgtagttggcgctggttcctcccaaccaatcaacgtcatcaaggaggactcctactatcaatggcaaggtaagaagacctctgcccaatactacgttaacaacgctggtgtctctgtggaagatggttgtatctggggtactgagggttccggtgtcggtaactgggccccagttgtcttgggtgctggttacactgatggtatcacttacttgtccatcattccaaacccaaacaacaaagaagcaccaaactttaacatcaagatcgttgccaccgatggctctaccgtcaatggtgcttgctcttacgaaaatggtgtctactctggctctggctctgacggttgtactgtttcagttacttctggttctgctaactttgtcttctactag

SEQ ID NO: 6940 - DNA, 1098 bp, Artificial Sequence
  Description of Artificial Sequence: Synthetic polynucleotide
atgaaattatccgctttattagctttatctgcctccaccgccgtcttggccgctccagctgtccaccatagtgacaaccaccaccacaacgacaagcgtgccgttgtcaccgttactcagtacgtcaacgcagacggcgctgttgttattccagctgccaccaccgctacctctgcggctgctgatggaaaggtcgagtctgttgctgctgccaccactactttgtccagcactgccgccgccgctactacctctgccgccgcctcttcttcctcctcttcctcttcctcctcttcctcttcttcctctgttggttctggagattttgaagatggtaccatttcctgttctgatttcccatccggacaaggtgctgtctccttggactggttaggtcttggcggctgggcttccatcatggacatgaacggtaacaccgccacctcttgtcaagacggatactactgttcttacgcttgttctccaggttacgctaagacccaatggccttctgaacaaccttccgatggtagatccgttggtggtttatactgtaagaacggtaaattataccgttccaacaccgacactaacagtttgtgtgtagaaggtcaaggctctgctcaagctgttaacaaggtctccggctccattgctatctgtggtaccgattatccaggttctgaaaacatggtcgttcctaccgtagttggcgctggttcctcccaaccaatcaacgtcatcaaggaggactcctactatcaatggcaaggtaagaagacctctgcccaatactacgttaacaacgctggtgtctctgtggaagatggttgtatctggggtactgagggttccggtgtcggtaactgggccccagttgtcttgggtgctggttacactgatggtatcacttacttgtccatcattccaaacccaaacaacaaagaagcaccaaactttaacatcaagatcgttgccaccgatggctctaccgtcaatggtgcttgctcttacgaaaatggtgtctactctggctctggctctgacggttgtactgtttctgttacttctggttctgctaactttgtcttctactga

SEQ ID NO: 6941 - DNA, 816 bp, Saccharomyces cerevisiae
atgccttcgctaacccccagatgtatcattgtcagacacggtcaaactgaatggtccaagtcaggccagtatactggtttgacagatctaccgttaacgccctacggtgagggccaaatgttgaggaccggtgagagtgttttccgcaataatcagtttttgaatccagacaacatcacttatatcttcacctctccacgtttgcgtgccaggcaaactgtggatttggttttgaaaccattaagcgacgagcaaagagctaagatccgtgtggtggtagacgacgacttgcgagagtgggagtacggtgactacgagggaatgctgactcgagaaatcattgaattgagaaagtcacgcggtttggacaaggagaggccatggaatatctggagagatgggtgtgagaacggtgagactactcagcaaattgggttgagactttcccgcgctattgccagaatccagaacttgcaccgcaagcaccagagtgagggcagagcatcagacatcatggtctttgcgcacggacatgcattgcgttattttgctgctatttggtttggactgggtgtgcaaaagaagtgtgagacgattgaagaaattcaaaatgtcaaatcttatgatgacgacacagttccatatgtgaaattggaatcttacagacatttggtagacaatccatgtttcttactggacgccggtgggattggtgttttgtcatacgctcaccacaacattgacgaacctgcattggaattagcaggtccatttgtctcaccaccagaggaggaatcccagcatggcgatgtgtaa

SEQ ID NO: 6942 - DNA, 816 bp, Artificial Sequence
  Description of Artificial Sequence: Synthetic polynucleotide
atgccttctttaacccccagatgtatcattgtcagacacggtcaaactgaatggtccaagtctggccagtatactggtttgacagatttaccgttaacgccctacggtgagggccaaatgttgaggaccggtgagagtgttttccgcaataatcagtttttgaatccagacaacatcacttatatcttcacctctccacgtttgcgtgccaggcaaactgtggatttggttttgaaaccattaagcgacgagcaaagagctaagatccgtgtggtggtagacgacgacttgagagagtgggagtacggtgactacgagggaatgttgactagagaaatcattgaattgagaaagagtcgcggtttggacaaggagaggccatggaatatctggagagatgggtgtgagaacggtgagactactcagcaaattgggttgagactttcccgcgctattgccagaatccagaacttgcaccgcaagcaccagagtgagggcagagcaagtgacatcatggtctttgcgcacggacatgcattgcgttattttgctgctatttggtttggattaggtgtgcaaaagaagtgtgagacgattgaagaaattcaaaatgtcaaatcttatgatgacgacacagttccatatgtgaaattggaatcttacagacatttggtagacaatccatgtttcttattagacgccggtgggattggtgttttgagttacgctcaccacaacattgacgaacctgcattggaattagcaggtccatttgtctctccaccagaggaggaatcccagcatggcgatgtgtga

SEQ ID NO: 6943 - DNA, 1332 bp, Saccharomyces cerevisiae
atgtcaagagatgtaagggcagagaaactagccatatcactattgattttatcattgtttctaatattccaattagtggctgagatttatctcaataatggtgatcagtaccatacagagactagcccctttacaagaggaagatcacatgtaacgcgtgtgcccaaccatgatgctagtttatctataccgtttttggacaagatcaaccagttttggcatgtaggcggtgccacgcaaattaggaatattcagtcgatcaaattgactcaggaccgtgatcaagataaacatggattagtattgtccaatggaattggcgacaacaccatcaatgactttgagattgttttcactttcagaatttctcacgaccccactacacaactcactggtgatggaatgtgttttgccattacgcccgaaaatgggtttctcacacagaatttacagtcgtcgtatgcgaaaaagcaatacatgatgaattctcagggcgtcatagccgataatacagatctgatgggcttcccgaaaaatctgcctggcctatttattgtcttggatacgtatcgcaaccaaggccacgaccataaggaggtaccctttatggatgtgtttataaatgtggccccagaaagcgattggtacgatataaatagtgatggtgaactcagtacatcgctgcggcttaattcaagaggccacataaaactcaagaaaaatgccctgtggaatcgagtcacgaaactaagaataatatatttggaaagtataagcttcctgaagatcgacgtgcagtacgcaaaagagggaaactactggattgagttatttcaaacaaccgaaaatctgtacttgccgaaaaacatgcacacggggcaaagatacattggctgtagcgcattaaatggccaattaacggagacagtggagctgctggacgtatccactagcgaattccattggaacgacatggatgcgtccattgaggacacctatgattacgcaaaggaagctgagctattcctggagcaggaatttggcgaggtccttgacagggaacccgatgagttcaccaaatggaaaatgatcaaagctcaaccaaacatcaagactgggtcacagtcagctgaacagaaaacttcaaacaatcctcactctcggttgttcaaggtcgtgctgaccatatggcattatagcgagattttgctattgatcatgggcatttatcttttttctgcttgcataagagttttccaaagaaggttcaaaaaaattagatccagaagaaaaagggcaggctcgcattctgtggggctattgcccatgtag

SEQ ID NO: 6944 - DNA, 1332 bp, Artificial Sequence
  Description of Artificial Sequence: Synthetic polynucleotide
atgagtagagatgtaagggcagagaaattggccatatctttgttgattttatctttgtttttaatattccaattagtggctgagatttatctcaataatggtgatcagtaccatacagagactagcccctttacaagaggaagaagccatgtaacgcgtgtgcccaaccatgatgctagtttatctataccgtttttggacaagatcaaccagttttggcatgtaggcggtgccacgcaaattaggaatattcagtctatcaaattgactcaggaccgtgatcaagataaacatggattagtattgtccaatggaattggcgacaacaccatcaatgactttgagattgttttcactttcagaatttctcacgaccccactacacaactcactggtgatggaatgtgttttgccattacgcccgaaaatgggtttctcacacagaatttacagtcttcttatgcgaaaaagcaatacatgatgaattctcagggcgtcatagccgataatacagatttgatgggcttcccgaaaaatttacctggcttatttattgtcttggatacgtatcgcaaccaaggccacgaccataaggaggtaccctttatggatgtgtttataaatgtggccccagaaagcgattggtacgatataaatagtgatggtgaactcagtacatctttaagacttaattctagaggccacataaaactcaagaaaaatgccttatggaatagagtcacgaaattgagaataatatatttggaaagtataagcttcttgaagatcgacgtgcagtacgcaaaagagggaaactactggattgagttatttcaaacaaccgaaaatctttacttgccgaaaaacatgcacacggggcaaagatacattggctgtagcgcattaaatggccaattaacggagacagtggagttattagacgtatccactagcgaattccattggaacgacatggatgcgtccattgaggacacctatgattacgcaaaggaagctgagcttttcttggagcaggaatttggcgaggtccttgacagggaacccgatgagttcaccaaatggaaaatgatcaaagctcaaccaaacatcaagactgggtctcagtctgctgaacagaaaacttctaacaatcctcactctagattgttcaaggtcgtgttgaccatatggcattatagcgagattttgttgttgatcatgggcatttatcttttttctgcttgcataagagttttccaaagaaggttcaaaaaaattagatccagaagaaaaagggcaggctctcattctgtggggttattgcccatgtga

SEQ ID NO: 6945 - DNA, 552 bp, Saccharomyces cerevisiae
atgtcaaacagtcatcatacatcccagggaagaagaaacaaactttcagtgtgggttaaaaaaataataaacaccactaccacaactaacgcatcggtctcgagcagtaaaccaagacgcggcactagggctggccccacaagagttaagcgtgctgagttggatccggatggaacaaccatcagttcgtcgttgcgaccattggttgatcgaaattcgttgcattcgagcgaatccgatgacgaaggagaccgtcgagtggcatgggatgaaccaccaacaggcaaagtaagacagcagcagcagcaacagcagcaacaacaaaacgacaacgcaagtgttattccgctagtatcgttttgttcctcgtcagtgaagtcgtctactttctcggacattcattcaatacagtctacgaggcccacaatattctctaacaggacgtttgagacgaattctagcgttctggccatcccaccacagagtatattggatcgatcaagaaccctcccgccgtcgaacgcaagtaacactaccacaagaagaccgtga

SEQ ID NO: 6946 - DNA, 552 bp, Artificial Sequence
  Description of Artificial Sequence: Synthetic polynucleotide
atgtccaacagtcatcatacatcccagggaagaagaaacaaactttctgtgtgggttaaaaaaataataaacaccactaccacaactaacgcatctgtctccagcagtaaaccaagacgcggcactagggctggccccacaagagttaagcgtgctgagttggatccggatggaacaaccatcagttcttctttgagaccattggttgatagaaattctttgcattctagcgaatccgatgacgaaggagaccgtcgtgtggcatgggatgaaccaccaacaggcaaagtaagacagcagcagcagcaacagcagcaacaacaaaacgacaacgcaagtgttattccgttagtatccttttgttcctcttctgtgaagtcttctactttcagtgacattcattccatacagtctacgaggcccacaatattctctaacaggacgtttgagacgaattctagcgttttggccatcccaccacagagtatattggatagatctagaaccctcccgccgtctaacgcaagtaacactaccacaagaagaccgtga

SEQ ID NO: 6947 - DNA, 852 bp, Saccharomyces cerevisiae
atgtctgaatcatctatttcttcttctaaaccatctgtggaattgccacaagcaacctggtcgcatctgcaaagatacccagctttatccaagtttattaaatatgcggaatctctgccacctgtggagagattgatttccttcaacctcgttgttttgggatctgtgaaccagtgggtttccgaatcgtccagctctcctcgtctggtgaagcaagttgttgctgctgggaaggaaggggccttcaagttggacgagttagttaacctcttggtgttcaaggagggtgtcgacggcttgctgtacaattggaaatcacattccaacacgccagggatctggctggtgtggttcttcgtcgactacgtcgccaacatttctaatactctgttgagggagttcctgatcaagccattgcacttgcaaggttctaccgcatcgaaggagatcggctcttccggtgaggagaacaaggtcactgatgcttcttctttgccccacgtggcagagttgtcttcaacgaccagaggtatgtcgcaggagatccagtccaaggtcaagtcgaactatatcgacccaaccaaggacctggctaaagaaaagtacgacgccatagtgaagcccacaactgacaagttgcagtctgtgtacatcgacccaacaaagactaagcttaacgaaacctaccaacgcttcaccactgtctatgaaaacaatctaagtaaatctgaaagcgtccctaaagccattgtatccaccgggttggacttgggcaatgccaccattgagaagctaaaggcctcaagagaagaccaaaccaattctaagcccgcggctgtgtcgaccaattag

SEQ ID NO: 6948 - DNA, 852 bp, Artificial Sequence
  Description of Artificial Sequence: Synthetic polynucleotide
atgtctgaaagctctatttcttcttctaaaccatctgtggaattgccacaagcaacctggtctcatttacaaagatacccagctttatccaagtttattaaatatgcggaatctttaccacctgtggagagattgatttccttcaacctcgttgttttgggatctgtgaaccagtgggtttccgaatcttccagctctcctcgtttagtgaagcaagttgttgctgctgggaaggaaggggccttcaagttggacgagttagttaacctcttggtgttcaaggagggtgtcgacggcttgttgtacaattggaaatctcattccaacacgccagggatctggttggtgtggttcttcgtcgactacgtcgccaacatttctaatactttattgagggagttcttgatcaagccattgcacttgcaaggttctaccgcatccaaggagatcggctcttccggtgaggagaacaaggtcactgatgcttcttctttgccccacgtggcagagttgtcttctacgaccagaggtatgtctcaggagatccagtccaaggtcaagtctaactatatcgacccaaccaaggacttggctaaagaaaagtacgacgccatagtgaagcccacaactgacaagttgcagtctgtgtacatcgacccaacaaagactaagcttaacgaaacctaccaacgcttcaccactgtctatgaaaacaatttgagtaaatctgaaagcgtccctaaagccattgtatccaccgggttggacttgggcaatgccaccattgagaagttgaaggcctctagagaagaccaaaccaattctaagcccgcggctgtgtctaccaattga

SEQ ID NO: 6949 - DNA, 1254 bp, Saccharomyces cerevisiae
atgtcagaccctatcagaacgaaacccaagtcgtcgatgcaaatcgacaacgcccctacgcctcacaataccccagcatcggttctgaatccgagctatttgaaaaacggcaacccagttagggcccaggcacaggagcaggatgacaagatcggcaccatcaacgaggaggacatcttggctaaccaacccctgttgttacagtccatccaggacagacttggctcgctggtgggccaggacagcgggtatgtggggggtcttcccaagaacgttaaggaaaagctgctgagcttgaagactttacaaagcgagctattcgaagttgaaaaggaatttcaggtggagatgtttgagctagagaacaagtttctgcagaagtacaagcccatttgggagcagcggtccaggatcatttcaggacaagagcaacccaagccggaacagatcgcaaagggccaagagattgtggagtcactcaatgagacggagttgttggtggacgaagaagagaaggcccaaaatgattccgaggaggaacaggtgaagggaattccctcattctggctaaccgcattagagaacttgcccatcgtttgcgacacgatcactgaccgcgatgcggaagttctggagtacctgcaagatattggtctggaatacttgacggatggtagacccggtttcaagctgttgttcagatttgattcttccgccaacccattcttcaccaacgacattctgtgcaagacctacttctaccagaaggagctcggttactccggggactttatctacgaccacgcagaaggctgcgagatcagttggaaggacaacgcccacaacgtcactgtggacctagaaatgcgcaagcagagaaacaagaccaccaagcaggtgaggaccatcgagaagatcactcccatagaatcctttttcaacttcttcgaccctcccaagatccaaaacgaagaccaagacgaggagttggaggaagacctcgaggaacgtctagctttagactactccatcggggaacaacttaaggacaagctaattcctagagccgtggactggtttaccggcgcagccttggaattcgagttcgaggaggacgaagaagaagcggacgaggacgaagacgaagaagaagatgatgatcacggcttggaggatgacgacggggaatctgccgaagagcaagacgattttgctggcaggccggaacaggctcctgaatgcaagcagtcataa

SEQ ID NO: 6950 - DNA, 1254 bp, Artificial Sequence
  Description of Artificial Sequence: Synthetic polynucleotide
atgtctgaccctatcagaacgaaacccaagtcttctatgcaaatcgacaacgcccctacgcctcacaataccccagcatctgttttgaatccgagctatttgaaaaacggcaacccagttagggcccaggcacaggagcaggatgacaagatcggcaccatcaacgaggaggacatcttggctaaccaacccttattgttacagtccatccaggacagacttggctctttggtgggccaggacagcgggtatgtggggggtcttcccaagaacgttaaggaaaagttattaagcttgaagactttacaaagcgagcttttcgaagttgaaaaggaatttcaggtggagatgtttgagttagagaacaagtttttgcagaagtacaagcccatttgggagcagaggtccaggatcatttctggacaagagcaacccaagccggaacagatcgcaaagggccaagagattgtggagtctctcaatgagacggagttgttggtggacgaagaagagaaggcccaaaatgattccgaggaggaacaggtgaagggaattccctctttctggttgaccgcattagagaacttgcccatcgtttgcgacacgatcactgaccgcgatgcggaagttttggagtacttacaagatattggtttggaatacttgacggatggtagacccggtttcaagttgttgttcagatttgattcttccgccaacccattcttcaccaacgacattttgtgcaagacctacttctaccagaaggagctcggttactccggggactttatctacgaccacgcagaaggctgcgagatcagttggaaggacaacgcccacaacgtcactgtggacttggaaatgcgcaagcagagaaacaagaccaccaagcaggtgaggaccatcgagaagatcactcccatagaatcctttttcaacttcttcgaccctcccaagatccaaaacgaagaccaagacgaggagttggaggaagacctcgaggaacgtttggctttagactactccatcggggaacaacttaaggacaagttgattcctagagccgtggactggtttaccggcgcagccttggaattcgagttcgaggaggacgaagaagaagcggacgaggacgaagacgaagaagaagatgatgatcacggcttggaggatgacgacggggaatctgccgaagagcaagacgattttgctggcaggccggaacaggctcctgaatgcaagcagagttga

SEQ ID NO: 6951 - DNA, 402 bp, Saccharomyces cerevisiae
atgtcgttttggaaaacattgcagagacagccacgtaccatctcgttgtttaccaatgacatcgcgtccaatatcaagtcgcagaaatgcctgcagttgctgaagggagacgtctctcatcgattcgacgtggaaatcgccaaccgctttcccacgtgggaccagctgcaatacatgagaacttcgtgcccgcaaggcccagtttcgttgcaaaggcagattccaaagctggattcagtgctcaaatacaagcacacagacccgacgttcgggatggacctgcagaagtgtgtccagaggggactttggaatccaaaggaggcgctttgggtcgactgggaaaacaagttggtgggaaatgagcccgcagacattgacaagtacatcattcagcgcaaataa

SEQ ID NO: 6952 - DNA, 402 bp, Artificial Sequence
  Description of Artificial Sequence: Synthetic polynucleotide
atgagtttttggaaaacattgcagagacagccacgtaccatctctttgtttaccaatgacatcgcgtccaatatcaagtctcagaaatgcttacagttgttgaagggagacgtctctcatagattcgacgtggaaatcgccaaccgctttcccacgtgggaccagttacaatacatgagaacttcttgcccgcaaggcccagtttctttgcaaaggcagattccaaagttggattctgtgctcaaatacaagcacacagacccgacgttcgggatggacttacagaagtgtgtccagaggggactttggaatccaaaggaggcgctttgggtcgactgggaaaacaagttggtgggaaatgagcccgcagacattgacaagtacatcattcagcgcaaatga

SEQ ID NO: 6953 - DNA, 2670 bp, Saccharomyces cerevisiae
atgccaacagctaagaggacgtcatccagggcttcgttggcactgcccttccagttacggttggtgcacaagaaatcatggggccatcggctaagagacttcatttccgggttcttaaaatcatgcagacccattgctaaatacgttttccccaacttcatcgtggtgcactatatctacctgatcacgctgtcgattatcgggtccattctgttatatccgtgcaagaacacggcgttcatcgatgtgctatttctggctgctggagcgtctacacagggcgggctggccaccaagagcactaacgatttcaacctgtaccagcagatagtggtgtacgtcattacattgctgtccacgcctatacttattcatgggtttttggcctttgtcaggctgtattggtttgaaaggtacttcgacaacattagggatatctccaaacagaattttaaactaagaaggaccatgacgttgcaacaaagggaactatcgggcagcagtggcaatgccgctcgaagtaggagtttcaaggacaacctgttccgtgggaagtttgtttccagagaagacccacgacaatccgcttcagatgtgccgatggactctcctgacacgtccgcattgtcctcaatctcaccgttgaatgtttcctcctctaaggaggaatccagtgacacgcaaagctcgcctccaaacttctcaagtaagcgccaaccctcagacgttgacccaagagacatttacaaatcgataatgatgctacaaaaacaacaagagaagagcaacgcaaactccacggattctttttcgagcgagaccaatggacccgctttcattgtgcaggaacgtcatgagagaagagccccccactgctcactgaaacgccattctgtcctgccatcttctcaggaattgaacaagctagcccagacgaaaagtttccagaaattgcttggcttgcggagagatgaaggtgaccatgactactttgacggtgctcctcacaaatatatggtcaccaagaagaaaaaaatatctagaacgcaatcatgtaacatcccaacgtatactgcttcaccgagtcctaaaacctcaggccaagtagttgaaaatcatagaaacttggccaagtcggcgccttcatcttttgttgatgaggagatgagcttttcaccgcaagagtctttgaatttacagttccaagcgcacccgcccaaaccaaaacgacgtgaaggtgatataggccaccccttcaccagaacaatgagcaccaactatctatcgtggcagccaacctttggcagaaactccgtcttcattggactcacaaagcaacaaaaggaggaactcggcggtgtcgaatatcgtgctttgagattgctgtgctgcattctcatggtatactacatcggattcaacattttggcgtttgtgaccatcgttccatgggcctgtacgaggcaccactactcagagattattagacgaaatggagtttctccaacctggtgggggtttttcactgcaatgagtgcattcagcaacttgggtctgtctttgaccgctgattcaatggtttcctttgatactgcgccgtatccgctgattttcatgatgttcttcatcatcataggcaatacaggcttcccaattatgttacgatttatcatttggatcatgttcaagacctcgagagacctatctcagtttaaggaaagtcttgggtttctcttggatcatccgcgcaggtgttttacgttgctgttccccagcggccccacatggtggctgtttacaactttagtcgtcttaaacgctacggattggattcttttcataattctggatttcaactccgctgtagtaaggcaggttgctaaaggttatcgagctctcatgggcctcttccagtctgtatgcacaagaactgctggattcaacgttgttgacttaagtaaattacacccgtccattcaggtgtcttatatgctaatgatgtacgtttcggtcctgccgctggcgatttccattagaagaacgaatgtttatgaggagcaatcgttgggactatacgatagtggacaagatgacgaaaatatcacccacgaagacgatataaaggaaacagaccatgatggcgaatccgaagagcgagacactgtatctacaaagtccaagccgaagaaacagtccccaaaatcgtttgttggtgctcatttgaggaggcaactctcttttgatttatggtacctattccttggattatttataatatgcatatgcgagggcagaaaaatcgaagacgttaataaacctgatttcaatgtctttgctatattgtttgaagttgttagcgcttatggtacagtgggtttgtcattgggttacccaaacaccaacacatcactatctgcccagttcaccgtattatcgaagctagtcataattgccatgctaataagaggaagaaatagaggtttaccatacactttggatcgtgccatcatgctgccaagtgacaaactggaacaaattgatcgtttacaagatatgaaagctaagggtaagttgttagccaaagttggtgaggatccaatgactacttacgtcaaaaagagatcccacaaactgaaaaaaatagcaacaaagttttgggggaagcattaa

SEQ ID NO: 6954 - DNA, 2670 bp, Artificial Sequence
  Description of Artificial Sequence: Synthetic polynucleotide
atgccaacagctaagaggacgtcttccagggcttctttggcattgcccttccagttaagattggtgcacaagaaaagttggggccatagattgagagacttcatttccgggttcttaaaaagttgcagacccattgctaaatacgttttccccaacttcatcgtggtgcactatatctacttgatcacgttatccattatcgggtccattttattatatccgtgcaagaacacggcgttcatcgatgtgctttttttggctgctggagcgtctacacagggcgggttagccaccaagagcactaacgatttcaacctttaccagcagatagtggtgtacgtcattacattgttatccacgcctatacttattcatgggtttttggcctttgtcaggttatattggtttgaaaggtacttcgacaacattagggatatctccaaacagaattttaaattgagaaggaccatgacgttgcaacaaagggaattaagtggcagcagtggcaatgccgctagaagtaggagtttcaaggacaacttgttccgtgggaagtttgtttccagagaagacccaagacaatccgcttctgatgtgccgatggactctcctgacacgtccgcattgtcctctatctctccgttgaatgtttcctcctctaaggaggaatccagtgacacgcaaagctctcctccaaacttctctagtaagcgccaaccctctgacgttgacccaagagacatttacaaatctataatgatgttacaaaaacaacaagagaagagcaacgcaaactccacggattctttttctagcgagaccaatggacccgctttcattgtgcaggaacgtcatgagagaagagccccccactgctctttgaaacgccattctgtcttgccatcttctcaggaattgaacaagttggcccagacgaaaagtttccagaaattgcttggcttgagaagagatgaaggtgaccatgactactttgacggtgctcctcacaaatatatggtcaccaagaagaaaaaaatatctagaacgcaaagctgtaacatcccaacgtatactgcttctccgagtcctaaaacctctggccaagtagttgaaaatcatagaaacttggccaagtctgcgccttcttcttttgttgatgaggagatgagcttttctccgcaagagtctttgaatttacagttccaagcgcacccgcccaaaccaaaaagacgtgaaggtgatataggccaccccttcaccagaacaatgagcaccaactatttatcttggcagccaacctttggcagaaactccgtcttcattggactcacaaagcaacaaaaggaggaactcggcggtgtcgaatatcgtgctttgagattgctttgctgcattctcatggtatactacatcggattcaacattttggcgtttgtgaccatcgttccatgggcctgtacgaggcaccactactctgagattattagaagaaatggagtttctccaacctggtgggggtttttcactgcaatgagtgcattcagcaacttgggtctttctttgaccgctgattctatggtttcctttgatactgcgccgtatccgttgattttcatgatgttcttcatcatcataggcaatacaggcttcccaattatgttaagatttatcatttggatcatgttcaagacctccagagacttgtctcagtttaaggaaagtcttgggtttctcttggatcatccgcgcaggtgttttacgttgttattccccagcggccccacatggtggttatttacaactttagtcgtcttaaacgctacggattggattcttttcataattttagatttcaactccgctgtagtaaggcaggttgctaaaggttatagagctctcatgggcctcttccagtctgtatgcacaagaactgctggattcaacgttgttgacttaagtaaattacacccgtccattcaggtgtcttatatgttaatgatgtacgtttctgtcttgccgttagcgatttccattagaagaacgaatgtttatgaggagcaatctttgggattatacgatagtggacaagatgacgaaaatatcacccacgaagacgatataaaggaaacagaccatgatggcgaatccgaagagagagacactgtatctacaaagtccaagccgaagaaacagtccccaaaaagttttgttggtgctcatttgaggaggcaactctcttttgatttatggtaccttttccttggattatttataatatgcatatgcgagggcagaaaaatcgaagacgttaataaacctgatttcaatgtctttgctatattgtttgaagttgttagcgcttatggtacagtgggtttgtctttgggttacccaaacaccaacacatctttatctgcccagttcaccgtattatccaagttggtcataattgccatgttgataagaggaagaaatagaggtttaccatacactttggatcgtgccatcatgcttccaagtgacaaattagaacaaattgatcgtttacaagatatgaaagctaagggtaagttgttagccaaagttggtgaggatccaatgactacttacgtcaaaaagagatcccacaaattgaaaaaaatagcaacaaagttttgggggaagcattga

SEQ ID NO: 6955 - DNA, 1257 bp, Saccharomyces cerevisiae
atggaaaacaaactactttgttggtggttgtactggccatgcgtgtattcatctattatagctaccataatatctttttacaccataactagacacttattaaattaccgtaaaccatatgaacaaagactatccatacggatactattgctcgtgcccatttttagtgtgtcatgcgcaagtggcataattaagcctgaagcagctcaattttatgtcgatcctatcagagaattttatgaagcattcgttatttacacttttttcacatttttaacactactactaggaggcgagaggaacatcattactgttttaagcttaaatcacgcccccacaagacatccgataccgctaataggtaaaatttgcaaaccgatagacttatctgatccttttgattttctttttgtcaaaaaaggcatattacagtatgtttggttcaaaccattttattgttttggtacattgatatgcagtgcatggaagctacccaaattcgaaatatttttgaacgttttttataatatttcagtgacttggtcactgtatagtttagcactattttggaagtgtctctatccggaattaactccttataaaccatggttgaaatttttatgtgtcaaattgattatttttgcctcttattggcagagcatcataatccagggtctagtggttactggaaagttgggtacgggaaaccaagatcgaacctctggatatgtgtacaagaatgggctcctgtgtatagagatggtgcctttcgccatcttgcatgcagtagctttcccttggaacaaatacacagcatttagcataccttatggggccaggatgaaattcatttacgctttgaaagattttcttggttgcggtgatctaatatgggattttaaacagactttgtttgctggtcccttgtactataattataggaacttcgatcctgaagccatggatctattaagcactagacaacaatccggtgcgactatggaaagactaaagcatgggctaagatttactgataatggaagaaatagttattgggtggcatatgggagtatagataacaaccttgttccggaatcaatagaggaatcatgggaagatgatattgctggtcagagaacttttcctgaggatccaaattatccggttgttcacgactacacgatgggccatcgatatagtagatcaatgaatgatttaagaagagatgttcaaagtaggtcatcaatggcttgttaa

SEQ ID NO: 6956 - DNA, 1257 bp, Artificial Sequence
  Description of Artificial Sequence: Synthetic polynucleotide
atggaaaacaaattactttgttggtggttgtactggccatgcgtgtattcttctattatagctaccataatatctttttacaccataactagacacttattaaattaccgtaaaccatatgaacaaagattatccataagaatattattgctcgtgcccatttttagtgtgtcttgcgcaagtggcataattaagcctgaagcagctcaattttatgtcgatcctatcagagaattttatgaagcattcgttatttacacttttttcacatttttaacattgttattaggaggcgagaggaacatcattactgttttaagcttaaatcacgcccccacaagacatccgataccgttgataggtaaaatttgcaaaccgatagacttatctgatccttttgattttctttttgtcaaaaaaggcatattacagtatgtttggttcaaaccattttattgttttggtacattgatatgcagtgcatggaagttgcccaaattcgaaatatttttgaacgttttttataatatttctgtgacttggtctttgtatagtttagcattattttggaagtgtctctatccggaattaactccttataaaccatggttgaaatttttatgtgtcaaattgattatttttgcctcttattggcagagcatcataatccagggtttagtggttactggaaagttgggtacgggaaaccaagatagaacctctggatatgtgtacaagaatgggctcttatgtatagagatggtgcctttcgccatcttgcatgcagtagctttcccttggaacaaatacacagcatttagcataccttatggggccaggatgaaattcatttacgctttgaaagattttcttggttgcggtgatttgatatgggattttaaacagactttgtttgctggtcccttgtactataattataggaacttcgatcctgaagccatggatttattaagcactagacaacaatccggtgcgactatggaaagattaaagcatgggttgagatttactgataatggaagaaatagttattgggtggcatatgggagtatagataacaaccttgttccggaaagtatagaggaaagttgggaagatgatattgctggtcagagaacttttcctgaggatccaaattatccggttgttcacgactacacgatgggccatcgttatagtagaagtatgaatgatttaagaagagatgttcaaagtaggagttctatggcttgttga

SEQ ID NO: 6957 - DNA, 915 bp, Saccharomyces cerevisiae
atgaatacttcagaactgtcaatagctgaggaaatcgactacgaagctcttccatcacatgctccgctacattcccagttactggcaggagcatttgcaggtataatggagcattctttgatgtttccaatagatgctctgaaaacccgagtgcaggctgcaggattgaataaagctgcctctacagggatgatatctcagatatccaaaatatctacaatggaaggttcgatggctttatggaagggtgttcaatcggtaatactgggggcagggcctgcgcatgcagtatattttggtacatacgagttttgcaaagctcgcctgataagccctgaagatatgcaaactcatcaaccaatgaagaccgcactgagtggtaccattgctaccattgctgcggatgcattgatgaacccctttgacaccgttaaacaaagactacaattggatactaatctaagagtttggaatgttactaagcaaatatatcaaaatgaaggctttgcagcattttactactcctatcccacaacattggccatgaatatcccatttgcagcgttcaatttcatgatatatgaatctgccagcaaattcttcaacccacaaaattcctacaatccattgattcattgtctttgcggtgggataagtggtgcaacatgtgctgcgttaactacaccgttggattgcataaagactgtattacaggttagaggcagcgaaactgtctccatcgaaataatgaaggatgcgaacacttttggtagagcctcaagagccatactggaggttcatggttggaaggggttttggcgaggtttgaaaccaaggatagtggctaatataccagccactgccatttcttggactgcatatgaatgtgctaagcattttttaatgaaaaattga

SEQ ID NO: 6958 - DNA, 915 bp, Artificial Sequence
  Description of Artificial Sequence: Synthetic polynucleotide
atgaatacttctgaattatctatagctgaggaaatcgactacgaagctcttccatctcatgctccgcttcattcccagttattggcaggagcatttgcaggtataatggagcattctttgatgtttccaatagatgctttgaaaaccagagtgcaggctgcaggattgaataaagctgcctctacagggatgatatctcagatatccaaaatatctacaatggaaggttctatggctttatggaagggtgttcaaagtgtaatattaggggcagggcctgcgcatgcagtatattttggtacatacgagttttgcaaagctcgcttaataagccctgaagatatgcaaactcatcaaccaatgaagaccgcattaagtggtaccattgctaccattgctgcggatgcattgatgaacccctttgacaccgttaaacaaagattacaattggatactaatttaagagtttggaatgttactaagcaaatatatcaaaatgaaggctttgcagcattttactactcctatcccacaacattggccatgaatatcccatttgcagcgttcaatttcatgatatatgaatctgccagcaaattcttcaacccacaaaattcctacaatccattgattcattgtctttgcggtgggataagtggtgcaacatgtgctgcgttaactacaccgttggattgcataaagactgtattacaggttagaggcagcgaaactgtctccatcgaaataatgaaggatgcgaacacttttggtagagcctctagagccatattggaggttcatggttggaaggggttttggagaggtttgaaaccaaggatagtggctaatataccagccactgccatttcttggactgcatatgaatgtgctaagcattttttaatgaaaaattga

SEQ ID NO: 6959 - DNA, 1215 bp, Saccharomyces cerevisiae
atgaccattattcagacggttactgaattgggtgttaccgaggacaccattaaggttcagatggctccttccggcggcaaacacctattggcagatcccggtaatcatccagcggagcattttgagagccagatgtcgtggctaaggtttcaaacaaggcagtatctaactagattcacagacaaccaatcagatttcgtacattctttacaaaaaaagcacagaacgccttttagagacgtttatttcaaatacacttcgcttatgggttcccacatgttttatgttatcgtgcttcccatgcctgtgtggcttggataccgcgatttaacacgggacatgatctacgttcttggttattcaatttatttgagtggctacttaaaggattattggtgcctaccaaggccaaaatcaccgccagttgacagaatcacactaagtgaatacactacgaaagaatatggtgcacccagttcacattctgctaacgctactgcggtaagtctattattcttttggagaatatgtttatctgacacactggtatggccaacaaagcttcttttactgagtctggtgatattttactacttaaccctggtttttggtagagtttactgcggtatgcatggtatgctggatttatttagcggcgccgcagttggagctatctgtttttttataagaatctgggtggtgcatgctttacgaaatttccagattggtgaacatctctggtttccccttttgagtgtagcatggggcttgtttattctgtttaaccacgtcaggcccattgatgaatgtccttgtttcgaagatagcgtagcgttcattggcgtagtcagtgggctggattgcagcgactggttaaccgaaagatacggatggaaccttgtatgtagtaggtacgcatcatgtggttctaaggtgttcttgaggcctctggtaggtgtcgcttctgtgattgtttggaaagacgtcattagcaagacagctgtctacacgctgttaattaaactactcagatttcacgatgatagaagcgaaaaggttcatttccataacgagacaagtgaagaagaagagtgtttattgtacagcggtgtttccaaagtggaaatcgtcggaaggtttctcatatacgcaggtatacctacaaccgtctttttgctatgcccagtttttttcacttggacaaacttaaggtag

SEQ ID NO: 6960 - DNA, 1215 bp, Artificial Sequence
  Description of Artificial Sequence: Synthetic polynucleotide
atgaccattattcagacggttactgaattgggtgttaccgaggacaccattaaggttcagatggctccttccggcggcaaacacttattggcagatcccggtaatcatccagcggagcattttgagagccagatgtcttggttaaggtttcaaacaaggcagtatttgactagattcacagacaaccaatctgatttcgtacattctttacaaaaaaagcacagaacgccttttagagacgtttatttcaaatacacttctcttatgggttcccacatgttttatgttatcgtgcttcccatgcctgtgtggcttggataccgcgatttaacaagagacatgatctacgttcttggttattctatttatttgagtggctacttaaaggattattggtgcttaccaaggccaaaatctccgccagttgacagaatcacattgagtgaatacactacgaaagaatatggtgcacccagttctcattctgctaacgctactgcggtaagtttgttattcttttggagaatatgtttatctgacacattggtatggccaacaaagcttcttttattaagtttagtgatattttactacttaaccttggtttttggtagagtttactgcggtatgcatggtatgcttgatttatttagcggcgccgcagttggagctatctgtttttttataagaatctgggtggtgcatgctttaagaaatttccagattggtgaacatctctggtttccccttttgagtgtagcatggggcttgtttattttatttaaccacgtcaggcccattgatgaatgtccttgtttcgaagatagcgtagcgttcattggcgtagtcagtgggttagattgcagcgactggttaaccgaaagatacggatggaaccttgtatgtagtaggtacgcatcttgtggttctaaggtgttcttgaggcctttggtaggtgtcgcttctgtgattgtttggaaagacgtcattagcaagacagctgtctacacgttattaattaaattactcagatttcacgatgatagaagcgaaaaggttcatttccataacgagacaagtgaagaagaagagtgtttattgtacagcggtgtttccaaagtggaaatcgtcggaaggtttctcatatacgcaggtatacctacaaccgtctttttgctttgcccagtttttttcacttggacaaacttaaggtga

SEQ ID NO: 6961 - DNA, 12279 bp, Saccharomyces cerevisiae
atgtgcaagaatgaggcaagacttgctaatgagctgatagaatttgttgcagctactgtaacgggtataaagaattctcccaaagagaatgagcaagcattcattgattatctacattgtcaataccttgaacggtttcaattttttttgggattattggatgggagagagttcgacacgttgtttgtcttcctttttgaagagctggatagaacaatagttacaatagacattggtgaagaggctatatatgatgccaacttggcgaataaaaagtattctactctattaattattaaatctagaagtgttattgtggatgcagaaccgattgcaacacaaataagtgccatatacttacctggtccagtaaatgcggggaacctggcctcaattatcacacatggcgtatcgtctgtgtttggccaattgataaaatcagatacaaagacatattctgtcgaaactatagataaaacgaggaggaaacttgacgacatttctaaacaatttcaacagttacatacctcaattgaaacgccagatcttttagcgatggtccctagcattatcaaattggctgtatcaaaaggggctacttcacatgattatgcaaactaccttcctagtaatgatttggaaagtatgagatttttgaacattttacaaagcattgcaaacaaatggtttttggttcttaaacaaacattagccattgacagagatataaaaaatggttcttttttagacgaagttgagttttggtcgaatttctacgaagtactgaagtcgttaattgaacaaacacaaagccaagaatttcaggtgtgtctatccgttctaacaaacgcaaagagatttcataatttaacaaatttattgaatgaaggttcactttcagataaatttaagctagcggataaatataaccaatttctatcgtcaatccctatcgatgaggttcgccaggcaagcaatcttgaggacttgcaggaactatttcctgttttagcatcttctttgaagaagttcagatattcaggttatccagttcaaagatttgttgtgctgatggacaaaatttcacaagaagtcatggatgcaattctaagtaatctttcagatttatttcagctagagtatggttcttttttgggtttatatgaaaaatcagcaggcatgatagaagaatgggatgatattgtccaggatgtcaatcttttaataagagaggatcttaggaaaagagcaccacaggagctacttatacaaaagctaacatttacaagtgcatccgtaaaggctactttggatgaaattttaagcacacgcaagcgatttttttcattggcagaaaccattaagagtatatccccttctacttatcacgaagaaatacagagattgtatcatccatttgagcagatccatgatatttccgtgaattttcgattgaaattggagcaagccgaaagtgaattcagtaaaaacatgctcgatttggaaaagaagttacaaaatacgttggcaagttttatggactctgatcactgtccaaccgaaaaattaagttatctagtaaaattcaagccattaatggaactttgtcctaggataaaagtaaaagtactagagaatcaacagatactgctacttgaaataaaaaaagatatacggcaactggagactggtttagagctcttgcctaaaattctgcacgtggaagctttaaataacattcctcccatatctgcaagaatttcctactttctgaatgtacaatcccgtattgacaatatagtgcagtatctcgaagcactttttggttctaattggaatgacacacttgaagggcgttcgatatcaacttcgatagtacaactacgtaaggaaacaaatcctcacgatgtgttccttcactggttggggaattttcctgaaaaagcaacagcaaatcttttgacgacacctattttaaagcttataagaaataatgaggatgattatgaactaaaagtcaacttcgattttgccttagctgctgcttactcggaattaaggagtttaacctatatggcttttcaagtgcctagccacatagtacgtattgcgagaacttacatgtatttgtatccgagggcaataaacttggttgaactaattcaaacttttttttcacttagtaaatcactttcctatacattttacacgaacatctttctgaagagaaacgtgcaaactgtatggctactattacaacaaattctgataacgccgtgggaatctttacaagaggaaagttccgaaatgtcctgttcggtacacagcctagcaagattggaaaagtcaattgatggaattctttctgattatcaaatattgaaaaactccgagcctcagtttgccaaggaattttctggcctgaaatcttttgacggtactgctgatgatctgcacgaagtggaggaaataataagcaatattcaagctatttttgaaaatctttttaccaagggtcttactaatgttagtgaccatatttccacgtttaataacttaattatcagcataatcttggagaaagtacgcttaaatttgaaaaaaatgcatttcccaaagcatgtattgaaactcagtttcaatgaaggtagaataacatcatctccatcgttagctgctatgaaacgttctttactgaaggatattgaggctcttttaaacaaagttgttttaattaattttttgcatgaccctgatcatcctctttccactaccctgacttttaattcgctagtcatcaaactaaaagatgatatacaaaattgtatagaacaggttcaaaatttacattgtaagataaattcttacgtcaaagaatggcaaaagatggaatttctctggcaaattacagaggaagcgtttttagaagtagtcgataacagtacacaaagatgctttggaattttaaaaggccttcttgattctcagtcaaaattcgatctaattataagccgaaataacttttcaaagaacttagtgcttcatacagaagatgcgcaacgtcatatccgttcgaaaatggattcttggatcttatatgtcagcaagcatctcttaacaatatatgaacgcgatgctagaaaattgcatgaagatatgaacagggacagagaagctgtcgaggatatggatataaattttacctctttaaagaatataacagtgatcattgaggctgtcaatgtaaataaaaggcatctcactgaacgagatatccaaatcaagctgcttgggtctgttatgagggcgcttacaaagctgaaggtgaggtttccatcgcattttgtctatatagaccagctcgataacgattttagttcgttgaggcaaagtttgagctatgttgaacaagagttgcaaaaacatcgcgttgttatagcaaaaagtctagaagaaggcgttgaaaatatcaataatctctcacaatctttgaacgaaagttggtcagtcagaaaaccaatatctccaacattaactccacctgaagcacttaaaatcctagagtttttcaatgaatcaattactaaattgaagaaaaagatgcactctgtcgcagccgctgcaaaaatgttactgatccccgttgttttgaatgaccagctaacacacgtggttgaagaggtcaaaacgtatgacctagtttggaggagcattaaaaacctttgggaagatgttcaaagaactttcgaaacgccgtggtgtagagtagatgtattgctacttcaatcggatttggcaaactttcttcggagggcggatgaactgccgagagctgtcaaacaatttgagatgtataaatcgctattttcacaggttaacatgcttacctctgtaaataaaatcttggtggagttaaaggatggtgctttaaagccacgacattggaacatgatattccgcgatattggtaaaagacagatacaaaaaaatctactggataaattggagttttctcttaaagatgtcatggtcctcaatttaactttaaatgaaatactacttacaaagattatagaaagagcccaaaaggaatttgttatagaaaagtctctgaacagaatcaaaaaattttggaaggaagctcaatatgaagtcatagagcactccagtggactcaagcttgtgagggaatgggatgtactggagcaagcctgtaaagaggatctagaggagctagtttctatgaaagcttcgaattattacaagatttttgaacaagactgtttggatttggaatctaaactgacaaaattatctgaaattcaggtaaattgggttgaagtacagttttactggttggacttgtatggaatccttggtgaaaacttggacattcaaaacttcttaccgctcgaaacttcgaaatttaaaagcttaaccagtgagtataaaatgataaccacaagagcgtttcaactcgacacaacaatcgaagtaatacatattccaaatttcgacacaactctgaagttaacgatagattctttaaagatgataaaatcgtcactatcgacatttttagagagacaaagaagacaattcccaaggttttactttttaggcaacgatgatcttttaaaaatcataggatctggaaaacaccacgaccaagtttcaaagtttatgaagaaaatgttcggaagcattgagtctataatattcctcgaagatttcataaccggtgtgcggtcagtggaaggtgaagtcctaaatttgaatgaaaaaatcgagctgaaggactcgattcaagctcaagagtggttaaacattttagacacagaaattaagctaagcgtcttcactcaatttagagactgtttgggccaactgaaagatggaacggacattgaagtagttgtatctaaatatatctttcaagccattcttctctcagctcaagttatgtggacggagctcgttgaaaaatgccttcaaactaatcaattttcaaagtactggaaagaagttgatatgaagattaagggactgctggataagttgaataaatcttccgataacgtgaagaaaaaaatagaggccctactggttgagtatttgcattttaataacgttattggacagcttaaaaattgttccactaaggaagaagctcgactactatgggcgaaagttcaaaagttttatcaaaagaatgacactttagatgatctcaactccgtttttatttctcagagtggctacctcttgcaatataaatttgagtatattggcatcccagaaagattaatatatacaccgttgcttcttattgggtttgcgacactcacagattctctgcatcaaaaatatggtgggtgcttcttcggtcctgcgggcacaggtaaaacagaaactgtgaaagcatttggtcaaaatctcggtcgcgtggttgtagtttttaattgtgatgattccttcgattatcaggttctttccaggcttctagtaggtatcacacagattggcgcatggggatgcttcgatgaattcaataggctcgatgagaaagttttgagtgcggtgtctgccaatatccaacaaatacaaaatggcctccaggttggtaagtcccatattacacttttagaagaagaaactccattgagccctcacactgcagtgtttattactttgaatcctgggtataatggaaggtcagagttaccggaaaatttgaagaagagttttcgagaattctctatgaaatctccgcaaagtggtactattgcagagatgatattacaaattatggggttcgaagattctaagtctttagcttcgaaaattgttcattttttagaactgttgtcttcaaaatgcagttcaatgaaccattatcattttggtttgagaacgctaaaaggtgtattaagaaattgcagccctttgattagtgaatttggtgaaggggaaaaaacggtagtcgaaagtttgaaaagagtgattttaccatcgctcggtgacaccgatgaattggtattcaaagacgaattatcgaaaatatttgattctgctggaacgccgctaaattcgaaggctattgttcaatgtttaaaggacgctggtcaaaggagtggcttttcaatgtctgaggaatttctcaagaaatgtatgcagttttattacatgcaaaaaacacaacaggctttgatactggtaggtaaggcaggctgtggtaaaacggcaacgtggaaaactgttattgatgccatggccatttttgatggtcacgctaacgtcgtctatgttattgatacaaaagttcttacaaaagaatccttgtatggaagtatgcttaaagcaacgctagagtggagagatgggctttttacttcgattctaagaagggttaacgatgatatcacaggaacttttaagaattcgagaatttgggtagtatttgatagtgatttagacccagaatatgtggaagccatgaattctgttcttgatgataataaaattttaacgcttccaaacggtgaaagacttcctattccgccgaactttcgcattttatttgaaacggataaccttgaccatactacacctgctactataacaagatgtggtttgctgtggttttctacggatgtgtgttcaatatcctccaagattgaccacctactgaataaaagttatgaagcgcttgataataaactatccatgtttgaattagataagttgaaggaccttatatctgattcttttgatatggcctctttaaccaatatttttacgtgttcaaatgatttagttcacattctcggggttcgaacctttaataagttagaaaccgcggtgcagttggctgttcatttaatatcgagttataggcagtggtttcaaaacttggacgataaaagtttgaaagatgtgattactttattgattaagagatccctactatatgcactagctggtgattcaactggtgaatcacaaagagcttttatacaaactataaacacttattttggacatgacagccaagaactatcagattattctaccatagttattgcgaacgataagttgagttttagttccttttgttccgaaattccctctgtttctttagaagcacatgaggtcatgaggcctgacattgttattcctacaattgatacgattaagcatgagaaaattttttatgacttgctcaattcaaaaaggggtattatcctttgtgggccacctggatctggtaaaacaatgattatgaataatgcactccggaactcttcgctctatgatgttgttggaataaatttttcgaaagacacgaccacagaacatattttgtcagccttgcataggcatacaaactacgtaactacatcaaaaggccttactttgttaccaaaatcggatataaaaaatttggtattattttgtgacgagattaatttaccaaaactcgacaagtatggttctcaaaatgtcgtcttattcttaaggcagttgatggaaaagcaaggattttggaaaacgccagaaaataagtgggtgacaatagagaggatacatattgttggtgcctgcaatcctccaaccgacccaggtagaattcctatgtcagaaagatttacacgacatgctgctattctttacctaggttatcccagcggaaaatctctttctcaaatttatgaaatttattacaaagccattttcaagctagtccctgagttcagatcatacacagagcccttcgcccgcgcttccgttcatttatataacgaatgtaaagcaagatacagtactgggcttcaatcacactatcttttttcaccaagagaattaacacgtttggttaggggtgtctacactgcaattaacactggtccaaggcaaacactaagatcactaatacggttatgggcttacgaagcttggagaatatttgcagataggctggttggtgtaaaagaaaaaaacagttttgaacaacttctttatgagacagtcgataaatatttacctaatcaggatttgggtaatataagctcaacttcacttctcttttcgggcttgttgagccttgatttcaaagaggtcaacaaaacagatcttgtaaactttatagaggaaagatttaaaacattctgtgatgaggagctggaagtgccaatggttatacacgagtctatggttgaccatattttgcgtattgatcgtgcgttaaaacaagttcaaggtcacatgatgctaattggtgcaagcagaacaggtaaaactattttaactaggtttgtcgcgtggttgaacggtttgaagattgttcaacccaagatccaccgtcattccaatcttagcgactttgatatgattttgaaaaaagctatttcagactgttcacttaaagaatctcgtacttgtttaatcattgatgaatccaacattttagagacggcttttttggagagaatgaatacattacttgccaacgctgatataccagatttgtttcaaggagaggagtatgataagctcttgaataacttgcgaaataaaaccaggtctttaggtcttttattggatacagaacaagaactgtatgactggtttgttggagaaattgccaaaaaccttcatgttgtcttcacgatctgcgatcctacaaacaataagtcctcagcaatgataagttctccagcccttttcaatcgttgcataattaattggatgggtgattgggatacgaaaacaatgtcccaagtggccaacaatatggtggacgtgatccctatggaatttaccgattttatagttccagaggtcaataaagagttggtatttacggagccaatccaaactataagagatgctgtggttaatattctgatacattttgatagaaatttttaccaaaaaatgaaggttggggtaaatccaaggtcacctgggtattttattgatggtttacgtgccttagtgaagcttgttacggcgaaatatcaagatttacaggaaaatcaaagatttgttaatgtaggtctcgaaaaactaaacgagtctgtcttgaaggttaacgaactaaacaaaactttgtcaaagaagagtacggaacttactgagaaagaaaaggaagcccggagtacattggataaaatgcttatggagcaaaacgagtcggaaagaaagcaggaggctacagaggaaatcaaaaagatattgaaagtacaagaagaagatataagaaaaagaaaggaggtcgtcatgaaaagtattcaagatatcgaacctaccattttagaggcacaacggggtgtaaagaacataaaaaagcaacagttgacagaaatcagatcaatggtcaaccccccctctggtgtgaaaattgttatggaggctgtttgcgccatcttgggctaccaattttccaactggagagatatccaacaatttattagaaaagatgactttattcataatatagtacattatgataccaccttacatatgaagccccaaattcgaaaatatatggaggaagaatttttgtcagatcctaattttacttatgagacaattaacagggccagcaaagcgtgtgggccgctatatcagtgggtcaatgcccaaataaacttcagtaaagttttagaaaacgtagatccgctgagacaagaaatgaaaagaatagagttcgaatcattgaagacgaaggccaatttacttgccgctgaagaaatgacacaggatttagaagcaagtattgaagtttcaaagcgaaaatatagtttgttgattagggatgttgaggccatcaagacagaaatgagtaacgtgcaggctaatcttgataggtctatatctttagttaagagtttaaccttcgaaaaagaaaggtggctgaacactacaaagcaatttagtaagacgagccaagagctgattggaaattgcataatttcatccatatatgaaacatactttggtcatttgaatgaaagggaaagagctgacatgttagtcattttaaagcgcctactaggcaaatttgctgttaaatatgatgtaaattatcgtttcatcgattatttggtaacactagatgaaaaaatgaagtggcttgaatgtggcttggataagaacgattactttttggaaaatatgagcatagtcatgaattcacaagacgctgttccttttcttttggatccaagctcccacatgataacagttatctcgaattattatggtaataaaactgtacttctcagttttcttgaagaaggttttgttaaaagattagaaaatgcaattagattcggaagtgtagttataattcaggatggagaattctttgatccaattatatcaagactaatctccagagagttcaatcatgccggaaacagagtcacggtggagattggtgatcatgaagtagatgtttcaggcgattttaaattattcattcactcttgcgatcccagtggagatattccaatattcctcagatctagggtaaggttagttcattttgtcacgaataaggaaagtattgagacacgaatttttgacatcactttgacagaagagaatgcagaaatgcaaaggaaaagggaagatttgataaaattgaataccgaatacaagttgaaactgaagaatctagaaaagcgacttttggaggaactaaataactcacaggggaatatgttggaaaatgatgaactgatggtgactttgaacaacctgaagaaagaggccatgaacattgaaaaaaagctaagtgaatctgaagagtttttcccacagtttgataatctggtagaagagtattctattatcggtaagcatagtgtcaaaatattctctatgttggagaagtttggtcagtttcattggttttacggcatttctataggacaatttctatcatgtttcaaacgtgtcttcattaagaaatctagggaaacaagagcagctaggacacgggtagatgaaattctttggctattatatcaagaagtatattgtcaattctccaccgctcttgacaaaaaatttaaaatgattatggctatgacgatgttttgtttgtataaattcgacattgaaagtgaacaatataaagaggcagttctaactatgattggagttctctctgaaagtagcgatggcgtaccaaaactaaccgtagatacaaataatgatttgcggtacttatgggactatgttacaaccaaatcgtatatatctgcgttgaactggttcaaaaatgagttttttgttgatgagtggaatatcgcggatgtggtagccaattccgagaacaactattttacaatggcaagcgagcgagatgttgatggcacattcaaattaatcgaattggcgaaagcctcgaaggaatcgttaaaaatcatcccgctagggtctatagaaaatctaaactatgctcaagaggaaatatcaaaatctaagatagaaggtggttggatattattacaaaacatacaaatgtcgctatcatgggtgaaaacgtatctgcacaagcatgttgaggagacaaaggcggcagaagaacatgagaaattcaaaatgttcatgacatgccatttgactggtgataaactacctgccccattgctacaaagaactgatagatttgtgtatgaggatatcccaggtatactagataccgtcaaagatctatggggttctcaatttttcactggtaaaatttcaggagtatggagcgtgtattgtaccttcctattgtcatggtttcatgccttgatcactgccaggacccgattggttcctcatgggttttccaagaagtattactttaatgattgcgactttcaatttgcctcagtgtatttagagaatgtattagccaccaattctaccaacaacattccttgggcacaagtgcgagatcacatagctacgatcgtatacggaggaaagatcgatgaagagaaagaccttgaagtggtcgctaaactttgtgcgcacgtattctgcggctcggacaatttgcagatcgttcctggggtacgaatcccacagcctcttcttcaacaaagtgaagaagaggaacgggcaaggcttactgccatactgtctaatacgattgagcctgcagattcactcagttcatggcttcaattgccaagggaatctattttgaattacgaacgtcttcaggctaaagaggtggctagctcaactgaacaacttcttcaagaaatgtag

SEQ ID NO: 6962 - DNA, 12279 bp, Artificial Sequence
  Description of Artificial Sequence: Synthetic polynucleotide
atgtgcaagaatgaggcaagacttgctaatgagttgatagaatttgttgcagctactgtaacgggtataaagaattctcccaaagagaatgagcaagcattcattgattatttgcattgtcaataccttgaaagatttcaattttttttgggattattggatgggagagagttcgacacgttgtttgtcttcctttttgaagagttagatagaacaatagttacaatagacattggtgaagaggctatatatgatgccaacttggcgaataaaaagtattctactttattaattattaaatctagaagtgttattgtggatgcagaaccgattgcaacacaaataagtgccatatacttacctggtccagtaaatgcggggaacttggcctctattatcacacatggcgtatcttctgtgtttggccaattgataaaatctgatacaaagacatattctgtcgaaactatagataaaacgaggaggaaacttgacgacatttctaaacaatttcaacagttacatacctctattgaaacgccagatcttttagcgatggtccctagcattatcaaattggctgtatccaaaggggctacttctcatgattatgcaaactaccttcctagtaatgatttggaaagtatgagatttttgaacattttacaaagcattgcaaacaaatggtttttggttcttaaacaaacattagccattgacagagatataaaaaatggttcttttttagacgaagttgagttttggtctaatttctacgaagtattgaagtctttaattgaacaaacacaaagccaagaatttcaggtgtgtttatccgttttgacaaacgcaaagagatttcataatttaacaaatttattgaatgaaggttctctttctgataaatttaagttggcggataaatataaccaatttttatcttctatccctatcgatgaggttcgccaggcaagcaatcttgaggacttgcaggaattatttcctgttttagcatcttctttgaagaagttcagatattctggttatccagttcaaagatttgttgtgttgatggacaaaatttctcaagaagtcatggatgcaattttaagtaatctttctgatttatttcagttggagtatggttcttttttgggtttatatgaaaaatctgcaggcatgatagaagaatgggatgatattgtccaggatgtcaatcttttaataagagaggatcttaggaaaagagcaccacaggagttgcttatacaaaagttaacatttacaagtgcatccgtaaaggctactttggatgaaattttaagcacacgcaagagatttttttctttggcagaaaccattaagagtatatccccttctacttatcacgaagaaatacagagattgtatcatccatttgagcagatccatgatatttccgtgaattttagattgaaattggagcaagccgaaagtgaattcagtaaaaacatgctcgatttggaaaagaagttacaaaatacgttggcaagttttatggactctgatcactgtccaaccgaaaaattaagttatttggtaaaattcaagccattaatggaactttgtcctaggataaaagtaaaagtattggagaatcaacagatattattacttgaaataaaaaaagatataagacaattggagactggtttagagctcttgcctaaaattttacacgtggaagctttaaataacattcctcccatatctgcaagaatttcctactttttgaatgtacaatcccgtattgacaatatagtgcagtatctcgaagcactttttggttctaattggaatgacacacttgaagggcgttctatatctacttccatagtacaattgcgtaaggaaacaaatcctcacgatgtgttccttcactggttggggaattttcctgaaaaagcaacagcaaatcttttgacgacacctattttaaagcttataagaaataatgaggatgattatgaattgaaagtcaacttcgattttgccttagctgctgcttactctgaattaaggagtttaacctatatggcttttcaagtgcctagccacatagtacgtattgcgagaacttacatgtatttgtatccgagggcaataaacttggttgaattgattcaaacttttttttcccttagtaaatctctttcctatacattttacacgaacatctttttgaagagaaacgtgcaaactgtatggttgttattacaacaaattttaataacgccgtgggaatctttacaagaggaaagttccgaaatgtcctgttctgtacacagcttagcaagattggaaaagtctattgatggaattctttctgattatcaaatattgaaaaactccgagcctcagtttgccaaggaattttctggcttgaaatcttttgacggtactgctgatgatttacacgaagtggaggaaataataagcaatattcaagctatttttgaaaatctttttaccaagggtcttactaatgttagtgaccatatttccacgtttaataacttaattatcagcataatcttggagaaagtacgcttaaatttgaaaaaaatgcatttcccaaagcatgtattgaaactcagtttcaatgaaggtagaataacatcttctccatctttagctgctatgaaacgttctttattgaaggatattgaggctcttttaaacaaagttgttttaattaattttttgcatgaccctgatcatcctctttccactaccttaacttttaattctttggtcatcaaattgaaagatgatatacaaaattgtatagaacaggttcaaaatttacattgtaagataaattcttacgtcaaagaatggcaaaagatggaatttctctggcaaattacagaggaagcgtttttagaagtagtcgataacagtacacaaagatgctttggaattttaaaaggccttcttgattctcagtccaaattcgatttgattataagcagaaataacttttccaagaacttagtgcttcatacagaagatgcgcaacgtcatatccgttctaaaatggattcttggatcttatatgtcagcaagcatctcttaacaatatatgaacgcgatgctagaaaattgcatgaagatatgaacagggacagagaagctgtcgaggatatggatataaattttacctctttaaagaatataacagtgatcattgaggctgtcaatgtaaataaaaggcatctcactgaaagagatatccaaatcaagcttcttgggtctgttatgagggcgcttacaaagttgaaggtgaggtttccatctcattttgtctatatagaccagctcgataacgattttagttctttgaggcaaagtttgagctatgttgaacaagagttgcaaaaacatcgcgttgttatagcaaaaagtttagaagaaggcgttgaaaatatcaataatctctctcaatctttgaacgaaagttggtctgtcagaaaaccaatatctccaacattaactccacctgaagcacttaaaatcttggagtttttcaatgaaagtattactaaattgaagaaaaagatgcactctgtcgcagccgctgcaaaaatgttattgatccccgttgttttgaatgaccagttgacacacgtggttgaagaggtcaaaacgtatgacttggtttggaggagcattaaaaacctttgggaagatgttcaaagaactttcgaaacgccgtggtgtagagtagatgtattgttacttcaatctgatttggcaaactttcttagaagggcggatgaattaccgagagctgtcaaacaatttgagatgtataaatctttattttcccaggttaacatgcttacctctgtaaataaaatcttggtggagttaaaggatggtgctttaaagccaagacattggaacatgatattccgcgatattggtaaaagacagatacaaaaaaatttattagataaattggagttttctcttaaagatgtcatggtcctcaatttaactttaaatgaaatattacttacaaagattatagaaagagcccaaaaggaatttgttatagaaaagtctttgaacagaatcaaaaaattttggaaggaagctcaatatgaagtcatagagcactccagtggactcaagcttgtgagggaatgggatgtattggagcaagcctgtaaagaggatttagaggagttagtttctatgaaagcttctaattattacaagatttttgaacaagactgtttggatttggaatctaaattaacaaaattatctgaaattcaggtaaattgggttgaagtacagttttactggttggacttgtatggaatccttggtgaaaacttggacattcaaaacttcttaccgctcgaaacttctaaatttaaaagcttaaccagtgagtataaaatgataaccacaagagcgtttcaactcgacacaacaatcgaagtaatacatattccaaatttcgacacaactttgaagttaacgatagattctttaaagatgataaaatcttctttatctacatttttagagagacaaagaagacaattcccaaggttttactttttaggcaacgatgatcttttaaaaatcataggatctggaaaacaccacgaccaagtttccaagtttatgaagaaaatgttcggaagcattgagtctataatattcctcgaagatttcataaccggtgtgagatctgtggaaggtgaagtcttgaatttgaatgaaaaaatcgagttgaaggacagtattcaagctcaagagtggttaaacattttagacacagaaattaagttgagcgtcttcactcaatttagagactgtttgggccaattgaaagatggaacggacattgaagtagttgtatctaaatatatctttcaagccattcttctctctgctcaagttatgtggacggagctcgttgaaaaatgccttcaaactaatcaattttccaagtactggaaagaagttgatatgaagattaagggacttttagataagttgaataaatcttccgataacgtgaagaaaaaaatagaggccttattggttgagtatttgcattttaataacgttattggacagcttaaaaattgttccactaaggaagaagctaggcttttatgggcgaaagttcaaaagttttatcaaaagaatgacactttagatgatctcaactccgtttttatttctcagagtggctacctcttgcaatataaatttgagtatattggcatcccagaaagattaatatatacaccgttgcttcttattgggtttgcgacactcacagattctttgcatcaaaaatatggtgggtgcttcttcggtcctgcgggcacaggtaaaacagaaactgtgaaagcatttggtcaaaatctcggtcgcgtggttgtagtttttaattgtgatgattccttcgattatcaggttctttccaggcttttggtaggtatcacacagattggcgcatggggatgcttcgatgaattcaataggctcgatgagaaagttttgagtgcggtgtctgccaatatccaacaaatacaaaatggcctccaggttggtaagtcccatattacacttttagaagaagaaactccattgagccctcacactgcagtgtttattactttgaatcctgggtataatggaaggagtgagttaccggaaaatttgaagaagagttttagagaattctctatgaaatctccgcaaagtggtactattgcagagatgatattacaaattatggggttcgaagattctaagtctttagcttccaaaattgttcattttttagaattattgtcttctaaatgcagttctatgaaccattatcattttggtttgagaacgttgaaaggtgtattaagaaattgcagccctttgattagtgaatttggtgaaggggaaaaaacggtagtcgaaagtttgaaaagagtgattttaccatctctcggtgacaccgatgaattggtattcaaagacgaattatccaaaatatttgattctgctggaacgccgttaaattctaaggctattgttcaatgtttaaaggacgctggtcaaaggagtggcttttccatgtctgaggaatttctcaagaaatgtatgcagttttattacatgcaaaaaacacaacaggctttgatattagtaggtaaggcaggctgtggtaaaacggcaacgtggaaaactgttattgatgccatggccatttttgatggtcacgctaacgtcgtctatgttattgatacaaaagttcttacaaaagaatccttgtatggaagtatgcttaaagcaacgttggagtggagagatgggctttttacttctattttaagaagggttaacgatgatatcacaggaacttttaagaattctagaatttgggtagtatttgatagtgatttagacccagaatatgtggaagccatgaattctgttcttgatgataataaaattttaacgcttccaaacggtgaaagacttcctattccgccgaactttcgcattttatttgaaacggataaccttgaccatactacacctgctactataacaagatgtggtttgttatggttttctacggatgtgtgttctatatcctccaagattgaccacttgttgaataaaagttatgaagcgcttgataataaactttccatgtttgaattagataagttgaaggaccttatatctgattcttttgatatggcctctttaaccaatatttttacgtgttctaatgatttagttcacattctcggggttagaacctttaataagttagaaaccgcggtgcagttggctgttcatttaatatctagttataggcagtggtttcaaaacttggacgataaaagtttgaaagatgtgattactttattgattaagagatccttattatatgcattggctggtgattctactggtgaatctcaaagagcttttatacaaactataaacacttattttggacatgacagccaagaattaagtgattattctaccatagttattgcgaacgataagttgagttttagttccttttgttccgaaattccctctgtttctttagaagcacatgaggtcatgaggcctgacattgttattcctacaattgatacgattaagcatgagaaaattttttatgacttgctcaattctaaaaggggtattatcctttgtgggccacctggatctggtaaaacaatgattatgaataatgcactcagaaactcttctctctatgatgttgttggaataaatttttccaaagacacgaccacagaacatattttgagtgccttgcataggcatacaaactacgtaactacaagtaaaggccttactttgttaccaaaatctgatataaaaaatttggtattattttgtgacgagattaatttaccaaaactcgacaagtatggttctcaaaatgtcgtcttattcttaaggcagttgatggaaaagcaaggattttggaaaacgccagaaaataagtgggtgacaatagagaggatacatattgttggtgcctgcaatcctccaaccgacccaggtagaattcctatgtctgaaagatttacaagacatgctgctattctttacttgggttatcccagcggaaaatctctttctcaaatttatgaaatttattacaaagccattttcaagttggtccctgagttcagatcttacacagagcccttcgcccgcgcttccgttcatttatataacgaatgtaaagcaagatacagtactgggcttcaatctcactatcttttttctccaagagaattaacacgtttggttaggggtgtctacactgcaattaacactggtccaaggcaaacattaagatccttgataagattatgggcttacgaagcttggagaatatttgcagataggttggttggtgtaaaagaaaaaaacagttttgaacaacttctttatgagacagtcgataaatatttacctaatcaggatttgggtaatataagctctacttctcttctcttttctggcttgttgagccttgatttcaaagaggtcaacaaaacagatcttgtaaactttatagaggaaagatttaaaacattctgtgatgaggagttagaagtgccaatggttatacacgagtctatggttgaccatattttgcgtattgatcgtgcgttaaaacaagttcaaggtcacatgatgttgattggtgcaagcagaacaggtaaaactattttaactaggtttgtcgcgtggttgaacggtttgaagattgttcaacccaagatccaccgtcattccaatcttagcgactttgatatgattttgaaaaaagctatttctgactgttctcttaaagaatctcgtacttgtttaatcattgatgaatccaacattttagagacggcttttttggagagaatgaatacattacttgccaacgctgatataccagatttgtttcaaggagaggagtatgataagctcttgaataacttgagaaataaaaccaggtctttaggtcttttattggatacagaacaagaattgtatgactggtttgttggagaaattgccaaaaaccttcatgttgtcttcacgatctgcgatcctacaaacaataagtcctctgcaatgataagttctccagcccttttcaatcgttgcataattaattggatgggtgattgggatacgaaaacaatgtcccaagtggccaacaatatggtggacgtgatccctatggaatttaccgattttatagttccagaggtcaataaagagttggtatttacggagccaatccaaactataagagatgctgtggttaatattttaatacattttgatagaaatttttaccaaaaaatgaaggttggggtaaatccaaggtctcctgggtattttattgatggtttacgtgccttagtgaagcttgttacggcgaaatatcaagatttacaggaaaatcaaagatttgttaatgtaggtctcgaaaaattgaacgagtctgtcttgaaggttaacgaattgaacaaaactttgtccaagaagagtacggaacttactgagaaagaaaaggaagccagaagtacattggataaaatgcttatggagcaaaacgagagtgaaagaaagcaggaggctacagaggaaatcaaaaagatattgaaagtacaagaagaagatataagaaaaagaaaggaggtcgtcatgaaaagtattcaagatatcgaacctaccattttagaggcacaaagaggtgtaaagaacataaaaaagcaacagttgacagaaatcagaagtatggtcaaccccccctctggtgtgaaaattgttatggaggctgtttgcgccatcttgggctaccaattttccaactggagagatatccaacaatttattagaaaagatgactttattcataatatagtacattatgataccaccttacatatgaagccccaaattagaaaatatatggaggaagaatttttgagtgatcctaattttacttatgagacaattaacagggccagcaaagcgtgtgggccgttatatcagtgggtcaatgcccaaataaacttcagtaaagttttagaaaacgtagatccgttaagacaagaaatgaaaagaatagagttcgaatctttgaagacgaaggccaatttacttgccgctgaagaaatgacacaggatttagaagcaagtattgaagtttccaagagaaaatatagtttgttgattagggatgttgaggccatcaagacagaaatgagtaacgtgcaggctaatcttgataggtctatatctttagttaagagtttaaccttcgaaaaagaaaggtggttgaacactacaaagcaatttagtaagacgagccaagagttgattggaaattgcataatttcttccatatatgaaacatactttggtcatttgaatgaaagggaaagagctgacatgttagtcattttaaagcgccttttgggcaaatttgctgttaaatatgatgtaaattatcgtttcatcgattatttggtaacattagatgaaaaaatgaagtggcttgaatgtggcttggataagaacgattactttttggaaaatatgagcatagtcatgaattctcaagacgctgttccttttcttttggatccaagctcccacatgataacagttatctctaattattatggtaataaaactgtacttctcagttttcttgaagaaggttttgttaaaagattagaaaatgcaattagattcggaagtgtagttataattcaggatggagaattctttgatccaattatatctagattgatctccagagagttcaatcatgccggaaacagagtcacggtggagattggtgatcatgaagtagatgtttctggcgattttaaattattcattcactcttgcgatcccagtggagatattccaatattcctcagatctagggtaaggttagttcattttgtcacgaataaggaaagtattgagacaagaatttttgacatcactttgacagaagagaatgcagaaatgcaaaggaaaagggaagatttgataaaattgaataccgaatacaagttgaaattgaagaatttggaaaagagacttttggaggaattgaataactctcaggggaatatgttggaaaatgatgaattgatggtgactttgaacaacttgaagaaagaggccatgaacattgaaaaaaagttgagtgaatctgaagagtttttcccacagtttgataatttggtagaagagtattctattatcggtaagcatagtgtcaaaatattctctatgttggagaagtttggtcagtttcattggttttacggcatttctataggacaatttttaagttgtttcaaacgtgtcttcattaagaaatctagggaaacaagagcagctaggacaagagtagatgaaattctttggttgttatatcaagaagtatattgtcaattctccaccgctcttgacaaaaaatttaaaatgattatggctatgacgatgttttgtttgtataaattcgacattgaaagtgaacaatataaagaggcagttttaactatgattggagttctctctgaaagtagcgatggcgtaccaaaattgaccgtagatacaaataatgatttgagatacttatgggactatgttacaaccaaaagttatatatctgcgttgaactggttcaaaaatgagttttttgttgatgagtggaatatcgcggatgtggtagccaattccgagaacaactattttacaatggcaagcgagagagatgttgatggcacattcaaattaatcgaattggcgaaagcctccaaggaatctttaaaaatcatcccgttagggtctatagaaaatttgaactatgctcaagaggaaatatccaaatctaagatagaaggtggttggatattattacaaaacatacaaatgtctttatcttgggtgaaaacgtatttgcacaagcatgttgaggagacaaaggcggcagaagaacatgagaaattcaaaatgttcatgacatgccatttgactggtgataaattacctgccccattgttgcaaagaactgatagatttgtgtatgaggatatcccaggtatattggataccgtcaaagatttatggggttctcaatttttcactggtaaaatttctggagtatggagcgtgtattgtaccttcttgttgtcctggtttcatgccttgatcactgccaggaccagattggttcctcatgggttttccaagaagtattactttaatgattgcgactttcaatttgcctctgtgtatttagagaatgtattagccaccaattctaccaacaacattccttgggcacaagtgagagatcacatagctacgatcgtatacggaggaaagatcgatgaagagaaagaccttgaagtggtcgctaaactttgtgcgcacgtattctgcggctctgacaatttgcagatcgttcctggggtaagaatcccacagcctcttcttcaacaaagtgaagaagaggaaagagcaaggcttactgccatattatctaatacgattgagcctgcagattctctcagttcttggcttcaattgccaagggaatctattttgaattacgaacgtcttcaggctaaagaggtggctagctctactgaacaacttcttcaagaaatgtga

SEQ ID NO: 6963 - DNA, 876 bp, Saccharomyces cerevisiae
atgaatacactattatttaagcgaaaaggtggcaattgtgggaacgaaagtaacatagtttcgcagggatcgccctcaagtagcaatcttcctgaatcacctggcactttagatgaaaagaatcttcccagattgcctactccattcgctagaagcctttctaccattcctagttatgagcagatgaaacgtacaaacaaactgccagattatcacctaaagattgttgttgtgggagatggcgctgtagggaagacgtgcctgctgatatcttatgtccaaggaacatttccgactgattatattcctactattttcgaaaattatgtcacaaacatagaaggacccaacggtcaaattatagaattggcattatgggacactgccggccaagaagagtatagtagacttagaccgctttcatatacgaatgcagatgtgctgatggtgtgctattctgttggtagtaagacatcgcttaaaaatgtggaagatctctggttcccagaggttaagcatttttgtccttccactccaatcatgctagtcggccttaaatcagatctatatgaagctgataacctttcagatctggtggaaccaagttcagcagaatccttggccaagcgtctgggggcatttgcacatattcaatgctcagcacgattgaaagaaaatatcgatgaagtatttgaaactgccatacacacgttactttccgattcattatatgctcccagagagcctacacatacaatcaaaaatccctttaaaagaaataccaccagatcagatatcgattcttctactggagataccagcgtctctatttccggaacgaaaagattaagaaaaaacaagtgtattataatgtaa

SEQ ID NO: 6964 - DNA, 876 bp, Artificial Sequence
  Description of Artificial Sequence: Synthetic polynucleotide
atgaatacattattatttaagagaaaaggtggcaattgtgggaacgaaagtaacatagtttctcagggaagtcccagtagtagcaatcttcctgaatctcctggcactttagatgaaaagaatcttcccagattgcctactccattcgctagaagcctttctaccattcctagttatgagcagatgaaacgtacaaacaaattaccagattatcacttgaagattgttgttgtgggagatggcgctgtagggaagacgtgcttattgatatcttatgtccaaggaacatttccgactgattatattcctactattttcgaaaattatgtcacaaacatagaaggacccaacggtcaaattatagaattggcattatgggacactgccggccaagaagagtatagtagacttagaccgctttcctatacgaatgcagatgtgttgatggtgtgctattctgttggtagtaagacatctcttaaaaatgtggaagatctctggttcccagaggttaagcatttttgtccttccactccaatcatgcttgtcggccttaaatctgatttatatgaagctgataacctttctgatttggtggaaccaagttctgcagaatccttggccaagcgtcttggggcatttgcacatattcaatgctctgcaagattgaaagaaaatatcgatgaagtatttgaaactgccatacacacgttactttccgattctttatatgctcccagagagcctacacatacaatcaaaaatccctttaaaagaaataccaccagaagtgatatcgattcttctactggagataccagcgtctctatttccggaacgaaaagattaagaaaaaacaagtgtattataatgtga

SEQ ID NO: 6965 - DNA, 1920 bp, Saccharomyces cerevisiae
atgtacgaacagtttgaattttctttttttttcttcgaaaattcagacaataaggttaaatataaagctcatctcatctcatcgataaaacgctggagtattatcacatgcatgcgttgcttttggaccgtacagaagtctatatttaaagctaggtttttcgcttgcagaaactttgtcaagaagcataattataaactaatcagcaccatgactggaagtactgaaatggtaccaccaacaatgaaacataccgttgacaacaaaaggctttcgtctcctttgacagattctggtaaccgccggactaagaagccaaagttgagaaagtacaaggccaaaaaggttgaaacaacttctccgatgggtgtcctagaatttgaagtgaacgatttgttaaaatctcaaaatttgtccagggagcaggttctgaacgatgttacttcaattctaaatgataagtcctcaacagatggacctatcgtcttacaatatcaccgagaggtaaaaaatgtcaaggtcttagaaattacttccaatggcaacgggttggctttgatcgataatcctgttgaaacagaaaagaagcaagttgttatcataccgtttggcctgcccggtgatgtagttaatatcaaagtctttaagacccacccttactatgtcgagagtgatttattagacgtagtggaaaaatctccaatgagaagagatgatttaattagggataaatatttcgggaaatcttcaggaagtcaattagagttcttaacttacgatgaccaactagaattgaaaagaaaaacaattatgaatgcctacaagttcttcgcaccaaggttagttgctgaaaaacttttacccccatttgacaccaccgtagcttcccctttacaatttggctacaggaccaaaattacgcctcatttcgatatgccaaaaagaaaacaaaaggaactatcagtaaggcctcctttaggatttggtcaaaagggtagacctcaatggagaaaagatactttggatatcggcggacatggttcgatattagatatcgatgaatgtgtgcttgcaactgaagttctcaacaaaggattgactaatgaaagaagaaagtttgagcaagagtttaaaaactacaaaaaaggcgcgactattttactgagagagaataccactattttagacccttccaaaccaactttagaacagttaaccgaagaagcctctagggatgaaaatggtgatataagttatgtcgaagtcgaagacaaaaagaacaatgtcaggctggctaaaacttgcgttaccaatcctagacaaattgtcactgaatatgttgatggatatacttttaattttagtgcgggtgagttttttcaaaataataactctatcctgccaatagtgaccaagtatgtccgtgataacttgcaagctcccgctaaaggtgatgataataaaacaaagtttctagtagatgcttattgtggatcaggtcttttcagtatatgcagctccaagggcgtagataaagtgattggtgtagaaatttccgctgacagtgtctcttttgcagaaaaaaatgcaaaggcaaatggtgttgaaaactgtagattcatcgttggaaaggctgagaaactctttgagtctattgatactccaagtgaaaacacttccgttatcttggatccaccacgcaagggctgtgacgaattattcctaaagcaattagccgcatataatccagccaagattatttacatatcgtgtaatgtccattcccaggcacgtgatgtcgagtacttcctcaaagaaacagaaaacggttccgcccaccagattgaaagcataagaggatttgatttctttccacaaacgcaccacgttgagagtgtgtgtataatgaagagaatctaa

SEQ ID NO: 6966 - DNA, 1920 bp, Artificial Sequence
  Description of Artificial Sequence: Synthetic polynucleotide
atgtacgaacagtttgaattttctttttttttcttcgaaaatagtgacaataaggttaaatataaagctcatctcatctcttctataaaacgctggagtattatcacatgcatgcgttgcttttggaccgtacagaagtctatatttaaagctaggtttttcgcttgcagaaactttgtcaagaagcataattataaattaatcagcaccatgactggaagtactgaaatggtaccaccaacaatgaaacataccgttgacaacaaaaggctttcttctcctttgacagattctggtaaccgccgtactaagaagccaaagttgagaaagtacaaggccaaaaaggttgaaacaacttctccgatgggtgtcttggaatttgaagtgaacgatttgttaaaatctcaaaatttgtccagggagcaggttttgaacgatgttacttctattttgaatgataagtcctctacagatggacctatcgtcttacaatatcacagggaggtaaaaaatgtcaaggtcttagaaattacttccaatggcaacgggttggctttgatcgataatcctgttgaaacagaaaagaagcaagttgttatcataccgtttggcttgcccggtgatgtagttaatatcaaagtctttaagacccacccttactatgtcgagagtgatttattagacgtagtggaaaaatctccaatgagaagagatgatttaattagggataaatatttcgggaaatcttctggaagtcaattagagttcttaacttacgatgaccaattggaattgaaaagaaaaacaattatgaatgcctacaagttcttcgcaccaaggttagttgctgaaaaacttttacccccatttgacaccaccgtagcttcccctttacaatttggctacaggaccaaaattacgcctcatttcgatatgccaaaaagaaaacaaaaggaattaagtgtaaggcctcctttaggatttggtcaaaagggtagacctcaatggagaaaagatactttggatatcggcggacatggttccatattagatatcgatgaatgtgtgcttgcaactgaagttctcaacaaaggattgactaatgaaagaagaaagtttgagcaagagtttaaaaactacaaaaaaggcgcgactattttattaagagagaataccactattttagacccttccaaaccaactttagaacagttaaccgaagaagcctctagggatgaaaatggtgatataagttatgtcgaagtcgaagacaaaaagaacaatgtcaggttggctaaaacttgcgttaccaatcctagacaaattgtcactgaatatgttgatggatatacttttaattttagtgcgggtgagttttttcaaaataataactctatcttgccaatagtgaccaagtatgtccgtgataacttgcaagctcccgctaaaggtgatgataataaaacaaagtttttggtagatgcttattgtggatctggtcttttcagtatatgcagctccaagggcgtagataaagtgattggtgtagaaatttccgctgacagtgtctcttttgcagaaaaaaatgcaaaggcaaatggtgttgaaaactgtagattcatcgttggaaaggctgagaaactctttgagtctattgatactccaagtgaaaacacttccgttatcttggatccaccacgcaagggctgtgacgaattattcttgaagcaattagccgcatataatccagccaagattatttacatatcttgtaatgtccattcccaggcacgtgatgtcgagtacttcctcaaagaaacagaaaacggttccgcccaccagattgaaagcataagaggatttgatttctttccacaaacgcaccacgttgagagtgtgtgtataatgaagagaatctga

SEQ ID NO: 6967 - DNA, 264 bp, Saccharomyces cerevisiae
atggaaaacgataagggccaattagtcgaactttacgttccaagaaaatgttctgctaccaacagaatcatcaaggctgatgaccacgcatctgttcaaatcaacgtcgctaaggttgatgaagaaggacgtgctatcccaggtgagtacgttacctacgctttgtccggttacgttagatccagaggtgaatctgatgattctttgaaccgtttggctcaaaacgatggtttgttaaagaacgtctggtcttactcacgttaa

SEQ ID NO: 6968 - DNA, 264 bp, Artificial Sequence
  Description of Artificial Sequence: Synthetic polynucleotide
atggaaaacgataagggccaattagtcgaactttacgttccaagaaaatgttctgctaccaacagaatcatcaaggctgatgaccacgcatctgttcaaatcaacgtcgctaaggttgatgaagaaggacgtgctatcccaggtgagtacgttacctacgctttgtccggttacgttagatccagaggtgaatctgatgattctttgaaccgtttggctcaaaacgatggtttgttaaagaacgtctggtcttactctcgttga

SEQ ID NO: 6969 - DNA, 1851 bp, Saccharomyces cerevisiae
atgtataagaagctggctattgccacattgctctattccgcagattatttaccaggtgtgtttgcccttggtcaccaagtgaataaattgttagaggaagcaggcaaaaaaggcgacattgaaacatgccttattgtgacgacctctctatttaatggcactttaagcgagctagccaagaatattttacaatcaatatacaccaaaattgtgttggtagagcctttaaattgccaagaagaaagcatacagaagaatagtgagaatttagctcttttggaaagacctgaattatcctttgccttaatcaaagcaagactatgggaattaactcagttcgaacaagttctttacttggattccgacactttacctctgaataaagaatttttaaagttgtttgacattatgtctaaacaaaccacgtcacaagtgggtgctattgctgatatcggctggcctgatatgttcaatagcggtgtcatgatgctaataccggatgctgatactgcatccgttttacaaaattatatttttgaaaacacttcaattgatggttctgaccagggcattttaaaccagttcttcaatcaaaattgttgcactgatgagctagttaaagacagtttctctcgagaatgggtacagttatcatttacgtataacgtaactattcctaatttaggctaccaatcttcacctgctatgaattactttaaacctagcattaagttgattcatttcattgggaaacacaagccatggtcattgtggtcccaaaagaatttcattaaaaacgagtatcatgatcaatggaatgaggtatacgaggaatttaaggaagaacatcaattaaataacgaagtttcgaagccaaagattagtgattccgataaaactgagactcctgaaacgataaccccagtggatgcccctccatcgaacgaacccactacgaatcaagagatcgacacaattagtacagtggaagaaaacgtggacaaccagaacgccgagcctgttcctaactcggatcatagccctgctcctaaccctgtcccattggattttaccaagtggttaacaacctttattaacaaagatcacttgactaatcagccagtaaatgaaagcagagaatattcgaaagagaatgataacaatataatcaatagcagttcaaaccgcgaccaagaaagtcctccaaatagtactcaggaactaaacagctcttatagcgttgtgagtactcaagctgatagcgatgagcaccaaaatgcagaagaggaggatagtacgacagataacgcttcaaattctggagaagaaagccacctcgatgatataagcacggccgcttcttccaataacaatgtaagtaatcaaccagatggcaaaaattttagcaattctaaagaaaataatatcagtgtcgaatctagcccttcaaatccagaacagaaaaggtcaactgacaatatacaaaaaccaagtgtttctactaatgacttaccagacgacgtagaaccacatacctctgttgatgacaatatacagtacttagaaaaagacaaggaaggttatgaagaatttcttccggacgtgtacgagtcaaatgcaatcgataacgaagaagaattttttgatgacgatgcaagagatgctaccgaaggagaaacgaagacgagtgcagttgcagataaacaggaggatatgaaacttacagcagaggaaaccaaccaaccgcaacaagaaatgcccaacttcaaatttgactgggaggactctgattatctatccaaagtagagaggtgtttccctgatgatatttttgagtatgcagtagagtaa

SEQ ID NO: 6970 - DNA, 1851 bp, Artificial Sequence
  Description of Artificial Sequence: Synthetic polynucleotide
atgtataagaagttggctattgccacattgctctattccgcagattatttaccaggtgtgtttgcccttggtcaccaagtgaataaattgttagaggaagcaggcaaaaaaggcgacattgaaacatgccttattgtgacgacctctttatttaatggcactttaagcgagttggccaagaatattttacaaagtatatacaccaaaattgtgttggtagagcctttaaattgccaagaagaaagcatacagaagaatagtgagaatttagctcttttggaaagacctgaattatcctttgccttaatcaaagcaagattatgggaattaactcagttcgaacaagttctttacttggattccgacactttacctttaaataaagaatttttaaagttgtttgacattatgtctaaacaaaccacgtctcaagtgggtgctattgctgatatcggctggcctgatatgttcaatagcggtgtcatgatgttgataccggatgctgatactgcatccgttttacaaaattatatttttgaaaacacttctattgatggttctgaccagggcattttaaaccagttcttcaatcaaaattgttgcactgatgagttagttaaagacagtttctctagagaatgggtacagttatcttttacgtataacgtaactattcctaatttaggctaccaatcttctcctgctatgaattactttaaacctagcattaagttgattcatttcattgggaaacacaagccatggtctttgtggtcccaaaagaatttcattaaaaacgagtatcatgatcaatggaatgaggtatacgaggaatttaaggaagaacatcaattaaataacgaagtttccaagccaaagattagtgattccgataaaactgagactcctgaaacgataaccccagtggatgcccctccatctaacgaacccactacgaatcaagagatcgacacaattagtacagtggaagaaaacgtggacaaccagaacgccgagcctgttcctaacagtgatcatagccctgctcctaaccctgtcccattggattttaccaagtggttaacaacctttattaacaaagatcacttgactaatcagccagtaaatgaaagcagagaatattctaaagagaatgataacaatataatcaatagcagtagtaaccgcgaccaagaaagtcctccaaatagtactcaggaattgaacagctcttatagcgttgtgagtactcaagctgatagcgatgagcaccaaaatgcagaagaggaggatagtacgacagataacgcttctaattctggagaagaaagccacctcgatgatataagcacggccgcttcttccaataacaatgtaagtaatcaaccagatggcaaaaattttagcaattctaaagaaaataatatcagtgtcgaatctagcccttccaatccagaacagaaaaggtctactgacaatatacaaaaaccaagtgtttctactaatgacttaccagacgacgtagaaccacatacctctgttgatgacaatatacagtacttagaaaaagacaaggaaggttatgaagaatttcttccggacgtgtacgagagcaatgcaatcgataacgaagaagaattttttgatgacgatgcaagagatgctaccgaaggagaaacgaagacgagtgcagttgcagataaacaggaggatatgaaacttacagcagaggaaaccaaccaaccgcaacaagaaatgcccaacttcaaatttgactgggaggactctgattatttatccaaagtagagaggtgtttccctgatgatatttttgagtatgcagtagagtga

SEQ ID NO: 6971 - DNA, 1188 bp, Saccharomyces cerevisiae
atgtctgaaggtattactgatattgaagaatcccaaattcaaaccaactatgacaaggttgtctacaagttcgatgatatggaattggacgaaaacttgttaagaggtgttttcggttacggtttcgaagaaccatctgccattcaacaacgtgccatcatgcctattattgaaggtcacgatgtcttggctcaagctcaatctggtactggtaagaccggtaccttttccattgctgctttgcaaagaattgacacctctgtcaaggctcctcaagctttgatgttggctccaactagagaattggctttgcaaatccaaaaggttgtcatggctttggctttccacatggacatcaaggtccacgcttgtatcggtggtacttcctttgttgaagacgctgaaggtttgagagatgctcaaatcgtcgttggtactccaggtcgtgtttttgacaacatccaaagacgtagattcagaactgacaagatcaagatgttcatcttagatgaagctgatgaaatgttgtcttctggtttcaaggaacaaatctaccaaattttcaccttacttccaccaaccactcaagttgttctattgtccgccaccatgccaaatgacgtcttggaagttaccaccaaatttatgagaaacccagttagaattttggttaagaaggatgaattgactttggaaggtatcaaacaattctacgttaatgttgaagaagaagaatacaaatacgagtgtttgaccgatttatacgactctatctccgttactcaagctgtcatcttctgtaacaccagaagaaaggtcgaagaattgaccactaagttaagaaacgacaaatttaccgtttctgccatctactctgatttaccacaacaagaaagagacaccatcatgaaggaattcagaagtggttcttccagaattttgatctccactgatttgttggctagaggtatcgatgtccaacaagtttctttggttattaactacgacttaccagctaacaaagaaaactatattcacagaatcggtagaggtggtcgtttcggtagaaagggtgttgccatcaactttgttactaacgaagacgttggcgctatgagagaactagaaaagttctactccactcaaattgaagaattgccatccgacatcgctactttgttgaactaa

SEQ ID NO: 6972 - DNA, 1188 bp, Artificial Sequence
  Description of Artificial Sequence: Synthetic polynucleotide
atgtctgaaggtattactgatattgaagaatcccaaattcaaaccaactatgacaaggttgtctacaagttcgatgatatggaattggacgaaaacttgttaagaggtgttttcggttacggtttcgaagaaccatctgccattcaacaacgtgccatcatgcctattattgaaggtcacgatgtcttggctcaagctcaatctggtactggtaagaccggtaccttttccattgctgctttgcaaagaattgacacctctgtcaaggctcctcaagctttgatgttggctccaactagagaattggctttgcaaatccaaaaggttgtcatggctttggctttccacatggacatcaaggtccacgcttgtatcggtggtacttcctttgttgaagacgctgaaggtttgagagatgctcaaatcgtcgttggtactccaggtcgtgtttttgacaacatccaaagacgtagattcagaactgacaagatcaagatgttcatcttagatgaagctgatgaaatgttgtcttctggtttcaaggaacaaatctaccaaattttcaccttacttccaccaaccactcaagttgttttattgtccgccaccatgccaaatgacgtcttggaagttaccaccaaatttatgagaaacccagttagaattttggttaagaaggatgaattgactttggaaggtatcaaacaattctacgttaatgttgaagaagaagaatacaaatacgagtgtttgaccgatttatacgactctatctccgttactcaagctgtcatcttctgtaacaccagaagaaaggtcgaagaattgaccactaagttaagaaacgacaaatttaccgtttctgccatctactctgatttaccacaacaagaaagagacaccatcatgaaggaattcagaagtggttcttccagaattttgatctccactgatttgttggctagaggtatcgatgtccaacaagtttctttggttattaactacgacttaccagctaacaaagaaaactatattcacagaatcggtagaggtggtcgtttcggtagaaagggtgttgccatcaactttgttactaacgaagacgttggcgctatgagagaattggaaaagttctactccactcaaattgaagaattgccatccgacatcgctactttgttgaactga

SEQ ID NO: 6973 - DNA, 825 bp, Saccharomyces cerevisiae
atggttgagtcaaatgatattataaaaagtgggctggcagagaaagcactaaaggctctaattttacaatgtgaagagaacccatctttaaaaaatgataaggacatacacataatcatcaacacgggcaaaaaaatgggcataaacagggacaacatcccccgtattattccattaacaaagtacaagctatttaaaccaagggacctaaacatattactcattaccaaggatccctctgccttgtatagagaaactttgacgaaagacgagcatacgtcggaattattcaaggaaattataagtgtcaagaacttgagacgtagattcaaagggagtaaactgacccaactttataaagattttgacttggtcgttgccgattacagagttcaccacttacttccggaggttcttggtagcagattttatcacggtagtaaaaaattgccatacatgatccgcatgtcgaaagaagtaaaattgaagcgtcaacaaatggtcgaaaaatgtgaccccatttacgtgagagcacaattgagaagtatatgtaagaatacctcatacattcccaataatgacaactgcttaagcgtcagggtcggttatattcaaaaacactccataccagaaattttgcaaaacatccaagatacaataaactttctcactgataaaagtaagagaccgcaaggcggcgtcattaaaggaggaataatatctatatttgtcaagaccagtaacagtactagtttgcctatatatcagttttcagaggctagagaaaatcagaaaaatgaagatctgagtgatattaaattgtaa

SEQ ID NO: 6974 - DNA, 825 bp, Artificial Sequence
  Description of Artificial Sequence: Synthetic polynucleotide
atggttgagagcaatgatattataaaaagtgggttagcagagaaagcattgaaggctttgattttacaatgtgaagagaacccatctttaaaaaatgataaggacatacacataatcatcaacacgggcaaaaaaatgggcataaacagggacaacatcccccgtattattccattaacaaagtacaagttatttaaaccaagggacttgaacatattactcattaccaaggatccctctgccttgtatagagaaactttgacgaaagacgagcatacgagtgaattattcaaggaaattataagtgtcaagaacttgagacgtagattcaaagggagtaaattgacccaactttataaagattttgacttggtcgttgccgattacagagttcaccacttacttccggaggttcttggtagcagattttatcacggtagtaaaaaattgccatacatgatccgcatgtccaaagaagtaaaattgaagcgtcaacaaatggtcgaaaaatgtgaccccatttacgtgagagcacaattgagaagtatatgtaagaatacctcttacattcccaataatgacaactgcttaagcgtcagggtcggttatattcaaaaacactccataccagaaattttgcaaaacatccaagatacaataaactttctcactgataaaagtaagagaccgcaaggcggcgtcattaaaggaggaataatatctatatttgtcaagaccagtaacagtactagtttgcctatatatcagttttctgaggctagagaaaatcagaaaaatgaagatttgagtgatattaaattgtga

SEQ ID NO: 6975 - DNA, 1278 bp, Saccharomyces cerevisiae
atgcaaatctgcaaggtatttcttacacaggttaaaaaactactttttgttagtcttctattttgcttgatagctcaaacatgttggcttgcacttgtaccatatcagagacagctgagcctagattcgtatttttttagaagatctcgagaagtttcatcgagatatgattttacaaggaggcgacatatgaatcagacgctgaagctatctagcaacacttataatgatgaaccactaaacaagaccaagggaataaaaaatcaaagagaaaatgctacattgttaatgcttgtgcgtaattgggaactttcgggggcactccgttccatgagatcactagaagaccgtttcaataaaaactaccagtatgactggacatttcttaatgatgtcccatttgatcaagagttcatcgaagccaccacagccatggctagtggtagaacgcaatacgctttaatccctgcggaggactggaacaggccatcttggatcaacgaaactctatttgaagaggctttacaattaatggaggaaaaaaatatcttgtacggtgggtcaaagtcatatagaaatatgtgccgatttaattctggatttttctttagacaaaagatattagatccgtacgatttttatttcagagttgagccagatgtagagtatttttgcgattttccctacgatccattcaaggtgatgaggcagaacaataagaaatatggctttgtgataactatgtatgaatacgaagatacaattccgagcctatgggaagctgtagaagaatatctcgaagaaacagagtcagcagatattgacatggaaagcaacgctttcgggttcgtatcaaatttcgacttcatcggtaaatcttttggtgtcatcgatagtaacagcggctataatttatgtcatttttggacaaattttgaaattggcgatttgaactttttcagaagtgagaaatacattagatttttcgagtacttggattcaaagggcggtttttactatgaaaggtggggagatgcaccagttcattcgattgctgcctcacttcttttgaaaaaagacgaaatcatccattttgatgaattaggctataagcatatgccttttggcacgtgtccatctgcatactacctgagacttcaacaaagatgtctttgtgatagcaatcacccagacaatattgatctcaatgtcatcagctgcctgagaagatggtggaaggacggcagcggtaaatacttcctcaaacacgattcatag

SEQ ID NO: 6976 - DNA, 1278 bp, Artificial Sequence
  Description of Artificial Sequence: Synthetic polynucleotide
atgcaaatctgcaaggtatttcttacacaggttaaaaaattactttttgttagtcttttattttgcttgatagctcaaacatgttggcttgcacttgtaccatatcagagacagttgagcttagattcttatttttttagaagatctagagaagtttcttctagatatgattttacaaggaggagacatatgaatcagacgttgaagttatctagcaacacttataatgatgaaccattgaacaagaccaagggaataaaaaatcaaagagaaaatgctacattgttaatgcttgtgcgtaattgggaactttccggggcactccgttccatgagatccttagaagaccgtttcaataaaaactaccagtatgactggacatttcttaatgatgtcccatttgatcaagagttcatcgaagccaccacagccatggctagtggtagaacgcaatacgctttaatccctgcggaggactggaacaggccatcttggatcaacgaaactttatttgaagaggctttacaattaatggaggaaaaaaatatcttgtacggtgggtccaagagttatagaaatatgtgcagatttaattctggatttttctttagacaaaagatattagatccgtacgatttttatttcagagttgagccagatgtagagtatttttgcgattttccctacgatccattcaaggtgatgaggcagaacaataagaaatatggctttgtgataactatgtatgaatacgaagatacaattccgagcttgtgggaagctgtagaagaatatctcgaagaaacagagtctgcagatattgacatggaaagcaacgctttcgggttcgtatctaatttcgacttcatcggtaaatcttttggtgtcatcgatagtaacagcggctataatttatgtcatttttggacaaattttgaaattggcgatttgaactttttcagaagtgagaaatacattagatttttcgagtacttggattctaagggcggtttttactatgaaaggtggggagatgcaccagttcattctattgctgcctctcttcttttgaaaaaagacgaaatcatccattttgatgaattaggctataagcatatgccttttggcacgtgtccatctgcatactacttgagacttcaacaaagatgtctttgtgatagcaatcacccagacaatattgatctcaatgtcatcagctgcttgagaagatggtggaaggacggcagcggtaaatacttcctcaaacacgatagttga

SEQ ID NO: 6977 - DNA, 987 bp, Saccharomyces cerevisiae
atgagtaaaaacagggaccctctactggctaatttgaacgctttcaaaagcaaagtgaagtctgccccggtgatcgcacccgctaaagttggacagaagaagaccaatgacacagtgattactatagatggaaacactaggaagaggacggcctccgaacgtgcgcaagaaaacactttgaactctgcgaaaaatcctgtgttagtggatatcaagaaagaagctgggagcaatagctctaatgctatttcattagatgacgacgatgacgacgaagattttggtagctctccttcaaaaaaagtaaggcctggctctattgctgcagccgctttacaagcaaatcaaacagatatttccaagagtcacgattcttcaaagttgctttgggcgactgaatacattcaaaagaaaggtaagcccgttttggtgaatgagttattggactacttgtcaatgaaaaaagatgacaaggttattgagcttttaaaaaaattagatagaatagagtttgaccccaagaaggggactttcaaatacctttccacctacgatgtccattccccttcggaactgctgaagttgttacgttcacaagtaacattcaaaggtatttcctgcaaagacttgaaagacggttggccacaatgcgatgaaacgattaaccaactggaggaagacagcaaaattttggtgttaagaactaaaaaggataaaactccaagatacgtttggtataacagcggtggtaacttgaaatgtattgacgaggagtttgttaaaatgtgggaaaatgtgcaattaccgcaatttgcagaattgccaagaaagctgcaagatttaggtctaaagcctgctagtgtcgatcctgctactatcaaaagacaaacaaagagagttgaagttaaaaagaagagacaaagaaagggtaagattactaacactcatatgaccggtatcttgaaagattattcccatagagtatga

SEQ ID NO: 6978 - DNA, 987 bp, Artificial Sequence
  Description of Artificial Sequence: Synthetic polynucleotide
atgagtaaaaacagggaccctttattagctaatttgaacgctttcaaaagcaaagtgaagtctgccccggtgatcgcacccgctaaagttggacagaagaagaccaatgacacagtgattactatagatggaaacactaggaagaggacggcctccgaacgtgcgcaagaaaacactttgaactctgcgaaaaatcctgtgttagtggatatcaagaaagaagctgggagcaatagctctaatgctatttctttagatgacgacgatgacgacgaagattttggtagctctccttccaaaaaagtaaggcctggctctattgctgcagccgctttacaagcaaatcaaacagatatttccaagagtcacgattcttccaagttgctttgggcgactgaatacattcaaaagaaaggtaagcccgttttggtgaatgagttattggactacttgtccatgaaaaaagatgacaaggttattgagcttttaaaaaaattagatagaatagagtttgaccccaagaaggggactttcaaatacctttccacctacgatgtccattccccttctgaattattgaagttgttacgttctcaagtaacattcaaaggtatttcctgcaaagacttgaaagacggttggccacaatgcgatgaaacgattaaccaattggaggaagacagcaaaattttggtgttaagaactaaaaaggataaaactccaagatacgtttggtataacagcggtggtaacttgaaatgtattgacgaggagtttgttaaaatgtgggaaaatgtgcaattaccgcaatttgcagaattgccaagaaagttacaagatttaggtttgaagcctgctagtgtcgatcctgctactatcaaaagacaaacaaagagagttgaagttaaaaagaagagacaaagaaagggtaagattactaacactcatatgaccggtatcttgaaagattattcccatagagtatga

SEQ ID NO: 6979 - DNA, 1509 bp, Saccharomyces cerevisiae
atgataccaccacgaatcgttccatggagggattttgctgaactagaggagctgaaactttggttttacccgaaaagcaaaggaaccattgaagataagcgacagcgtgcagtgcaaagagtacagagctaccgactaaagggttcccaatatttacctcacgtggtggactctacagcacaaataacatgtgcggtattgctagacgaaaaggaagcgtgtttaggagtacatcaggattctattcctatccggttatcgtatgtaatggctttgattcggtttgtcaatggcttattggatccaacgcaacaatctcagttcgctattcccttacacacattagctgctaaaattggactgccgtcctggtttgttgatttgagacactggggtacacatgagagagatttacctggattagaaatgcttcgttgggccgccaatgaagcgttatcttggctatatgatcactactggaacgatgaggaattagaagatgacagggatgatgatgacgatgatgatgataccggttacggatacagaagaaatgataaactggagaaatatatggagtcattaactaaaacacttgataaatggaagcgacttagaaacgagtttctggaatacaaatgggtgtgggagaatgcaaacgatagtttaattacaagtagtaacttttctggggataatttggtgaactatgatgccgaaaagaggaaaagttcacacgcaagttcatcagaaactatgatcagggaaaatttgcgtcaatggcaagaactttggaaattatccatttatcacaatgtggttcttgagaaattttttaacaattatgacccacttttactcaaagttttaatgcttaatttgaacaattttgattggaaggtcattgagtgggtagctaggaattacagaacccaacaagatgatagtaatataacgacaattttaaaaaggaaattcaatgcctggaaagaactacaaaaaaggctgttagatgttattataaataaccttaacaataaaaattttaaaaataaatggcaaaattgggagaaacttattgatgaaaatgcgtcatacttgatattgtatttttgccaatctatgctggccaaactagagactgaaaaaattactggtaactcatggagaaacaaaaaacggagaaaacaaattgatagcacagtggaaatcgaggcaaaactgaaggaaaacatagacaatttatcattaaggtttaatgaaggtgaaataaagctgtatgattttattcctgcggaaaaagattccgttccattgaagaaggaagtgagtccggcattaaaggctgataccaatgatatactaggcgatttggcgtctttgaaacagagaatgagcagtttcggaacagtaggtaaaaaaaataaacaagaggagaacagagctacaccagtaaaaaattggtcaagggttcaaaattggaaacccaaaccctttggtgtcctgtaa

SEQ ID NO: 6980 - DNA, 1509 bp, Artificial Sequence
  Description of Artificial Sequence: Synthetic polynucleotide
atgataccaccaagaatcgttccatggagggattttgctgaattagaggagttgaaactttggttttacccgaaaagcaaaggaaccattgaagataagagacagcgtgcagtgcaaagagtacagagctacagattaaagggttcccaatatttacctcacgtggtggactctacagcacaaataacatgtgcggtattgttggacgaaaaggaagcgtgtttaggagtacatcaggattctattcctatcagattatcttatgtaatggctttgattagatttgtcaatggcttattggatccaacgcaacaatctcagttcgctattcccttacacacattagctgctaaaattggattaccgtcctggtttgttgatttgagacactggggtacacatgagagagatttacctggattagaaatgcttcgttgggccgccaatgaagcgttatcttggttatatgatcactactggaacgatgaggaattagaagatgacagggatgatgatgacgatgatgatgataccggttacggatacagaagaaatgataaattagagaaatatatggagtctttaactaaaacacttgataaatggaagagacttagaaacgagtttttggaatacaaatgggtgtgggagaatgcaaacgatagtttaattacaagtagtaacttttctggggataatttggtgaactatgatgccgaaaagaggaaaagttctcacgcaagttcttctgaaactatgatcagggaaaatttgcgtcaatggcaagaactttggaaattatccatttatcacaatgtggttcttgagaaattttttaacaattatgacccacttttactcaaagttttaatgcttaatttgaacaattttgattggaaggtcattgagtgggtagctaggaattacagaacccaacaagatgatagtaatataacgacaattttaaaaaggaaattcaatgcctggaaagaattacaaaaaaggttattagatgttattataaataaccttaacaataaaaattttaaaaataaatggcaaaattgggagaaacttattgatgaaaatgcgtcttacttgatattgtatttttgccaatctatgttggccaaattagagactgaaaaaattactggtaacagttggagaaacaaaaaaagaagaaaacaaattgatagcacagtggaaatcgaggcaaaattgaaggaaaacatagacaatttatctttaaggtttaatgaaggtgaaataaagctttatgattttattcctgcggaaaaagattccgttccattgaagaaggaagtgagtccggcattaaaggctgataccaatgatatattgggcgatttggcgtctttgaaacagagaatgagcagtttcggaacagtaggtaaaaaaaataaacaagaggagaacagagctacaccagtaaaaaattggagcagggttcaaaattggaaacccaaaccctttggtgtcttgtga

SEQ ID NO: 6981 - DNA, 2592 bp, Saccharomyces cerevisiae
atgggatatgactcccaagttaggacaaaaaaacgacatcgaattactgtagtatgcacaaattgcaaaaaaaggaaaagtaagtgcgatcgaacgaaaccatgtggaacatgtgtacgactgggagatgtggacagctgtgtctatctcaccgatagctctggacaacctgaaagcagtccttcattgaatgatgctgaccctctgaggaaacaatcaactcctgcggaacgaataagtccaggtttcattaagaaaagaagatcgtcacagacaagacaagacgaagatcactggcaaagagtacgagaacttgaaaatcaatcatcactttattatctaccaattcatgaagaaactccattttttattgacctcatccctaatgggttttatttagagaccaaaaggtctgctgataatttatttggtctgttcacggatagagcaattgaaaatcgcgacccctatctccaagcaatggtaacatttagaagtatcgcaatcaaaaaaatgatggataaattgggaagcaacggcaataatgtgaaaaatggaagcttgcctaaatctttcgaagctttatccactttcgatgctgatgacgaacgccacattagcgatgatgttgttggtaagggcaataacttccgcatgcatcagactattcacaaatcattgtttaacaaattcgctcaatacagagaaaataatgctaaaaaattcagctcagaaactatattagcaaaggattatttgcctcctttaaaaatacttgaaagtgaggttttagcactttttgaagaaaaaatttacaatatgataccgattttcgatatgaaagttttgcgtcatgaaataacgatattttatcaaaatatagtcgagaaagggaatccaatttctataaaacactacgatcatatggttttctgcataatcttgttgattattaaaatatgccgactttctgtccagttttcgaagctaactccatatatatacccggttcttcaagaaattgatacctctaagtttttggctcttgttaaacactatttgttcgagacgaaggtcctcagaaaatgtaatttattacagttgcaatgtctcatattactaaggttcttgcactggtgtgcccctgaagatggcgatggacccgaaactcaatattgtcaaatcttaatggggacaataatatcatcatgtaaagaaatgggcattaactggtattgcttctctcatccagaaaaatattcatttaaaataaaccgacatacgaggccttcatacgatataatgaaacctagcgattacatttcagttttcagaaagatatggagttatgttttattttgggacaggaagatgtgttttattagcggtgaagaatgtcaaattgggaaaaccttgcagtgccatttcaaagaagaagcagatacacccacatggtatatacgaatgttaaccctggataacttgatgaaaaagataaacgatacgttgaacgatgatccaggaaaggtagatttgaacttgttgcaccgactaataaatgatttaaaaagaaactttcatattttaaaaagcctgtcgaaaaacgaaaaagaaacaatgcgtcattttgatttcgaaatggaatggataatagatttattctcactaagtttgctgcacggagaaatgatcttttatgaatatgactgcaatattacaaaattttataagagtttccaagatttgtgggatatggtcattcatatctcagagaagtgctacaattacttttttaacagtgatgccttagaggtggattcattgacaaagttttataccaatagaatcgtggaaattgtcgcaaacaaagttttggtcattgttccggcattcattctcagaggagaccgcttcaaaacaattcagtacgccgacaagaagaaaatgatagaatttctttacggggtctcgtctgtgtattttaacgaatttggctttgagtactatcgttgttttagaaaaatgttcaccgctaaaattgcctacaagatcttgaatcgctcatgtgaaaaagatgcatggagaattattttaaaatttttgctgaatgaattgaaactagaagataacggtgatagttatatagattacaacgatatgagattaaatgacatctgtccaataatactagaatttcaggagacagtacaaaaatatgatgggtataggccagatattctaagtatatggaacaatgagttttatcccataggtaaatacaacgatgatatgacaggatttaagtttcaaatgcgcataaaggaaatgcaagaattcttggatatggagaaatattccgacaggtttaatattttttcatccttttatgatcacgccagttcacaattagctaaacatactgaagttgataccaacataagcattacgaatgaacaagtagctgaaattccgcaaaaagaactactacaacaacctttagcacccgctttgcctgttaatgatttaattgtctcagagtttgacgtgattgaagatatttttgatcctgtggatttcgtatcatttttttaa

SEQ ID NO: 6982 - DNA, 2592 bp, Artificial Sequence
  Description of Artificial Sequence: Synthetic polynucleotide
atgggatatgactcccaagttaggacaaaaaaaagacatagaattactgtagtatgcacaaattgcaaaaaaaggaaaagtaagtgcgatagaacgaaaccatgtggaacatgtgtaaggttaggagatgtggacagctgtgtctatctcaccgatagctctggacaacctgaaagcagtccttctttgaatgatgctgaccctttaaggaaacaatctactcctgcggaaagaataagtccaggtttcattaagaaaagaagaagttctcagacaagacaagacgaagatcactggcaaagagtaagagaacttgaaaatcaatcttctctttattatttaccaattcatgaagaaactccattttttattgacctcatccctaatgggttttatttagagaccaaaaggtctgctgataatttatttggtcttttcacggatagagcaattgaaaatcgcgacccctatctccaagcaatggtaacatttagaagtatcgcaatcaaaaaaatgatggataaattgggaagcaacggcaataatgtgaaaaatggaagcttgcctaaatctttcgaagctttatccactttcgatgctgatgacgaacgccacattagcgatgatgttgttggtaagggcaataacttccgcatgcatcagactattcacaaatctttgtttaacaaattcgctcaatacagagaaaataatgctaaaaaattcagctctgaaactatattagcaaaggattatttgcctcctttaaaaatacttgaaagtgaggttttagcactttttgaagaaaaaatttacaatatgataccgattttcgatatgaaagttttgcgtcatgaaataacgatattttatcaaaatatagtcgagaaagggaatccaatttctataaaacactacgatcatatggttttctgcataatcttgttgattattaaaatatgcagactttctgtccagttttccaagttgactccatatatatacccggttcttcaagaaattgatacctctaagtttttggctcttgttaaacactatttgttcgagacgaaggtcctcagaaaatgtaatttattacagttgcaatgtctcatattattgaggttcttgcactggtgtgcccctgaagatggcgatggacccgaaactcaatattgtcaaatcttaatggggacaataatatcttcttgtaaagaaatgggcattaactggtattgcttctctcatccagaaaaatattcttttaaaataaacagacatacgaggccttcttacgatataatgaaacctagcgattacatttctgttttcagaaagatatggagttatgttttattttgggacaggaagatgtgttttattagcggtgaagaatgtcaaattgggaaaaccttgcagtgccatttcaaagaagaagcagatacacccacatggtatataagaatgttaaccttggataacttgatgaaaaagataaacgatacgttgaacgatgatccaggaaaggtagatttgaacttgttgcaccgtttaataaatgatttaaaaagaaactttcatattttaaaaagcttatccaaaaacgaaaaagaaacaatgcgtcattttgatttcgaaatggaatggataatagatttattctctttgagtttgttgcacggagaaatgatcttttatgaatatgactgcaatattacaaaattttataagagtttccaagatttgtgggatatggtcattcatatctctgagaagtgctacaattacttttttaacagtgatgccttagaggtggattctttgacaaagttttataccaatagaatcgtggaaattgtcgcaaacaaagttttggtcattgttccggcattcattctcagaggagaccgcttcaaaacaattcagtacgccgacaagaagaaaatgatagaatttctttacggggtcagctctgtgtattttaacgaatttggctttgagtactatcgttgttttagaaaaatgttcaccgctaaaattgcctacaagatcttgaatcgcagttgtgaaaaagatgcatggagaattattttaaaatttttgttgaatgaattgaaattagaagataacggtgatagttatatagattacaacgatatgagattaaatgacatctgtccaataatattggaatttcaggagacagtacaaaaatatgatgggtataggccagatattttaagtatatggaacaatgagttttatcccataggtaaatacaacgatgatatgacaggatttaagtttcaaatgcgcataaaggaaatgcaagaattcttggatatggagaaatattccgacaggtttaatattttttcttccttttatgatcacgccagttctcaattagctaaacatactgaagttgataccaacataagcattacgaatgaacaagtagctgaaattccgcaaaaagaattattacaacaacctttagcacccgctttgcctgttaatgatttaattgtcagtgagtttgacgtgattgaagatatttttgatcctgtggatttcgtatcctttttttga

SEQ ID NO: 6983 - DNA, 594 bp, Saccharomyces cerevisiae
atgtttaccagtgccattagattgtcatcgcaaagactgttcgctagtcaaccttctgtcaccgctgcggcattgcgctcgactgctacaaccttacccttaagatcatattctcagcccgcatcccttcaagactccagtatcttgacatggtctgattttttcaaattgaggaaacagcagcgtagaatcaatgttggttcttcgctgtttactgctcttttgggctgtaacgtttcatgggcttacctttccacaatggaaatagacccgactcaaatgctattcggattcgacccattaactgtaatttcagctgggataatagcctctggtgcactaggctacttgttgggtccgatagttggttcgcaagttttcaaactttcccataaccaacaattggcacagttcaacaacaaaaataaagagtttctaaaacatatcatcaataacagggtcgatgcctcttctcaaagtttcagtaatcctgttccagattattacggtgaaaagataggttccttaaaggaatataagcaatggttaagagattgtcacgcttacgcaaagaaagccaaagaatttttgtga

SEQ ID NO: 6984 - DNA, 594 bp, Artificial Sequence
  Description of Artificial Sequence: Synthetic polynucleotide
atgtttaccagtgccattagattgtcttctcaaagattattcgctagtcaaccttctgtcaccgctgcggcattgcgctccactgctacaaccttacccttaagatcttattctcagcccgcatcccttcaagactccagtatcttgacatggtctgattttttcaaattgaggaaacagcagcgtagaatcaatgttggttcttctttatttactgctcttttgggctgtaacgtttcctgggcttacctttccacaatggaaatagacccgactcaaatgcttttcggattcgacccattaactgtaatttctgctgggataatagcctctggtgcattgggctacttgttgggtccgatagttggttctcaagttttcaaactttcccataaccaacaattggcacagttcaacaacaaaaataaagagtttttgaaacatatcatcaataacagggtcgatgcctcttctcaaagtttcagtaatcctgttccagattattacggtgaaaagataggttccttaaaggaatataagcaatggttaagagattgtcacgcttacgcaaagaaagccaaagaatttttgtga

SEQ ID NO: 6985 - DNA, 1086 bp, Saccharomyces cerevisiae
atgactactgctgttaggcttttaccttcactgggcagaaccgcccataagaggtctctctacctgttctccgctgctgctgctgctgctgctgctgcaacttttgcttactcgcaatcccaaaagagatcatcgtcttctcccgggggtggtagtaaccacggatggaacaactgggggaaggcagctgctttggcttccactacaccgctcgttcatgtcgcctctgtcgaaaaagggaggtcatacgaggacttccaaaaggtgtacaatgcgattgcactcaagctgagggaagatgacgaatatgacaactatataggctatgggcccgtattagtccgtcttgcttggcacacttcagggacctgggacaagcacgacaatacaggcgggtcatacggtggtacatacagattcaaaaaggagtttaacgatccatccaatgcgggcttgcagaatggcttcaagttcctggagcccattcacaaagagtttccctggatctcctcgggtgatctgttcagtctagggggtgtcactgccgtgcaggaaatgcagggtcccaagattccatggagatgtggtagagtcgacacgccagaggatactacccctgacaacgggagactgcctgacgctgataaagacgctgactatgtcagaacattttttcaaagacttaatatgaatgacagagaagtagttgctcttatgggggctcacgctctgggcaagacccacttgaagaactctggatacgaagggccatggggagccgctaacaacgtctttaccaatgagttttacttgaacttgctgaatgaagactggaaattggaaaagaacgacgcgaacaacgaacagtgggactctaagagcggctacatgatgctgcccactgattattctttgattcaggatcccaagtacttaagcattgtgaaagaatacgctaatgaccaggacaagttcttcaaggatttttccaaagcttttgaaaaactgttggagaacggtatcactttccctaaagacgcgcccagtccatttattttcaagactttagaggaacaaggtttatag

SEQ ID NO: 6986 - DNA, 1086 bp, Artificial Sequence
  Description of Artificial Sequence: Synthetic polynucleotide
atgactactgctgttaggcttttaccttctttaggcagaaccgcccataagaggtctctctaccttttctccgctgctgctgctgctgctgctgctgcaacttttgcttactctcaatcccaaaagagatcttcttcttctcccgggggtggtagtaaccacggatggaacaactgggggaaggcagctgctttggcttccactacaccgctcgttcatgtcgcctctgtcgaaaaagggaggtcttacgaggacttccaaaaggtgtacaatgcgattgcactcaagttaagggaagatgacgaatatgacaactatataggctatgggcccgtattagtccgtcttgcttggcacacttctgggacctgggacaagcacgacaatacaggcgggtcttacggtggtacatacagattcaaaaaggagtttaacgatccatccaatgcgggcttgcagaatggcttcaagttcttggagcccattcacaaagagtttccctggatctccagtggtgatcttttcagtttagggggtgtcactgccgtgcaggaaatgcagggtcccaagattccatggagatgtggtagagtcgacacgccagaggatactacccctgacaacgggagattacctgacgctgataaagacgctgactatgtcagaacattttttcaaagacttaatatgaatgacagagaagtagttgctcttatgggggctcacgctttgggcaagacccacttgaagaactctggatacgaagggccatggggagccgctaacaacgtctttaccaatgagttttacttgaacttgttgaatgaagactggaaattggaaaagaacgacgcgaacaacgaacagtgggactctaagagcggctacatgatgttgcccactgattattctttgattcaggatcccaagtacttaagcattgtgaaagaatacgctaatgaccaggacaagttcttcaaggatttttccaaagcttttgaaaaacttttggagaacggtatcactttccctaaagacgcgcccagtccatttattttcaagactttagaggaacaaggtttatga

SEQ ID NO: 6987 - DNA, 2232 bp, Saccharomyces cerevisiae
atgtctgctcccgctgccgatcataacgctgccaaacctattcctcatgtacctcaagcgtcccgacggtacaaaaattcatacaatggattcgtatacaatatacatacatggctgtatgatgtgtctgtatttctgtttaatattttgttcactattttcttcagagaaattaaggtacgtggtgcatataacgttcccgaagttggggtgccaaccatccttgtgtgtgcccctcatgcaaatcagttcatcgacccggctttggtaatgtcgcaaacccgtttgctgaagacatcagcgggaaagtcccgatccagaatgccttgttttgttactgctgagtcgagttttaagaaaagatttatctctttctttggtcacgcaatgggcggtattcccgtgcctagaattcaggacaacttgaagccagtggatgagaatcttgagatttacgctccggacttgaagaaccacccggaaatcatcaagggccgctccaagaacccacagactacaccagtgaactttacgaaaaggttttctgccaagtccttgcttggattgcccgactacttaagtaatgctcaaatcaaggaaatcccggatgatgaaacgataatcttgtcctctccattcagaacatcgaaatcaaaagtggtggagctcttgactaatggtactaattttaaatatgcagagaaaatcgacaatacggaaactttccagagtgtttttgatcacttgcatacgaagggctgtgtaggtattttccccgagggtggttctcatgaccgtccttcgttactacccatcaaggcaggtgttgccattatggctctgggcgcagtagccgctgatcctaccatgaaagttgctgttgtaccctgtggtttgcattatttccacagaaataaattcagatctagagctgttttagaatacggcgaacctatagtggtggatgggaaatatggcgaaatgtataaggactccccacgtgagaccgtttccaaactactaaaaaagatcaccaattctttgttttctgttaccgaaaatgctccagattacgatactttgatggtcattcaggctgccagaagactatatcaaccggtaaaagtcaggctacctttgcctgccattgtagaaatcaacagaaggttacttttcggttattccaagtttaaagatgatccaagaattattcacttaaaaaaactggtatatgactacaacaggaaattagattcagtgggtttaaaagaccatcaggtgatgcaattaaaaactaccaaattagaagcattgaggtgctttgtaactttgatcgttcgattgattaaattttctgtctttgctatactatcgttaccgggttctattctcttcactccaattttcattatttgtcgcgtatactcagaaaagaaggccaaagagggtttaaagaaatcattggttaaaattaagggtaccgatttgttggccacatggaaacttatcgtggcgttaatattggcaccaattttatacgttacttactcgatcttgttgattattttggcaagaaaacaacactattgtcgcatctgggttccttccaataacgcattcatacaatttgtctatttttatgcgttattggttttcaccacgtattcctctttaaagaccggtgaaatcggtgttgaccttttcaaatctttaagaccactttttgtttctattgtttaccccggtaagaagatcgaagaaatccaaacaacaagaaagaatttaagtctagagttgactgctgtttgtaacgatttaggacctttggttttccctgattacgataaattagcgactgagatattctctaagagagacggttatgatgtctcttctgatgcagagtcttctataagtcgtatgagtgtacaatctagaagccgctcttcttctatacattctattggctcgctagcttctaacgccctatcaagagtgaattcaagaggctcgttgaccgatattccaattttttctgatgcaaagcaaggtcaatggaaaagtgaaggtgaaactagtgaggatgaggatgaatttgatgagaaaaatcctgccatagtacaaaccgcacgaagttctgatctaaataaggaaaacagtcgcaacacaaatatatcttcgaagattgcttcgctggtaagacagaaaagagaacacgaaaagaaagaatga

SEQ ID NO: 6988 - DNA, 2232 bp, Artificial Sequence
  Description of Artificial Sequence: Synthetic polynucleotide
atgtctgctcccgctgccgatcataacgctgccaaacctattcctcatgtacctcaagcgtcccgccgctacaaaaattcttacaatggattcgtatacaatatacatacatggttatatgatgtgtctgtatttttgtttaatattttgttcactattttcttcagagaaattaaggtacgtggtgcatataacgttcccgaagttggggtgccaaccatccttgtgtgtgcccctcatgcaaatcagttcatcgacccggctttggtaatgtctcaaacccgtttgttgaagacatctgcgggaaagtccagatccagaatgccttgttttgttactgctgagagcagttttaagaaaagatttatctctttctttggtcacgcaatgggcggtattcccgtgcctagaattcaggacaacttgaagccagtggatgagaatcttgagatttacgctccggacttgaagaaccacccggaaatcatcaagggccgctccaagaacccacagactacaccagtgaactttacgaaaaggttttctgccaagtccttgcttggattgcccgactacttaagtaatgctcaaatcaaggaaatcccggatgatgaaacgataatcttgtcctctccattcagaacaagtaaatctaaagtggtggagctcttgactaatggtactaattttaaatatgcagagaaaatcgacaatacggaaactttccagagtgtttttgatcacttgcatacgaagggctgtgtaggtattttccccgagggtggttctcatgaccgtccttctttattgcccatcaaggcaggtgttgccattatggctttgggcgcagtagccgctgatcctaccatgaaagttgctgttgtaccctgtggtttgcattatttccacagaaataaattcagatctagagctgttttagaatacggcgaacctatagtggtggatgggaaatatggcgaaatgtataaggactccccacgtgagaccgtttccaaattattgaaaaagatcaccaattctttgttttctgttaccgaaaatgctccagattacgatactttgatggtcattcaggctgccagaagattatatcaaccggtaaaagtcaggttgcctttgcctgccattgtagaaatcaacagaaggttacttttcggttattccaagtttaaagatgatccaagaattattcacttaaaaaaattagtatatgactacaacaggaaattagattctgtgggtttaaaagaccatcaggtgatgcaattaaaaactaccaaattagaagcattgaggtgctttgtaactttgatcgttagattgattaaattttctgtctttgctatattatctttaccgggttctattctcttcactccaattttcattatttgtcgcgtatactctgaaaagaaggccaaagagggtttaaagaaatctttggttaaaattaagggtaccgatttgttggccacatggaaacttatcgtggcgttaatattggcaccaattttatacgttacttactctatcttgttgattattttggcaagaaaacaacactattgtcgcatctgggttccttccaataacgcattcatacaatttgtctatttttatgcgttattggttttcaccacgtattcctctttaaagaccggtgaaatcggtgttgaccttttcaaatctttaagaccactttttgtttctattgtttaccccggtaagaagatcgaagaaatccaaacaacaagaaagaatttaagtttggagttgactgctgtttgtaacgatttaggacctttggttttccctgattacgataaattagcgactgagatattctctaagagagacggttatgatgtctcttctgatgcagagtcttctataagtcgtatgagtgtacaatctagaagccgctcttcttctatacattctattggctccttggcttctaacgccttgtccagagtgaattctagaggctctttgaccgatattccaattttttctgatgcaaagcaaggtcaatggaaaagtgaaggtgaaactagtgaggatgaggatgaatttgatgagaaaaatcctgccatagtacaaaccgcaagaagttctgatttgaataaggaaaacagtcgcaacacaaatatatcttccaagattgcttctttagtaagacagaaaagagaacacgaaaagaaagaatga

SEQ ID NO: 6989 - DNA, 582 bp, Saccharomyces cerevisiae
atggtttctaccacgcaatcgaggtctttgaaggccatgggagaagagatctggaaaaataaaacagaaaaaattaatacagaattatttacgctaacatatgggtccatagtggcacaattgtgccaagattatgaacgggactttaacaaagtgaatgatcatttgtatagcatgggatataatattgggtgtagacttattgaggatttcttggctagaacggcattgccacgctgtgagaatttagtgaagacaagcgaagtactaagtaagtgtgcattcaaaatatttttaaacatcacacccaacataacgaactggtcgcataacaaggatactttttcattgattttggatgaaaacccattggctgactttgtggagttacccatggacgctatgaaatcgctctggtattccaatatattgtgtggtgttttgaaagggtcacttgaaatggtgcagctggattgtgatgtctggtttgtgtcggatatcttgagaggagactctcagacggagatcaaggttaagttaaatagaattttaaaagacgaaataccgatcggcgaagattag

SEQ ID NO: 6990 - DNA, 582 bp, Artificial Sequence
  Description of Artificial Sequence: Synthetic polynucleotide
atggtttctaccacgcaatccaggtctttgaaggccatgggagaagagatctggaaaaataaaacagaaaaaattaatacagaattatttacgttgacatatgggtccatagtggcacaattgtgccaagattatgaaagagactttaacaaagtgaatgatcatttgtatagcatgggatataatattgggtgtagacttattgaggatttcttggctagaacggcattgccacgctgtgagaatttagtgaagacaagcgaagtattgagtaagtgtgcattcaaaatatttttaaacatcacacccaacataacgaactggtctcataacaaggatactttttctttgattttggatgaaaacccattggctgactttgtggagttacccatggacgctatgaaatctctctggtattccaatatattgtgtggtgttttgaaagggtctcttgaaatggtgcagttagattgtgatgtctggtttgtgtctgatatcttgagaggagactctcagacggagatcaaggttaagttaaatagaattttaaaagacgaaataccgatcggcgaagattga

SEQ ID NO: 6991 - DNA, 1782 bp, Saccharomyces cerevisiae
atggtacgagacttagtgacattgccttcatcactgcccttgattactgctggttttgctactgatcaggttcatttgcttattggtacagggtccacggactcagtaagcgtttgtaagaatagaatccactccattttgaatgctggtggtaatcccatagtagtgaatccctcgtcaccaagccatactaaacaattacaattggaatttggtaagtttgcaaagttcgaaatagtagaaagggagtttaggttatctgatttaactactttggggagagttctggtatgcaaggtagtggatagagtattcgtagatctacccataacacaaagtcgcctatgcgaggagatcttttggcaatgccaaaaactgagaattcccataaatacattccacaaaccagagttttctaccttcaatatgattcctacgtgggtcgacccaaaaggaagtggtttacaaatctcagttactacgaatgggaatggatacatcttggcaaacaggataaaaagagatataatatcacacttacctccaaacatatctgaggtggtgataaacatggggtatttgaaagaccgtattataaacgaagaccataaggccttgttagaggaaaagtactaccagactgacatgtcattacctggatttggctacggcttagatgaggacggttgggagagccataagtttaataagctaattcgtgaatttgaaatgaccagtagagaacagagacttaagagaaccagatggttatctcagataatggagtattacccgatgaacaagctgagtgacatcaagttggaagatttcgagacttcatcttctccaaataaaaagacaaagcaggaaactgtcacagagggtgtagtacctcctaccgatgaaaatattgaaaacggtacaaaacaactacaattatcggaagtgaaaaaagaggagggacctaaaaaactagggaagatttctttagtcggaagtggtccaggctcggtatctatgctaacgataggtgcattacaagaaataaagtctgcagatataatactggcagataaactggtaccgcaagccattttagatttaatacctccaaaaactgaaaccttcatagccaaaaaatttcccggtaatgcagaacgagcacaacaggaattactagctaaaggtttagaatcgttggataatggattgaaagtagtccgtttgaagcaaggtgatccgtatatttttggccgtggtggcgaggaatttaatttcttcaaagatcacggatatattcctgtggttttaccgggcataagctcatccctagcttgtactgtattggctcagatacccgctactcaacgtgatatagcagaccaagtgctcatatgtactgggactgggagaaagggcgctctgcctataattcctgaatttgttgaaagcagaaccaccgtctttctaatggcactgcatcgcgccaacgttctgatcacgggattattgaagcatggctgggatggtgatgtccccgctgcaattgtcgagagaggatcgtgccctgaccagcgtgttactagaactcttcttaaatgggtaccagaagtcgtggaggagattggttcaaggccccccggtgtcttggttgtaggcaaggctgtgaatgcattggttgaaaaagatctgataaattttgacgaatcaagaaaatttgtcattgatgaaggttttagagaatttgaggttgatgtagatagtctatttaagttatactaa

SEQ ID NO: 6992 - DNA, 1782 bp, Artificial Sequence
  Description of Artificial Sequence: Synthetic polynucleotide
atggtaagagacttagtgacattgccttcttctttacccttgattactgctggttttgctactgatcaggttcatttgcttattggtacagggtccacggactctgtaagcgtttgtaagaatagaatccactccattttgaatgctggtggtaatcccatagtagtgaatccctcttctccaagccatactaaacaattacaattggaatttggtaagtttgcaaagttcgaaatagtagaaagggagtttaggttatctgatttaactactttggggagagttttggtatgcaaggtagtggatagagtattcgtagatttgcccataacacaaagtcgcttatgcgaggagatcttttggcaatgccaaaaattgagaattcccataaatacattccacaaaccagagttttctaccttcaatatgattcctacgtgggtcgacccaaaaggaagtggtttacaaatctccgttactacgaatgggaatggatacatcttggcaaacaggataaaaagagatataatatctcacttacctccaaacatatctgaggtggtgataaacatggggtatttgaaagaccgtattataaacgaagaccataaggccttgttagaggaaaagtactaccagactgacatgtctttacctggatttggctacggcttagatgaggacggttgggagagccataagtttaataagttgattcgtgaatttgaaatgaccagtagagaacagagacttaagagaaccagatggttatctcagataatggagtattacccgatgaacaagttgagtgacatcaagttggaagatttcgagacttcttcttctccaaataaaaagacaaagcaggaaactgtcacagagggtgtagtacctcctaccgatgaaaatattgaaaacggtacaaaacaattacaattatctgaagtgaaaaaagaggagggacctaaaaaattggggaagatttctttagtcggaagtggtccaggctctgtatctatgcttacgataggtgcattacaagaaataaagtctgcagatataatattggcagataaattagtaccgcaagccattttagatttaatacctccaaaaactgaaaccttcatagccaaaaaatttcccggtaatgcagaaagagcacaacaggaattattagctaaaggtttagaatctttggataatggattgaaagtagtccgtttgaagcaaggtgatccgtatatttttggccgtggtggcgaggaatttaatttcttcaaagatcacggatatattcctgtggttttaccgggcataagctcttccttggcttgtactgtattggctcagatacccgctactcaacgtgatatagcagaccaagtgctcatatgtactgggactgggagaaagggcgctttacctataattcctgaatttgttgaaagcagaaccaccgtctttttgatggcattgcatcgcgccaacgttttgatcacgggattattgaagcatggctgggatggtgatgtccccgctgcaattgtcgagagaggaagttgccctgaccagcgtgttactagaactcttcttaaatgggtaccagaagtcgtggaggagattggttctaggccccccggtgtcttggttgtaggcaaggctgtgaatgcattggttgaaaaagatttgataaattttgacgaatctagaaaatttgtcattgatgaaggttttagagaatttgaggttgatgtagatagtttatttaagttatactga

SEQ ID NO: 6993 - DNA, 1059 bp, Saccharomyces cerevisiae
atgattggcaaacggtttttccaaacaacaagtaaaaagattgcttttgcattcgatattgatggtgtgttgttcaggggcaaaaagccaattgctggtgccagcgacgcattgaagctgttgaaccgaaataaaattccatatattttactcactaatggtggagggttctctgaaagggcacggacagagtttatctcgagtaaattggacgttgatgtatcacccttgcaaattattcaaagtcatactccttacaagtcccttgttaacaaatattcaaggatcttggccgttggtacaccttccgtgagaggcgttgcagaaggctacggatttcaagatgttgttcaccaaacggatattgtaagatacaatagggacattgcaccatttagtgggctatctgatgaacaagtgatggagtactcaagggatattccagatttaaccactaagaaattcgatgccgtcttggtatttaacgatcctcatgattgggctgccgatatacaaatcatctcagatgcaatcaacagcgaaaatgggatgttaaataccttgagaaacgaaaagagtggcaaaccttccatccccatttacttttcgaaccaggatttactgtgggccaatccttataaattgaatagatttggacaaggtgccttccgcttactagttagaaggctttatctcgagttaaatggtgaacccttgcaagattatactttgggtaagcctacaaagttgacttatgatttcgctcatcatgttctcattgattgggaaaaaagactaagcgggaaaataggccaatctgtgaagcaaaaactgccactcttaggcacgaaaccttcaacttctccattccatgcggtttttatggtaggtgataatcctgcaagtgacatcattggagctcaaaattacggttggaacagttgtttggtgaagacaggtgtgtataacgaaggtgatgacttaaaggaatgtaagcctaccttgatcgtgaatgatgtatttgatgcggttactaaaacgttagaaaagtacgcatga

SEQ ID NO: 6994 - DNA, 1059 bp, Artificial Sequence
  Description of Artificial Sequence: Synthetic polynucleotide
atgattggcaaaagatttttccaaacaacaagtaaaaagattgcttttgcattcgatattgatggtgtgttgttcaggggcaaaaagccaattgctggtgccagcgacgcattgaagttgttgaacagaaataaaattccatatattttactcactaatggtggagggttctctgaaagggcaagaacagagtttatctccagtaaattggacgttgatgtatctcccttgcaaattattcaaagtcatactccttacaagtcccttgttaacaaatattctaggatcttggccgttggtacaccttccgtgagaggcgttgcagaaggctacggatttcaagatgttgttcaccaaacggatattgtaagatacaatagggacattgcaccatttagtgggttatctgatgaacaagtgatggagtactctagggatattccagatttaaccactaagaaattcgatgccgtcttggtatttaacgatcctcatgattgggctgccgatatacaaatcatcagtgatgcaatcaacagcgaaaatgggatgttaaataccttgagaaacgaaaagagtggcaaaccttccatccccatttacttttccaaccaggatttattatgggccaatccttataaattgaatagatttggacaaggtgccttccgcttattggttagaaggctttatctcgagttaaatggtgaacccttgcaagattatactttgggtaagcctacaaagttgacttatgatttcgctcatcatgttctcattgattgggaaaaaagattgagcgggaaaataggccaatctgtgaagcaaaaattaccactcttaggcacgaaaccttccacttctccattccatgcggtttttatggtaggtgataatcctgcaagtgacatcattggagctcaaaattacggttggaacagttgtttggtgaagacaggtgtgtataacgaaggtgatgacttaaaggaatgtaagcctaccttgatcgtgaatgatgtatttgatgcggttactaaaacgttagaaaagtacgcatga

SEQ ID NO: 6995 - DNA, 1047 bp, Saccharomyces cerevisiae
atgtcacaatacaaaactggtttacttttaatacatccggcggtgactacaacgccagagctagtagagaacactaaggctcaagctgcatcaaagaaagtcaagttcgtggaccagtttttaatcaataaactaaatgatgggtccataactttggaaaacgcaaaatatgaaacagtacactatttgacgccagaagcccagactgatattaagtttccgaaaaagttaatttctgtcttagctgactcattgaaaccaaacggctcactaattggtttaagtgatatttataaagtagatgcattaatcaatgggtttgaaataattaacgaaccagattattgctggattaaaatggattcctctaaactaaaccaaactgtttctataccactgaaaaaaaagaaaacgaacaatactaagctacagagtggtagtaagctaccaacttttaaaaaagctagttcttcaacctctaatttaccctcattcaaaaaagcagatcacagtaggcaacctatagttaaggaaacagacagcttcaaaccacctagtttcaaaatgaccactgaaccaaaagtctaccgagtcgtagacgacctgattgaggatagcgatgatgatgatttctctagtgactcttccaaagcccaatattttgatcaagtggataccagcgatgattccattgaagaagaagaattaatcgacgaggatggttctggtaagtcaatgattactatgattacatgcggtaaatccaaaactaagaagaagaaggcttgtaaagattgcacctgtggtatgaaagaacaggaagaaaatgaaataaacgatataagatctcaacaagataaagttgtcaaatttacagaagacgagttgaccgagattgatttcactatcgatgggaagaaagttggcggctgtggttcttgttctctaggggatgcctttagatgtagtggttgtccctacttgggtcttcctgctttcaagcctggtcaacctatcaatttggacagcatttcagatgacttgtaa

SEQ ID NO: 6996 - DNA, 1047 bp, Artificial Sequence
  Description of Artificial Sequence: Synthetic polynucleotide
atgtctcaatacaaaactggtttacttttaatacatccggcggtgactacaacgccagagttggtagagaacactaaggctcaagctgcatccaagaaagtcaagttcgtggaccagtttttaatcaataaattgaatgatgggtccataactttggaaaacgcaaaatatgaaacagtacactatttgacgccagaagcccagactgatattaagtttccgaaaaagttaatttctgtcttagctgactctttgaaaccaaacggctccttgattggtttaagtgatatttataaagtagatgcattaatcaatgggtttgaaataattaacgaaccagattattgctggattaaaatggattcctctaaattgaaccaaactgtttctataccattgaaaaaaaagaaaacgaacaatactaagttacagagtggtagtaagttaccaacttttaaaaaagctagttcttccacctctaatttaccctctttcaaaaaagcagatcacagtaggcaacctatagttaaggaaacagacagcttcaaaccacctagtttcaaaatgaccactgaaccaaaagtctacagagtcgtagacgacttgattgaggatagcgatgatgatgatttctctagtgactcttccaaagcccaatattttgatcaagtggataccagcgatgattccattgaagaagaagaattaatcgacgaggatggttctggtaagtctatgattactatgattacatgcggtaaatccaaaactaagaagaagaaggcttgtaaagattgcacctgtggtatgaaagaacaggaagaaaatgaaataaacgatataagatctcaacaagataaagttgtcaaatttacagaagacgagttgaccgagattgatttcactatcgatgggaagaaagttggcggctgtggttcttgttctttaggggatgcctttagatgtagtggttgtccctacttgggtcttcctgctttcaagcctggtcaacctatcaatttggacagcatttctgatgacttgtga

SEQ ID NO: 6997 - DNA, 1689 bp, Saccharomyces cerevisiae
atgactgccgtcgcctctactagcgggaagcaagatgctgaccataaccagtctatagagtgtccaaggttttcgcgtggacagaaagagattttgttggaccatgaggatgcgaaggggaaggattcaataatcaactcccccgtgtcagggaggcaatcaataagccctactttgtcgaatgctactaccacgactacgaaatctattatgaatgccaccggcacctccggcgcagtagtaagtaatactccggagcctggtttgaagagagtccccgccgtcactttcagtgatctaaagcaacagcaaaagcaggatagtctgactcagctgaagaacgactcagaaaggaccaagtctccaaatagtaatcctgctcctgtctcaaattccattcctggcaatcatgcagttataccgaaccacaccaacacttcaagaacaacgcaattatctgggtctccactcgtcaacgaaatgaaagattatgatcctaagaaaaaagacagtgctcttaaaatagttgataccatgaagcctgacaaaatcatggccacttcaacgccaataagtagagaaaataataaggtaaccgccaaagcccccaccagtattacacttcgaaaggaagatgcacaagatcaagctaacaatgtttcaggccaaattaatgtgcgttctaccccggaagaaacgccagtgaagcagtccgtcattccttccatcatccccaaaagagagaactccaagaatttggatcccagactacctcaagatgatggaaaattgcacgtgttgtttggcgctacaggttcgttatcggtatttaagatcaagccaatgattaaaaaactagaagaaatatatggacgtgatagaataagcattcaagttatcctcactcaatcagcaacacagtttttcgaacaaagatataccaagaaaattatcaaatcttcagaaaaactaaataaaatgtcgcagtacgaatccactccggcaactccagtgacaccaacaccaggacaatgcaacatggctcaagtagtcgagttacccccacatattcaactatggaccgaccaagatgaatgggacgcatggaaacaacgaactgatcctgtacttcatatagaactacgtcgctgggcggatatactggtagtagctccattaactgcaaacacattatcaaaaattgctttgggcctgtgcgacaatcttctgacaagtgtcattagagcttggaatccgagttatcccattcttttggcaccttctatggtgagtagcacttttaattctatgatgacaaagaagcaactacaaacgataaaggaggaaatgtcctgggtcactgttttcaagccgtctgagaaagttatggatataaatggtgatattggtctcgggggtatgatggactggaatgagattgttaacaaaatcgttatgaaattgggtgggtacccaaaaaataacgaggaagaggacgatgatgaggatgaggaagaagacgacgacgaagaagaagatacagaagataagaacgaaaacaacaacgatgatgatgacgatgacgacgatgacgacgacgacgacgacgacgacgacgacgacgacgacgatgatgacgaggacgaggacgaagcagaaaccccaggtataatagataagcatcaataa

SEQ ID NO: 6998 - DNA, 1689 bp, Artificial Sequence
  Description of Artificial Sequence: Synthetic polynucleotide
atgactgccgtcgcctctactagcgggaagcaagatgctgaccataaccagtctatagagtgtccaaggttttctcgtggacagaaagagattttgttggaccatgaggatgcgaaggggaaggattctataatcaactcccccgtgagcgggaggcaaagtataagccctactttgagcaatgctactaccacgactacgaaatctattatgaatgccaccggcacctccggcgcagtagtaagtaatactccggagcctggtttgaagagagtccccgccgtcactttcagtgatttgaagcaacagcaaaagcaggatagtttgactcagttgaagaacgactctgaaaggaccaagtctccaaatagtaatcctgctcctgtctccaattccattcctggcaatcatgcagttataccgaaccacaccaacacttccagaacaacgcaattatctgggtctccactcgtcaacgaaatgaaagattatgatcctaagaaaaaagacagtgctcttaaaatagttgataccatgaagcctgacaaaatcatggccacttccacgccaataagtagagaaaataataaggtaaccgccaaagcccccaccagtattacacttagaaaggaagatgcacaagatcaagctaacaatgtttctggccaaattaatgtgcgttctaccccggaagaaacgccagtgaagcagtccgtcattccttccatcatccccaaaagagagaactccaagaatttggatcccagattacctcaagatgatggaaaattgcacgtgttgtttggcgctacaggttctttaagtgtatttaagatcaagccaatgattaaaaaattagaagaaatatatggacgtgatagaataagcattcaagttatcctcactcaaagtgcaacacagtttttcgaacaaagatataccaagaaaattatcaaatcttctgaaaaattgaataaaatgtctcagtacgaatccactccggcaactccagtgacaccaacaccaggacaatgcaacatggctcaagtagtcgagttacccccacatattcaattatggaccgaccaagatgaatgggacgcatggaaacaaagaactgatcctgtacttcatatagaattgcgtcgctgggcggatatattagtagtagctccattaactgcaaacacattatccaaaattgctttgggcttatgcgacaatcttttaacaagtgtcattagagcttggaatccgagttatcccattcttttggcaccttctatggtgagtagcacttttaattctatgatgacaaagaagcaattacaaacgataaaggaggaaatgtcctgggtcactgttttcaagccgtctgagaaagttatggatataaatggtgatattggtctcgggggtatgatggactggaatgagattgttaacaaaatcgttatgaaattgggtgggtacccaaaaaataacgaggaagaggacgatgatgaggatgaggaagaagacgacgacgaagaagaagatacagaagataagaacgaaaacaacaacgatgatgatgacgatgacgacgatgacgacgacgacgacgacgacgacgacgacgacgacgacgatgatgacgaggacgaggacgaagcagaaaccccaggtataatagataagcatcaatga

SEQ ID NO: 6999 - DNA, 321 bp, Saccharomyces cerevisiae
atgatcgtctttgatgtatctctaatgatcattattattttttcttttgcttttaacatgagtcaaagcaatattcttatgttatataactcaccccatgtgctcgtgggcagtgacgcacgcaactttttctcttgcaaaaaatggcatcgatgcttttctggggaggtgatattagaggagaagaagtcacagagtgctcttggatcacgatccctcacttgtacttgtccacttatcagcgccgtccagttacatttggagagatctttttttagcctggccttctttgctgtcatactactttatattccgggataa

SEQ ID NO: 7000 - DNA, 321 bp, Artificial Sequence
  Description of Artificial Sequence: Synthetic polynucleotide
atgatcgtctttgatgtatctttgatgatcattattattttttcttttgcttttaacatgagtcaaagcaatattcttatgttatataactctccccatgtgctcgtgggcagtgacgcacgcaactttttctcttgcaaaaaatggcataggtgcttttctggggaggtgatattagaggagaagaagtctcagagtgctcttggatctagatccctcacttgtacttgtccacttatcagcgccgtccagttacatttggagagatctttttttagcttagccttctttgctgtcatattactttatattccgggatga

SEQ ID NO: 7001 - DNA, 468 bp, Saccharomyces cerevisiae
atgaattcaactaaaaggctgaaaatgtcaacaacctttcatgattatgacttggaagagccattaacctcaaatgccagaccactaaagaactccgttattacaatccgagtaataaaatctttcccatatagaaacgtcaagaacatagtgctgcacgattacgatcttgctgataaaactgcaaaggacctgttcaatgacgttttgaacaaaattcaaaatgaaggttcattcagaccattccgtaatgttaagtttgatactttaaagatatacacgcacgcacatggttccaagacggttaatctcgtgatcaattttgaccacgatgacgactggactttagacatagagaatgacaaaaaaaagctgttcgagtatggcattgagaatgaaaccgaaatttcgcttttcaacaaagaggattacctaaggtttaaagaaaaccctgaagaaaaatggtga

SEQ ID NO: 7002 - DNA, 468 bp, Artificial Sequence
  Description of Artificial Sequence: Synthetic polynucleotide
atgaattctactaaaaggttgaaaatgtctacaacctttcatgattatgacttggaagagccattaacctctaatgccagaccattgaagaactccgttattacaatcagagtaataaaatctttcccatatagaaacgtcaagaacatagtgttacacgattacgatcttgctgataaaactgcaaaggaccttttcaatgacgttttgaacaaaattcaaaatgaaggttctttcagaccattccgtaatgttaagtttgatactttaaagatatacacgcacgcacatggttccaagacggttaatctcgtgatcaattttgaccacgatgacgactggactttagacatagagaatgacaaaaaaaagcttttcgagtatggcattgagaatgaaaccgaaatttctcttttcaacaaagaggattacttgaggtttaaagaaaaccctgaagaaaaatggtga

SEQ ID NO: 7003 - DNA, 924 bp, Saccharomyces cerevisiae
atgactagtttggacgatacaataatttcgtaccagaatataatgttactggataacatgaccaactacaacaagcctgcgattgactatttccatcatgaatttaatgatgcaagcttggaaatatcggcttcatggacactactattgaagatgcgcaaacataaactacttcgattaccaagttgctcttcagaggacgtgctagattacaacatgtacctcgttaggctacatcattgcctctggaggcgttggtccataaatcactatggtttacagaactccaaatccaatccactgtccatcaactggaacaaagaaaccgatgtaacggtgttgtacggtccagatttgactaacatagatagtaatgaaaacgaaatatcgccggtccagaaccaaattgaccagaaacaaacaaaaaatctaaaatctgctttaaagaaaaatacggaatgctgggtaaccgaggaggtggatgagattaacgcttctatagagagcaatgacaacgctttggtgaaattagaagacatttcatgcccatcgtctgttgattctcacacgtcttccattttcgaccagcattctacatgcactaaaatttcctccatagatgaagattctgaagaccttatgaacgaaaagaaggaacaattccccaggaagttgaagtttaaccaagccgtgatgaagagggagatcgactcaaaggggactatccgcgaatccctcatcaacataaacgatatccaacattcccgccaccatcgccgtcaccatcgtcgccatcatcaccatcaccatcaaaatagttctcattctgatgaaacaataaaagaagctcattatgagttcagcaactatacatttggcactatggaagaagacattttttataggaaccaggttgttttttaa

SEQ ID NO: 7004 - DNA, 924 bp, Artificial Sequence
  Description of Artificial Sequence: Synthetic polynucleotide
atgactagtttggacgatacaataatttcttaccagaatataatgttattagataacatgaccaactacaacaagcctgcgattgactatttccatcatgaatttaatgatgcaagcttggaaatatctgcttcttggacattgttgttgaagatgcgcaaacataaattacttcgtttaccaagttgctcttctgaggacgtgttggattacaacatgtacctcgttaggttacatcattgcctctggaggcgttggtccataaatcactatggtttacagaactccaaatccaatccattgtccatcaactggaacaaagaaaccgatgtaacggtgttgtacggtccagatttgactaacatagatagtaatgaaaacgaaatatctccggtccagaaccaaattgaccagaaacaaacaaaaaatttgaaatctgctttaaagaaaaatacggaatgctgggtaaccgaggaggtggatgagattaacgcttctatagagagcaatgacaacgctttggtgaaattagaagacatttcttgcccatcttctgttgattctcacacgtcttccattttcgaccagcattctacatgcactaaaatttcctccatagatgaagattctgaagaccttatgaacgaaaagaaggaacaattccccaggaagttgaagtttaaccaagccgtgatgaagagggagatcgactccaaggggactatccgcgaatccctcatcaacataaacgatatccaacattcccgccaccatcgccgtcaccatcgtcgccatcatcaccatcaccatcaaaatagttctcattctgatgaaacaataaaagaagctcattatgagttcagcaactatacatttggcactatggaagaagacattttttataggaaccaggttgttttttga

SEQ ID NO: 7005 - DNA, 1113 bp, Saccharomyces cerevisiae
atgtcgaaacagtgggcgagtggtacaaacggagctttcaaaagacaggtttcgtccttcagagaaacaatctctaagcaacacccaatttataagccagcaaagggaagatattggttgtatgtttcacttgcatgcccatgggcccatagaacactaattacgagggctttgaagggattaacctctgttataggatgtagcgtagtccattggcaccttgacgagaaaggatggagatttttggacatggaaaagcaattggaggacagtgaagattttttggaacattggcacgatgttgcaggtggtattagaactgctaaagaggattccagcaagagcttcgccgagatcaagaatgacagtcaaagattcatggttgatgctaccaatgagcctcactatggatacaagagaatcagtgacttatattacaagagcgatcctcaatactcggcaaggttcaccgtcccagtcctgtgggacttagaaacccaaacaattgttaacaacgaaagtagcgaaattataaggattttgaactctagtgcgttcgatgaatttgtcgacgacgatcacaagaaaacggaccttgttcctgctcagttgaaaacacagatcgatgacttcaattcttgggtttacgacagcatcaacaatggtgtatacaagaccggattcgcagagaaagcagaagtttacgaaagtgaagtcaacaacgtatttgaacatttggacaaagtggagaaaatcctgagtgacaaatattccaaattgaaggccaaatacggtgaagaagatagacaaaaaatcttgggtgagttcttcactgtgggtgatcaattaacagaagctgacattagattgtatactaccgtcataagattcgatcctgtgtacgtccaacatttcaaatgcaattttacctctattagagccggatatccatttattcatttgtgggtaagaaatttatactggaattatgatgccttcaggtacacaacagattttgaccatatcaagttacactacacgcgttcccacacaaggatcaaccccttgggaattacgcccctgggacccaagccagatattcgtcctttataa

SEQ ID NO: 7006 - DNA, 1113 bp, Artificial Sequence
  Description of Artificial Sequence: Synthetic polynucleotide
atgtccaaacagtgggcgagtggtacaaacggagctttcaaaagacaggtttcttccttcagagaaacaatctctaagcaacacccaatttataagccagcaaagggaagatattggttgtatgtttcccttgcatgcccatgggcccatagaacattaattacgagggctttgaagggattaacctctgttataggatgtagcgtagtccattggcaccttgacgagaaaggatggagatttttggacatggaaaagcaattggaggacagtgaagattttttggaacattggcacgatgttgcaggtggtattagaactgctaaagaggattccagcaagagcttcgccgagatcaagaatgacagtcaaagattcatggttgatgctaccaatgagcctcactatggatacaagagaatcagtgacttatattacaagagcgatcctcaatacagtgcaaggttcaccgtcccagtcttgtgggacttagaaacccaaacaattgttaacaacgaaagtagcgaaattataaggattttgaactctagtgcgttcgatgaatttgtcgacgacgatcacaagaaaacggaccttgttcctgctcagttgaaaacacagatcgatgacttcaattcttgggtttacgacagcatcaacaatggtgtatacaagaccggattcgcagagaaagcagaagtttacgaaagtgaagtcaacaacgtatttgaacatttggacaaagtggagaaaatcttaagtgacaaatattccaaattgaaggccaaatacggtgaagaagatagacaaaaaatcttgggtgagttcttcactgtgggtgatcaattaacagaagctgacattagattgtatactaccgtcataagattcgatcctgtgtacgtccaacatttcaaatgcaattttacctctattagagccggatatccatttattcatttgtgggtaagaaatttatactggaattatgatgccttcaggtacacaacagattttgaccatatcaagttacactacacgcgttcccacacaaggatcaaccccttgggaattacgcccttaggacccaagccagatattcgtcctttatga

SEQ ID NO: 7007 - DNA, 1092 bp, Saccharomyces cerevisiae
atggtatacacaacaccgcaacaacagcagagattcagctccacaccgcaatctagccacactcttatcttctcgccaatcagagccccttcaatgcaaacgccctcctcattggattaccaatcaccttcaattgttgtgtcatcgtcttcaatgaaggttcacggccggtcttccagtttcggtaaattttcactgtctattgggcaaaatggtaaggctacaatactggggcctataaacgtccttcccactgatacatcgaaaatggagaaacctgtaccaaagaaaaagcctgttacttctgaccgtgtcgaaaagactcgtatattatctttgttgaaaaaaatgagaaacaagagcagtactgtcaacaaaaaatatagtaaagtaccattaaagtctacgacaagtttgcaaccagcagctactgcaccttcaccactagtgtccaacatcataaagccgtctcccaaaaagttagcttccccaagaactccgaatgcaaactccaatttaaatctaaactttacttcatttcagattaaaacaggtttcactcccaatctcgatggaattttacttgaaaacttcacgtctcctaacacaaccgctgattcacagggtaattccgccagtaacatcataaataataatcacggtagcgcaaataataccaaccaatttctttttaatctaccacttcaatcatcaccaaggcaattcaggtctcctgcaagattaatagatccccttcccatatcggactggaacaccagtctcttgatgtcacccccaagaacgacgaattttgaatctgcaaacaatcacttcaattcaaattttgctcaagcatcgatgttaagacgcccttcactaccgcacatagatgaggtgattccacaggactctaatccagccaattactcagatagatcggactatctatctgtggaccagaacgccaataatcataatggtgcactttcagaacagacctataataatataatgaaatcttctatgatttcgttacctatagaaaaagatgatgccacaatggcactacgaaaacttgtctccagagagtag

SEQ ID NO: 7008 - DNA, 1092 bp, Artificial Sequence
  Description of Artificial Sequence: Synthetic polynucleotide
atggtatacacaacaccgcaacaacagcagagattcagctccacaccgcaatctagccacactcttatcttctctccaatcagagccccttctatgcaaacgccctcctctttggattaccaaagtccttctattgttgtgtcttcttcttctatgaaggttcacggccgttcttccagtttcggtaaattttctttatctattgggcaaaatggtaaggctacaatattagggcctataaacgtccttcccactgatacaagtaaaatggagaaacctgtaccaaagaaaaagcctgttacttctgaccgtgtcgaaaagactcgtatattatctttgttgaaaaaaatgagaaacaagagcagtactgtcaacaaaaaatatagtaaagtaccattaaagtctacgacaagtttgcaaccagcagctactgcaccttctccattggtgtccaacatcataaagccgtctcccaaaaagttagcttccccaagaactccgaatgcaaactccaatttaaatttgaactttacttcttttcagattaaaacaggtttcactcccaatctcgatggaattttacttgaaaacttcacgtctcctaacacaaccgctgattctcagggtaattccgccagtaacatcataaataataatcacggtagcgcaaataataccaaccaatttctttttaatttaccacttcaatcttctccaaggcaattcaggtctcctgcaagattaatagatccccttcccatatctgactggaacaccagtctcttgatgtctcccccaagaacgacgaattttgaatctgcaaacaatcacttcaatagtaattttgctcaagcatctatgttaagacgcccttctttaccgcacatagatgaggtgattccacaggactctaatccagccaattactctgatagaagtgactatttatctgtggaccagaacgccaataatcataatggtgcactttctgaacagacctataataatataatgaaatcttctatgatttctttacctatagaaaaagatgatgccacaatggcattaagaaaacttgtctccagagagtga

SEQ ID NO: 7009 - DNA, 1758 bp, Saccharomyces cerevisiae
atggagaacgacaaggcgtcacatgcgagcccaagcattggagtgaacgaatttgtcgttcaaggggagatatccatagacgactccgaaaggtctgtcaagagtgttagcgttagcataagtgatgatgaggatagtaagacagatgtacaagataatatggccacaccgtccacaagatcgaaatttcaaacagatctggccattgataataggctattggaaaaagatccaaagtacaaaaaacttttcactgaaaaaagaagacgtcgaagaccagaaagctgtattaacctcatgactaaaggtaagggcactggacaaaaagataacattaatgatcaaattttcagcctaagaatattaccaggctccgatttaaactctttaaaggattctttatggataataaagatctctacccagccagatgttgaaaaaacaatcgcaagagctttttctgatttctattggttatatcatcaattacaaaataaccactggggaaaaacgattcctccgcctacaaggtccaacattcttgtagagaaggacgaatttgccataaatcatctttttatgatacgtaataatgagaagtatgatccaatttttaatttcaaaccggaatatatcatatcattgcaattgatggcaatgattaagcacatattcaatgacaaggttttacgtttggattcaaatttcatagattttattagttgggatgacgatcttcctgaaagtttgcaaatagtagtcgatgacagtaccttcacaggggataaaatactaatgacatcttctcaatttcgagaattaaaagagtttcataaacaatcaaaaaaagtggaatcaataacaaattcacatgcttcgttaatacccgtaacagaacttaccgaaatatatataagcccgaccaaattattctctagaaaagactaccaaaggctttttcaacctcaaagcacagacaacacctttaataacaatgacccgttgattcaagagtggataccaaaaagcaaaacattattcactagtttatcctttggttcaagtgcacctacttatcaagaagcgtcaactgagatacaggcatgccatgactgggtaagcatatccaaggagcaatggaaacagttactctaccatgtattacagtacattgtagacgaggcagtgaaggtgaattctgtgataaacgaatttactgagtgtcttaagcaaatttctttggacgaagtcattagagcaaactctgaactatttttgaaattttccaaactgaatgaatcctttctaaaaaaattcaaaggtgcatcgaggcaagacattctgaagctaatcatattatttgatgaaaatgtaagattttgcgaatcatttgaatccatcttaaatcaaagattgaagcttggtaaaattctaagcatcatagaagtggatctagacaagaagaaaaactttcttgacaaactatctccgggaaacaacaacagtaacaatgaagaccttaagatacgcacggcagaggatgaataccgcattgtattaaaaagatataaccgtgttaagcagagctgggagaaaattatggaagatatcttaaatgaacggaaagaatttgagaagagagaagccgccgaggttaatagttgtttaaaatcaataagagatttgaacatggatgaaaagaaacactatttacaattatggcaagactttgtaccagatgagcacataagccaatga

SEQ ID NO: 7010 - DNA, 1758 bp, Artificial Sequence
  Description of Artificial Sequence: Synthetic polynucleotide
atggagaacgacaaggcgtctcatgcgagcccaagcattggagtgaacgaatttgtcgttcaaggggagatatccatagacgactccgaaaggtctgtcaagagtgttagcgttagcataagtgatgatgaggatagtaagacagatgtacaagataatatggccacaccgtccacaagaagtaaatttcaaacagatttggccattgataataggttattggaaaaagatccaaagtacaaaaaacttttcactgaaaaaagaagacgtagaagaccagaaagctgtattaacctcatgactaaaggtaagggcactggacaaaaagataacattaatgatcaaattttcagcttaagaatattaccaggctccgatttaaactctttaaaggattctttatggataataaagatctctacccagccagatgttgaaaaaacaatcgcaagagctttttctgatttctattggttatatcatcaattacaaaataaccactggggaaaaacgattcctccgcctacaaggtccaacattcttgtagagaaggacgaatttgccataaatcatctttttatgatacgtaataatgagaagtatgatccaatttttaatttcaaaccggaatatatcatatctttgcaattgatggcaatgattaagcacatattcaatgacaaggttttacgtttggattctaatttcatagattttattagttgggatgacgatcttcctgaaagtttgcaaatagtagtcgatgacagtaccttcacaggggataaaatattaatgacatcttctcaatttagagaattaaaagagtttcataaacaaagtaaaaaagtggaaagtataacaaattctcatgcttctttaatacccgtaacagaacttaccgaaatatatataagcccgaccaaattattctctagaaaagactaccaaaggctttttcaacctcaaagcacagacaacacctttaataacaatgacccgttgattcaagagtggataccaaaaagcaaaacattattcactagtttatcctttggtagtagtgcacctacttatcaagaagcgtctactgagatacaggcatgccatgactgggtaagcatatccaaggagcaatggaaacagttactctaccatgtattacagtacattgtagacgaggcagtgaaggtgaattctgtgataaacgaatttactgagtgtcttaagcaaatttctttggacgaagtcattagagcaaactctgaattatttttgaaattttccaaattgaatgaatcctttttgaaaaaattcaaaggtgcaagcaggcaagacattttgaagttaatcatattatttgatgaaaatgtaagattttgcgaaagttttgaatccatcttaaatcaaagattgaagcttggtaaaattttgagcatcatagaagtggatttggacaagaagaaaaactttcttgacaaattatctccgggaaacaacaacagtaacaatgaagaccttaagatacgcacggcagaggatgaataccgcattgtattaaaaagatataaccgtgttaagcagagctgggagaaaattatggaagatatcttaaatgaaagaaaagaatttgagaagagagaagccgccgaggttaatagttgtttaaaatctataagagatttgaacatggatgaaaagaaacactatttacaattatggcaagactttgtaccagatgagcacataagccaatga

SEQ ID NO: 7011 - DNA, 2517 bp, Saccharomyces cerevisiae
atgttcacatttatacccatcacccatcctacatcggatacaaagcacccattgctgctagtccagtctgcacatggggaaaagtatttcttcggtaaaattggtgaaggatcccaaaggagtctgactgaaaataagatcaggatatccaaattgaaggatattttccttactggtgaattaaactggtcagatataggtggattacctggaatgattttgactattgctgatcaagggaaaagtaatcttgttttgcattacggcaatgacattttgaattacatagtttccacttggagatacttcgtctttagattcggaatagacttgaacgatcacattatgaaagacaaggaagtatataaagataagataatagctgttaaatcctttaatgttctgaaaaatgggggggaagacaggttaggcgtcttcgatagttttcaaaaaggtgtattacgttccatagtagcaaaaatgttccccaaacatgcacccaccgataggtacgatccttctagtgatccgcacttgaatgtagagttgcctgacttagacgccaaagtggaagtttctacgaattacgagatttcattcagtccagtgaggggtaaatttaaagtggaggaagctattaaactaggtgttccgaagggtcccttatttgcaaagttaaccaagggccaaacaattactttggataacggtattgttgtaactccggaacaggtattggagaatgaacgtcattttgccaaagtattgatcctggatatcccagatgacctatatttgaacgctttcgtagaaaaattcaaggattatgattgtgctgagcttggcatggtgtattattttcttggtgatgaggttaccattaatgataatctattcgcgttcattgacatatttgagaaaaacaattatggtaaagtaaatcatatgatatcccacaataaaatttctccaaacacgatatcatttttcggttctgcattgaccacattgaaattaaaggcactacaagtaaataattacaatttaccaaaaacagatcgtgtgttttccaaggacttctacgacagattcgatacaccactcagcagaggtacatctatgtgtaaatcccaggaagagcctttgaatacaataatagagaaggataacattcatattttttcacaaaacaagacagtaactttcgaaccatttcggatgaacgaagaaccgatgaaatgcaacatcaacggtgaagtggcggatttctcgtggcaagaaattttcgaagaacatgtaaaaccattagaatttcccttagctgatgtcgatacagttatcaataatcaactacacgtggataactttaacaattcagcagaaaagaagaaacacgttgaaattatcaccttaggaaccggtagtgcattgccttctaaatatagaaacgttgtctccacacttgttaaagttccttttactgacgccgatggaaataccataaatagaaacattatgctagatgctggtgaaaatactttaggtaccatacacaggatgttttctcagctagcagtcaagtcaatatttcaggatttgaaaatgatatatctgagtcacttgcatgcagaccaccatttgggaataatcagcgtgctaaatgaatggtacaaatataacaaggatgatgaaacgagttatatatatgtggttactccatggcaatatcacaaatttgttaatgaatggttagttctagaaaataaagagattttaaagagaatcaaatacataagttgtgagcatttcatcaatgattcgtttgtaagaatgcagacacaatctgttcctttggcagagttcaatgaaatattgaaagaaaatagcaatcaagaatcaaacagaaaactggaactggatagagattcttcatatagggatgttgacttgatcagacaaatgtatgaggatttatcgatagaatattttcaaacttgcagagctatacattgtgactgggcatattcgaactcaattaccttccgaatggacgaaaacaatgagcataatacattcaaggtttcatattcaggcgatacaagacctaacatcgagaaattttccctcgaaataggctataattcagatctattaattcacgaagctacactagaaaatcagctactggaggatgccgtgaagaaaaaacactgcactattaatgaagcaatcggtgtttcgaacaaaatgaatgctaggaagttgatcttaacacacttttcccagagatatcccaaattgccccaattagacaataatattgatgtgatggcgagagaattttgttttgctttcgacagtatgatcgttgattatgagaaaattggtgaacagcagcgtatttttccactgctgaataaggcatttgttgaagaaaaggaagaagaagaagatgttgatgacgttgaaagcgtacaagatttggaagtcaaacttaagaaacacaagaaaaattag

SEQ ID NO: 7012 - DNA, 2517 bp, Artificial Sequence
  Description of Artificial Sequence: Synthetic polynucleotide
atgttcacatttatacccatcacccatcctacatctgatacaaagcacccattgttattggtccagtctgcacatggggaaaagtatttcttcggtaaaattggtgaaggatcccaaaggagtttgactgaaaataagatcaggatatccaaattgaaggatattttccttactggtgaattaaactggtctgatataggtggattacctggaatgattttgactattgctgatcaagggaaaagtaatcttgttttgcattacggcaatgacattttgaattacatagtttccacttggagatacttcgtctttagattcggaatagacttgaacgatcacattatgaaagacaaggaagtatataaagataagataatagctgttaaatcctttaatgttttgaaaaatgggggggaagacaggttaggcgtcttcgatagttttcaaaaaggtgtattacgttccatagtagcaaaaatgttccccaaacatgcacccaccgataggtacgatccttctagtgatccgcacttgaatgtagagttgcctgacttagacgccaaagtggaagtttctacgaattacgagatttctttcagtccagtgaggggtaaatttaaagtggaggaagctattaaattgggtgttccgaagggtcccttatttgcaaagttaaccaagggccaaacaattactttggataacggtattgttgtaactccggaacaggtattggagaatgaacgtcattttgccaaagtattgatcttagatatcccagatgacctttatttgaacgctttcgtagaaaaattcaaggattatgattgtgctgagcttggcatggtgtattattttcttggtgatgaggttaccattaatgataatttattcgcgttcattgacatatttgagaaaaacaattatggtaaagtaaatcatatgatatcccacaataaaatttctccaaacacgatatcctttttcggttctgcattgaccacattgaaattaaaggcattacaagtaaataattacaatttaccaaaaacagatcgtgtgttttccaaggacttctacgacagattcgatacaccactcagcagaggtacatctatgtgtaaatcccaggaagagcctttgaatacaataatagagaaggataacattcatattttttctcaaaacaagacagtaactttcgaaccatttagaatgaacgaagaaccgatgaaatgcaacatcaacggtgaagtggcggatttcagttggcaagaaattttcgaagaacatgtaaaaccattagaatttcccttagctgatgtcgatacagttatcaataatcaattacacgtggataactttaacaattctgcagaaaagaagaaacacgttgaaattatcaccttaggaaccggtagtgcattgccttctaaatatagaaacgttgtctccacacttgttaaagttccttttactgacgccgatggaaataccataaatagaaacattatgcttgatgctggtgaaaatactttaggtaccatacacaggatgttttctcagttagcagtcaagagtatatttcaggatttgaaaatgatatatttgagtcacttgcatgcagaccaccatttgggaataatcagcgtgttgaatgaatggtacaaatataacaaggatgatgaaacgagttatatatatgtggttactccatggcaatatcacaaatttgttaatgaatggttagttttggaaaataaagagattttaaagagaatcaaatacataagttgtgagcatttcatcaatgattcttttgtaagaatgcagacacaatctgttcctttggcagagttcaatgaaatattgaaagaaaatagcaatcaagaatctaacagaaaattagaattagatagagattcttcttatagggatgttgacttgatcagacaaatgtatgaggatttatctatagaatattttcaaacttgcagagctatacattgtgactgggcatattccaactctattaccttccgcatggacgaaaacaatgagcataatacattcaaggtttcttattctggcgatacaagacctaacatcgagaaattttccctcgaaataggctataattctgatttattaattcacgaagctacattagaaaatcagttattggaggatgccgtgaagaaaaaacactgcactattaatgaagcaatcggtgtttctaacaaaatgaatgctaggaagttgatcttaacacacttttcccagagatatcccaaattgccccaattagacaataatattgatgtgatggcgagagaattttgttttgctttcgacagtatgatcgttgattatgagaaaattggtgaacagcagcgtatttttccattattgaataaggcatttgttgaagaaaaggaagaagaagaagatgttgatgacgttgaaagcgtacaagatttggaagtcaaacttaagaaacacaagaaaaattga

SEQ ID NO: 7013 - DNA, 963 bp, Saccharomyces cerevisiae
atgtcgaagcctggtcgtactattttagcaagcaaggtcgccgaaactttcaataccgaaataattaacaacgtagaggaatacaagaagacacataatggtcaaggtccccttcttgtgggattcctagctaataatgatcctgctgcaaagatgtatgctacatggactcaaaagactagcgagtcaatggggttccgctatgacttaagggtcattgaagataaggattttttggaagaagcgataatacaagctaacggcgatgactctgtgaacggtatcatggtatactttcctgttttcggtaatgctcaagatcagtatttgcaacaggttgtgtgcaaggaaaaagatgtagaagggttaaatcatgtttactaccaaaacctgtaccataatgtcagatacctggacaaagaaaaccgtttgaaatccattctaccttgcacaccactagctatcgttaagatattggaattcttgaaaatttacaacaatttgttaccagaaggaaacagactgtatgggaagaaatgcatagtaattaacaggtcagaaatcgtcggtagaccactggcggcgctattagccaatgacggtgccacagtatactctgtggacgttaacaacattcaaaaattcacccgtggtgaaagtttgaaattaaacaagcatcatgtggaagaccttggggagtactctgaagatctgttgaaaaagtgttctcttgattcagatgtggtcatcactggtgtccctagtgaaaattacaaattccccaccgaatacatcaaagaaggtgccgtctgcatcaattttgcatgcaccaaaaattttagcgatgatgtcaaggaaaaagcttctctttacgttccaatgactggtaaagttaccattgcaatgttgttgagaaacatgttacgtttagtaaggaacgtagaactgtctaaagaaaaatag

SEQ ID NO: 7014 - DNA, 963 bp, Artificial Sequence
  Description of Artificial Sequence: Synthetic polynucleotide
atgtccaagcctggtcgtactattttagcaagcaaggtcgccgaaactttcaataccgaaataattaacaacgtagaggaatacaagaagacacataatggtcaaggtccccttcttgtgggattcttggctaataatgatcctgctgcaaagatgtatgctacatggactcaaaagactagcgagtccatggggttccgctatgacttaagggtcattgaagataaggattttttggaagaagcgataatacaagctaacggcgatgactctgtgaacggtatcatggtatactttcctgttttcggtaatgctcaagatcagtatttgcaacaggttgtgtgcaaggaaaaagatgtagaagggttaaatcatgtttactaccaaaacctttaccataatgtcagatacttggacaaagaaaaccgtttgaaatccattttaccttgcacaccattggctatcgttaagatattggaattcttgaaaatttacaacaatttgttaccagaaggaaacagattatatgggaagaaatgcatagtaattaacaggtctgaaatcgtcggtagaccattggcggcgttattagccaatgacggtgccacagtatactctgtggacgttaacaacattcaaaaattcacccgtggtgaaagtttgaaattaaacaagcatcatgtggaagaccttggggagtactctgaagatttattgaaaaagtgttctcttgattctgatgtggtcatcactggtgtccctagtgaaaattacaaattccccaccgaatacatcaaagaaggtgccgtctgcatcaattttgcatgcaccaaaaattttagcgatgatgtcaaggaaaaagcttctctttacgttccaatgactggtaaagttaccattgcaatgttgttgagaaacatgttacgtttagtaaggaacgtagaattatctaaagaaaaatga

SEQ ID NO: 7015 - DNA, 1035 bp, Saccharomyces cerevisiae
atgattagaaccgtaaaacccaagaatgcaagagccaagagagctttggtaaagagggaagctaagttggtagagaatgtcaagcaagcgctattcattccagggcaaagctgtaacaagaatctgcacgatattatggtagatttgagtgccttgaagaagccagatatgaagaggttcaatcgtaagaatgatattcatcctttcgaagacatgtcgccactagagttctttagtgaaaagaatgactgttcattgatggtgctgatgacaagttccaaaaagcgtaaaaacaacatgacctttatacgtacatttggctacaaaatatatgatatgattgaactaatggttgcagataatttcaagttgttatctgattttaagaaattaacatttactgtagggttgaagcctatgtttacattccaaggtgctgcatttgatacacatcccgtatacaagcaaattaaatctttgtttttagatttctttagaggcgaatctactgatttacaggatgttgcgggattacaacatgtcatttccatgaccattcaaggtgacttccaagatggtgagccattgccgaacgttctattccgtgtttacaaattaaaaagttataaaagcgaccaaggtggtaagagattaccacgtattgaattggtggagattgggccacgtctagatttcaaaatcggcagaattcatactccaagtccagatatggtcactgaagctcacaagaagccaaaacaattagaaatgaagacaaagaagaatgtagaattagatatcatgggtgataaattgggtagaatccatatgggcaaacaagatttgggtaaactacaaacaagaaagatgaagggtttgaaatccaaattcgaccaaggaactgaagaaggtgatggagaggtagatgaagactacgaagatgaagcgtcgtattcggatgatggacaagaatacgaagaagagttcgtcagtgccactgatattgagccctctgctaaaagacagaagaaataa

SEQ ID NO: 7016 - DNA, 1035 bp, Artificial Sequence
  Description of Artificial Sequence: Synthetic polynucleotide
atgattagaaccgtaaaacccaagaatgcaagagccaagagagctttggtaaagagggaagctaagttggtagagaatgtcaagcaagcgttattcattccagggcaaagctgtaacaagaatttacacgatattatggtagatttgagtgccttgaagaagccagatatgaagaggttcaatcgtaagaatgatattcatcctttcgaagacatgtctccattggagttctttagtgaaaagaatgactgttctttgatggtgttgatgacaagttccaaaaagcgtaaaaacaacatgacctttatacgtacatttggctacaaaatatatgatatgattgaattgatggttgcagataatttcaagttgttatctgattttaagaaattaacatttactgtagggttgaagcctatgtttacattccaaggtgctgcatttgatacacatcccgtatacaagcaaattaaatctttgtttttagatttctttagaggcgaatctactgatttacaggatgttgcgggattacaacatgtcatttccatgaccattcaaggtgacttccaagatggtgagccattgccgaacgttttgttccgtgtttacaaattaaaaagttataaaagcgaccaaggtggtaagagattaccacgtattgaattggtggagattgggccacgtttggatttcaaaatcggcagaattcatactccaagtccagatatggtcactgaagctcacaagaagccaaaacaattagaaatgaagacaaagaagaatgtagaattagatatcatgggtgataaattgggtagaatccatatgggcaaacaagatttgggtaaattacaaacaagaaagatgaagggtttgaaatccaaattcgaccaaggaactgaagaaggtgatggagaggtagatgaagactacgaagatgaagcgtcttattctgatgatggacaagaatacgaagaagagttcgtcagtgccactgatattgagccctctgctaaaagacagaagaaatga

SEQ ID NO: 7017 - DNA, 3474 bp, Saccharomyces cerevisiae
atgagtgaaaaaaaagtacatcttcgtttgcggaaggaacttagcgtacccattgcggtggttgaaaacgaatccctggcgcagttgtcttatgaagaggaaagccaggcctctctaatggacatttccatggagcagcaacagttaaggttacattcgcactttgataattccaaggttttcacagaaaataacagatacatagtaaaaacccttcaaacagactacagtagcggattcagtaacgatgacgaattgaatggatatatcgatatgcaaattggatatggactagtcaatgaccacaagaaggtttacatctggaatattcactccactcaaaaggatacgccctatataactgtaccatttcgttctgatgataatgatgaaatagcagtcgcgcccaggtgcatactaactttccctgctacaatggatgagtctccattagcactgaatcctaatgatcaggacgaaaccggagggcttatcattatcaaaggtagcaaagcgatatattatgaggatatcaactccataaataatttgaactttaagttatctgaaaaattctctcacgagttagaattacccatcaactcttcgggcggagagaagtgtgacctaatgttaaactgcgaacctgctggtatagtgctttctacaaatatgggcagaatattttttataaccattagaaattccatgggtaaacctcaactgaagttaggcaaactattaaataaacctttcaaattgggtatctggtccaaaattttcaatacaaacagttcagttgtctcattacgaaatggacctatcctcggtaaggggacaaggttagtatatattactactaacaaaggaatttttcaaacatggcagttgtctgccacgaattcccatccaacaaaattgattgatgtaaacatttacgaagccattttagagtcgctccaggatttgtatccatttgctcatggtacgttgaagatttgggactctcatccattacaagatgaaagttcacaacttttcctgtcatctatttacgacagttcatgcaatgaaacatattatattctttccacgattatcttcgattcttcttctaatagttttactattttttccacttatagattgaacacttttatggagtcaataaccgacacaaagtttaagcctaagatatttatacctcagatggagaatgctaacgataccaatgaggtaacttccattttggtaatgttccccaatgctgttgtcattactcaggtgaactcaaaattggactctagctattcaatgagaagaaagtgggaagatattgttagccttagaaatgacattgatataattggttctggttacgactcaaaatctttgtatgttttaacgaaacaaatgggggtgctacagttttttgtgaaagagaatgaggaaacaaattctaaaccggaagttgggtttgtcaaatctcatgttgatcaagctgtttatttctccaaaataaatgcaaatcccatagatttcaatttacctccagaaatttcactagatcaagaatctatagagcatgatttaaaattaaccagcgaggagatttttcattccaacggcaagtacataccccctatgctaaatacgttggggcaacatctctctgtccgtaaagaattttttcaaaatttcctgacatttgttgctaagaacttcaactataaaatatcacccgaactgaaattggatctgatcgaaaaatttgagatcttgaattgctgtattaagttcaatagtatcatcagacaatctgatgtattgaacgatatatgggagaagactttatcaaactataatctgacacaaaatgaacacttaactactaaaacagttgtaatcaacagtcccgacgtatttccagtaatctttaaacaatttttaaaccatgttgtgtttgttttgttcccatcacaaaatcaaaatttcaaactaaatgttaccaatttaatcaacttatgcttttatgatggaattcttgaagaaggtgaaaaaactataaggtatgaacttttggagttagacccgatggaggttgatacatccaagctaccatggttcataaactttgattacttaaactgtatcaatcaatgtttttttgattttacatttgcgtgtgaggaggaaggaagtctggattcttataaagagggcttgttaaagattgtgaaaattttatattatcagttcaaccaatttaaaatatggatcaacacgcaacccgttaaatctgtgaacgccaatgataattttataaatatcaacaatctttatgatgataaccacctggattggaaccacgtcctttgtaaggtaaatctaaaagaacagtgtattcaaatagcagaattttacaaagatttatctggattggtgcaaacattacaaactttagatcaaaatgactcaacaaccgtatcgctatacgaaacattcttcaacgaattccctaaagagtttagctttacattatttgaatatttaatcaagcataaaaaattgaacgacctcatcttcaggttcccacaacaacacgatgttttaatacagtttttccaagagtccgctccaaagtacggtcatgtagcatggatccaacagattctggatgggtcgtacgcagatgccatgaatactttaaaaaacattactgttgatgattcaaagaagggcgaaagcttgagcgaatgtgaattgcacttgaatgttgcaaaattaagctcgttgctagttgaaaaggataatttggacattaatactttgagaaagatccaatataatttagatacaattgatgctgagaaaaatatttcaaacaaattgaaaaagggcgaagttcagatatgtaaacgcttcaagaatggctctatcagggaagttttcaacatattagtggaagagcttaaatcaacaacagtagtcaatctatcggatctcgttgagttgtattctatgctcgacgatgaagagagcttattcataccgctaaggcttctttctgttgatggaaacttactgaattttgaagttaaaaagttcttgaatgctttggtatggagaagaatcgttctactaaatgctagtaatgaaggagataaactgcttcagcatatagtcaaacgtgtttttgatgaagaactacccaaaaataatgatttccccttgcccagtgtggatcttttatgtgacaaatcgttactgacgccagaatacataagcgaaacatatggcaggtttcctattgatcagaatgccatacgtgaagagatatatgaagaaatatctcaagtggaaacgttgaactcagacaactcactcgagataaagttgcactcgactattggttctgtagcgaaagaaaaaaactataccatcaactatgaaaccaacactgtagaatactaa

SEQ ID NO: 7018 - DNA, 3474 bp, Artificial Sequence
  Description of Artificial Sequence: Synthetic polynucleotide
atgagtgaaaaaaaagtacatcttcgtttgagaaaggaacttagcgtacccattgcggtggttgaaaacgaatccttagcgcagttgtcttatgaagaggaaagccaggcctctttgatggacatttccatggagcagcaacagttaaggttacattctcactttgataattccaaggttttcacagaaaataacagatacatagtaaaaacccttcaaacagactacagtagcggattcagtaacgatgacgaattgaatggatatatcgatatgcaaattggatatggattagtcaatgaccacaagaaggtttacatctggaatattcactccactcaaaaggatacgccctatataactgtaccatttcgttctgatgataatgatgaaatagcagtcgcgcccaggtgcatattgactttccctgctacaatggatgagtctccattagcattgaatcctaatgatcaggacgaaaccggagggcttatcattatcaaaggtagcaaagcgatatattatgaggatatcaactccataaataatttgaactttaagttatctgaaaaattctctcacgagttagaattacccatcaactcttctggcggagagaagtgtgacttgatgttaaactgcgaacctgctggtatagtgctttctacaaatatgggcagaatattttttataaccattagaaattccatgggtaaacctcaattgaagttaggcaaattattaaataaacctttcaaattgggtatctggtccaaaattttcaatacaaacagttctgttgtctctttaagaaatggacctatcctcggtaaggggacaaggttagtatatattactactaacaaaggaatttttcaaacatggcagttgtctgccacgaattcccatccaacaaaattgattgatgtaaacatttacgaagccattttagagtctctccaggatttgtatccatttgctcatggtacgttgaagatttgggactctcatccattacaagatgaaagttctcaacttttcttatcttctatttacgacagttcctgcaatgaaacatattatattctttccacgattatcttcgattcttcttctaatagttttactattttttccacttatagattgaacacttttatggagagtataaccgacacaaagtttaagcctaagatatttatacctcagatggagaatgctaacgataccaatgaggtaacttccattttggtaatgttccccaatgctgttgtcattactcaggtgaactccaaattggactctagctattccatgagaagaaagtgggaagatattgttagccttagaaatgacattgatataattggttctggttacgactctaaatctttgtatgttttaacgaaacaaatgggggtgttacagttttttgtgaaagagaatgaggaaacaaattctaaaccggaagttgggtttgtcaaatctcatgttgatcaagctgtttatttctccaaaataaatgcaaatcccatagatttcaatttacctccagaaatttctttagatcaagaatctatagagcatgatttaaaattaaccagcgaggagatttttcattccaacggcaagtacataccccctatgttgaatacgttggggcaacatctctctgtccgtaaagaattttttcaaaatttcttaacatttgttgctaagaacttcaactataaaatatctcccgaattgaaattggatttgatcgaaaaatttgagatcttgaattgctgtattaagttcaatagtatcatcagacaatctgatgtattgaacgatatatgggagaagactttatctaactataatttgacacaaaatgaacacttaactactaaaacagttgtaatcaacagtcccgacgtatttccagtaatctttaaacaatttttaaaccatgttgtgtttgttttgttcccatctcaaaatcaaaatttcaaattgaatgttaccaatttaatcaacttatgcttttatgatggaattcttgaagaaggtgaaaaaactataaggtatgaacttttggagttagacccgatggaggttgatacatccaagttaccatggttcataaactttgattacttaaactgtatcaatcaatgtttttttgattttacatttgcgtgtgaggaggaaggaagtttggattcttataaagagggcttgttaaagattgtgaaaattttatattatcagttcaaccaatttaaaatatggatcaacacgcaacccgttaaatctgtgaacgccaatgataattttataaatatcaacaatctttatgatgataaccacttggattggaaccacgtcctttgtaaggtaaatttgaaagaacagtgtattcaaatagcagaattttacaaagatttatctggattggtgcaaacattacaaactttagatcaaaatgactctacaaccgtatctttgtacgaaacattcttcaacgaattccctaaagagtttagctttacattatttgaatatttaatcaagcataaaaaattgaacgacctcatcttcaggttcccacaacaacacgatgttttaatacagtttttccaagagtccgctccaaagtacggtcatgtagcatggatccaacagattttagatgggtcttacgcagatgccatgaatactttaaaaaacattactgttgatgattctaagaagggcgaaagcttgagcgaatgtgaattgcacttgaatgttgcaaaattaagctctttgttggttgaaaaggataatttggacattaatactttgagaaagatccaatataatttagatacaattgatgctgagaaaaatatttccaacaaattgaaaaagggcgaagttcagatatgtaaacgcttcaagaatggctctatcagggaagttttcaacatattagtggaagagcttaaatctacaacagtagtcaatttaagtgatctcgttgagttgtattctatgctcgacgatgaagagagcttattcataccgttaaggcttctttctgttgatggaaacttattgaattttgaagttaaaaagttcttgaatgctttggtatggagaagaatcgttttgttgaatgctagtaatgaaggagataaattacttcagcatatagtcaaacgtgtttttgatgaagaattgcccaaaaataatgatttccccttgcccagtgtggatcttttatgtgacaaatctttattgacgccagaatacataagcgaaacatatggcaggtttcctattgatcagaatgccatacgtgaagagatatatgaagaaatatctcaagtggaaacgttgaacagcgacaactctctcgagataaagttgcacagtactattggttctgtagcgaaagaaaaaaactataccatcaactatgaaaccaacactgtagaatactga

SEQ ID NO: 7019 - DNA, 402 bp, Saccharomyces cerevisiae
atggattcaatagatgaacaaattgctataaagcgaaaagaacttcagtcattacaaaagataaccagtttaacggatggcttaaaaattcagctaacagagttgaatgagcagatcaaagaaatgggaatgaatgcggattcagtggcccaattgatgaacaattgggattctataataaacaatatatcgcaagcaagtttgggattattgcaatatgcagagggtgattatgagataggaccgtggaaagattctaagaaaaaggaatctgaacaatcaaatgaaacaggtcttgaagcgcaagaaaatgataagaatgatgaagataatgatgaggatgaagatctggtacccttgccggaaacaatggtcagaattagggtagatggtaacgaatga

SEQ ID NO: 7020 - DNA, 402 bp, Artificial Sequence
  Description of Artificial Sequence: Synthetic polynucleotide
atggattctatagatgaacaaattgctataaagagaaaagaacttcagtctttacaaaagataaccagtttaacggatggcttaaaaattcagttgacagagttgaatgagcagatcaaagaaatgggaatgaatgcggattctgtggcccaattgatgaacaattgggattctataataaacaatatatctcaagcaagtttgggattattgcaatatgcagagggtgattatgagataggaccgtggaaagattctaagaaaaaggaatctgaacaaagcaatgaaacaggtcttgaagcgcaagaaaatgataagaatgatgaagataatgatgaggatgaagatttagtacccttgccggaaacaatggtcagaattagggtagatggtaacgaatga

SEQ ID NO: 7021 - DNA, 1836 bp, Saccharomyces cerevisiae
atggcttacagtgactacagcgatggagcagacgacatgccggactttcacgacgaaggtgaatttgatgattatttgaatgacgatgaatatgatctaatgaacgaggtatttcctactctaaaggcgcagttacaggattaccaaggctgggataatctttcacttaagctagctttgtttgacaacaatttcgatttggaaagcacgctggcggaattgaagaaaactttgaagaagaagaagacaccaaagaagccaattgctgctgctaatgggagtgcgaatgttactcaaaaactggcaaacatctcaatttcgcaacaaaggccaaatgatcggcttccagactggcttgacgaggaagaaagtgagggtgaacgcaatggtgaggaagccaatgatgaaaagacagttcaaagatactataagactacggtgccaacgaaaccaaagaaacctcatgatatttctgcatttgttaaatctgccttacctcacttaagttttgttgttcttggtcatgttgatgcgggaaaatcaactctaatgggcagactactttatgatctgaacattgtcaaccaatcccaactgagaaagctacaaagagagagtgaaactatgggtaagtcatccttcaaatttgcatggattatggatcagacaaatgaagagcgcgaacgtggtgtaacagtgtcaatttgtacatcgcatttctctacccatagggcaaattttactattgtggatgcgccaggccatagagattttgttccaaacgctataatggggatatcacaagcagatatggctatactttgtgtagactgtagcaccaatgctttcgaatcaggatttgacttggatgggcaaacaaaggagcatatgctactggcatctagtcttggaattcacaatctgattattgctatgaataagatggataatgttgactggtcccaacaaaggtttgaagagattaaatcgaaattgttgccatatctggttgatattgggttttttgaggataatattaattgggtacctatcagtggcttttccggagaaggtgtttataaaattgaatatacagatgaagtgagacaatggtacaatggtcctaacttaatgtctactttggaaaatgcggcgttcaagatttcaaaggagaatgaaggaattaacaaagatgatccgtttttgttttctgtgttggagatcatcccatcgaaaaaaacaagtaacgatttagcactagtttcaggaaaattggaatcaggttctattcaacctggtgaatctttgacaatatatccgtcggaacagagttgtattgtggataaaattcaggttggttctcaacagggccaatcaacgaatcacgaagagacagatgttgccattaagggtgattttgtcactttgaaattgcgcaaagcctatccagaagatattcaaaatggtgatttggcagcatcagttgattattcgtccattcattcagcacagtgttttgttctggaattgaccacctttgacatgaaccgacctttgctgccaggaacaccgtttattcttttcatcggagtcaaggagcaacctgctcgaatcaaaagattgatttcatttatagacaagggcaatactgcaagcaagaaaaagattagacatctaggctctaaacaacgagcatttgtagaaatagaactaattgaagtaaagaggtggattcctttattaactgcccatgaaaatgaccgtttgggaagagttgttcttagaaaggacggtagaaccattgcggcaggtaaaatatccgaaataactcagtag

SEQ ID NO: 7022 - DNA, 1836 bp, Artificial Sequence
  Description of Artificial Sequence: Synthetic polynucleotide
atggcttacagtgactacagcgatggagcagacgacatgccggactttcacgacgaaggtgaatttgatgattatttgaatgacgatgaatatgatttgatgaacgaggtatttcctactttgaaggcgcagttacaggattaccaaggctgggataatctttctcttaagttggctttgtttgacaacaatttcgatttggaaagcacgttggcggaattgaagaaaactttgaagaagaagaagacaccaaagaagccaattgctgctgctaatgggagtgcgaatgttactcaaaaattggcaaacatctctatttctcaacaaaggccaaatgatagacttccagactggcttgacgaggaagaaagtgagggtgaacgcaatggtgaggaagccaatgatgaaaagacagttcaaagatactataagactacggtgccaacgaaaccaaagaaacctcatgatatttctgcatttgttaaatctgccttacctcacttaagttttgttgttcttggtcatgttgatgcgggaaaatctactttaatgggcagattactttatgatttgaacattgtcaaccaatcccaattgagaaagttacaaagagagagtgaaactatgggtaagtcttccttcaaatttgcatggattatggatcagacaaatgaagagcgcgaacgtggtgtaacagtgtccatttgtacatctcatttctctacccatagggcaaattttactattgtggatgcgccaggccatagagattttgttccaaacgctataatggggatatctcaagcagatatggctatactttgtgtagactgtagcaccaatgctttcgaatctggatttgacttggatgggcaaacaaaggagcatatgttattggcatctagtcttggaattcacaatttaattattgctatgaataagatggataatgttgactggtcccaacaaaggtttgaagagattaaatctaaattgttgccatatttggttgatattgggttttttgaggataatattaattgggtacctatcagtggcttttccggagaaggtgtttataaaattgaatatacagatgaagtgagacaatggtacaatggtcctaacttaatgtctactttggaaaatgcggcgttcaagatttccaaggagaatgaaggaattaacaaagatgatccgtttttgttttctgtgttggagatcatcccatctaaaaaaacaagtaacgatttagcattggtttctggaaaattggaaagtggttctattcaacctggtgaatctttgacaatatatccgagtgaacagagttgtattgtggataaaattcaggttggttctcaacagggccaatctacgaatcacgaagagacagatgttgccattaagggtgattttgtcactttgaaattgcgcaaagcctatccagaagatattcaaaatggtgatttggcagcatctgttgattattcttccattcattctgcacagtgttttgttttggaattgaccacctttgacatgaacagacctttgttaccaggaacaccgtttattcttttcatcggagtcaaggagcaacctgctagaatcaaaagattgatttcctttatagacaagggcaatactgcaagcaagaaaaagattagacatttaggctctaaacaaagagcatttgtagaaatagaattgattgaagtaaagaggtggattcctttattaactgcccatgaaaatgaccgtttgggaagagttgttcttagaaaggacggtagaaccattgcggcaggtaaaatatccgaaataactcagtga

SEQ ID NO: 7023 - DNA, 588 bp, Saccharomyces cerevisiae
atgattggcagaggtgtgtgctgcagatcgttccacactgctggatctgcctggaagcaatttggatttcccaaaacacaagtgacaacgatttacaacaagactaagagcgcatctaactataaagggtatttaaagcacagagatgctccaggaatgtactatcaaccatcagaatccatcgcaaccggatctgttaacagtgagaccattccacgtagctttatggcagccagtgaccctcgtagagggcttgacatgcctgttcaaagcactaaagcgaagcagtgtccaaatgttctcgtaggtaagagcacagtgaacggcaaaacctatcatctgggacctcaagaaattgatgagatccggaagttacgtcttgacaatcctcaaaagtatacacgcaaatttttggctgcaaaatatggcatttcgccattatttgtatccatggtctcgaaacctagtgaacaacatgtacaaattatggaaagtagattgcaagaaatccaatcacgctggaaggagaagaggcgtatagccagagaggaccgtaagcgtagaaaactcctgtggtaccaggcgtga

SEQ ID NO: 7024 - DNA, 588 bp, Artificial Sequence
  Description of Artificial Sequence: Synthetic polynucleotide
atgattggcagaggtgtgtgctgcagatctttccacactgctggatctgcctggaagcaatttggatttcccaaaacacaagtgacaacgatttacaacaagactaagagcgcatctaactataaagggtatttaaagcacagagatgctccaggaatgtactatcaaccatctgaatccatcgcaaccggatctgttaacagtgagaccattccacgtagctttatggcagccagtgaccctcgtagagggcttgacatgcctgttcaaagcactaaagcgaagcagtgtccaaatgttctcgtaggtaagagcacagtgaacggcaaaacctatcatttaggacctcaagaaattgatgagatcagaaagttacgtcttgacaatcctcaaaagtatacacgcaaatttttggctgcaaaatatggcatttctccattatttgtatccatggtctccaaacctagtgaacaacatgtacaaattatggaaagtagattgcaagaaatccaaagtcgctggaaggagaagaggcgtatagccagagaggaccgtaagcgtagaaaactcttatggtaccaggcgtga

SEQ ID NO: 7025 - DNA, 3216 bp, Saccharomyces cerevisiae
atgggtcattcggggcgtgaggaaaggataaaagacatatttaaggaacttacgtcaaaagaactaacgcctgggttgcttttgacactgcagaaactagcgcaaaagccgaatactaatctagaacagtttattgccagctgtaaagctttgacgaaactcagcagtaacaatccaatcatttttaatgaacttctggagctcctcaagaataaatctgaagaggactcgacaggcccaaagaaaatcgccccttctataaataagagaaagaaatttaagatccagttagaccttgacgataatgaagatgagctagattctccagttcaaaaaaaaccagcacctacacggacgttgttcaagagaatagataaactaaaggccaaacagttgaggcagtattcgcccaccgtgaaggatccttctccaaatagtgaacagcaaacacagaatggtcatgctgaaacgaaggactatgaaccgactcgaagcgaagtagttgaggaggacagagaatggtatgataatgatgatgattatggaaatttggtgcctgaacctctgtctgaattgcctgaggaagcgaaactactacctgtcattaggaatatcgacaacgatgatgccttacgaaataccgttcaattataccccataccactcaagcaaagaatggaatggatccctccttttttatcaaagtttgctcttgaaaacaaagtgcccacttccataattatcgggtccatctctgagacgtccagccaagtatccgctttatcaatggtgaatccatttaggaatcctgacagtgaattttctgcgaacgccaaacgaggtagtaagctggttgccttgagaaggataaacatggaacatattcaacaatctcgagacaacaccactgttttgaacactgccatgggggaagtactaggcttggagaataacaataaagcaaaagataagagcaaccaaaagatttgcgacgatacagctcttttcacgccatcaaaagatgacattaaacatactaaagagcaactgcctgttttccgctgcagatctcaattgttatcattgataagagaaaatcaagtagtggtgataattggtgaaacgggctcaggtaaaaccacgcaacttgcacagtatttatatgaagaaggatatgccaacgatagggggaaatctattgttgtcacacagccgagaagagtagcagccatatccgttgcaaaaagggttgcaatggaaatgcaagttccattgggtaaggaagtaggctattctataaggtttgaagatgtgacggattctgagtgtacaaaacttaagtttgtaacggatggtattctactcagagagaccttattggatgatacactcgataaatattcgtgtgttattattgatgaagctcatgaaaggtcattaaatacagacattttactaggttttttcaagattttattagcacgtagaagagatctaaaactcataatcacttcagcaacaatgaatgcgaagaagttctccgcattttttggtaatgctcctcagttcacaattcctggaagaactttccccgtacagaccatatatacttccaaccctgttcaagactacgtagaagctgcagtttctcaggctgtgaaaattcatttagcaaacgattgttcaagcggtgatattctcattttcatgacaggtcaagaagatattgaaacaacgttcgacactctgcaagaaaagtttttgcaagtatattctaaaaagtttggtaccgcaaactttgaagagatcaatgatattgaaattttaccaatctactcggctttacctgcagatttgcaattcaaaatttttcaggatctacatggcactaaaaggaaaattataattgcgacaaatattgcagagacttcattgaccattaaaggtattagatatgtcattgattgtggttactctaaactgaaagtttacaatccaaagattgggcttgatagtttagtaataacgcccatatcaaaagctaacgccgaccaaagatccggaagagcgggaagaactgcgccaggcactgcatatcgattatacacggaagatacattcaaagaagatatgtacttacagacaatacctgagatccaaagaacgaatttgtcaaacacccttttactgctaaaatctctggacgttactgacgaattgagtaagttcccgttcattgataaaccacccttacaaacatttttatcctcattgtatgagttatggttcataggggctatagacactagtggacaattgactccattgggattacagatggcaaaatttcccctgcaaccttccctttccaaaattttattaattgcagttagaaacggctgcagtgatgaaatgttaacaatagtttccatgctttctgttccacaagtcttttatagacccaaggaaagacagaaagaagcagatattgctagaaataaattttttatcgcgaaatcagatcacttaacgttacttaatgtttttgaacaatggagggcaaataattttagttcgcattggtgtaacaaacattttgttcaatacaaatcacttgtcagggcaagagacattcgagaccagttgctaacaatactaaaatctcaaaaaattccggtcatttcctccggtaaggactgggatattattaaaaaatgtatttgttcaggatttgctcatcaagcagccaaaataacaggactacgaaattacgttcatttaaaaactggcgtaagtgttcaactacaccctacaagtgcattacacggattgggggatttacccccttacgtggtatatcatgaattattaatgactagcaaagaatacatttgttgtgttacttctgtagatccattctggttaatggaatatggtgggttactctacgacatcaagcgtattaaaaatgatcaggaggccacaactacaggcctctttggtgaacactatgaacatactctggacaaggttgaagatgatattgatatcaatattaggagatgtaaggatatgagagacagtgtgatacaggagctcaaaatgaccgacaattcaaacaaagaagacaaaaagcaaaaaacgaaaaagcaaaatatactgaacggcaaagaaaattcaatgaaacctttcaaaagaaggaagccttttttttag

SEQ ID NO: 7026 - DNA, 3216 bp, Artificial Sequence
  Description of Artificial Sequence: Synthetic polynucleotide
atgggtcattctgggcgtgaggaaaggataaaagacatatttaaggaacttacgtccaaagaattgacgcctgggttgcttttgacattacagaaattagcgcaaaagccgaatactaatttggaacagtttattgccagctgtaaagctttgacgaaactcagcagtaacaatccaatcatttttaatgaacttttggagctcctcaagaataaatctgaagaggactctacaggcccaaagaaaatcgccccttctataaataagagaaagaaatttaagatccagttagaccttgacgataatgaagatgagttagattctccagttcaaaaaaaaccagcacctacaagaacgttgttcaagagaatagataaattgaaggccaaacagttgaggcagtattctcccaccgtgaaggatccttctccaaatagtgaacagcaaacacagaatggtcatgctgaaacgaaggactatgaaccgactagaagcgaagtagttgaggaggacagagaatggtatgataatgatgatgattatggaaatttggtgcctgaacctttatctgaattgcctgaggaagcgaaattattgcctgtcattaggaatatcgacaacgatgatgccttaagaaataccgttcaattataccccataccactcaagcaaagaatggaatggatccctccttttttatccaagtttgctcttgaaaacaaagtgcccacttccataattatcgggtccatctctgagacgtccagccaagtatccgctttatctatggtgaatccatttaggaatcctgacagtgaattttctgcgaacgccaaaagaggtagtaagttggttgccttgagaaggataaacatggaacatattcaacaatctagagacaacaccactgttttgaacactgccatgggggaagtattaggcttggagaataacaataaagcaaaagataagagcaaccaaaagatttgcgacgatacagctcttttcacgccatctaaagatgacattaaacatactaaagagcaattacctgttttccgctgcagatctcaattgttatctttgataagagaaaatcaagtagtggtgataattggtgaaacgggcagtggtaaaaccacgcaacttgcacagtatttatatgaagaaggatatgccaacgatagggggaaatctattgttgtcacacagccgagaagagtagcagccatatccgttgcaaaaagggttgcaatggaaatgcaagttccattgggtaaggaagtaggctattctataaggtttgaagatgtgacggattctgagtgtacaaaacttaagtttgtaacggatggtattttactcagagagaccttattggatgatacactcgataaatattcttgtgttattattgatgaagctcatgaaaggtctttaaatacagacattttattgggttttttcaagattttattagcacgtagaagagatttgaaactcataatcacttctgcaacaatgaatgcgaagaagttctccgcattttttggtaatgctcctcagttcacaattcctggaagaactttccccgtacagaccatatatacttccaaccctgttcaagactacgtagaagctgcagtttctcaggctgtgaaaattcatttagcaaacgattgtagcagcggtgatattctcattttcatgacaggtcaagaagatattgaaacaacgttcgacactttacaagaaaagtttttgcaagtatattctaaaaagtttggtaccgcaaactttgaagagatcaatgatattgaaattttaccaatctactctgctttacctgcagatttgcaattcaaaatttttcaggatttgcatggcactaaaaggaaaattataattgcgacaaatattgcagagacttctttgaccattaaaggtattagatatgtcattgattgtggttactctaaattgaaagtttacaatccaaagattgggcttgatagtttagtaataacgcccatatccaaagctaacgccgaccaaagatccggaagagcgggaagaactgcgccaggcactgcatatagattatacacggaagatacattcaaagaagatatgtacttacagacaatacctgagatccaaagaacgaatttgtctaacacccttttattattgaaatctttggacgttactgacgaattgagtaagttcccgttcattgataaaccacccttacaaacatttttatcctctttgtatgagttatggttcataggggctatagacactagtggacaattgactccattgggattacagatggcaaaatttcccttgcaaccttccctttccaaaattttattaattgcagttagaaacggctgcagtgatgaaatgttaacaatagtttccatgctttctgttccacaagtcttttatagacccaaggaaagacagaaagaagcagatattgctagaaataaattttttatcgcgaaatctgatcacttaacgttacttaatgtttttgaacaatggagggcaaataattttagttctcattggtgtaacaaacattttgttcaatacaaatctcttgtcagggcaagagacattagagaccagttgttgacaatattgaaatctcaaaaaattccggtcatttcctccggtaaggactgggatattattaaaaaatgtatttgttctggatttgctcatcaagcagccaaaataacaggattaagaaattacgttcatttaaaaactggcgtaagtgttcaattacaccctacaagtgcattacacggattgggggatttacccccttacgtggtatatcatgaattattaatgactagcaaagaatacatttgttgtgttacttctgtagatccattctggttaatggaatatggtgggttactctacgacatcaagcgtattaaaaatgatcaggaggccacaactacaggcctctttggtgaacactatgaacatactttggacaaggttgaagatgatattgatatcaatattaggagatgtaaggatatgagagacagtgtgatacaggagctcaaaatgaccgacaatagcaacaaagaagacaaaaagcaaaaaacgaaaaagcaaaatatattaaacggcaaagaaaattctatgaaacctttcaaaagaaggaagccttttttttga

SEQ ID NO: 7027 - DNA, 1038 bp, Saccharomyces cerevisiae
atgttacgcaacatcatcaggttcaaaggatttggaaaagggaccagtggaggatttttaaaacctgtatcatttcgtgttcagttaacgcgatgttaccgctatgacaatggtccttcatatcgtcgatttaataatggagagtattcccaaaaatcatcgtttaaaagcattcttctcgataagtcatcaagaaaatacttagctttattatttggtggatgctctctcttttattatacacatttggataaagcaccggtaagcgataggtccaggttcatctgggtatcgcgtccattagagttaactatcggaaattacacatacaaatcaatttggagacaaacgcagcaggaaatattacctccacagcatccgctgtccatcaaaattgagaatattttcatgaaaattgtcgaagctgcttataaggaccctagtgtagacaactcactactggacggaatcaagtgggaaattcatgtggtcaatgatccaactgcttcaccaaatgcattcgttttaccagggggtaaggtctttatattcagctctattttacctatttgtgctaatgatgatgggattgccactgttttagcacacgaatttgctcatcagctagcaagacacacagccgaaaatttgtcgaaggctcctatatattctcttttgggtttggtgttatatactgttactggagctcatgctatcaacaatatactattggatgggtttttgcgaatgccagcatcaagacagatggaaaccgaagctgattacattggcctgatgataatgtcaagggcatgttttcaaccacaggagtcaataaaagtgtgggaaagaatggcaaattttgaaaagcaaatgaatagagggggtgttgtgaatatggagtttctaagtacacatccagcaagcactcgtagaatagagaatatgtcgaaatggttgccaaaagctaatgaaatttatgaacaatctgattgtagcagtatgggtaactattataaaagttttttctcaatgtaa

SEQ ID NO: 7028 - DNA, 1038 bp, Artificial Sequence
  Description of Artificial Sequence: Synthetic polynucleotide
atgttacgcaacatcatcaggttcaaaggatttggaaaagggaccagtggaggatttttaaaacctgtatcctttcgtgttcagttaacgagatgttaccgctatgacaatggtccttcttatcgtagatttaataatggagagtattcccaaaaaagctcctttaaaagcattcttctcgataagagtagtagaaaatacttagctttattatttggtggatgctctctcttttattatacacatttggataaagcaccggtaagcgataggtccaggttcatctgggtatcccgtccattagagttaactatcggaaattacacatacaaatccatttggagacaaacgcagcaggaaatattacctccacagcatccgttatccatcaaaattgagaatattttcatgaaaattgtcgaagctgcttataaggaccctagtgtagacaactctttattagacggaatcaagtgggaaattcatgtggtcaatgatccaactgcttctccaaatgcattcgttttaccagggggtaaggtctttatattcagctctattttacctatttgtgctaatgatgatgggattgccactgttttagcacacgaatttgctcatcagttagcaagacacacagccgaaaatttgtccaaggctcctatatattctcttttgggtttggtgttatatactgttactggagctcatgctatcaacaatatattattggatgggtttttgagaatgccagcatctagacagatggaaaccgaagctgattacattggcttaatgataatgtctagggcatgttttcaaccacaggagagtataaaagtgtgggaaagaatggcaaattttgaaaagcaaatgaatagagggggtgttgtgaatatggagtttttgagtacacatccagcaagcactcgtagaatagagaatatgtccaaatggttgccaaaagctaatgaaatttatgaacaatctgattgtagcagtatgggtaactattataaaagttttttctccatgtga

SEQ ID NO: 7029 - DNA, 1014 bp, Saccharomyces cerevisiae
atgagtcagtcttacgaagcaggaaatgccaatatgggccaaggggaggatgatgaatttgatggctatttcgaagactttgacaacgatatcatgccaaatagtaataatggacaaagggttggtactaatgctggattgtcattcaatgacgaagtaaatgttaatgatgatgattttttagacatttataatatgtcccctagagagagattgatgcataatatcaggaagaatgttcaaaaattacagttttatttttattcactacgcttatggcaacagattatcattgtcctcctcggcataatgctaatgataatgggtatattgttgctcgtcttccataatgcgattttacataaagttgttgttacttcgaacgatttgagagaaaagatgtcaacacattttatattaatggttctgatattctttgtcgcatttcctcctatgattggctactccttattatccaccactactgggttgatctatggtgtcagttttgagggatgggttacgctagctttgggatctgtaacaggttccattgcctctttcgttgtgttcaagacgatcttgcattcaagagcagaaaagcttgtgcatttgaatagaagatttgaagcattggcttcaattttacaagaaaacaatagctattggattctagctctactgagattatgtcccttcccatattctttgactaatggtgccatagctggtgtttacggtatctcggtacgcaacttttccattgccaacataataaccacaccaaagctgttcatctatctatttataggttctcgtgtaaagagtctcgcagaatctgaatctacaggatctagggtatttgacttggtaagcattattatcacattattaatcctaagtcttacagcatggctcttatacttcaagactaagaagagatatttagaactacaaaaccgcgaccgtcaagtgtccactgatcaactacctgaattgtcttttgaggtctaa

SEQ ID NO: 7030 - DNA, 1014 bp, Artificial Sequence
  Description of Artificial Sequence: Synthetic polynucleotide
atgagtcagtcttacgaagcaggaaatgccaatatgggccaaggggaggatgatgaatttgatggctatttcgaagactttgacaacgatatcatgccaaatagtaataatggacaaagggttggtactaatgctggattgagtttcaatgacgaagtaaatgttaatgatgatgattttttagacatttataatatgtcccctagagagagattgatgcataatatcaggaagaatgttcaaaaattacagttttatttttattctttacgcttatggcaacagattatcattgtcctcctcggcataatgttaatgataatgggtatattgttgctcgtcttccataatgcgattttacataaagttgttgttacttctaacgatttgagagaaaagatgtctacacattttatattaatggttttgatattctttgtcgcatttcctcctatgattggctactccttattatccaccactactgggttgatctatggtgtcagttttgagggatgggttacgttggctttgggatctgtaacaggttccattgcctctttcgttgtgttcaagacgatcttgcattccagagcagaaaagcttgtgcatttgaatagaagatttgaagcattggcttccattttacaagaaaacaatagctattggattttggctttattaagattatgtcccttcccatattctttgactaatggtgccatagctggtgtttacggtatctctgtacgcaacttttccattgccaacataataaccacaccaaagcttttcatctatttatttataggttctcgtgtaaagagtctcgcagaatctgaatctacaggatctagggtatttgacttggtaagcattattatcacattattaatcttaagtcttacagcatggctcttatacttcaagactaagaagagatatttagaattacaaaaccgcgaccgtcaagtgtccactgatcaattacctgaattgtcttttgaggtctga

SEQ ID NO: 7031 - DNA, 2733 bp, Saccharomyces cerevisiae
atgagcagcaaaatatcagatcttacatctacacaaaataagcccctccttgttacgcaacaactaatcgaaaaatattacgaacagatcctgggcacttcccagaacataattcctattttaaatccgaagaacaagtttattaggcccagtaaggataattcagatgttgaaagggtggaggaggatgctggtaaaagactgcaaactggcaagaacaaaactacgaacaaagtaaatttcaacctggatactggaaacgaggataaacttgacgatgaccaagagacagtaacagaaaatgaaaataatgatatcgagatggttgagacagacgaaggcgaagatgaaaggcaagggtcatctttagccagtaaatgcaaatcatttctttacaacgtttttgtgggaaactatgaaagagacattcttattgacaaagtctgttcacaaaagcaacatgcgatgtcatttgaagaatggtgttctgcgggcgccagattggatgacctcactgggaaaacagaatggaagcagaaattggaaagtcccttgtatgattacaagctaataaaagatttaacatctagaatgcgtgaggagcgcttgaataggaattacgctcaattgttgtacatcattaggacgaattgggtacgaaacctgggaaatatggggaatgtaaacctatataggcactcccatgtaggcaccaaatatttaattgacgagtatatgatggagtctaggttagcgctagaatctttaatggagtctgatcttgatgatagttaccttttgggtatactgcaacaaacgagaagaaatattggtcgtaccgctttagttctcagtgggggtggaacttttggtcttttccacatcggtgtccttggtactctatttgaattggatttattacccagagtgattagtggtagcagtgctggtgcaattgtagcaagcatattatctgtccatcacaaagaagaaattccggttttactaaatcatattttggataaagaattcaacattttcaaagacgataaacagaaaagtgaaagcgagaatttgttaataaaaatatctaggttcttcaaaaacggtacgtggtttgataacaagcatctggtaaatacaatgatagaatttttgggagatttgacatttagggaagcttacaatagaacgggtaaaattttgaatataaccgtttcgccggcatctttatttgaacaaccgcgcttgctgaataatttgactgcaccaaacgtcctgatttggtccgccgtatgtgcatcatgttcactaccgggaattttcccctcgagcccactttacgaaaaagatccaaaaacgggagaaaggaaaccatggactggtagtagttcggtcaaatttgtcgatggttctgtggacaatgacttgcccatttctcgtctttctgaaatgtttaatgtagaccatattatcgcatgccaggtgaatattcacgtatttccctttttgaaactatcactatcctgtgttggcggggaaattgaggacgaatttagtgcaagattaaagcaaaacttatcaagtatatacaattttatggccaatgaagctattcatattctagaaattggaagtgagatgggaattgccaaaaacgcgcttacaaaactgagatcggtattatctcaacaatattctggtgacatcactattttgcccgacatgtgtatgctttttagaataaaggagctgttgtcaaacccaacaaaagaatttttattaagggaaatcaccaatggtgcaaaagctacgtggcccaaggtttccattattcaaaatcactgtggccaggaatttgctctggataaggcgatttcttatatcaaaggtaggatgattgtcacctcctctttaaaaacccccttccaatttgctgattcagtcattggattaattaaagctccagagcaaacgtcagatgagtccaaaaacccagaaaattcaacattgctaactaggactccaaccaagggtgacaatcatatttccaatgttttagatgacaacttattagaatcagaatcgacaaactctttgctattgttacgtgagaatgcaagcacatatgggcggtcaccttccgggtttagaccgcggtattccattacgtccgcttctctcaatccgcgtcaccaaagaaggaaatcagatactatttcaacttcaaggcgaccagccaaatccttttcattttcagttgcttctcccacatcaaggatgttgaggcaatccagcaaaatcaatggacacccaccgccaattctgcagaaaaaaacaagtatgggccggctaatgtttcctatggatgccaagacctatgacccggaaagccatgaacttatcccacattctgccagcattgaaacacctgccatggtagacaagaaattgcattttggccgaaagagtagatacttgaggcatatgaacaaaaaatgggtcagcagtagcaacatattatacacagattcggataaagaagaccatcctacattgagactgataagtaacttcgattcagacgcaatgattcatagtgatttagcgggcaatttcaggcgtcatagcattgatggaagacccccttctcaagctacaaagagctcaccgtttcgatcgaggccttcttcttcaacgcagcacaaaagcaccaccagttttactcaataa

SEQ ID NO: 7032 - DNA, 2733 bp, Artificial Sequence
  Description of Artificial Sequence: Synthetic polynucleotide
atgagcagcaaaatatctgatcttacatctacacaaaataagcccctccttgttacgcaacaattgatcgaaaaatattacgaacagatcttgggcacttcccagaacataattcctattttaaatccgaagaacaagtttattaggcccagtaaggataattctgatgttgaaagggtggaggaggatgctggtaaaagattacaaactggcaagaacaaaactacgaacaaagtaaatttcaaccttgatactggaaacgaggataaacttgacgatgaccaagagacagtaacagaaaatgaaaataatgatatcgagatggttgagacagacgaaggcgaagatgaaaggcaagggagttctttagccagtaaatgcaaaagttttctttacaacgtttttgtgggaaactatgaaagagacattcttattgacaaagtctgttctcaaaagcaacatgcgatgagttttgaagaatggtgttctgcgggcgccagattggatgacctcactgggaaaacagaatggaagcagaaattggaaagtcccttgtatgattacaagttaataaaagatttaacatctagaatgcgtgaggagcgcttgaataggaattacgctcaattgttgtacatcattaggacgaattgggtaagaaacttgggaaatatggggaatgtaaacttatataggcactcccatgtaggcaccaaatatttaattgacgagtatatgatggagtctaggttagcgttagaatctttaatggagtctgatcttgatgatagttaccttttgggtatattgcaacaaacgagaagaaatattggtcgtaccgctttagttctcagtgggggtggaacttttggtcttttccacatcggtgtccttggtactttatttgaattggatttattacccagagtgattagtggtagcagtgctggtgcaattgtagcaagcatattatctgtccatcacaaagaagaaattccggttttattgaatcatattttggataaagaattcaacattttcaaagacgataaacagaaaagtgaaagcgagaatttgttaataaaaatatctaggttcttcaaaaacggtacgtggtttgataacaagcatttggtaaatacaatgatagaatttttgggagatttgacatttagggaagcttacaatagaacgggtaaaattttgaatataaccgtttctccggcatctttatttgaacaaccgcgcttgttgaataatttgactgcaccaaacgtcttgatttggtccgccgtatgtgcatcttgttctttaccgggaattttcccctctagcccactttacgaaaaagatccaaaaacgggagaaaggaaaccatggactggtagtagttctgtcaaatttgtcgatggttctgtggacaatgacttgcccatttctcgtctttctgaaatgtttaatgtagaccatattatcgcatgccaggtgaatattcacgtatttccctttttgaaattaagtttatcctgtgttggcggggaaattgaggacgaatttagtgcaagattaaagcaaaacttatccagtatatacaattttatggccaatgaagctattcatattttggaaattggaagtgagatgggaattgccaaaaacgcgcttacaaaattgagatctgtattatctcaacaatattctggtgacatcactattttgcccgacatgtgtatgctttttagaataaaggagttattgtctaacccaacaaaagaatttttattaagggaaatcaccaatggtgcaaaagctacgtggcccaaggtttccattattcaaaatcactgtggccaggaatttgctttagataaggcgatttcttatatcaaaggtaggatgattgtcacctcctctttaaaaacccccttccaatttgctgattctgtcattggattaattaaagctccagagcaaacgtctgatgagtccaaaaacccagaaaattctacattgttgactaggactccaaccaagggtgacaatcatatttccaatgttttagatgacaacttattagaaagtgaatctacaaactctttgttgttgttacgtgagaatgcaagcacatatgggaggtctccttccgggtttagaccgcgttattccattacgtccgcttctctcaatccgcgtcaccaaagaaggaaatctgatactatttctacttctaggagaccagccaaatccttttctttttctgttgcttctcccacatccaggatgttgaggcaatccagcaaaatcaatggacacccaccgccaattttacagaaaaaaacaagtatgggcagattaatgtttcctatggatgccaagacctatgacccggaaagccatgaacttatcccacattctgccagcattgaaacacctgccatggtagacaagaaattgcattttggcagaaagagtagatacttgaggcatatgaacaaaaaatgggtcagcagtagcaacatattatacacagattctgataaagaagaccatcctacattgagattaataagtaacttcgattctgacgcaatgattcatagtgatttagcgggcaatttcaggcgtcatagcattgatggaagacccccttctcaagctacaaagagctctccgtttagaagtaggccttcttcttctacgcagcacaaaagcaccaccagttttactcaatga

SEQ ID NO: 7033 - DNA, 2121 bp, Saccharomyces cerevisiae
atgtataactcaatctacgggtcccccttccctaaaataaatccgaaggtccgctacaaaactgctctagaaagagcagggtttgacactaagccgcgtaatccgttcagtagtcagaggaatgcttccactggaagtttacaagcttccgtgaagtcgccgccaataacccgtcaaagaaatgtatctgccgccccatctgttccggtcacgatgaagagtgcgtatacggcgtcttcaaagagtgcttattcatctgtaaagggcgagtctgacatttatccgcctcccgtattggagaatagcgagaggcggagtgtaactcctccaaagaatagcaattttacgtcttcgagacccagtgacatatctcgttctatttccaggcccagcgagcgtgcttcgcaagaggatcccttccgttttgaacgcgacttagaccgtcaggcggaacaatatgctgcctctaggcatacatgtaaatcacctgctaacaaggaattccaagccgcagataacttccccttcaacttcgaacaagaagatgctggtaatactgaaagggaacaagatttgagccctattgaaagaagtttcatgatgctgactcaaaatgacactgcaagcgttgtaaattctatgaaccaaaccgataacagaggtgtgctcgaccaaaaactcggaaaagaacagcaaaaagaggaaagttcaatcgaatatgaaagtgaaggacagcaggaggatgagaatgatattgaaagcctaaattttgaaccagatcctaaactacagatgaatcttgaaaatgaaccacttcaagatgattttccagaagcaaaacaagaggaaaagaatacagaacctaaaattccggaaattaatgttacgagggaaagtaatacaccatctttaaccatgaacgcactagactctaaaatatatcctgatgataacttttctggcctggaatcttcaaaggaacagaaatcacctggtgtgtcatcatcgtcaacaaaagttgaagatttaagtcttgatgggttaaatgagaaacgtctttcaataacttcttcagaaaacgtggaaacaccatacactgctacgaacctccaagtcgaacaattgattgctcaattagacgatgtttccctatctagaaatgcaaagctcgatatgaacggcaattgcctcaacgcagtggacagaaaggcttctagattcaaaaagtcaagcgcatatttatctgggtatcccagcatggatatacccgtaacgcagcaaacatcaattgtgcaaaacagcaatacgaacttatccagacaaactattctggtagataaaggcgatgtcgatgaagacgcgccatctgaatctacaactaatggtggcacacccattttttacaagtttaaacagtcgaacgtagaatactccaataatgaagggatgggttcgcaagaaactttcagaacgaaacttcccacaattgaagcactacaactgcagcataagcgcaacataacagatctgagagaagaaattgataattccaaatctaatgactctcatgtattacctaacggcggcactacgagatacagctctgatgcagattataaagaaacggagcccattgagtttaaatatccgcctggggagggaccttgcagagcatgcggcttggaagtcacagggaaaagaatgttttccaaaaaggaaaacgaactgtcgggtcaatggcatcgtgaatgttttaaatgcattgaatgtggtatcaaattcaataaacatgttccctgttatattctaggcgatgaaccatattgtcaaaagcactatcacgaggagaatcacagtatttgtaaggtttgttcaaatttcatagagggtgaatgtctggaaaatgataaggtggaacgattccacgtggattgtctaaactgtttcttatgcaagactgccattactaatgattattatatattcaatggggaaattccattgtgcggtaatcacgacatggaagctctcttgaaggaaggtatcgacaatgctacatcaagcaatgataagaacaatactctctctaaaaggagaacgaggctcatcaacttcaactag

SEQ ID NO: 7034 - DNA, 2121 bp, Artificial Sequence
  Description of Artificial Sequence: Synthetic polynucleotide
atgtataactctatctacgggtcccccttccctaaaataaatccgaaggtccgctacaaaactgctttggaaagagcagggtttgacactaagccgcgtaatccgttcagtagtcagaggaatgcttccactggaagtttacaagcttccgtgaagagcccgccaataacccgtcaaagaaatgtatctgccgccccatctgttccggtcacgatgaagagtgcgtatacggcgtcttccaagagtgcttattcttctgtaaagggcgagtctgacatttatccgcctcccgtattggagaatagcgagaggagaagtgtaactcctccaaagaatagcaattttacgtcttctagacccagtgacatatctcgttctatttccaggcccagcgagcgtgcttctcaagaggatcccttccgttttgaacgcgacttagaccgtcaggcggaacaatatgctgcctctaggcatacatgtaaatctcctgctaacaaggaattccaagccgcagataacttccccttcaacttcgaacaagaagatgctggtaatactgaaagggaacaagatttgagccctattgaaagaagtttcatgatgttgactcaaaatgacactgcaagcgttgtaaattctatgaaccaaaccgataacagaggtgtgctcgaccaaaaactcggaaaagaacagcaaaaagaggaaagttctatcgaatatgaaagtgaaggacagcaggaggatgagaatgatattgaaagcttgaattttgaaccagatcctaaattacagatgaatcttgaaaatgaaccacttcaagatgattttccagaagcaaaacaagaggaaaagaatacagaacctaaaattccggaaattaatgttacgagggaaagtaatacaccatctttaaccatgaacgcattggactctaaaatatatcctgatgataacttttctggccttgaatcttccaaggaacagaaatctcctggtgtgtcttcttcttctacaaaagttgaagatttaagtcttgatgggttaaatgagaaacgtctttccataacttcttctgaaaacgtggaaacaccatacactgctacgaacctccaagtcgaacaattgattgctcaattagacgatgtttccttatctagaaatgcaaagctcgatatgaacggcaattgcctcaacgcagtggacagaaaggcttctagattcaaaaagagcagcgcatatttatctgggtatcccagcatggatatacccgtaacgcagcaaacatccattgtgcaaaacagcaatacgaacttatccagacaaactattttagtagataaaggcgatgtcgatgaagacgcgccatctgaatctacaactaatggtggcacacccattttttacaagtttaaacagtccaacgtagaatactccaataatgaagggatgggttctcaagaaactttcagaacgaaacttcccacaattgaagcattacaattgcagcataagcgcaacataacagatttgagagaagaaattgataattccaaatctaatgactctcatgtattacctaacggcggcactacgagatacagctctgatgcagattataaagaaacggagcccattgagtttaaatatccgcctggggagggaccttgcagagcatgcggcttggaagtcacagggaaaagaatgttttccaaaaaggaaaacgaattatctggtcaatggcatcgtgaatgttttaaatgcattgaatgtggtatcaaattcaataaacatgttccctgttatattttgggcgatgaaccatattgtcaaaagcactatcacgaggagaatcacagtatttgtaaggtttgttctaatttcatagagggtgaatgtttagaaaatgataaggtggaaagattccacgtggattgtttgaactgtttcttatgcaagactgccattactaatgattattatatattcaatggggaaattccattgtgcggtaatcacgacatggaagctctcttgaaggaaggtatcgacaatgctacatctagcaatgataagaacaatactctctctaaaaggagaacgaggctcatcaacttcaactga

SEQ ID NO: 7035 - DNA, 741 bp, Saccharomyces cerevisiae
atgtttcttaagacacctaattgggaaacggtaaatgagactcccaaatcgagagtcttaacgataaacgaattgatctctcccaacctggatactgaatctaacagccttctggcgacgccggcaaggaaatatttcaaaacttcaataagtgaagcgcaagattctcctacatctgccccttcgcccgatggcaatgaggatcccacatatcaatacaacgtacaatttcattttccaggaccaataacacctacaacacccaggtctaagaatgcagaaatgtttccatcccccacgcccccattggtttctcccacagcggttatcgaggaagagaatgacgattccgtacgggagttttcacgcacgctaaaatcaagactcaactgcgcaatggttaagctatcaaaggaacatgagcaagtagctttgattcctccacctccgacggaaaagatacgaaagggctcttatagtaataaatttgccgctaagcataggcgctgtcactcgttagatgaatccaaaaagtttctgagttctctggaagattcatccgctcatgcagcgttcttgaaggcaatttcgtccaaacatgccaaaagcaatagggtagacaacgttaacgtttcgccgttacgttggtcatctcatagaagaacgcaaagtacacaggagaattctttacaagaagttgttgctatcgatacattattgaagatgtcctcatcggactga

SEQ ID NO: 7036 - DNA, 741 bp, Artificial Sequence
  Description of Artificial Sequence: Synthetic polynucleotide
atgtttcttaagacacctaattgggaaacggtaaatgagactcccaaatctagagtcttaacgataaacgaattgatctctcccaaccttgatactgaatctaacagccttttggcgacgccggcaaggaaatatttcaaaacttccataagtgaagcgcaagattctcctacatctgccccttctcccgatggcaatgaggatcccacatatcaatacaacgtacaatttcattttccaggaccaataacacctacaacacccaggtctaagaatgcagaaatgtttccatcccccacgcccccattggtttctcccacagcggttatcgaggaagagaatgacgattccgtaagagagtttagccgcacgttgaaatctagactcaactgcgcaatggttaagttatccaaggaacatgagcaagtagctttgattcctccacctccgacggaaaagataagaaagggctcttatagtaataaatttgccgctaagcataggcgctgtcactctttagatgaatccaaaaagtttttgagttctttggaagattcttccgctcatgcagcgttcttgaaggcaatttcttccaaacatgccaaaagcaatagggtagacaacgttaacgtttctccgttacgttggtcttctcatagaagaacgcaaagtacacaggagaattctttacaagaagttgttgctatcgatacattattgaagatgtcctcttctgactga

SEQ ID NO: 7037 - DNA, 1221 bp, Saccharomyces cerevisiae
atggcttccaagaaaattaaagttgacgaagtgccaaaattaagtgttaaggagaaggagattgaagagaaatcttcttcttcttcttcctcctcctcctcctcctcctcctcctcttcttcttcatcttcctcgtccagttctagcggcgaatcttcaagcagcagcagcagcagcagcagcagcagcagcagtgacagcagtgacagcagtgactctgaatctagctcatcatcatcttcttcttctagctcaagctcaagttccagtgactctgaatcttctagtgaatccgactctagctccagtggatcttcttcttcctctagctctagttctgacgaatcttcttcggaatccgaatcagaagatgaaaccaagaaaagagcaagagaatcagacaacgaagatgctaaggagactaaaaaggctaaaactgaaccagaaagctcttcctcatcggagtcaagctctagcgggtcatcgtcatcttcagaatcagaatcaggttcggaatctgattctgactcaagttctagctcaagtagttcttctgattccgaatcagattctgaatcagattctcaatcaagttctagctccagctctagcgactcttcgtctgactccgactccagctccagcgactcttcatctgactccgactctagctccagctctagcagctcttcctcggattcagattcggattccgactcaagctcggactcagactcttcaggctcgtccgattcttcaagctcgtctgattcaagttccgacgaatctacatcttctgattcctccgattcggattccgactcagactctggttctagctctgaattggaaacaaaagaagcaactgcagacgaatccaaggccgaagaaacgcctgcctcatctaacgaatcaactccatctgcttccagttcatcaagcgccaataaattgaacattcctgctggaaccgacgagatcaaagagggccaaagaaagcatttttccagagtagatagatcgaagattaatttcgaagcttgggagttgacagacaacacctacaaaggcgcggctggaacatggggtgaaaaggcaaatgaaaaattaggtagagtaagaggtaaagatttcacgaagaacaaaaataaaatgaagagaggttcttacagaggtggatccattacattagaaagtggttcatacaaattccaagattaa

SEQ ID NO: 7038 - DNA, 1221 bp, Artificial Sequence
  Description of Artificial Sequence: Synthetic polynucleotide
atggcttccaagaaaattaaagttgacgaagtgccaaaattaagtgttaaggagaaggagattgaagagaaatcttcttcttcttcttcctcctcctcctcctcctcctcctcctcttcttcttcttcttcctcctccagttctagcggcgaatcttctagcagcagcagcagcagcagcagcagcagcagcagtgacagcagtgacagcagtgactctgaatctagctcttcttcttcttcttcttctagcagcagcagtagttccagtgactctgaatcttctagtgaatccgactctagctccagtggatcttcttcttcctctagctctagttctgacgaatcttcttctgaatccgaaagtgaagatgaaaccaagaaaagagcaagagaaagtgacaacgaagatgctaaggagactaaaaaggctaaaactgaaccagaaagctcttcctcttctgagagcagctctagcgggtcttcttcttcttctgaaagtgaaagtggttctgaatctgattctgacagcagttctagcagtagtagttcttctgattccgaaagtgattctgaaagtgattctcaaagtagttctagctccagctctagcgactcttcttctgactccgactccagctccagcgactcttcttctgactccgactctagctccagctctagcagctcttccagtgattctgattctgattccgactccagcagtgacagtgactcttctggcagctccgattcttctagctcttctgattctagttccgacgaatctacatcttctgattcctccgattctgattccgacagtgactctggttctagctctgaattggaaacaaaagaagcaactgcagacgaatccaaggccgaagaaacgcctgcctcttctaacgaatctactccatctgcttccagttcttctagcgccaataaattgaacattcctgctggaaccgacgagatcaaagagggccaaagaaagcatttttccagagtagatagatccaagattaatttcgaagcttgggagttgacagacaacacctacaaaggcgcggctggaacatggggtgaaaaggcaaatgaaaaattaggtagagtaagaggtaaagatttcacgaagaacaaaaataaaatgaagagaggttcttacagaggtggatccattacattagaaagtggttcttacaaattccaagattga

SEQ ID NO: 7039 - DNA, 1806 bp, Saccharomyces cerevisiae
atgctcaaccatcccagccaaggctcagatgatgctcaggacgaaaagcaaggcgacttcccggtcatcgaagaggagaagacccaggctgtaacgctgaaggattcgtatgttagcgacgacgtcgccaactccacggaacgctacaacttgtccccttctccggaggacgaagacttcgaaggccccactgaagaagaaatgcagactttaaggcacgttggtggtaaaattcctatgaggtgttggttaattgctattgtagagctttccgagagattctcctactacgggctttccgcaccattccaaaactacatggaatatggacctaatgactccccaaagggtgttctgagcttgaacagtcagggtgccactgggttgtcgtattttttccagttttggtgttacgttacaccagttttcggtggttacgttgcggacaccttctggggtaaatataatacaatttgttgcggtaccgctatttacattgccggtattttcattctatttatcacttcgattccctccgttggtaacagagacagtgctattggtgggttcattgctgccattattctgatcggtattgccactggtatgattaaagctaacctttccgtgttgattgccgaccagcttcctaagcggaaaccctccatcaaagttttaaaatcgggcgaaagagtcattgtcgattcaaatattactttacaaaacgtttttatgttcttctatttcatgatcaatgtcggttctctatcattaatggccactactgaattggaatatcataaggggttctgggcggcctatctattgcccttctgcttcttttggatcgctgttgtcactttgatttttggtaaaaagcaatacattcaaagaccaatcggagataaagtcatcgctaaaagttttaaagtttgttggattttaactaagaataagttcgacttcaacgctgctaaaccttctgttcatccagaaaagaactatccatggaatgacaaatttgttgatgaaattaagagagctttggcggcttgtaaagtctttatattctacccaatttattggacccaatacggtaccatgatttccagtttcatcactcaggccagtatgatggaattacatggaattcccaacgatttcttacaagcattcgattccattgcgttgatcattttcatcccaatttttgaaaaattcgtatatcctttcattagaagatacactccactaaaaccaattacaaaaattttcttcggtttcatgtttggatcttttgccatgacatgggctgctgttctacaaagtttcgtttacaaggctggtccatggtataatgaacctctgggtcacaacaccccaaatcatgtccacgtttgctggcaaatacccgcatatgtcttgatttctttttcagagatctttgcctctatcactgggttggaatacgcttattccaaagccccagcttccatgaaatcgtttattatgtccattttcttattgactaacgcctttggttctgcaatcggttgtgcattgtccccagtgaccgttgatcctaaatttacatggttattcactggtttggctgttgcctgctttatttctggttgtttgttctggttgtgcttcaggaagtataatgatacagaggaagaaatgaacgctatggactacgaagaagaagacgaatttgatctcaatccaatttccgcacctaaagctaacgatattgaaatattagaaccaatggaaagtctaagatccaccaccaaatattag

SEQ ID NO: 7040 - DNA, 1806 bp, Artificial Sequence
  Description of Artificial Sequence: Synthetic polynucleotide
atgctcaaccatcccagccaaggcagtgatgatgctcaggacgaaaagcaaggcgacttcccggtcatcgaagaggagaagacccaggctgtaacgttgaaggattcttatgttagcgacgacgtcgccaactccacggaacgctacaacttgtccccttctccggaggacgaagacttcgaaggccccactgaagaagaaatgcagactttaaggcacgttggtggtaaaattcctatgaggtgttggttaattgctattgtagagctttccgagagattctcctactacgggctttccgcaccattccaaaactacatggaatatggacctaatgactccccaaagggtgttttaagcttgaacagtcagggtgccactgggttgagttattttttccagttttggtgttacgttacaccagttttcggtggttacgttgcggacaccttctggggtaaatataatacaatttgttgcggtaccgctatttacattgccggtattttcattttatttatcacttctattccctccgttggtaacagagacagtgctattggtgggttcattgctgccattattttgatcggtattgccactggtatgattaaagctaacctttccgtgttgattgccgaccagcttcctaagagaaaaccctccatcaaagttttaaaatctggcgaaagagtcattgtcgattctaatattactttacaaaacgtttttatgttcttctatttcatgatcaatgtcggttctttatctttaatggccactactgaattggaatatcataaggggttctgggcggcctatcttttgcccttctgcttcttttggatcgctgttgtcactttgatttttggtaaaaagcaatacattcaaagaccaatcggagataaagtcatcgctaaaagttttaaagtttgttggattttaactaagaataagttcgacttcaacgctgctaaaccttctgttcatccagaaaagaactatccatggaatgacaaatttgttgatgaaattaagagagctttggcggcttgtaaagtctttatattctacccaatttattggacccaatacggtaccatgatttccagtttcatcactcaggccagtatgatggaattacatggaattcccaacgatttcttacaagcattcgattccattgcgttgatcattttcatcccaatttttgaaaaattcgtatatcctttcattagaagatacactccattgaaaccaattacaaaaattttcttcggtttcatgtttggatcttttgccatgacatgggctgctgttttgcaaagtttcgtttacaaggctggtccatggtataatgaacctttaggtcacaacaccccaaatcatgtccacgtttgctggcaaatacccgcatatgtcttgatttctttttctgagatctttgcctctatcactgggttggaatacgcttattccaaagccccagcttccatgaaaagttttattatgtccattttcttattgactaacgcctttggttctgcaatcggttgtgcattgtccccagtgaccgttgatcctaaatttacatggttattcactggtttggctgttgcctgctttatttctggttgtttgttctggttgtgcttcaggaagtataatgatacagaggaagaaatgaacgctatggactacgaagaagaagacgaatttgatctcaatccaatttccgcacctaaagctaacgatattgaaatattagaaccaatggaaagtttgagatccaccaccaaatattga

SEQ ID NO: 7041 - DNA, 387 bp, Saccharomyces cerevisiae
atgcaaatcttcgttaagactttgactggtaagaccatcactttggaagttgaatcttctgacaccattgacaatgtcaagtccaagatccaagacaaggaaggtatcccacctgaccaacaaagattgatctttgctggtaagcaattggaagacggtagaactctatctgactacaacatccaaaaggaatccactttacatttggtcttgagattaagaggtggtatcattgaaccatctttgaaagccttggcttccaaatacaactgtgacaaatctgtttgtcgtaaatgttacgccagattaccaccaagagctaccaactgtagaaagagaaagtgtggtcacaccaaccaattgcgtccaaagaagaagttgaaataa

SEQ ID NO: 7042 - DNA, 387 bp, Artificial Sequence
  Description of Artificial Sequence: Synthetic polynucleotide
atgcaaatcttcgttaagactttgactggtaagaccatcactttggaagttgaatcttctgacaccattgacaatgtcaagtccaagatccaagacaaggaaggtatcccacctgaccaacaaagattgatctttgctggtaagcaattggaagacggtagaactttatctgactacaacatccaaaaggaatccactttacatttggtcttgagattaagaggtggtatcattgaaccatctttgaaagccttggcttccaaatacaactgtgacaaatctgtttgtcgtaaatgttacgccagattaccaccaagagctaccaactgtagaaagagaaagtgtggtcacaccaaccaattgcgtccaaagaagaagttgaaatga

SEQ ID NO: 7043 - DNA, 5628 bp, Saccharomyces cerevisiae
atgtcggatcatgatactccaatggaaagcatacaaaatggtgaaaattcagacgaaagattgaacgccattgcgtcttttttcggttgctctttagagcaggttaaatcatttgacggtgatgtggtaaaacaccttaacgataaacttttacagtttaatgaacttaaatcggagaatctaaaggttaccgtctcattcgatgaattgaaggctagttctttaaagaaaattgatggtttgaagacagaaatggaaaacgttataagagaaaatgataaaatccgaaaagagaggaatgatacttttgttaagttcgaatctgtagaaaatgaaaagatgaaattatcaagtgagctagagtttgtgaaaaggaagctcgatgatttaactgaggagaaaaaggaaacccagagtaatcaacagcgaaccctgaaaatactggatgaaagactaaaagaaatagaattggtcagggttgagaataatcgctccaatagtgaatgtaagaaactacgctctacaataatggatttagaaacaaaacaacagggctatattactaatgacctgaattctagaactgaactggaaagaaaaacacaagaattgactttattgcagtcaaataatgattggctagaaaaggagctacgttcaaaaaatgaacagtatctctcctacagacaaaaaaccgacaaagtaattctagatatcaggaatgaattaaatcgtttaaggaatgattttcaaatggaaagaacgaataatgatgttttgaagcaaaaaaataacgaattgtcaaaatctttacaagaaaaactactggaaatcaagggtctatccgactccctaaattccgaaaagcaagaattttctgcagaaatgtccctaaagcaacgtttagtggaccttttagaatcacaattgaacgctgtaaaagaagaattgaacagtataagagagttgaacactgcaaaggtaatagcagatgattcaaaaaaacaaactcccgaaaatgaagacttacttaaggaattgcagttaacgaaagaaaaattagcacaatgcgaaaaagaatgtctacgtttatcctctataactgacgaagcagatgaagataatgaaaatttatctgcaaaatctagttctgattttatattcctgaagaaacaattaattaaagaaaggcgtaccaaggaacatcttcaaaatcaaattgaaacattcatcgtagagttggaacataaagtgcccattataaactctttcaaagaaagaactgacatgttggaaaacgaattgaataacgctgcattgttactagagcatacatcgaacgagaagaatgcaaaggttaaggaattaaatgccaaaaaccaaaagctagtggaatgtgaaaatgatcttcaaactttaactaaacaacgtctcgatctatgccgtcaaatacaataccttttaattaccaattctgtttctaatgactcgaagggacccttacgtaaggaagaaattcaatttattcaaaacattatgcaggaagacgatagtactatcacagaatctgactctcaaaaagtcgtaactgaaagactagttgaattcaaaaacattattcaattacaagaaaaaaatgcagaacttttgaaagtagtaagaaacttagccgataagttggaatcgaaagaaaagaaatctaaacaaagtcttcagaaaatcgaaagtgaaacagtaaatgaggctaaagaggctataataactttaaagagtgaaaaaatggatctagaatcaagaattgaggaactacagaaagagcttgaagaattgaaaacttctgttcccaacgaagatgcgtcatacagcaatgtaactataaaacagttaaccgaaactaagagagacctcgaatctcaagtacaagacttgcaaactcgtatctcgcaaattactagggagtctactgaaaatatgtcacttttaaacaaggagatacaggacctgtatgacagcaagagcgacatatccattaagcttggaaaggaaaaatcatcgagaatattggcagaggaacgatttaaactactttcgaatacgttagatctaactaaagctgagaacgaccaactgcgcaaaaggtttgattatttacagaatactattttaaaacaagattccaaaacacacgagacacttaatgaatacgtttcctgtaaatctaagttaagcattgttgaaacagaattattgaacctgaaagaagaacagaaattaagagttcatttagaaaagaacttgaaacaagaactgaataaactctcccctgaaaaggacagtttacgcatcatggtaactcaattacaaactttacaaaaggagcgtgaagatctattggaagagactaggaaatcatgtcaaaagaaaatagatgaacttgaagatgctctcagcgaacttaaaaaggaaacttctcaaaaagaccatcatatcaaacagctggaagaagacaacaattcaaatatagaatggtaccaaaataaaatcgaagctttgaagaaagattatgaatcagtaataacttctgtagatagtaagcaaactgacattgagaaattacaatataaagtcaaatcactagaaaaggaaatcgaggaggacaagattcgtttacatacttataatgttatggatgaaacaattaacgatgattccctacgcaaggagttggaaaaatccaagattaacttaactgatgcttattcacaaatcaaagaatacaaggatctctacgagactacctctcagtctttgcagcaaacgaattctaaattggatgaatctttcaaggactttactaaccagattaaaaacctaactgatgaaaaaactagtttggaggataagatttcgcttctaaaagagcaaatgtttaatttgaataatgagctagatttgcagaaaaaagggatggaaaaagaaaaagctgactttaagaaaaggatatcaattttacagaacaataataaagaagtcgaagctgttaagtccgaatatgaatcgaagttatcaaaaatccaaaacgaccttgatcaacaaactatatatgctaatactgcgcaaaacaactatgaacaagaactacagaaacatgcagatgtttctaagacgattagtgaattaagagagcaattacatacgtacaaaggtcaagttaagaccctgaacttatcgcgtgatcaactggagaatgctctgaaagaaaacgaaaagagttggtcctcccagaaggaatctttattagaacagctagatttatcgaattctcgtattgaggatttatcctcccaaaataaactattgtatgatcaaatacaaatctacacagctgcggacaaagaagtcaataattcgacaaacggacctggtttgaataatattttaattacactacgtcgcgaaagggatattcttgatacaaaagtgacggtggctgaaagagatgcaaaaatgttgagacaaaaaatttctttgatggatgttgaattacaagatgctcgtactaagctagataattcaagagttgaaaaggaaaatcattcttccattattcaacagcatgacgacattatggagaaattaaatcaattaaatctattaagagaaagtaacataacattgcggaatgagctggaaaacaacaataacaagaagaaggaactgcaatctgaattagataaattgaagcaaaatgttgcgcctatcgagtccgaattgacagccttgaaatattctatgcaagaaaaagagcaagagctcaaattagctaaagaagaggttcatcgttggaaaaagcgctcacaagacatattggagaaacatgaacaattgagctcaagcgattatgagaagctagaaagcgagatagaaaatttgaaggaggaactagaaaataaggagcgtcaaggagcggaagccgaggaaaaatttaacaggctgagaagacaagcgcaagagagattaaaaacatcaaaactctcacaggactcattgactgaacaagtaaatagtctaagggatgcaaagaacgtgttggaaaattccttgagtgaggcaaacgcgagaatcgaagagttacaaaatgcaaaagtagcacaaggtaacaaccagttagaagcaataagaaaattacaagaagacgcagaaaaggcttcaagagagcttcaagccaagttagaagaaagtacgacttcttacgaatctacgataaacggcttaaatgaagagattacaacattaaaagaagaaattgaaaaacaaaggcaaatccagcaacagttacaagctacatctgcaaatgaacaaaatgacttatctaacatagttgagtctatgaaaaagtcttttgaagaagataaaatcaaattcatcaaagaaaaaacccaagaagttaatgaaaaaatactcgaggcccaagaaaggctaaatcaaccttccaatatcaatatggaggagattaaaaaaaaatgggaatctgagcacgaacaggaagtatctcaaaagattcgcgaagctgaggaagccctcaaaaagcgaatcagattacccactgaggagaaaattaataagataatcgaacgaaagaaggaggaattggaaaaagagtttgaagaaaaggttgaggagagaataaaatcaatggaacaatctggagaaatagacgtggtgcttcgaaaacagctagaagctaaggttcaagagaaacaaaaggaattggaaaacgagtataacaaaaaattacaagaagaactcaaagatgtaccacactcaagtcatatctcagatgatgaaagggacaaattacgagcagaaatcgaaagcaggttgagggaggagttcaacaatgaactgcaagccataaagaagaaatccttcgacgaaggaaagcaacaagcaatgatgaaaactacccttttggaaagaaaacttgccaagatggaatctcaattgtcagaaacaaaacaaagtgccgagagtcctccgaaatctgttaacaatgtacaaaatccattactaggattacctaggaaaatcgaagagaattcaaattcaccattcaatccgttactttccggtgaaaaactcttaaagctaaattctaagtcttcatcaggtggatttaacccttttacctcgccatccccaaataagcacttacaaaatgataatgacaaaagggagtcgttggctaacaagacagatccaccaactcatttggaacccagcttcaacattcccgcctcaaggggtctaatatcttcatcttccactttgtcaactgatacaaatgatgaagaacttactagcaacaatcctgcccaaaaggattcatcgaacagaaatgttcaatcggaagaggatacagaaaaaaagaaagagggagaacctgttaaaagaggagaggcaatagaagagcagacgaaatccaacaagcgacctattgatgaggtaggagagctgaaaaatgatgaagacgacactacagaaaacattaatgagtcaaaaaagatcaagactgaagatgaggaagaaaaagaaaccgataaggtgaatgacgagaacagtatataa

SEQ ID NO: 7044 - DNA, 5628 bp, Artificial Sequence
  Description of Artificial Sequence: Synthetic polynucleotide
atgagtgatcatgatactccaatggaaagcatacaaaatggtgaaaatagtgacgaaagattgaacgccattgcgtcttttttcggttgctctttagagcaggttaaaagttttgacggtgatgtggtaaaacaccttaacgataaacttttacagtttaatgaacttaaaagtgagaatttgaaggttaccgtctctttcgatgaattgaaggctagttctttaaagaaaattgatggtttgaagacagaaatggaaaacgttataagagaaaatgataaaatcagaaaagagaggaatgatacttttgttaagttcgaatctgtagaaaatgaaaagatgaaattatccagtgagttagagtttgtgaaaaggaagctcgatgatttaactgaggagaaaaaggaaacccagagtaatcaacagcgtaccttgaaaatattggatgaaagattgaaagaaatagaattggtcagggttgagaataatcgctccaatagtgaatgtaagaaattgcgctctacaataatggatttagaaacaaaacaacagggctatattactaatgacttgaattctagaactgaattggaaagaaaaacacaagaattgactttattgcagtctaataatgattggttagaaaaggagttgcgttctaaaaatgaacagtatctctcctacagacaaaaaaccgacaaagtaattttagatatcaggaatgaattaaatcgtttaaggaatgattttcaaatggaaagaacgaataatgatgttttgaagcaaaaaaataacgaattgagtaaatctttacaagaaaaattattggaaatcaagggtttatccgactccttgaattccgaaaagcaagaattttctgcagaaatgtccttgaagcaacgtttagtggaccttttagaatctcaattgaacgctgtaaaagaagaattgaacagtataagagagttgaacactgcaaaggtaatagcagatgattctaaaaaacaaactcccgaaaatgaagacttacttaaggaattgcagttaacgaaagaaaaattagcacaatgcgaaaaagaatgtttgcgtttatcctctataactgacgaagcagatgaagataatgaaaatttatctgcaaaatctagttctgattttatattcttgaagaaacaattaattaaagaaaggcgtaccaaggaacatcttcaaaatcaaattgaaacattcatcgtagagttggaacataaagtgcccattataaactctttcaaagaaagaactgacatgttggaaaacgaattgaataacgctgcattgttattggagcatacaagtaacgagaagaatgcaaaggttaaggaattaaatgccaaaaaccaaaagttagtggaatgtgaaaatgatcttcaaactttaactaaacaacgtctcgatttatgccgtcaaatacaataccttttaattaccaattctgtttctaatgactccaagggacccttacgtaaggaagaaattcaatttattcaaaacattatgcaggaagacgatagtactatcacagaatctgactctcaaaaagtcgtaactgaaagattggttgaattcaaaaacattattcaattacaagaaaaaaatgcagaacttttgaaagtagtaagaaacttagccgataagttggaaagtaaagaaaagaaatctaaacaaagtcttcagaaaatcgaaagtgaaacagtaaatgaggctaaagaggctataataactttaaagagtgaaaaaatggatttggaatctagaattgaggaattacagaaagagcttgaagaattgaaaacttctgttcccaacgaagatgcgtcttacagcaatgtaactataaaacagttaaccgaaactaagagagacctcgaatctcaagtacaagacttgcaaactcgtatctctcaaattactagggagtctactgaaaatatgtctcttttaaacaaggagatacaggacctttatgacagcaagagcgacatatccattaagcttggaaaggaaaaaagcagcagaatattggcagaggaaagatttaaattactttctaatacgttagatttgactaaagctgagaacgaccaattgcgcaaaaggtttgattatttacagaatactattttaaaacaagattccaaaacacacgagacacttaatgaatacgtttcctgtaaatctaagttaagcattgttgaaacagaattattgaacttgaaagaagaacagaaattaagagttcatttagaaaagaacttgaaacaagaattgaataaactctcccctgaaaaggacagtttacgcatcatggtaactcaattacaaactttacaaaaggagcgtgaagatttattggaagagactaggaaaagttgtcaaaagaaaatagatgaacttgaagatgctctcagcgaacttaaaaaggaaacttctcaaaaagaccatcatatcaaacagttagaagaagacaacaatagtaatatagaatggtaccaaaataaaatcgaagctttgaagaaagattatgaaagtgtaataacttctgtagatagtaagcaaactgacattgagaaattacaatataaagtcaaatctttggaaaaggaaatcgaggaggacaagattcgtttacatacttataatgttatggatgaaacaattaacgatgattccttacgcaaggagttggaaaaatccaagattaacttaactgatgcttattctcaaatcaaagaatacaaggatctctacgagactacctctcagtctttgcagcaaacgaattctaaattggatgaatctttcaaggactttactaaccagattaaaaacttgactgatgaaaaaactagtttggaggataagatttctcttttgaaagagcaaatgtttaatttgaataatgagttagatttgcagaaaaaagggatggaaaaagaaaaagctgactttaagaaaaggatatctattttacagaacaataataaagaagtcgaagctgttaagtccgaatatgaatccaagttatccaaaatccaaaacgaccttgatcaacaaactatatatgctaatactgcgcaaaacaactatgaacaagaattacagaaacatgcagatgtttctaagacgattagtgaattaagagagcaattacatacgtacaaaggtcaagttaagaccttgaacttatctcgtgatcaattggagaatgctttgaaagaaaacgaaaagagttggtcctcccagaaggaatctttattagaacagttagatttatccaattctcgtattgaggatttatcctcccaaaataaacttttgtatgatcaaatacaaatctacacagctgcggacaaagaagtcaataattctacaaacggacctggtttgaataatattttaattacattacgtcgcgaaagggatattcttgatacaaaagtgacggtggctgaaagagatgcaaaaatgttgagacaaaaaatttctttgatggatgttgaattacaagatgctcgtactaagttggataattctagagttgaaaaggaaaatcattcttccattattcaacagcatgacgacattatggagaaattaaatcaattaaatttattaagagaaagtaacataacattgagaaatgagttagaaaacaacaataacaagaagaaggaattacaatctgaattagataaattgaagcaaaatgttgcgcctatcgagtccgaattgacagccttgaaatattctatgcaagaaaaagagcaagagctcaaattagctaaagaagaggttcatcgttggaaaaagcgctctcaagacatattggagaaacatgaacaattgagcagcagcgattatgagaagttggaaagcgagatagaaaatttgaaggaggaattggaaaataaggagcgtcaaggagcggaagccgaggaaaaatttaacaggttaagaagacaagcgcaagagagattaaaaacaagtaaactctctcaggactctttgactgaacaagtaaatagtttgagggatgcaaagaacgtgttggaaaattccttgagtgaggcaaacgcgagaatcgaagagttacaaaatgcaaaagtagcacaaggtaacaaccagttagaagcaataagaaaattacaagaagacgcagaaaaggcttccagagagcttcaagccaagttagaagaaagtacgacttcttacgaatctacgataaacggcttaaatgaagagattacaacattaaaagaagaaattgaaaaacaaaggcaaatccagcaacagttacaagctacatctgcaaatgaacaaaatgacttatctaacatagttgagtctatgaaaaagtcttttgaagaagataaaatcaaattcatcaaagaaaaaacccaagaagttaatgaaaaaatactcgaggcccaagaaaggttgaatcaaccttccaatatcaatatggaggagattaaaaaaaaatgggaatctgagcacgaacaggaagtatctcaaaagattcgcgaagctgaggaagccctcaaaaagagaatcagattacccactgaggagaaaattaataagataatcgaaagaaagaaggaggaattggaaaaagagtttgaagaaaaggttgaggagagaataaaatctatggaacaatctggagaaatagacgtggtgcttagaaaacagttagaagctaaggttcaagagaaacaaaaggaattggaaaacgagtataacaaaaaattacaagaagaactcaaagatgtaccacacagcagtcatatcagtgatgatgaaagggacaaattaagagcagaaatcgaaagcaggttgagggaggagttcaacaatgaattacaagccataaagaagaaatccttcgacgaaggaaagcaacaagcaatgatgaaaactacccttttggaaagaaaacttgccaagatggaatctcaattgagtgaaacaaaacaaagtgccgagagtcctccgaaatctgttaacaatgtacaaaatccattattaggattacctaggaaaatcgaagagaatagtaattctccattcaatccgttactttccggtgaaaaactcttaaagttgaattctaagtcttcttctggtggatttaacccttttacctctccatccccaaataagcacttacaaaatgataatgacaaaagggagtctttggctaacaagacagatccaccaactcatttggaacccagcttcaacattcccgcctctaggggtttgatatcttcttcttccactttgtctactgatacaaatgatgaagaacttactagcaacaatcctgcccaaaaggattcttccaacagaaatgttcaaagtgaagaggatacagaaaaaaagaaagagggagaacctgttaaaagaggagaggcaatagaagagcagacgaaatccaacaagagacctattgatgaggtaggagagttgaaaaatgatgaagacgacactacagaaaacattaatgagagtaaaaagatcaagactgaagatgaggaagaaaaagaaaccgataaggtgaatgacgagaacagtatatga

SEQ ID NO: 7045 - DNA, 267 bp, Saccharomyces cerevisiae
atgacaagcaaacgggaaaagtcactggatcacacattagaactaaagataccgtttgaaacggagcgacaagcgaccatagcaaccaaagtcctatctccggacccgattttgaagccacaagattttcaagtagactacagttccgagaaaaatgtcatgctagtccagttcagaagcattgatgatagggtgcttcgagtgggagttagcagtatcatagacagtatcaaaaccattgtggaagccatggacgttctatcataa

SEQ ID NO: 7046 - DNA, 267 bp, Artificial Sequence
  Description of Artificial Sequence: Synthetic polynucleotide
atgacaagcaaaagagaaaagtctttagatcacacattagaattgaagataccgtttgaaacggagagacaagcgaccatagcaaccaaagtcttgtctccggacccgattttgaagccacaagattttcaagtagactacagttccgagaaaaatgtcatgcttgtccagttcagaagcattgatgatagggtgcttcgtgtgggagttagcagtatcatagacagtatcaaaaccattgtggaagccatggacgttttatcttga

SEQ ID NO: 7047 - DNA, 3588 bp, Saccharomyces cerevisiae
atgccagaaacctctgttcagaatccattaaggctttctgaaaatgaaaatactcgttcgatgtttctgtctgcatcacagcagcagcggccatctgccactccatccttccctaggttggtacggaataccacagcaaatttgagtttatcagattttcaagtgttaaatccgtcttctaaaaggcaaaattcaaactcggtttacgatgatataaatagcagtaagaggcgaataagtagacctagattttcagatatcgaaggaaaaaataatgaccatacttacccagaaagaacaacagtcaaggaatcagagaaaaatccttctcccagatatgtgagtagttcgaaaagggccctgaaaagggaaaactcagttggaattactcaatcctctgcattgatttcgaaatcatttagtgaaaacggcggaagcattgcacatgagaaatggagcccggaaaatatgataaaaccactgaacgtttcacagaattcgctagctttcgtggatgcagggtcagatgaacagtccaagagtgaaattgtaggcggtttccagcgtaaatctaataatagtcaagaaatcaacgacaaggataacagtgcccgagatcaggatttcaataacagtggcaacaacaacaataataacaatcacagtagcaataacaatgacaataacaataataacaacgacgacaacaacaacaacaataacagcaacagccgtgataataacaataatagtgatgatagtaatgaaagggaagaaaatgattcctgcaagccagcaagtaataagagatcgggcattgctctaatacaaaaattacaagaattgtacaaagtgatagttaagcaagaaattgaattgcaggagcggtgctcacaactaacaaactctcaaaccaccgaactaaaaagcttgtggactatctataaaatcaatacagatcttgttaacaattatgtcacttttatcactacagctttactaccatcccaaccgcctcacgatttggtcatcggccaagaaattgtcgaaatatataggatcgaaagaaggctatgggtttacggcacgataacatttctagacgttctaaagaacttttctaacttcatggatcctgaagtttgctgccaatttatcactcacgtctttgtttcattatcaactatgatttctgacataccgtccaaatattctatcacttggttacaaagactaggagacttatcaagaatggctatagcactatatccctcgagttttatcgattggaaactgagtgctgagcattggtatactgaggcgatgaaatacatatacaatcatggaaagctatattatcatatgtctaccgtacagcaaaacactcttgaagcttttgtaaatttggggaaaagcgtcttttgtcaggaaacattcactccgtctccgcaatatatgcaattggttattgataacatttatcaaagagcctttgtagaaagaaataatggcaatcttagaaactctttattaattgagtatttgaaacatagtgaagccatgctattacccagttttttagaaagtccagatttacaaaatgtcgtgttgagctatttcattgaaaagttcggtatagatgcaaacggttgtaacatttttaacgcagaagatatgtttgttcagaatcctgattttttcaagtatttcttcaggcatggcccctcttttgcacaatcgcatattttacaaattgttggatttggagagccaaaaaacccatttgcaattttatttgaattgccgaagtatttgaaggagaggaaagacaagaaggaacgtaaaaaatcttcaaataatgactcctccgtgacggaaagttcaacgggcaatagccgaaatgacaacgaagatgacgatgaaataatgagttctaccacttccatatctgatcacgatctcttagcagaattcttcaatgacatcgataccttaaggcgtccgatactgccttcaatgctaacaaacgaagcatggttggaaacattaaagtttctaaatatgacctcattaaaatgcggtataatagtgcttcggaagtttctacatgggcctttaggtatcgcattaccccatatcttaccatggatatactttatcatctcaatttgtttgaaaagcagccaattgagtgatccagttagtaaagaattctggatgattattgttaagagagcttttccatgggatacaatggttacctttatgaatgttttgattgtgtatttattggataaccaaacatcgaactctattattggagatttatgcgatgactacgataaattaagcctttctgaacttttagaattattcaatgaaggcgaagaattaccagaaattttgggctgttggggaacattgtggtttgacacaatttgcgaaaagaatacgcattcgattagtagtgaagataattttcaagaaatcggtataaaagattatatggcattggattcgccgacagatggaattatatttgatgaaaaggacgaaaatggtgaaaaattctggaaaagggcatgcagaaccatatttctttttagagagctgtcaagaagttttccaataggcgtaataatcagaaacgatccgttgatatatcgttcatcatttcaaaatactaatatattgggaagtttagtcttcaaactcgaacccttgtgcaatatacacaacaatataccagtattaggtgccctggaaagtattattgacatatctgaggcaagaagtgaaaacaacactgatctgcacgctgtgccggaactaagtgtcaacgagggcgataatatcttccactatgttggctacaagaaacttcgtgccgattatacgtgcttcgataaaaatggagaatttttaagcgcctcgctttacactacatggtatgtcccgaacagcaacaacactaacatagaggacaacatcaattataacagcgaaaaggaaaatgaaggtctatttctggaatgtataaaatctgattatccagaaatagattttaaaactacatactttgtctttgatgcaacttcttggctaagacattccgcacgcatattcaagctagctcaaaacagactgctaagatttgccatttgtttaaccacattccaagagctgagatttttacgaaagtcaaaggacgaaaacgtcatggaggctgccacaagaggtataataactataaggcagctttactatgagaataaagtattacccctaagattcacaggtaatgtagcgacacacatcgaagagaacttagaatttgaagaacaaataacatggaggacacatgtcgacgagtttgtcatcgaatccgtaatgaaggcgcaagaaaaactagagagtgccagcgaaccgcgtctttcccctcgccgctttaactacgtagttctgatatctgacgacgacgccatgaagaaaaaagcagaagaaaaagaaataaaaacgctaagcacacgatttgtgttttctttgtgcacaaaacttggcgaacagcgccatctgtgtacagactga

SEQ ID NO: 7048 - DNA, 3588 bp, Artificial Sequence
  Description of Artificial Sequence: Synthetic polynucleotide
atgccagaaacctctgttcagaatccattaaggctttctgaaaatgaaaatactcgttccatgtttttatctgcatcccagcagcagaggccatctgccactccatccttccctaggttggtaagaaataccacagcaaatttgagtttaagtgattttcaagtgttaaatccgtcttctaaaaggcaaaatagcaactctgtttacgatgatataaatagcagtaagaggagaataagtagacctagattttctgatatcgaaggaaaaaataatgaccatacttacccagaaagaacaacagtcaaggaaagtgagaaaaatccttctcccagatatgtgagtagttctaaaagggccttgaaaagggaaaactctgttggaattactcaatcctctgcattgatttccaaaagttttagtgaaaacggcggaagcattgcacatgagaaatggagcccggaaaatatgataaaaccattgaacgtttctcagaattctttggctttcgtggatgcagggtctgatgaacagtccaagagtgaaattgtaggcggtttccagcgtaaatctaataatagtcaagaaatcaacgacaaggataacagtgccagagatcaggatttcaataacagtggcaacaacaacaataataacaatcacagtagcaataacaatgacaataacaataataacaacgacgacaacaacaacaacaataacagcaacagccgtgataataacaataatagtgatgatagtaatgaaagggaagaaaatgattcctgcaagccagcaagtaataagagaagcggcattgctttaatacaaaaattacaagaattgtacaaagtgatagttaagcaagaaattgaattgcaggagcgttgctctcaattgacaaactctcaaaccaccgaattgaaaagcttgtggactatctataaaatcaatacagatcttgttaacaattatgtcacttttatcactacagctttattaccatcccaaccgcctcacgatttggtcatcggccaagaaattgtcgaaatatataggatcgaaagaaggctttgggtttacggcacgataacatttttggacgttttgaagaacttttctaacttcatggatcctgaagtttgctgccaatttatcactcacgtctttgtttctttatctactatgatttctgacataccgtccaaatattctatcacttggttacaaagattaggagacttatctagaatggctatagcattatatcccagtagttttatcgattggaaattaagtgctgagcattggtatactgaggcgatgaaatacatatacaatcatggaaagctttattatcatatgtctaccgtacagcaaaacactcttgaagcttttgtaaatttggggaaaagcgtcttttgtcaggaaacattcactccgtctccgcaatatatgcaattggttattgataacatttatcaaagagcctttgtagaaagaaataatggcaatcttagaaactctttattaattgagtatttgaaacatagtgaagccatgcttttacccagttttttagaaagtccagatttacaaaatgtcgtgttgagctatttcattgaaaagttcggtatagatgcaaacggttgtaacatttttaacgcagaagatatgtttgttcagaatcctgattttttcaagtatttcttcaggcatggcccctcttttgcacaatctcatattttacaaattgttggatttggagagccaaaaaacccatttgcaattttatttgaattgccgaagtatttgaaggagaggaaagacaagaaggaacgtaaaaaatcttccaataatgactcctccgtgacggaaagttccacgggcaatagcagaaatgacaacgaagatgacgatgaaataatgagttctaccacttccatatctgatcacgatctcttagcagaattcttcaatgacatcgataccttaaggcgtccgatattaccttctatgttaacaaacgaagcatggttggaaacattaaagtttttgaatatgaccagtttaaaatgcggtataatagtgcttagaaagtttttacatgggcctttaggtatcgcattaccccatatcttaccatggatatactttatcatctctatttgtttgaaaagcagccaattgagtgatccagttagtaaagaattctggatgattattgttaagagagcttttccatgggatacaatggttacctttatgaatgttttgattgtgtatttattggataaccaaacaagtaactctattattggagatttatgcgatgactacgataaattaagcctttctgaacttttagaattattcaatgaaggcgaagaattaccagaaattttgggctgttggggaacattgtggtttgacacaatttgcgaaaagaatacgcattctattagtagtgaagataattttcaagaaatcggtataaaagattatatggcattggattctccgacagatggaattatatttgatgaaaaggacgaaaatggtgaaaaattctggaaaagggcatgcagaaccatatttctttttagagagttatctagaagttttccaataggcgtaataatcagaaacgatccgttgatatatcgttcttcttttcaaaatactaatatattgggaagtttagtcttcaaactcgaacccttgtgcaatatacacaacaatataccagtattaggtgccttggaaagtattattgacatatctgaggcaagaagtgaaaacaacactgatttacacgctgtgccggaattaagtgtcaacgagggcgataatatcttccactatgttggctacaagaaacttcgtgccgattatacgtgcttcgataaaaatggagaatttttaagcgcctctctttacactacatggtatgtcccgaacagcaacaacactaacatagaggacaacatcaattataacagcgaaaaggaaaatgaaggtttatttttggaatgtataaaatctgattatccagaaatagattttaaaactacatactttgtctttgatgcaacttcttggttgagacattccgcacgcatattcaagttggctcaaaacagattattaagatttgccatttgtttaaccacattccaagagttaagatttttaagaaagtccaaggacgaaaacgtcatggaggctgccacaagaggtataataactataaggcagctttactatgagaataaagtattacccttgagattcacaggtaatgtagcgacacacatcgaagagaacttagaatttgaagaacaaataacatggaggacacatgtcgacgagtttgtcatcgaatccgtaatgaaggcgcaagaaaaattagagagtgccagcgaaccgcgtctttcccctcgccgctttaactacgtagttttgatatctgacgacgacgccatgaagaaaaaagcagaagaaaaagaaataaaaacgttgagcacaagatttgtgttttctttgtgcacaaaacttggcgaacagcgccatttatgtacagactga

SEQ ID NO: 7049 - DNA, 1650 bp, Saccharomyces cerevisiae
atgtccccttctaaaatgaatgctacagtaggatctacttccgaagttgaacaaaaaatcagacaagaattggctcttagtgacgaagtcaccaccatcagacgcaatgctccagctgccgttttgtatgaagatggtctaaaagaaaataaaactgtcatttcatcaagcggtgcattgatcgcttattccggtgttaaaaccggaagatctccaaaggacaaacgtattgttgaagaacctacctcgaaagacgaaatttggtggggtccggtcaataaaccatgttctgaaagaacatggtctatcaaccgtgaaagagctgcagattacttgagaacaagagaccacatttatattgtcgatgcatttgcaggatgggatccaaaatacagaatcaaagtccgcgttgtttgtgccagggcttaccacgctttattcatgacaaatatgcttattagacctacagaagaagaattagcccattttggagaacctgattttactgtctggaacgctggtcagttcccagccaatttacacacccaggatatgtcttcaaagagtactatagaaattaacttcaaagcaatggaaatgatcattttaggtaccgaatacgccggtgaaatgaaaaaaggtattttcacagttatgttttacttgatgcctgtgcaccataacgttttaactttgcactcttccgccaaccagggtattcaaaacggtgacgttactttattctttggcctaagtggtaccgggaaaaccactttatccgcagacccacatagattgttgatcggcgatgatgaacattgttggtccgaccatggtgtcttcaatatcgaaggtggttgttacgccaagtgtattaatttatctgccgaaaaggagcctgaaattttcgacgctatcaagtttggttctgtattagaaaacgttatctatgacgagaagtcgcatgtagtcgactatgacgactcttctattactgaaaatactagatgtgcctacccaattgactacattccaagtgccaagattccatgtttggcggactctcatccaaagaacattatcctgctaacttgtgatgcttcgggtgttttaccaccagtatctaaattgactcctgaacaagtcatgtaccatttcatctctggttacacttctaaaatggctggtactgagcaaggtgtcactgaacctgaaccaacattttcatcttgtttcggacaacccttcctagccttgcaccctattagatacgcaaccatgttagctacaaagatgtctcaacataaagctaatgcgtacttaatcaacaccggctggactggttcttcctacgtatctggtggtaaacgttgcccattgaagtacacaagggccattctggattctattcatgatggttcgttagccaatgaaacgtacgaaactttaccgattttcaatcttcaagtacctaccaaggttaacggtgttccagctgagcttttgaatcctgctaaaaactggtctcaaggtgaatccaaatacagaggtgcagttaccaacttggccaacttgtttgttcaaaatttcaagatttatcaagacagagccacaccagatgtattagccgctggtcctcaattcgagtaa

SEQ ID NO: 7050 - DNA, 1650 bp, Artificial Sequence
  Description of Artificial Sequence: Synthetic polynucleotide
atgtccccttctaaaatgaatgctacagtaggatctacttccgaagttgaacaaaaaatcagacaagaattggctcttagtgacgaagtcaccaccatcagacgcaatgctccagctgccgttttgtatgaagatggtttgaaagaaaataaaactgtcatttcttctagcggtgcattgatcgcttattccggtgttaaaaccggaagatctccaaaggacaaacgtattgttgaagaacctacctccaaagacgaaatttggtggggtccggtcaataaaccatgttctgaaagaacatggtctatcaaccgtgaaagagctgcagattacttgagaacaagagaccacatttatattgtcgatgcatttgcaggatgggatccaaaatacagaatcaaagtccgcgttgtttgtgccagggcttaccacgctttattcatgacaaatatgcttattagacctacagaagaagaattagcccattttggagaacctgattttactgtctggaacgctggtcagttcccagccaatttacacacccaggatatgtcttccaagagtactatagaaattaacttcaaagcaatggaaatgatcattttaggtaccgaatacgccggtgaaatgaaaaaaggtattttcacagttatgttttacttgatgcctgtgcaccataacgttttaactttgcactcttccgccaaccagggtattcaaaacggtgacgttactttattctttggcttaagtggtaccgggaaaaccactttatccgcagacccacatagattgttgatcggcgatgatgaacattgttggtccgaccatggtgtcttcaatatcgaaggtggttgttacgccaagtgtattaatttatctgccgaaaaggagcctgaaattttcgacgctatcaagtttggttctgtattagaaaacgttatctatgacgagaagagtcatgtagtcgactatgacgactcttctattactgaaaatactagatgtgcctacccaattgactacattccaagtgccaagattccatgtttggcggactctcatccaaagaacattatcttattaacttgtgatgcttctggtgttttaccaccagtatctaaattgactcctgaacaagtcatgtaccatttcatctctggttacacttctaaaatggctggtactgagcaaggtgtcactgaacctgaaccaacattttcttcttgtttcggacaacccttcttggccttgcaccctattagatacgcaaccatgttagctacaaagatgtctcaacataaagctaatgcgtacttaatcaacaccggctggactggttcttcctacgtatctggtggtaaacgttgcccattgaagtacacaagggccattttagattctattcatgatggttctttagccaatgaaacgtacgaaactttaccgattttcaatcttcaagtacctaccaaggttaacggtgttccagctgagcttttgaatcctgctaaaaactggtctcaaggtgaatccaaatacagaggtgcagttaccaacttggccaacttgtttgttcaaaatttcaagatttatcaagacagagccacaccagatgtattagccgctggtcctcaattcgagtga

SEQ ID NO: 7051 - DNA, 2154 bp, Saccharomyces cerevisiae
atgttattaaacccagatcaaattctaaacctagttcgaaaagtatatgaagtagatattaaacagttttattcgcaattacggctaaagaacttaagaggattgttagaccatgctgctcatctgtttaatgtttacctgagggatttagaaatcaatcaggaaatggaagctttgacagcatttattattggttgttattatctgtaccttattattccacaatcgttacaattccaaacaagaaataatctctacagcagttacgcaaagctaaaaaacgactatcaagacgaacacgtgatgggttatgtgttaaaagtggtaagagatgaaagtactgttattgttgaccggtatttagcggagtcaaacggaatttgcaggaccataaaaagaaaaagagcctactccttaccgctacggcctttacctgttcatatggcctctttgtcaatacataacaagtttgatggctcactacatgaaataccgaatgagctaacaaaaccaacaaatgataattcgaaagaggacatagtcagggaaagtaatcagatagcatcaagtaataaattggaagctggttctgaagtggcgtactacacaagcaaagaagcattatcaaaaccctcgtatttaaaactcagtactggaaaggatgcattattcaaaacgctgtctagtccagcaactgctccccccgtgcactccttggaggtttcgtcacaaatcagagattctagccaagattcttcatcctctttatccaaggtggaaaagccaaaggaggaagaaggaaagatcgaggccatagaatcttcggccccgaaagcttacaatctaccagtaattgaagattctaatgatctgttatcagagttatctattactggcctgcaaaatccatgcaatacatgctatattaacagtataattcaatgtctgtttggcactaccttatttcgggatttgtttttaaccaagaaatataggctattcctcaatactaacaaatatccgaaagaagtccaactttcccgctcgatttacgttttgttcaaaaaaatgtatttgaatggaggaagagcgattataccaaatagattcttaaaaatgtgcaagaagttaaggccagatttgaacatcccagatgatcaacaggatacacaggaatttctactaatagttttagcacgaatacatgaagagctctcgaacgaaaatgttgtcaagtattatccagatctagtgtcatatgatgcgaatgctttacaagttaacccatccaaatacgagaaatggtacgagagaaatgttattactgatggtttatctccaattgatcacatatatcgagggcagttggagaacattttgaaatgtcagcgctgtggtaattcttcttatagctattctaccttctatgttctgtcacttgcgattccaaaactatcattgtatagctttacaagtaagtcgagaaaaattaaattagaggattgcataaacttatttacaggcgatgaagaactgtcaggcgacaatgcttgggattgtcctaattgtagaattactgattctaaatccaaaaaagaagaaattactagccagaagaaaaaatcaaccatattcggttttcattccagatcaaggtcaaaatcaccccaccatcatcaccatcatcaccatagcagcgatgattcaacaaaaaatgcaaagaagcgaaattctaaaaagttaaccacgattaagagtttagactttatagttttacctccgatacttgtcattcatttatcaaggttctattatgatttaacaaaaaaaaacagcactgtaataacctaccctttgatattgaacattattttaaagaacggtaaagtgattcgatacaagttatatggaacggtgaatcattccggtaaccttatcaatggacactatacttctgttgtgaacaaagaaaagagccatgaaattggactgaatagacaagtttgggttacatttgatgacgattatatacagcaacatcgcaaggatcgcaacaactttgaagccggcaaaacagaaatgtctagcgatgaggtatacgtcttattctacgaaagaatggatgaagagaactatgaagaagaattctgttaa

SEQ ID NO: 7052 - DNA, 2154 bp, Artificial Sequence
  Description of Artificial Sequence: Synthetic polynucleotide
atgttattaaacccagatcaaattttgaacttggttagaaaagtatatgaagtagatattaaacagttttattctcaattaaggttaaagaacttaagaggattgttagaccatgctgctcatttatttaatgtttacttgagggatttagaaatcaatcaggaaatggaagctttgacagcatttattattggttgttattatttgtaccttattattccacaatctttacaattccaaacaagaaataatctctacagcagttacgcaaagttgaaaaacgactatcaagacgaacacgtgatgggttatgtgttaaaagtggtaagagatgaaagtactgttattgttgacagatatttagcggagagcaacggaatttgcaggaccataaaaagaaaaagagcctactccttaccgttgagacctttacctgttcatatggcctctttgagcatacataacaagtttgatggctccttgcatgaaataccgaatgagttgacaaaaccaacaaatgataattctaaagaggacatagtcagggaaagtaatcagatagcaagtagtaataaattggaagctggttctgaagtggcgtactacacaagcaaagaagcattatccaaaccctcttatttaaaactcagtactggaaaggatgcattattcaaaacgttgtctagtccagcaactgctccccccgtgcactccttggaggtttcttctcaaatcagagattctagccaagattcttcttcctctttatccaaggtggaaaagccaaaggaggaagaaggaaagatcgaggccatagaatcttctgccccgaaagcttacaatttaccagtaattgaagattctaatgatttattatctgagttatctattactggcttacaaaatccatgcaatacatgctatattaacagtataattcaatgtttatttggcactaccttatttagagatttgtttttaaccaagaaatataggttgttcctcaatactaacaaatatccgaaagaagtccaactttcccgctccatttacgttttgttcaaaaaaatgtatttgaatggaggaagagcgattataccaaatagattcttaaaaatgtgcaagaagttaaggccagatttgaacatcccagatgatcaacaggatacacaggaatttttattgatagttttagcaagaatacatgaagagctctccaacgaaaatgttgtcaagtattatccagatttggtgtcttatgatgcgaatgctttacaagttaacccatccaaatacgagaaatggtacgagagaaatgttattactgatggtttatctccaattgatcacatatatagagggcagttggagaacattttgaaatgtcagcgctgtggtaattcttcttatagctattctaccttctatgttttatctcttgcgattccaaaattatctttgtatagctttacaagtaagtctagaaaaattaaattagaggattgcataaacttatttacaggcgatgaagaattaagtggcgacaatgcttgggattgtcctaattgtagaattactgattctaaatccaaaaaagaagaaattactagccagaagaaaaaatctaccatattcggttttcattccagaagtaggtccaaaagtccccaccatcatcaccatcatcaccatagcagcgatgattctacaaaaaatgcaaagaagagaaattctaaaaagttaaccacgattaagagtttagactttatagttttacctccgatacttgtcattcatttatctaggttctattatgatttaacaaaaaaaaacagcactgtaataacctaccctttgatattgaacattattttaaagaacggtaaagtgattagatacaagttatatggaacggtgaatcattccggtaaccttatcaatggacactatacttctgttgtgaacaaagaaaagagccatgaaattggattgaatagacaagtttgggttacatttgatgacgattatatacagcaacatcgcaaggatcgcaacaactttgaagccggcaaaacagaaatgtctagcgatgaggtatacgtcttattctacgaaagaatggatgaagagaactatgaagaagaattctgttga

SEQ ID NO: 7053 - DNA, 2436 bp, Saccharomyces cerevisiae
atgtcgaatataagtaccaaagatatacgaaaaagtaagccaaaaagaggatccggcttcgatttacttgaagtgactgaatcacttggctatcagacacacaggaaaaatggaagaaattcatggtcaaaggacgacgataatatgctacgatcgctagtaaacgaatccgcaaaggagttaggctatgagaatggacttgaagacgtaaaaacaattcaacaatccaaccatctttctaaatgtattgcttgggatgttttagctacacgattcaaacacaccgtaagaacttcaaaggatgtaagaaagcgttggacaggatctctggacccaaacttgaagaaaggtaaatggacacaagaagaggatgagcagctcttgaaagcttatgaagaacatgggcctcactggctgagtatctccatggatatccctggaagaacagaggatcaatgtgcgaaaaggtacattgaagtgttgggacctggaagtaaaggtagattaagagaatggacgctcgaggaagatttaaatctgataagtaaagtgaaggcatacggcacgaaatggagaaagatttcgtcggaaatggaattcagaccaagtttaacgtgcaggaacagatggcggaaaattattactatggttgtgcgaggacaagcatcagaagtaataacaaaggctataaaagaaaacaagaacatagacatgacagacggaaaactccgacaacatccaatcgccgattctgatatacgctcagattctacaccgaataaagaagaacagttgcagctatctcaacagaacaacccttcattgataaagcaggatatattgaatgttaaagagaacgaatcgagcaaactaccaagattaaaggataatgatggacccattttaaatgacagcaagccacaagcattacctcccttaaaagagatatctgcacctccaccaatcaggatgacgcaagtcggtcagactcataccagtggtagcattaggagcaaagtatctttaccaattgaaggtctttctcaaatgaacaagcaaagtcctggaggaatctcagatagcccacagacaagccttcccccagcattcaatccagcatctctcgatgagcatatgatgaatagtaatagtatttcagattctccgaagcatgcttattctactgtgaaaactagagaaccaaattcctctagcacacaatggaaatttacattaaaagatggtcaaggtttgtcaatttctaacggaactattgacagcacaaaattagtaaaagaattggttgaccaagctaagaagtactctttaaaaatttcgatacatcaacatattcacaatcattatgttacatccacagaccatcctgtcagcagcaatactggattgtcaaatataggaaatataaatggaaaccctctattaatggatagtttcccacatatgggtagacaactgggaaatggtcttccagggttaaattcaaatagtgacacttttaacccagaatataggacttctctggacaacatggatagcgattttttatcaagaacacccaactataacgcattcagcttggaagcaacttcacacaatcccgctgacaatgcaaatgaacttggttcacaaagcaatagagaaacaaacagcccgtctgtattttatcctcaagcaaatacattgatcccaactaattctaccgctacaaataatgaaatcattcaaggaaacgttagtgctaatagtatgtcaccgaatttcaatggaacaaatggcaaggcaccaagttcgacggcatcatatacaacgagcggttcagaaatgccacctgatgtaggtcctaatagaatagcgcatttcaactatttgccaccaactatacggcctcatttaggctcatcagatgcgacaagaggtgctgacttgaataagttactcaatccatctccaaattcagtaagaagtaacggcagtaaaactaagaaaaaagaaaaaagaaaaagtgaatcatctcagcatcattcttcatcatctgtgacaaccaataaattcaatcacattgatcagtcggagatatcaaggactacatccagatctgatactccattgagagatgaagacggcctggatttttgggaaacgttaagatccttggctactacgaatccaaatcctccagttgaaaagtcagctgaaaatgatggtgccaagcctcaagtggtacatcaagggattggctcacatacagaagatagcagcctaggttcccatagcggaggatacgatttttttaacgaactgttggataaaaaggcagatacactgcataatgaggctaagaagacgagcgagcatgatatgacgtcaggaggttctaccgataatgggtcagtcctgccactgaatcctagttga

SEQ ID NO: 7054 - DNA, 2436 bp, Artificial Sequence
  Description of Artificial Sequence: Synthetic polynucleotide
atgagtaatataagtaccaaagatataagaaaaagtaagccaaaaagaggatccggcttcgatttacttgaagtgactgaatctcttggctatcagacacacaggaaaaatggaagaaattcttggtccaaggacgacgataatatgttaagatccttagtaaacgaatccgcaaaggagttaggctatgagaatggacttgaagacgtaaaaacaattcaacaatccaaccatctttctaaatgtattgcttgggatgttttagctacaagattcaaacacaccgtaagaacttctaaggatgtaagaaagcgttggacaggatctttggacccaaacttgaagaaaggtaaatggacacaagaagaggatgagcagctcttgaaagcttatgaagaacatgggcctcactggttgagtatctccatggatatccctggaagaacagaggatcaatgtgcgaaaaggtacattgaagtgttgggacctggaagtaaaggtagattaagagaatggacgctcgaggaagatttaaatttgataagtaaagtgaaggcatacggcacgaaatggagaaagatttcttctgaaatggaattcagaccaagtttaacgtgcaggaacagatggagaaaaattattactatggttgtgagaggacaagcatctgaagtaataacaaaggctataaaagaaaacaagaacatagacatgacagacggaaaactcagacaacatccaatcgccgattctgatatacgctctgattctacaccgaataaagaagaacagttgcagctttctcaacagaacaacccttctttgataaagcaggatatattgaatgttaaagagaacgaaagtagcaaattaccaagattaaaggataatgatggacccattttaaatgacagcaagccacaagcattacctcccttaaaagagatatctgcacctccaccaatcaggatgacgcaagtcggtcagactcataccagtggtagcattaggagcaaagtatctttaccaattgaaggtctttctcaaatgaacaagcaaagtcctggaggaatcagtgatagcccacagacaagccttcccccagcattcaatccagcatctctcgatgagcatatgatgaatagtaatagtatttctgattctccgaagcatgcttattctactgtgaaaactagagaaccaaattcctctagcacacaatggaaatttacattaaaagatggtcaaggtttgtctatttctaacggaactattgacagcacaaaattagtaaaagaattggttgaccaagctaagaagtactctttaaaaatttctatacatcaacatattcacaatcattatgttacatccacagaccatcctgtcagcagcaatactggattgagcaatataggaaatataaatggaaaccctttattaatggatagtttcccacatatgggtagacaattaggaaatggtcttccagggttaaatagtaatagtgacacttttaacccagaatataggacttctttggacaacatggatagcgattttttatctagaacacccaactataacgcattcagcttggaagcaacttctcacaatcccgctgacaatgcaaatgaacttggttctcaaagcaatagagaaacaaacagcccgtctgtattttatcctcaagcaaatacattgatcccaactaattctaccgctacaaataatgaaatcattcaaggaaacgttagtgctaatagtatgtctccgaatttcaatggaacaaatggcaaggcaccaagttccacggcaagttatacaacgagcggttctgaaatgccacctgatgtaggtcctaatagaatagcgcatttcaactatttgccaccaactataaggcctcatttaggctcttctgatgcgacaagaggtgctgacttgaataagttactcaatccatctccaaattctgtaagaagtaacggcagtaaaactaagaaaaaagaaaaaagaaaaagtgaaagctctcagcatcattcttcttcttctgtgacaaccaataaattcaatcacattgatcagtctgagatatctaggactacatccagatctgatactccattgagagatgaagacggcttggatttttgggaaacgttaagatccttggctactacgaatccaaatcctccagttgaaaagtctgctgaaaatgatggtgccaagcctcaagtggtacatcaagggattggctctcatacagaagatagcagccttggttcccatagcggaggatacgatttttttaacgaattattggataaaaaggcagatacattgcataatgaggctaagaagacgagcgagcatgatatgacgtctggaggttctaccgataatgggtctgtcttgccattgaatcctagttga

SEQ ID NO: 7055 - DNA, 1068 bp, Saccharomyces cerevisiae
atgactgccagcacatcagttgcggtgggttgtgcggtgggtatacccgtcggtgtaggtattataatagcagtatgtttctggtttaacctacaaaaaagatacaagagggaggaacaagacgatagagaattggaaagggctatttatgatgaaagtggtttcgtgtcctttgacaattttggacccttaagagacagtaaagatgaagcagcactagccagctccgagctaaaaaatcctgatcacacttctggttcatcggaaggatctgctcatccagaagaaaaagatggaaaatcgcgagatcaagagaaaccgttagggaaaaagaatagtaaatactatgtgccagcataccgtaggaaaataaatttacttcaagtacgaaataataactacggcaataatgccaggcagaagtccgttgtggatttaccaagtataaataacagctccaatgtttccttatcatcttcccaacggcatataacaaagagacagatcagcgtttatgatcagatggtccctgttatttctgatgaaggaccaaactttttcgcagatccttccagtgatactaatactagcaatgaccaaaacaaagcttcgatgatagaacttaaacataatactcgccaatctagtaatgaaaatctgataagaaatttgcagaatcaggactttggttcgtattacccaaggagagcttcatcctcgtttttaaatggtaacatttcaaacgcgtccttccatacaaggaattcctctataacatcggtaaataagcgcgatgccctagaggatgtgtttgcaacacccaaaagtgcggctcaatcacagttaccaaacacttttgataaagataacgaaggaatggatgctgaccactcggtaaaggatagcaggtctgcaataacagataaagataaggatttatacaaattacagaataactatgatgtgggcaatatcggggaaattgctgaggaagatcaatacgaaaacgaatttaccaactactcacagagtaagagagagttcatagaaagtctaaggcctaaatag

SEQ ID NO: 7056 - DNA, 1068 bp, Artificial Sequence
  Description of Artificial Sequence: Synthetic polynucleotide
atgactgccagcacatctgttgcggtgggttgtgcggtgggtatacccgtcggtgtaggtattataatagcagtatgtttctggtttaacttacaaaaaagatacaagagggaggaacaagacgatagagaattggaaagggctatttatgatgaaagtggtttcgtgtcctttgacaattttggacccttaagagacagtaaagatgaagcagcattggccagctccgagttgaaaaatcctgatcacacttctggttcttctgaaggatctgctcatccagaagaaaaagatggaaaatctagagatcaagagaaaccgttagggaaaaagaatagtaaatactatgtgccagcataccgtaggaaaataaatttacttcaagtaagaaataataactacggcaataatgccaggcagaagtccgttgtggatttaccaagtataaataacagctccaatgtttccttatcttcttcccaaagacatataacaaagagacagatcagcgtttatgatcagatggtccctgttatttctgatgaaggaccaaactttttcgcagatccttccagtgatactaatactagcaatgaccaaaacaaagcttccatgatagaacttaaacataatactcgccaatctagtaatgaaaatttgataagaaatttgcagaatcaggactttggttcttattacccaaggagagcttcttcctcttttttaaatggtaacatttccaacgcgtccttccatacaaggaattcctctataacatctgtaaataagcgcgatgccttagaggatgtgtttgcaacacccaaaagtgcggctcaatctcagttaccaaacacttttgataaagataacgaaggaatggatgctgaccactctgtaaaggatagcaggtctgcaataacagataaagataaggatttatacaaattacagaataactatgatgtgggcaatatcggggaaattgctgaggaagatcaatacgaaaacgaatttaccaactactctcagagtaagagagagttcatagaaagtttgaggcctaaatga

SEQ ID NO: 7057 - DNA, 1965 bp, Saccharomyces cerevisiae
atgctacagatcaactccaggcttgcagttattgatggatggctggtagacactgtgaagcgaaaaccaataaattttcggagtcctgaagtaagattactgttacccaatgacgatgactacaaaaagctatcacaacaaaacttggtggactggacgcgattaaagaaggattctaattcggtgctcgttggagtgaaatctatggaactatttaaacacataaagctagttttgcgagagtttttcttgttagaagatggaagaataattctgaagaggatcagaagcaaattacgttacaaagttgtcaagaaattaacttgtaaatgctgcaggttatatttaccaaaatggggcaccgtgtacatacatccgatgctaaaagataaagaaaagcccttagcgggggtatgtgaattttcattggatgtaaaccctgatcgggagtatccccttattgagatcaatgttagtcatcaatacattataattgagggcttccttctatacttaaatgaaaggaggctctataggtggaacgataacaatttgaggagtcaggttggcttaacaaaatgggcccatttaagaaaaacttacaatccggtaagccttgacatactttatagtttgaattcaaatttttattttgtaaaggatgatctgctatttcaattattaggaaagagggtatttgttaaattttgtaaagtaatggaaaatggaaaatgcggtaaggctccactgtggtatcgtgtgaagagaacgacaactgccaaagcaacacatattgcatatgccatatcaaattcaacagccccagattcattcaaaagtaaaaataacgattataggtttattgtcagggaaaagccaattgtggagaatactatctccaacctggattattcagacataaaaaaacagcagtttactgaagcagaggttgtaaaaagaaagatctcagcagatatttctcaaatagagaatgtgcatacgcaatttaatagtcaaaaggaaaaaaataatatcagggtgaataaggtttctagcgaggtcctagatcaaatttcgaaatttcctgtgtccagagtcaccttactgttgatgtctgctggtcaagataaaaattatattgaacttgttgaagaattggcaagaaggttggaaaaaatatgcatagaaaaaaccacacaatctttagaagagataagggatacttttcaggcgaatcctgagatgcaggctagctttgataaggaatattaccagagcattgaagaatataaaattacactcgaacttattaaggaagaccttttgattactctgataaaacaaatggaaaatatgtgggcagctgaaaaaaagtttagtacagaggaggagtatgtttcgccgaggtttttagtagcagatggatttctaatcgacctagcagaggaaaaaccgattaacccaaaggatccgcgcttactgacactgctaaaagatcatcagcgtgccatgattgaccaaatgaatttagttaagtggaatgacttcaaaaaatatcaagatcctatcccgctgaaagccaaaaccttatttaaattttgtaaacaaataaagaaaaaattcctacgaggtgcggacttcaagttacatacattacctacagaagcaaatttaaagtatgagccggagcggatgacagttttgtgttcctgtgtccctattcttttggatgaccaaactgtccaatatctgtatgatgacagcattattcctgaatttgaagcaacatcttcatatgcaacaaagcagtcaaagtgtgggcggaaaatgtctttgcaaatggagcctgacctcctttttcaagaggccattagacggatgcgacatttaactgcttatgacgttttgagaagaaactatattgcggcatttgaggagctatatatgggaaactgtaacgattaa

SEQ ID NO: 7058 - DNA, 1965 bp, Artificial Sequence
  Description of Artificial Sequence: Synthetic polynucleotide
atgttacagatcaactccaggcttgcagttattgatggatggttggtagacactgtgaagagaaaaccaataaattttagaagtcctgaagtaagattattattacccaatgacgatgactacaaaaagttatctcaacaaaacttggtggactggacgagattaaagaaggattctaattctgtgctcgttggagtgaaatctatggaattatttaaacacataaagttggttttgagagagtttttcttgttagaagatggaagaataattttgaagaggatcagaagcaaattacgttacaaagttgtcaagaaattaacttgtaaatgctgcaggttatatttaccaaaatggggcaccgtgtacatacatccgatgttgaaagataaagaaaagcccttagcgggggtatgtgaattttctttggatgtaaaccctgatagagagtatccccttattgagatcaatgttagtcatcaatacattataattgagggcttccttttatacttaaatgaaaggaggctctataggtggaacgataacaatttgaggagtcaggttggcttaacaaaatgggcccatttaagaaaaacttacaatccggtaagccttgacatactttatagtttgaatagtaatttttattttgtaaaggatgatttactttttcaattattaggaaagagggtatttgttaaattttgtaaagtaatggaaaatggaaaatgcggtaaggctccattatggtatcgtgtgaagagaacgacaactgccaaagcaacacatattgcatatgccatatccaattctacagccccagattctttcaaaagtaaaaataacgattataggtttattgtcagggaaaagccaattgtggagaatactatctccaaccttgattattctgacataaaaaaacagcagtttactgaagcagaggttgtaaaaagaaagatctctgcagatatttctcaaatagagaatgtgcatacgcaatttaatagtcaaaaggaaaaaaataatatcagggtgaataaggtttctagcgaggtcttggatcaaatttccaaatttcctgtgtccagagtcaccttattattgatgtctgctggtcaagataaaaattatattgaacttgttgaagaattggcaagaaggttggaaaaaatatgcatagaaaaaaccacacaatctttagaagagataagggatacttttcaggcgaatcctgagatgcaggctagctttgataaggaatattaccagagcattgaagaatataaaattacactcgaacttattaaggaagaccttttgattactttgataaaacaaatggaaaatatgtgggcagctgaaaaaaagtttagtacagaggaggagtatgtttctccgaggtttttagtagcagatggatttttgatcgacttggcagaggaaaaaccgattaacccaaaggatccgcgcttattaacattgttgaaagatcatcagcgtgccatgattgaccaaatgaatttagttaagtggaatgacttcaaaaaatatcaagatcctatcccgttaaaagccaaaaccttatttaaattttgtaaacaaataaagaaaaaattcttaagaggtgcggacttcaagttacatacattacctacagaagcaaatttaaagtatgagccggagagaatgacagttttgtgttcctgtgtccctattcttttggatgaccaaactgtccaatatttgtatgatgacagcattattcctgaatttgaagcaacatcttcttatgcaacaaagcagtccaagtgtgggagaaaaatgtctttgcaaatggagcctgacctcctttttcaagaggccattagaagaatgagacatttaactgcttatgacgttttgagaagaaactatattgcggcatttgaggagttgtatatgggaaactgtaacgattga

SEQ ID NO: 7059 - DNA, 3510 bp, Saccharomyces cerevisiae
atgcctgtggctgctcgatatatatttttgaccggcctatttttgctatctgtagctaatgttgctctaggtactacagaggcttgtttgccagctggagagaagaaaaatggtatgactataaacttttaccaatattccttaaaagattcatctacatactcaaatccgtcatatatggcctatggttatgctgatgcagaaaaactgggttctgtaagtgggcaaacaaagctttccatcgattattccatcccatgtaatggcgcatcagatacttgtgcttgttccgatgatgatgctactgaatatagcgcttcccaggttgtaccagtgaagcgtggcgttaaactttgttctgataatacaactctttcttctaaaactgagaaacgtgaaaatgacgattgcgatcaaggcgctgcctactggagttcagatctgttcggattctacacaacacccaccaacgtaaccgtggaaatgacaggttactttttaccaccaaaaactggtacctacacatttggcttcgctactgtggatgattcagcaattttatcggttggaggtaatgttgcctttgaatgttgtaaacaggaacagcctcctatcacatcaacggatttcactattaacggtattaaaccatggaacgcagatgcacctaccgacataaaggggtcaacgtacatgtacgccggttactattacccgatcaaaattgtttattcaaatgctgtatcctggggtacgcttcctgttagtgtggtattgccagatggtactgaggttaatgatgattttgaaggatatgttttttcttttgacgataatgctactcaagctcactgttccgttccaaaccctgctgagcatgcaagaacttgtgtatcatctgcaacatcttcctggtcgtccagtgaagtctgtacagagtgtaccgagaccgagtctaccagttatgtgacaccatatgtcactagctcttcctggtcgtccagtgaagtctgtacagagtgcaccgagaccgagtctactagcacctctactccatatgtcaccagctcttcctcgtcgtccagtgaagtctgtacggagtgcaccgaaactgagtctaccagttatgtgacaccatatgtcagctcgtctactgctgccgcaaactacactagctcattctcatcgtccagtgaagtctgtacagagtgcaccgaaactgagtctactagcacctctactccatatgtcactagctcttcctggtcgtccagtgaagtctgtacagagtgcaccgagaccgagtctaccagttatgtgacaccatatgtcagctcgtctactgctgccgcaaactacactagctcattctcatcgtccagtgaagtctgtacagagtgcaccgaaactgagtctactagcacctctactccatatgtcactagctcttcctcgtcgtccagtgaagtctgtacagagtgcaccgagaccgagtctaccagttatgtgacaccatatgtcagctcgtctactgctgccgcaaactacactagctctttctcatcgtccagtgaagtctgtacagagtgcaccgaaaccgagtctactagcacctctactccatatgtcaccagctcttcctggtcgtccagtgaagtctgtacagagtgcaccgagaccgagtctaccagttatgtgacaccatatgtcagctcgtctactgctgccgcaaactacactagctcattctcatcgtccagtgaagtctgtacagagtgcaccgaaaccgagtctacaagcacatccactccatatgcaacctcatctactggcacagctacttcatttaccgcttcaacttccaataccatgacgtctttggtccaaacagacacaaccgtttctttcagcctatcttcaactgtaagcgagcataccaacgctccaacttcatctgtagagtcaaatgctagtactttcatatcgtcaaataaaggcagcgttaaaagttatgttacgtcatccatacatagcattacgcccatgtatcctagtaaccaaaccgtaacatctagctctgttgtctccacaccaattacttccgaatcttctgaatcctcggcctcagttaccattctaccctcaactatcacttctgaattcaaaccatctacaatgaaaacgaaggtcgttagtatctcctcatcaccaactaatttgattaccagctatgacactacatctaaggattcaactgttggttcatccacatcgtctgtaagcctgatctctagtatttctctaccaagtagttattcagcttctagcgaacaaatatttcacagctccatcgttagttcaaacggtcaagcattaacaagtttttcttcgaccaaagtcagttcctcagaatcttctgaatcacatagaacatcgcccactacatccagtgaatcaggcatcaaatcttcaggcgttgaaatcgaatctacaagtacctcttctttcagctttcacgaaacttctacagcctccacctccgttcaaatatcttctcagtttgtgactccatcctcccctatttccacagttgcccctcgttctacagggctcaatagtcaaactgaaagtacaaattcttccaaggaaaccatgtcgtctgaaaatagcgccagcgttatgccttcttcatcagctacatctcccaaaacaggcaaagttaccagtgatgaaacttcttccggattttctcgtgatcgcaccactgtgtataggatgacttcagaaacaccctccacaaatgaacaaacaactttgattactgtaagttcttgtgaatcaaatagctgctcaaacacagtctcaagtgctgtagtttccacggccaccactaccatcaatgggattaccactgaatatactacatggtgccctctttctgctacggaattaacaacggtaagtaaattagagtcagaagaaaaaaccaccctaattacggttacttcttgtgagtctggtgtctgttccgaaactgcttcacctgctatcgtttcgacagccactgctaccgtcaatgatgtcgttacagtttattccacatggagcccacaggctacaaataaactagcggttagttctgacatcgaaaatagtgccagtaaggcttcattcgtttcagaggctgctgagacaaaatccataagcagaaacaacaattttgttccaacttctgggactacttctattgaaacacatacaaccactacaagcaacgcgtctgaaaatagcgacaatgtttctgcttctgaggctgtcagtagcaaaagtgtcacaaatcccgtgttgattagtgtatctcaacagcctcgtggcacaccagcaagtagtatgataggatctagtacagcctctttagagatgtcaagctacctcggcattgcaaatcatctactaaccaatagtggtattagtattttcattgcctccctattactggcaatcgtttaa

SEQ ID NO: 7060 - DNA, 3510 bp, Artificial Sequence
  Description of Artificial Sequence: Synthetic polynucleotide
atgcctgtggctgctcgttatatatttttgaccggcttatttttgttatctgtagctaatgttgctttgggtactacagaggcttgtttgccagctggagagaagaaaaatggtatgactataaacttttaccaatattccttaaaagattcttctacatactctaatccgagctatatggcctatggttatgctgatgcagaaaaattgggttctgtaagtgggcaaacaaagctttccatcgattattccatcccatgtaatggcgcatctgatacttgtgcttgttccgatgatgatgctactgaatatagcgcttcccaggttgtaccagtgaagcgtggcgttaaactttgttctgataatacaactctttcttctaaaactgagaaacgtgaaaatgacgattgcgatcaaggcgctgcctactggagttctgatcttttcggattctacacaacacccaccaacgtaaccgtggaaatgacaggttactttttaccaccaaaaactggtacctacacatttggcttcgctactgtggatgattctgcaattttaagtgttggaggtaatgttgcctttgaatgttgtaaacaggaacagcctcctatcacaagtacggatttcactattaacggtattaaaccatggaacgcagatgcacctaccgacataaaggggtccacgtacatgtacgccggttactattacccgatcaaaattgtttattctaatgctgtatcctggggtacgcttcctgttagtgtggtattgccagatggtactgaggttaatgatgattttgaaggatatgttttttcttttgacgataatgctactcaagctcactgttccgttccaaaccctgctgagcatgcaagaacttgtgtatcttctgcaacatcttcctggtcttccagtgaagtctgtacagagtgtaccgagaccgagtctaccagttatgtgacaccatatgtcactagctcttcctggtcttccagtgaagtctgtacagagtgcaccgagaccgagtctactagcacctctactccatatgtcaccagctcttcctcttcttccagtgaagtctgtacggagtgcaccgaaactgagtctaccagttatgtgacaccatatgtcagctcttctactgctgccgcaaactacactagctctttctcttcttccagtgaagtctgtacagagtgcaccgaaactgagtctactagcacctctactccatatgtcactagctcttcctggtcttccagtgaagtctgtacagagtgcaccgagaccgagtctaccagttatgtgacaccatatgtcagctcttctactgctgccgcaaactacactagctctttctcttcttccagtgaagtctgtacagagtgcaccgaaactgagtctactagcacctctactccatatgtcactagctcttcctcttcttccagtgaagtctgtacagagtgcaccgagaccgagtctaccagttatgtgacaccatatgtcagctcttctactgctgccgcaaactacactagctctttctcttcttccagtgaagtctgtacagagtgcaccgaaaccgagtctactagcacctctactccatatgtcaccagctcttcctggtcttccagtgaagtctgtacagagtgcaccgagaccgagtctaccagttatgtgacaccatatgtcagctcttctactgctgccgcaaactacactagctctttctcttcttccagtgaagtctgtacagagtgcaccgaaaccgagtctacaagcacatccactccatatgcaacctcttctactggcacagctacttcttttaccgcttccacttccaataccatgacgtctttggtccaaacagacacaaccgtttctttcagcttgtcttctactgtaagcgagcataccaacgctccaacttcttctgtagagagcaatgctagtactttcatatcttccaataaaggcagcgttaaaagttatgttacgtcttccatacatagcattacgcccatgtatcctagtaaccaaaccgtaacatctagctctgttgtctccacaccaattacttccgaatcttctgaatcctctgcctctgttaccattttgccctccactatcacttctgaattcaaaccatctacaatgaaaacgaaggtcgttagtatctcctcttctccaactaatttgattaccagctatgacactacatctaaggattctactgttggttcttccacatcttctgtaagcttaatctctagtatttctttaccaagtagttattctgcttctagcgaacaaatatttcacagctccatcgttagtagtaacggtcaagcattaacaagtttttcttccaccaaagtcagttccagtgaatcttctgaaagtcatagaacatctcccactacatccagtgaaagtggcatcaaatcttctggcgttgaaatcgaatctacaagtacctcttctttcagctttcacgaaacttctacagcctccacctccgttcaaatatcttctcagtttgtgactccatcctcccctatttccacagttgcccctcgttctacagggctcaatagtcaaactgaaagtacaaattcttccaaggaaaccatgtcttctgaaaatagcgccagcgttatgccttcttcttctgctacatctcccaaaacaggcaaagttaccagtgatgaaacttcttccggattttctcgtgatcgcaccactgtgtataggatgacttctgaaacaccctccacaaatgaacaaacaactttgattactgtaagttcttgtgaaagtaatagctgcagcaacacagtctctagtgctgtagtttccacggccaccactaccatcaatgggattaccactgaatatactacatggtgccctctttctgctacggaattaacaacggtaagtaaattagagagtgaagaaaaaaccaccttgattacggttacttcttgtgagtctggtgtctgttccgaaactgcttcccctgctatcgtttctacagccactgctaccgtcaatgatgtcgttacagtttattccacatggagcccacaggctacaaataaattagcggttagttctgacatcgaaaatagtgccagtaaggcttctttcgtttctgaggctgctgagacaaaatccataagcagaaacaacaattttgttccaacttctgggactacttctattgaaacacatacaaccactacaagcaacgcgtctgaaaatagcgacaatgtttctgcttctgaggctgtcagtagcaaaagtgtcacaaatcccgtgttgattagtgtatctcaacagcctcgtggcacaccagcaagtagtatgataggatctagtacagcctctttagagatgtctagctacctcggcattgcaaatcatttattaaccaatagtggtattagtattttcattgcctccttattattggcaatcgtttga

SEQ ID NO: 7061 - DNA, 3657 bp, Saccharomyces cerevisiae
atgataaaaaatggtacatgcccctattgggaacgtgatgatctttcggaatgtgctaggcgagaatatatcgagtttaaatttcctctatttatattgttgactggtatgatatacgcgttttgcaaagtctttcgagccttttatctaagggggaaaaatcatacaaatgaagcgccagaatttgaagaacaaggtaatggaaaccacgaatatgcaaggttctcagttttaagactaaaatctgcatgggaaagccgtagcttttgtaatgttaataatagatctactttcgacaaattcaaaaaatttatagagggtgccttcattgttttgcagcttactatccacctgtatattttatctagtatgccaatggataacaaaaagttctttcaccaaggttttctggttcaaatgtttctctggattttactgcttgttgttattacacttcgtttaatttcagcaagccagtcatttcggtgggttttagcatgtaagcgtgatttatgggctgtttcgttttactcatatgcatccctgtttactctttcgattttacctcttcgttccgtcttcattggaaagataaaagataaaattatggtcaaatatatcatttccgagactttcattgatttagcgcttttattattattatcaacgtcaagtatagaaggaactaggtactcatttttggttgaaaatgagaacaaaaagttgccaccggctcctaccgtctttggccttcttactttttctaggattgatcggcttatttggaaagcatacaaacactgccttggaaacgctgatatttgggatttggatattaataataagtctatagcaattttggcgaactttgaaatgtcttctaaaaaaggaaggctccttccaaacattatttgttattttaaggctgttttcatctcccaattatttctggcttttgtatctagttttttgaactttgtaccctcattgttgatgccaagaatactatcatacgttaatgacccaaagtcaaaatcatggaacttggtgtctttatacgtctcatctatgctcgtcagtaaaatcattgccacgacttgtagaggtcaaggattgtttttaggtgaaaagggtactatgcaactaagaacagttttgatatccaatatctattccaaaaccttaagaagaacaattctaaaagactcaacaacgtcacttcaaaaaaatgcgtcaacatcctttgaagaaaatcctgactcttctgaagcggaacctagaaaaaagtctagtaggaaagacaactctgtgaacaatgttatgtcaattgacgctttcaaggtttctgaagctatgaacactttttatctggcatgtgaagcagttttcatgacagttacggccctaatgatactatattccctactgggatggtccgcctttgctggtacctttgctcttcttgccatgattcctttgaatttttggtgtgcaactttttacgggaactatcaggccgatcaattaatcctaactgacaagcgtacctctgggattagtgaggctctgaactcaatacgtgtaataaagctactggcatgggaaaatctgttttatcaaaagattataaacgtaagagatggggaaataagactccttaaaaagaaggcaacaattttctttttgaaccatctcatttggttctttgggcccactttggtctctgcaataacattctcagtgtttattaaattccaaaatcagacacttactcctacaatagcatttacagctctttctttatttgcaatattgaggacacccatggaccaaattgcttcgactgtcagccttttgatacagtcttttatttctcttgaaagaatccaggattatcttaatgaatcagaaacaagaaaatatgagattttggaacaaagcaatactaaatttggctttgaagatgcaagcatggaatgggaagctgctgaaacaagttttaaacttaagaacatttctattgattttaagctgaatagtctcaacgcaattataggtccgactgggtcaggaaagtcttcgctattacttggactattgggagaattgaaccttctttctggaaaaatatacgtacctacagttgaatcccgcgacgacttagagattggtaaagacggaatgacgaattcaatggcatattgttctcaaactccgtggttgattagtggaacaattaaagataacgttgtttttggagaaatcttcaacaaacaaaaatttgatgatgtaatgaaatcctgttgtcttgacaaagatatcaaagcaatgacagctggcataagaacagacgtgggtgatggaggattttccttatctggcggacagcagcaaaggattgctttagccagagcaatttactcctcttccaggtatttgatccttgatgattgcttgagtgcagtagatcctgaaactgcactttatatatatgaagagtgtttatgcggccccatgatgaaaggaaggacctgcatcattacgagtcataatatttctttagttacgaaacgggctgactggcttgtgattttagatcgtggcgaggtgaaatcacagggtaaaccatcggacctcattaaatctaatgagtttttgagggaaagcataaacaatgattcaaaaaatacaactcacaatcaaattgacttgaaaagatcaacaacatcaaagaaaactaagaatggagatcccgagggagggaactcgcaagacgaagtgtgtgctgaagttgaaaattttgaggaaacaaaaatggaaggatcagttaaattttcagcttacaaatggttagcagactatttcgggggactgggagttgtttttgttttcacctcgtcctccatccttattcatggaatcacactgtctcagggcttttggctcagatactggctggacactggatcttcagggagtaagtctacctggctttatagaatagttgagggtcactctaacatctatttcttactgacttatattatcataggtcttgtttcttcatttttaacttctggtaaagtttggatagcaataatttcaggtaccaacgtcaccaagaaaatatttgcgaagcttctatccagtatcttatatgccaagttacgttttcataatgtcacgccgactggaagaataatgaacagatttagcaaggatatggatattattgatcaacaattgatccctaatttcgaaggactctcttatagcgtcgttgtttgtctgtggattatacttttaattggatatgttactcctcaatttctgttatttgctattcctttatgcgctctttattataccgtatgtacgttatatcttcgtgcatctagagagttgaagagaatagataacatcaatatctctccaatacaccagttattcgctgaagccatcaaaggagtaactacaattagagcattagcagatgagcgtaggtttatcactcaatctttggttgcaattgacagaagtaatgctccatttttttatctcaatatggccaccgagtggatcacatatagagtggatataattgggacacttgttctttttagttcttctgtaatgatcataatgaaggcctcatag

SEQ ID NO: 7062 - DNA, 3657 bp, Artificial Sequence
  Description of Artificial Sequence: Synthetic polynucleotide
atgataaaaaatggtacatgcccctattgggaacgtgatgatctttctgaatgtgctaggagagaatatatcgagtttaaatttcctttatttatattgttgactggtatgatatacgcgttttgcaaagtctttagagccttttatttgagggggaaaaatcatacaaatgaagcgccagaatttgaagaacaaggtaatggaaaccacgaatatgcaaggttctctgttttaagattgaaatctgcatgggaaagccgtagcttttgtaatgttaataatagatctactttcgacaaattcaaaaaatttatagagggtgccttcattgttttgcagcttactatccacttgtatattttatctagtatgccaatggataacaaaaagttctttcaccaaggttttttggttcaaatgtttctctggattttattacttgttgttattacacttcgtttaatttctgcaagccagtcttttagatgggttttagcatgtaagcgtgatttatgggctgtttctttttactcctatgcatccttatttactctttctattttacctcttcgttccgtcttcattggaaagataaaagataaaattatggtcaaatatatcatttccgagactttcattgatttagcgcttttattattattatctacgtccagtatagaaggaactaggtactcttttttggttgaaaatgagaacaaaaagttgccaccggctcctaccgtctttggccttcttactttttctaggattgatagacttatttggaaagcatacaaacactgccttggaaacgctgatatttgggatttggatattaataataagtctatagcaattttggcgaactttgaaatgtcttctaaaaaaggaaggctccttccaaacattatttgttattttaaggctgttttcatctcccaattatttttggcttttgtatctagttttttgaactttgtaccctctttgttgatgccaagaatattatcttacgttaatgacccaaagagtaaaagttggaacttggtgtctttatacgtcagctctatgctcgtcagtaaaatcattgccacgacttgtagaggtcaaggattgtttttaggtgaaaagggtactatgcaattgagaacagttttgatatccaatatctattccaaaaccttaagaagaacaattttgaaagactctacaacgtcccttcaaaaaaatgcgtctacatcctttgaagaaaatcctgactcttctgaagcggaacctagaaaaaagtctagtaggaaagacaactctgtgaacaatgttatgtctattgacgctttcaaggtttctgaagctatgaacactttttatttggcatgtgaagcagttttcatgacagttacggccttgatgatactttattccttattaggatggtccgcctttgctggtacctttgctcttcttgccatgattcctttgaatttttggtgtgcaactttttacgggaactatcaggccgatcaattaatcttgactgacaagcgtacctctgggattagtgaggctttgaacagcatacgtgtaataaagttattggcatgggaaaatttattttatcaaaagattataaacgtaagagatggggaaataagactccttaaaaagaaggcaacaattttctttttgaaccatctcatttggttctttgggcccactttggtctctgcaataacattctctgtgtttattaaattccaaaatcagacacttactcctacaatagcatttacagctctttctttatttgcaatattgaggacacccatggaccaaattgcttccactgtcagccttttgatacagtcttttatttctcttgaaagaatccaggattatcttaatgaaagtgaaacaagaaaatatgagattttggaacaaagcaatactaaatttggctttgaagatgcaagcatggaatgggaagctgctgaaacaagttttaaacttaagaacatttctattgattttaagttgaatagtctcaacgcaattataggtccgactgggtctggaaagtcttctttattacttggattattgggagaattgaaccttctttctggaaaaatatacgtacctacagttgaatcccgcgacgacttagagattggtaaagacggaatgacgaattctatggcatattgttctcaaactccgtggttgattagtggaacaattaaagataacgttgtttttggagaaatcttcaacaaacaaaaatttgatgatgtaatgaaatcctgttgtcttgacaaagatatcaaagcaatgacagctggcataagaacagacgtgggtgatggaggattttccttatctggcggacagcagcaaaggattgctttagccagagcaatttactcctcttccaggtatttgatccttgatgattgcttgagtgcagtagatcctgaaactgcactttatatatatgaagagtgtttatgcggccccatgatgaaaggaaggacctgcatcattacgagtcataatatttctttagttacgaaaagagctgactggcttgtgattttagatcgtggcgaggtgaaatctcagggtaaaccatctgacctcattaaatctaatgagtttttgagggaaagcataaacaatgattctaaaaatacaactcacaatcaaattgacttgaaaagatctacaacatccaagaaaactaagaatggagatcccgagggagggaactctcaagacgaagtgtgtgctgaagttgaaaattttgaggaaacaaaaatggaaggatctgttaaattttctgcttacaaatggttagcagactatttcgggggacttggagttgtttttgttttcacctcttcctccatccttattcatggaatcacattatctcagggcttttggctcagatactggttagacactggatcttctgggagtaagtctacctggctttatagaatagttgagggtcactctaacatctatttcttattaacttatattatcataggtcttgtttcttcttttttaacttctggtaaagtttggatagcaataatttctggtaccaacgtcaccaagaaaatatttgcgaagcttctttccagtatcttatatgccaagttacgttttcataatgtcacgccgactggaagaataatgaacagatttagcaaggatatggatattattgatcaacaattgatccctaatttcgaaggactctcttatagcgtcgttgtttgtttatggattatacttttaattggatatgttactcctcaatttttattatttgctattcctttatgcgctctttattataccgtatgtacgttatatcttcgtgcatctagagagttgaagagaatagataacatcaatatctctccaatacaccagttattcgctgaagccatcaaaggagtaactacaattagagcattagcagatgagcgtaggtttatcactcaatctttggttgcaattgacagaagtaatgctccatttttttatctcaatatggccaccgagtggatcacatatagagtggatataattgggacacttgttctttttagttcttctgtaatgatcataatgaaggccagctga

SEQ ID NO: 7063 - DNA, 921 bp, Saccharomyces cerevisiae
atgagttcagtagagagaataaaagaatatacagatataccttccgaatcaaacggctacatatcacctccagctaattggcctcaaacaggagatgttgaactaaaaaacttatcattgcgctattctcctcattcctctaaggcactagataatgtatcattcaaggtaaaagcaggaacaaaagttggtattgttggtagaacaggggctgggaaatcttctattatagcggctatttaccggctttcagactgggaaaacggtacgattactattgataacaaagacataaaacatatccctttagagcgtttaagaaattctataagctgcatcccacaggatcctactttatttgatggaactgttcgatctaatttagatcctttcgatcggtattctgatgtacaaatttatggcgtactatccaaagtgggattaattgaagaatgcgatgaattgtgcttgatttttgagcaagagcagcctaatttttctagtcataaactaagaaatagattcattgatttgaatactgttgtgaaatcaggtggttcaaacttatctcaagggcaaagacaacttttgtgcttggcacgatccatgcttggtgcacgtaatataatgctaattgacgaagcaaccgcctcaatagattatatttctgatgctaaaattcagaaaactataagagaaacaatgaaaaatacaacaattttgactattgctcatcgattaaggtcagtaatagattatgacaaaattctggtgatggaaatgggcagagtcaaggagtatgatcatccatacactctaatatctgatcgaaataccattttttaccgcctctgtaggcagagtggcgagttcgaaaaccttttcgagttggctaaagtctcattcgataataaaagataa

SEQ ID NO: 7064 - DNA, 921 bp, Artificial Sequence
  Description of Artificial Sequence: Synthetic polynucleotide
atgagttctgtagagagaataaaagaatatacagatataccttccgaatctaacggctacatatctcctccagctaattggcctcaaacaggagatgttgaattgaaaaacttatctttgcgctattctcctcattcctctaaggcattggataatgtatctttcaaggtaaaagcaggaacaaaagttggtattgttggtagaacaggggctgggaaatcttctattatagcggctatttacagactttctgactgggaaaacggtacgattactattgataacaaagacataaaacatatccctttagagcgtttaagaaattctataagctgcatcccacaggatcctactttatttgatggaactgttagatctaatttagatcctttcgatagatattctgatgtacaaatttatggcgtattgtccaaagtgggattaattgaagaatgcgatgaattgtgcttgatttttgagcaagagcagcctaatttttctagtcataaattgagaaatagattcattgatttgaatactgttgtgaaatctggtggttccaacttatctcaagggcaaagacaacttttgtgcttggcaagatccatgcttggtgcacgtaatataatgttgattgacgaagcaaccgcctctatagattatatttctgatgctaaaattcagaaaactataagagaaacaatgaaaaatacaacaattttgactattgctcatagattaaggtctgtaatagattatgacaaaattttggtgatggaaatgggcagagtcaaggagtatgatcatccatacactttgatatctgatagaaataccattttttaccgcctctgtaggcagagtggcgagttcgaaaaccttttcgagttggctaaagtctctttcgataataaaagatga

SEQ ID NO: 7065 - DNA, 1749 bp, Saccharomyces cerevisiae
atggaggaaactaagtactcttcgcagcaggagatagaaggagcatgtggttcagacgcttcattgaatgctagaggtagcaatgattctccaatgggactttccttgtacctctgcctggcttcgttaactcttgtactattcataactgcactggatattttgatagtgggaactattattgacgtggtcgcagaacagttcggaaactactccaaaacaggttggctcgttacaggctacagtttaccaaatgctattctgagtctcatttggggaagattcgcatctatcataggtttccagcatagtctcattttagcaatacttatttttgaagccggatccctaattgctgcccttgcctcttcaatgaatatgctcattttcggtagagttgttgctggtgttgggggaagcggactccaaacgctttgctttgttattggttgtacgatggttggtgaaaggtcacgtccattggtgatttccatcctaagttgtgcatttgctgtagctgctatcgttggtcctataatcggaggtgcctttacaacccatgttacctggaggtggtgcttctatatcaatcttcctatcggtggtcttgccattattatgtttttactcacctataaggccgagaataagggtatacttcaacaaattaaagatgctataggaacaatctcgagctttacttttagtaagttcagacaccaagttaattttaaaagacttatgaatggcataatcttcaagtttgacttctttggttttgccctctgctctgcagggctggtccttttcctactggggctaacctttggtggtaataaatatagttggaactctggccaagtcatcacatatttggttttgggtgtcttactttttattttttcattggtgtacgatttcttcctattcgataaattcaacccggaacctgataatatatcctacaggcctctccttctaagaagattggtagcaaaaccagccataataatagtaaacatggtaacatttctattatgtaccggttacaatgggcaaatgatatactctgtccagtttttccaacttatatttgcgtcgagtgcatggaaagccggtcttcacttgataccaatcgttattaccaacgttattgcggccattgcaagtggtgtgattaccaaaaagctcggtttagttaaaccactcttaatatttggaggcgttcttggggtaattggagcagggcttatgacacttatgacaaatacgtccacgaagtcaactcaaattggtgttttgctattaccggggttttcccttggatttgctctacaagcatcgctcatgagtgcacagcttcaaattaccaaagatcgtccagaagctgctatggactttattgaagtaacagctttcaatacattcatgaagtcattaggtacaactcttggtggtgtgctttcaaccactgttttttccgcctcctttcacaataaagtatcacgagctcatctagagccttacgaaggaaaaacggttgatgacatgattttgtatcgtcttcaaaactacgacggttctcattcgactattggaaacattttaagcgactccattaagaacgtattttggatggatctagggttttatgccttaggatttttgttttgtagtttttcatccaataagaaattaatcataccaaaaaaggacgatacaccagaagataatttagaagacaagtag

SEQ ID NO: 7066 - DNA, 1749 bp, Artificial Sequence
  Description of Artificial Sequence: Synthetic polynucleotide
atggaggaaactaagtactcttctcagcaggagatagaaggagcatgtggttctgacgcttctttgaatgctagaggtagcaatgattctccaatgggactttccttgtacctctgccttgcttctttaactcttgtattattcataactgcattggatattttgatagtgggaactattattgacgtggtcgcagaacagttcggaaactactccaaaacaggttggctcgttacaggctacagtttaccaaatgctattttaagtctcatttggggaagattcgcatctatcataggtttccagcatagtctcattttagcaatacttatttttgaagccggatccttgattgctgcccttgcctcttctatgaatatgctcattttcggtagagttgttgctggtgttgggggaagcggactccaaacgctttgctttgttattggttgtacgatggttggtgaaaggtctcgtccattggtgatttccatcttaagttgtgcatttgctgtagctgctatcgttggtcctataatcggaggtgcctttacaacccatgttacctggaggtggtgcttctatatcaatcttcctatcggtggtcttgccattattatgtttttactcacctataaggccgagaataagggtatacttcaacaaattaaagatgctataggaacaatcagtagctttacttttagtaagttcagacaccaagttaattttaaaagacttatgaatggcataatcttcaagtttgacttctttggttttgccctctgctctgcagggttagtccttttcttattagggttaacctttggtggtaataaatatagttggaactctggccaagtcatcacatatttggttttgggtgtcttactttttattttttctttggtgtacgatttcttccttttcgataaattcaacccggaacctgataatatatcctacaggcctctccttttgagaagattggtagcaaaaccagccataataatagtaaacatggtaacatttttattatgtaccggttacaatgggcaaatgatatactctgtccagtttttccaacttatatttgcgtccagtgcatggaaagccggtcttcacttgataccaatcgttattaccaacgttattgcggccattgcaagtggtgtgattaccaaaaagctcggtttagttaaaccactcttaatatttggaggcgttcttggggtaattggagcagggcttatgacacttatgacaaatacgtccacgaagtctactcaaattggtgttttgttattaccggggttttcccttggatttgctttacaagcaagtctcatgagtgcacagcttcaaattaccaaagatcgtccagaagctgctatggactttattgaagtaacagctttcaatacattcatgaagtctttaggtacaactcttggtggtgtgctttctaccactgttttttccgcctcctttcacaataaagtatctagagctcatttagagccttacgaaggaaaaacggttgatgacatgattttgtatcgtcttcaaaactacgacggttctcattctactattggaaacattttaagcgactccattaagaacgtattttggatggatttagggttttatgccttaggatttttgttttgtagtttttcttccaataagaaattaatcataccaaaaaaggacgatacaccagaagataatttagaagacaagtga

SEQ ID NO: 7067 - DNA, 1848 bp, Saccharomyces cerevisiae
atgagttctagtgttgttggtgcctcaagtaataaaaaaagtggaattaggcagtcctgtgagattattgagcgagaacgtcactcaaacgatgacacgtactctatgacatcgaccttttttaagctcaaagaaaacgaaattatgtctgcacagtttgattccttgaaatataaaattctactgataagtaccgcgtttgtatgtgggtttggaattagtttagactacacacttagatcgacctatacgggctatgcaacgaactcatattcagaacactccttactttcaactgtccaagttatcaatgctgttgtgagtgtcggatcccaagttgtctactctagactctctgaccacttcggaagactaaggctttttttagttgcaactattttttatataatgggaaccatcattcaatcacaggcgacccgtctcaccatgtatgcagcaggatcggttttctataactgtggatacgtcggaacaaatctgctcctgacattaatactctcagatttctcctccttgaaatggagaatgttttaccagtacgcctcatattggccatatatcataataccatggatttcaggcaatattatcacagcagcaaatcctcagaaaaactggtcctggaatattgcaatgtgggcttttatttacccactctctaccttgccaattatatttcttattctttatatgaagtacaaatcttcaaagactgctgagtggagatctctcaaagaacaggctagaaaggaaagaacgggcggattatttgagaatttggtgtttctattctggaaactcgatattgttggcatattattaataactgtgtcgctagggtgtattcttgttcctttgacgttggctaatgagacatcacaaaagtggcacaattcaaaaataattgccactttagtttcaggtggctgtttatttttcatttttttatattgggaggccaaatttgccaaatctcctcttctaccgttcaaattactaagtgatcgtggaatttgggcaccccttggtgttacttttttcaattttttcacctttttcatttcgtgcgactatctgtatcctgttttgctggtatcgatgaaagaatcgtccacttcggctgctcggatagtaaaccttcctgactttgttgctgctactgcatctccattctacagtttgttggtggcaaagacaaggaaactgaaactttctgtaatcggaggttgtgctgcatggatggtgtgcatgggccttttttacaaatacagaggaggatctgggtctcatgaaggtgttatcgctgcatctgttatcatgggtttgagcggtctcctatgcagcaattcagtgatcgtcatactgcaagccatgactacgcatagtaggatggctgtaataaccggcattcagtataccttttcaaagctaggcgctgctatcggtgcctccgtttctggtgccatatggacacaaaccatgcctaaccaactctacaagaaccttggaaacgatacattggcagaaatagcatatgcatcaccttatacattcattagtgattatccttggggctcaccggaaagagatgctgtggttgaatcttacagatatgttcaacgaataataatgacggttggcttggcatgtacggtaccgttctttacgtttacaatgttcatgagaaacccggaactaatagacaaggcgacacacgaagaattcactgaagatggtttggttgtcttgccagatgaggaaaatattttctctcaaatcaaggcactttttagacataatcgaagtaacaagaaatcaggatgttga

SEQ ID NO: 7068 - DNA, 1848 bp, Artificial Sequence
  Description of Artificial Sequence: Synthetic polynucleotide
atgagttctagtgttgttggtgcctccagtaataaaaaaagtggaattaggcagtcctgtgagattattgagagagaacgtcactccaacgatgacacgtactctatgacatctaccttttttaagctcaaagaaaacgaaattatgtctgcacagtttgattccttgaaatataaaattttattgataagtaccgcgtttgtatgtgggtttggaattagtttagactacacacttagatctacctatacgggctatgcaacgaacagttattctgaacactccttactttctactgtccaagttatcaatgctgttgtgagtgtcggatcccaagttgtctactctagactctctgaccacttcggaagattaaggctttttttagttgcaactattttttatataatgggaaccatcattcaatctcaggcgacccgtctcaccatgtatgcagcaggatctgttttctataactgtggatacgtcggaacaaatttactccttacattaatactctctgatttctcctccttgaaatggagaatgttttaccagtacgcctcttattggccatatatcataataccatggatttctggcaatattatcacagcagcaaatcctcagaaaaactggtcctggaatattgcaatgtgggcttttatttacccactctctaccttgccaattatatttcttattctttatatgaagtacaaatcttccaagactgctgagtggagatctctcaaagaacaggctagaaaggaaagaacgggcggattatttgagaatttggtgtttcttttctggaaactcgatattgttggcatattattaataactgtgtctttagggtgtattcttgttcctttgacgttggctaatgagacatctcaaaagtggcacaattctaaaataattgccactttagtttctggtggctgtttatttttcatttttttatattgggaggccaaatttgccaaatctcctcttttgccgttcaaattattaagtgatcgtggaatttgggcaccccttggtgttacttttttcaattttttcacctttttcatttcttgcgactatttgtatcctgttttgttagtatctatgaaagaatcttccactagtgctgctagaatagtaaaccttcctgactttgttgctgctactgcatctccattctacagtttgttggtggcaaagacaaggaaattgaaactttctgtaatcggaggttgtgctgcatggatggtgtgcatgggccttttttacaaatacagaggaggatctgggtctcatgaaggtgttatcgctgcatctgttatcatgggtttgagcggtctcctttgcagcaattctgtgatcgtcatattgcaagccatgactacgcatagtaggatggctgtaataaccggcattcagtataccttttccaagttgggcgctgctatcggtgcctccgtttctggtgccatatggacacaaaccatgcctaaccaactctacaagaaccttggaaacgatacattggcagaaatagcatatgcatctccttatacattcattagtgattatccttggggctctccggaaagagatgctgtggttgaatcttacagatatgttcaaagaataataatgacggttggcttggcatgtacggtaccgttctttacgtttacaatgttcatgagaaacccggaattgatagacaaggcgacacacgaagaattcactgaagatggtttggttgtcttgccagatgaggaaaatattttctctcaaatcaaggcactttttagacataatagaagtaacaagaaaagtggatgttga

SEQ ID NO: 7069 - DNA, 3618 bp, Saccharomyces cerevisiae
atgcgtactttcactgactttgtttctggcgcacctattgtaaggagtcttcagaaaagcaccataaggagatatgggtacaatttggcaccccacatgtttttgttactacacgtagatgagctatcgattttttctgcataccaagcaagtttacctggcgaaaagaaagtcgacacagagcggctgaagcgtgatctatgcccacgtaaacccattgagataaagtacttttcacagatatgtaacgatatgatgaacaaaaaggaccgattgggtgatgttttagctacagcgcaacgtatacgtcgacgatacaacaagaacggttcatcggagcctcgactaaagacgcttgacggactcacttccgagcgctggattcaatggttaggccttgaaagcgactaccattgttcattctctagtactcggaatgcggaagacgtagtggcaggtgaggcggcgagttcagatcatgatcaaaaaatttcaagagtaacgcgaaaaaggccccgagagcccaagagtacaaacgatatcctcgtcgcaggccagaaactctttggcagctcctttgaattcagggacttgcatcagttgcgcttatgtcatgaaatatacatggcagacacaccctctgtggcagtacaggccccaccgggctatggtaagacggagttatttcatctccccttgatagcactggcgtctaagggcgacgtgaaatatgtgtcgtttctgtttgtaccgtacacagtgttgcttgctaattgcatgatcaggttgggccgatgcggttgcttgaatgtggcccctgtaagaaactttattgaagaaggttgcgatggcgttactgatttatacgtggggatctacgatgatcttgctagcactaatttcacagacaggatagctgcgtgggagaatattgttgagtgcacctttaggaccaacaacgtaaaattgggttacctcattgtagatgagtttcacaactttgaaacggaggtctaccggcagtcgcaatttgggggcataactaaccttgattttgacgcttttgagaaagcaatctttttgagcggcacagcacctgaggctgtagctgatgctgcgttgcagcgtattgggcttacgggactggccaagaagtcgatggacatcaacgagctcaaacggtcggaagatctcagcagaggtctatccagctatccaacacggatgtttaatctaatcaaggagaaatccgaggtgcctttagggcatgttcataaaatttggaagaaagtggaatcacagcccgaagaagcactgaagcttcttttagccctctttgaaattgaaccagagtcgaaggccattgtagttgcaagcacaaccaacgaagtggaagaattggcctgctcttggagaaagtattttagggtggtatggatacacgggaagctgggtgctgcagaaaaggtgtctcgcacaaaggagtttgtcactgacggtagcatgcgagttctcatcggaacgaaattagtgactgaaggaattgacattaagcaattgatgatggtgatcatgcttgataatagacttaatattattgagctcattcaaggcgtagggagactaagagatgggggcctctgttatctattatctagaaaaaacagttgggcggcaaggaatcgtaagggtgaattaccaccgattaaggaaggctgtataaccgaacaggtacgcgagttctatggacttgaatcaaagaaaggaaaaaagggccagcatgttggatgctgtggctccaggacagacctgtctgctgacacagtggaactgatagaaagaatggacagattggctgaaaaacaggcgacagcttccatgtcgatcgttgcgttaccgtctagcttccaggagagcaatagcagtgacaggtgcagaaagtattgcagcagtgatgaggacagcaacacgtgcattcatggtagtgctaatgccagtaccaatgcgactaccaactccagcactaatgctactaccactgccagcaccaacgtcaggactagtgctactaccactgccagcatcaacgtcaggactagtgcgactaccactgaaagtaccaactccagcactaatgctactaccactgccagcaccaacgtcaggactagtgctactaccactgccagcatcaacgtcaggactagtgcgactaccactgaaagtaccaactccaacactagtgctactaccaccgaaagtaccgactccaacactagtgctactaccactgaaagtaccgactccagcactaatgctactaccactgccagcatcaacgtcaggactagtgcgactaccactgaaagtaccaactccaacactaatgctactaccactgaaagtaccaactccagcactaatgctactaccactgaaggtaccaactccaacactagtgctactaccactgctagcaccaactccagcactaatgctactaccactgaaagtaccaacgctagtgccaaggaggacgccaataaagatggcaatgctgaggataatagattccatccagtcaccgacattaacaaagagtcgtataagcggaaagggagtcaaatggttttgctagagagaaagaaactgaaagcacaatttcccaatacttccgagaatatgaatgtcttacagtttcttggatttcggtctgacgaaattaaacatcttttcctctatggtattgacgtatacttctgcccagagggagtattcacacaatacggattatgcaagggctgtcaaaagatgttcgagctctgtgtctgttgggctggccagaaagtatcgtatcggaggatggcttgggaagcactagctgtggagagaatgctgcgaaatgacgaggaatacaaagaatacttggaagacatcgagccatatcatggggaccctgtagggtatttgaaattttttagcgtaaaaaggggagagatctactctcagatacagagaaattatgcttggtacctggccattactagaagaagagaaacaattagtgtattggattcgacaagaggcaagcaagggagccaagttttccgcatgtctggaaggcagatcaaagagttgtattataaagtatggagcaacttgcgtgaatcgaagacagaggtgctgcagtactttttgaactgggacgagaaaaagtgccgggaagaatgggaggcaaaagacgatacggtctttgtggaagcgctcgagaaagttggagtttttcagcgtttgcgttccatgacgagcgctggactgcagggtccgcagtacgtcaagctgcagtttagcaggcatcatcgacagttgaggagcagatatgaattaagtctaggaatgcacttgcgagatcagcttgcgctgggagttaccccatctaaagtgccgcattggacggcattcctgtcgatgctgatagggctgttctacaataaaacatttcggcagaaactggaatatcttttggagcagatttcggaggtgtggttgttaccacattgggttgatttggcaaacgttgaagttctcgctgcagataacacgagggtaccatgctga

SEQ ID NO: 7070 - DNA, 3618 bp, Artificial Sequence
  Description of Artificial Sequence: Synthetic polynucleotide
atgcgtactttcactgactttgtttctggcgcacctattgtaaggagtcttcagaaaagcaccataaggagatatgggtacaatttggcaccccacatgtttttgttattacacgtagatgagttatccattttttctgcataccaagcaagtttacctggcgaaaagaaagtcgacacagagaggttaaagcgtgatttatgcccacgtaaacccattgagataaagtacttttcccagatatgtaacgatatgatgaacaaaaaggacagattgggtgatgttttagctacagcgcaacgtatacgtaggcgttacaacaagaacggttcttctgagcctcgtttgaagacgcttgacggactcacttccgagcgctggattcaatggttaggccttgaaagcgactaccattgttctttctctagtactagaaatgcggaagacgtagtggcaggtgaggcggcgagttctgatcatgatcaaaaaatttctagagtaacgagaaaaaggcccagagagcccaagagtacaaacgatatcctcgtcgcaggccagaaactctttggcagctcctttgaattcagggacttgcatcagttgcgcttatgtcatgaaatatacatggcagacacaccctctgtggcagtacaggccccaccgggctatggtaagacggagttatttcatctccccttgatagcattagcgtctaagggcgacgtgaaatatgtgtcctttttgtttgtaccgtacacagtgttgcttgctaattgcatgatcaggttgggccgttgcggttgcttgaatgtggcccctgtaagaaactttattgaagaaggttgcgatggcgttactgatttatacgtggggatctacgatgatcttgctagcactaatttcacagacaggatagctgcgtgggagaatattgttgagtgcacctttaggaccaacaacgtaaaattgggttacctcattgtagatgagtttcacaactttgaaacggaggtctacagacagtctcaatttgggggcataactaaccttgattttgacgcttttgagaaagcaatctttttgagcggcacagcacctgaggctgtagctgatgctgcgttgcagcgtattgggcttacgggattggccaagaagtctatggacatcaacgagctcaaaagaagtgaagatctcagcagaggtttatccagctatccaacaagaatgtttaatttgatcaaggagaaatccgaggtgcctttagggcatgttcataaaatttggaagaaagtggaatctcagcccgaagaagcattgaagcttcttttagccctctttgaaattgaaccagagtctaaggccattgtagttgcaagcacaaccaacgaagtggaagaattggcctgctcttggagaaagtattttagggtggtatggatacacgggaagttgggtgctgcagaaaaggtgtctcgcacaaaggagtttgtcactgacggtagcatgagagttctcatcggaacgaaattagtgactgaaggaattgacattaagcaattgatgatggtgatcatgcttgataatagacttaatattattgagctcattcaaggcgtagggagattgagagatgggggcctctgttatcttttatctagaaaaaacagttgggcggcaaggaatcgtaagggtgaattaccaccgattaaggaaggctgtataaccgaacaggtacgcgagttctatggacttgaatccaagaaaggaaaaaagggccagcatgttggatgctgtggctccaggacagacttgtctgctgacacagtggaattgatagaaagaatggacagattggctgaaaaacaggcgacagcttccatgtccatcgttgcgttaccgtctagcttccaggagagcaatagcagtgacaggtgcagaaagtattgcagcagtgatgaggacagcaacacgtgcattcatggtagtgctaatgccagtaccaatgcgactaccaactccagcactaatgctactaccactgccagcaccaacgtcaggactagtgctactaccactgccagcatcaacgtcaggactagtgcgactaccactgaaagtaccaactccagcactaatgctactaccactgccagcaccaacgtcaggactagtgctactaccactgccagcatcaacgtcaggactagtgcgactaccactgaaagtaccaactccaacactagtgctactaccaccgaaagtaccgactccaacactagtgctactaccactgaaagtaccgactccagcactaatgctactaccactgccagcatcaacgtcaggactagtgcgactaccactgaaagtaccaactccaacactaatgctactaccactgaaagtaccaactccagcactaatgctactaccactgaaggtaccaactccaacactagtgctactaccactgctagcaccaactccagcactaatgctactaccactgaaagtaccaacgctagtgccaaggaggacgccaataaagatggcaatgctgaggataatagattccatccagtcaccgacattaacaaagagtcttataagagaaaagggagtcaaatggttttgttggagagaaagaaattgaaagcacaatttcccaatacttccgagaatatgaatgtcttacagtttcttggatttagatctgacgaaattaaacatcttttcctctatggtattgacgtatacttctgcccagagggagtattcacacaatacggattatgcaagggctgtcaaaagatgttcgagctctgtgtctgttgggctggccagaaagtatcttatagaaggatggcttgggaagcattggctgtggagagaatgttaagaaatgacgaggaatacaaagaatacttggaagacatcgagccatatcatggggaccctgtagggtatttgaaattttttagcgtaaaaaggggagagatctactctcagatacagagaaattatgcttggtacttggccattactagaagaagagaaacaattagtgtattggattctacaagaggcaagcaagggagccaagttttccgcatgtctggaaggcagatcaaagagttgtattataaagtatggagcaacttgcgtgaatccaagacagaggtgttacagtactttttgaactgggacgagaaaaagtgcagagaagaatgggaggcaaaagacgatacggtctttgtggaagcgctcgagaaagttggagtttttcagcgtttgcgttccatgacgagcgctggattacagggtccgcagtacgtcaagttacagtttagcaggcatcatagacagttgaggagcagatatgaattaagtttgggaatgcacttgagagatcagcttgcgttgggagttaccccatctaaagtgccgcattggacggcattcttgtccatgttgatagggcttttctacaataaaacatttagacagaaattagaatatcttttggagcagatttctgaggtgtggttgttaccacattgggttgatttggcaaacgttgaagttctcgctgcagataacacgagggtaccatgctga

SEQ ID NO: 7071 - DNA, 171 bp, Saccharomyces cerevisiae
atgtccctacggccttgtctaacaccatccagcatgcaatacagtgacatatatatacaccacacccacacaccacacccacaccacacccacacccacacacaccacacacccacacactctcttacatctacctttactctcgctgtcacaccttacccggctttctga

SEQ ID NO: 7072 - DNA, 171 bp, Artificial Sequence
  Description of Artificial Sequence: Synthetic polynucleotide
atgtccttgagaccttgtttaacaccatccagcatgcaatacagtgacatatatatacaccacacccacacaccacacccacaccacacccacacccacacacaccacacacccacacactctcttacatctacctttactctcgctgtcacaccttacccggctttctga

SEQ ID NO: 7073 - DNA, 3618 bp, Saccharomyces cerevisiae
atgcgtactttcactgactttgtttctggcgcacctattgtaaggagtcttcagaaaagcaccataaggagatatgggtacaatttggcaccccacatgtttttgttactacacgtagatgagctatcgattttttctgcataccaagcaagtttacctggcgaaaagaaagtcgacacagagcggctgaagcgtgatctatgcccacgtaaacccattgagataaagtacttttcacagatatgtaacgatatgatgaacaaaaaggaccgattgggtgatgttttagctacagcgcaacgtatacgtcgacgatacaacaagaacggttcatcggagcctcgactaaagacgcttgacggactcacttccgagcgctggattcaatggttaggccttgaaagcgactaccattgttcattctctagtactcggaatgcggaagacgtagtggcaggtgaggcggcgagttcagatcatgatcaaaaaatttcaagagtaacgcgaaaaaggccccgagagcccaagagtacaaacgatatcctcgtcgcaggccagaaactctttggcagctcctttgaattcagggacttgcatcagttgcgcttatgtcatgaaatatacatggcagacacaccctctgtggcagtacaggccccaccgggctatggtaagacggagttatttcatctccccttgatagcactggcgtctaagggcgacgtgaaatatgtgtcgtttctgtttgtaccgtacacagtgttgcttgctaattgcatgatcaggttgggccgatgcggttgcttgaatgtggcccctgtaagaaactttattgaagaaggttgcgatggcgttactgatttatacgtggggatctacgatgatcttgctagcactaatttcacagacaggatagctgcgtgggagaatattgttgagtgcacctttaggaccaacaacgtaaaattgggttacctcattgtagatgagtttcacaactttgaaacggaggtctaccggcagtcgcaatttgggggcataactaaccttgattttgacgcttttgagaaagcaatctttttgagcggcacagcacctgaggctgtagctgatgctgcgttgcagcgtattgggcttacgggactggccaagaagtcgatggacatcaacgagctcaaacggtcggaagatctcagcagaggtctatccagctatccaacacggatgtttaatctaatcaaggagaaatccgaggtgcctttagggcatgttcataaaatttggaagaaagtggaatcacagcccgaagaagcactgaagcttcttttagccctctttgaaattgaaccagagtcgaaggccattgtagttgcaagcacaaccaacgaagtggaagaattggcctgctcttggagaaagtattttagggtggtatggatacacgggaagctgggtgctgcagaaaaggtgtctcgcacaaaggagtttgtcactgacggtagcatgcgagttctcatcggaacgaaattagtgactgaaggaattgacattaagcaattgatgatggtgatcatgcttgataatagacttaatattattgagctcattcaaggcgtagggagactaagagatgggggcctctgttatctattatctagaaaaaacagttgggcggcaaggaatcgtaagggtgaattaccaccgattaaggaaggctgtataaccgaacaggtacgcgagttctatggacttgaatcaaagaaaggaaaaaagggccagcatgttggatgctgtggctccaggacagacctgtctgctgacacagtggaactgatagaaagaatggacagattggctgaaaaacaggcgacagcttccatgtcgatcgttgcgttaccgtctagcttccaggagagcaatagcagtgacaggtgcagaaagtattgcagcagtgatgaggacagcaacacgtgcattcatggtagtgctaatgccagtaccaatgcgactaccaactccagcactaatgctactaccactgccagcaccaacgtcaggactagtgctactaccactgccagcatcaacgtcaggactagtgcgactaccactgaaagtaccaactccagcactaatgctactaccactgccagcaccaacgtcaggactagtgctactaccactgccagcatcaacgtcaggactagtgcgactaccactgaaagtaccaactccaacactagtgctactaccaccgaaagtaccgactccaacactagtgctactaccaccgaaagtaccgactccaacactagtgctactaccactgctagcaccaactccagcactaatgccactaccactgctagcaccaactccagcactaatgccactaccactgaaagtaccaacgctagtgccaaggaggacgccaataaagatggcaatgctgaggataatagattccatccagtcaccgacattaacaaagagtcgtataagcggaaagggagtcaaatggttttgctagagagaaagaaactgaaagcacaatttcccaatacttccgagaatatgaatgtcttacagtttcttggatttcggtctgacgaaattaaacatcttttcctctatggtattgacatatacttctgcccagagggagtattcacacaatacggattatgcaagggctgtcaaaagatgttcgggctctgtgtctgttgggctggccagaaagtatcgtatcggaggatggcttgggaagcactagctgtggagagaatgctgcgaaatgacgaggaatacaaagaatacttggaagacatcgagccatatcatggggaccctgtagggtatttgaaattttttagcgtaaaaaggggagagatctactctcagatacagagaaattatgcttggtacctggccattactagaagaagagaaacaattagtgtattggattcgacaagaggcaagcaagggagccaagttttccgcatgtctggaaggcagatcaaagagttgtattataaagtatggagcaacttgcgtgaatcgaagacagaggtgctgcagtactttttgaactgggacgagaaaaagtgccgggaagaatgggaggcaaaagacgatacggtctttgtggaagcgctcgagaaagttggagtttttcagcgtttgcgttccatgacgagcgctggactgcagggtccgcagtacgtcaagctgcagtttagcaggcatcatcgacagttgaggagcagatatgaattaagtctaggaatgcacttgcgagatcagcttgcgctgggagttaccccatctaaagtgccgcattggacggcattcctgtcgatgctgatagggctgttctacaataaaacatttcggcagaaactggaatatcttttggagcagatttcggaggtgtggttgttaccacattgggttgatttggcaaacgttgaagttctcgctgcagataacacgagggtaccgctgtacatgctgatggtagcggttcacaaagagctggatagcgatgatgttccagacggtagatttgatataatattactatgtagagattcgagcagagaagttggagagtga

SEQ ID NO: 7074 - DNA, 3618 bp, Artificial Sequence
  Description of Artificial Sequence: Synthetic polynucleotide
atgcgtactttcactgactttgtttctggcgcacctattgtaaggagtcttcagaaaagcaccataaggagatatgggtacaatttggcaccccacatgtttttgttattacacgtagatgagttatccattttttctgcataccaagcaagtttacctggcgaaaagaaagtcgacacagagaggttaaagcgtgatttatgcccacgtaaacccattgagataaagtacttttcccagatatgtaacgatatgatgaacaaaaaggacagattgggtgatgttttagctacagcgcaacgtatacgtaggcgttacaacaagaacggttcttctgagcctcgtttgaagacgcttgacggactcacttccgagcgctggattcaatggttaggccttgaaagcgactaccattgttctttctctagtactagaaatgcggaagacgtagtggcaggtgaggcggcgagttctgatcatgatcaaaaaatttctagagtaacgagaaaaaggcccagagagcccaagagtacaaacgatatcctcgtcgcaggccagaaactctttggcagctcctttgaattcagggacttgcatcagttgcgcttatgtcatgaaatatacatggcagacacaccctctgtggcagtacaggccccaccgggctatggtaagacggagttatttcatctccccttgatagcattagcgtctaagggcgacgtgaaatatgtgtcctttttgtttgtaccgtacacagtgttgcttgctaattgcatgatcaggttgggccgttgcggttgcttgaatgtggcccctgtaagaaactttattgaagaaggttgcgatggcgttactgatttatacgtggggatctacgatgatcttgctagcactaatttcacagacaggatagctgcgtgggagaatattgttgagtgcacctttaggaccaacaacgtaaaattgggttacctcattgtagatgagtttcacaactttgaaacggaggtctacagacagtctcaatttgggggcataactaaccttgattttgacgcttttgagaaagcaatctttttgagcggcacagcacctgaggctgtagctgatgctgcgttgcagcgtattgggcttacgggattggccaagaagtctatggacatcaacgagctcaaaagaagtgaagatctcagcagaggtttatccagctatccaacaagaatgtttaatttgatcaaggagaaatccgaggtgcctttagggcatgttcataaaatttggaagaaagtggaatctcagcccgaagaagcattgaagcttcttttagccctctttgaaattgaaccagagtctaaggccattgtagttgcaagcacaaccaacgaagtggaagaattggcctgctcttggagaaagtattttagggtggtatggatacacgggaagttgggtgctgcagaaaaggtgtctcgcacaaaggagtttgtcactgacggtagcatgagagttctcatcggaacgaaattagtgactgaaggaattgacattaagcaattgatgatggtgatcatgcttgataatagacttaatattattgagctcattcaaggcgtagggagattgagagatgggggcctctgttatcttttatctagaaaaaacagttgggcggcaaggaatcgtaagggtgaattaccaccgattaaggaaggctgtataaccgaacaggtacgcgagttctatggacttgaatccaagaaaggaaaaaagggccagcatgttggatgctgtggctccaggacagacttgtctgctgacacagtggaattgatagaaagaatggacagattggctgaaaaacaggcgacagcttccatgtccatcgttgcgttaccgtctagcttccaggagagcaatagcagtgacaggtgcagaaagtattgcagcagtgatgaggacagcaacacgtgcattcatggtagtgctaatgccagtaccaatgcgactaccaactccagcactaatgctactaccactgccagcaccaacgtcaggactagtgctactaccactgccagcatcaacgtcaggactagtgcgactaccactgaaagtaccaactccagcactaatgctactaccactgccagcaccaacgtcaggactagtgctactaccactgccagcatcaacgtcaggactagtgcgactaccactgaaagtaccaactccaacactagtgctactaccaccgaaagtaccgactccaacactagtgctactaccaccgaaagtaccgactccaacactagtgctactaccactgctagcaccaactccagcactaatgccactaccactgctagcaccaactccagcactaatgccactaccactgaaagtaccaacgctagtgccaaggaggacgccaataaagatggcaatgctgaggataatagattccatccagtcaccgacattaacaaagagtcttataagagaaaagggagtcaaatggttttgttggagagaaagaaattgaaagcacaatttcccaatacttccgagaatatgaatgtcttacagtttcttggatttagatctgacgaaattaaacatcttttcctctatggtattgacatatacttctgcccagagggagtattcacacaatacggattatgcaagggctgtcaaaagatgttcgggctctgtgtctgttgggctggccagaaagtatcttatagaaggatggcttgggaagcattggctgtggagagaatgttaagaaatgacgaggaatacaaagaatacttggaagacatcgagccatatcatggggaccctgtagggtatttgaaattttttagcgtaaaaaggggagagatctactctcagatacagagaaattatgcttggtacttggccattactagaagaagagaaacaattagtgtattggattctacaagaggcaagcaagggagccaagttttccgcatgtctggaaggcagatcaaagagttgtattataaagtatggagcaacttgcgtgaatccaagacagaggtgttacagtactttttgaactgggacgagaaaaagtgcagagaagaatgggaggcaaaagacgatacggtctttgtggaagcgctcgagaaagttggagtttttcagcgtttgcgttccatgacgagcgctggattacagggtccgcagtacgtcaagttacagtttagcaggcatcatagacagttgaggagcagatatgaattaagtttgggaatgcacttgagagatcagcttgcgttgggagttaccccatctaaagtgccgcattggacggcattcttgtccatgttgatagggcttttctacaataaaacatttagacagaaattagaatatcttttggagcagatttctgaggtgtggttgttaccacattgggttgatttggcaaacgttgaagttctcgctgcagataacacgagggtaccgttgtacatgttaatggtagcggttcacaaagagttagatagcgatgatgttccagacggtagatttgatataatattattatgtagagattctagcagagaagttggagagtga

SEQ ID NO: 7075 - DNA, 363 bp, Saccharomyces cerevisiae
atggtcaaattaacttcaatcgctgctggtgttgccgccatcgctgctactgcttccgcaaccaccactctagctcaatctgacgaaagagtcaacttggttgaattgggtgtctacgtctctgatatcagagctcacttggcccaatactacatgttccaagccgcccacccaactgaaacctacccagtcgaagttgctgaagccgttttcaactacggtgacttcaccaccatgttgactggtattgccccagaccaagtgaccagaatgataaccggtgtcccatggtactccaccagattaaagccagctatctccaaggctctatccaaggacggtatctacactatcgcaaactag

SEQ ID NO: 7076 - DNA, 363 bp, Artificial Sequence
  Description of Artificial Sequence: Synthetic polynucleotide
atggtcaaattaacttctatcgctgctggtgttgccgccatcgctgctactgcttccgcaaccaccactttggctcaatctgacgaaagagtcaacttggttgaattgggtgtctacgtctctgatatcagagctcacttggcccaatactacatgttccaagccgcccacccaactgaaacctacccagtcgaagttgctgaagccgttttcaactacggtgacttcaccaccatgttgactggtattgccccagaccaagtgaccagaatgataaccggtgtcccatggtactccaccagattaaagccagctatctccaaggctttgtccaaggacggtatctacactatcgcaaactga

SEQ ID NO: 7077 - DNA, 1425 bp, Saccharomyces cerevisiae
atgtttagagtcaagatcatctctcagaaacgtacaaaaagtgtacagatgctagaaaacgatcaacttgatattttgggacaacaaccttcgctatacaaactatacactcaaatatgctctatctaccgtgtaccagatccttctgctcatgaccatatcgtaaataccttaacaagaggacttgaaacattggctaaaaatttccagtggctagcaggaaatgtcgtaaatgaaggtgctgacgaaggtaacactggtacctacagaattgtcccgtcagacaaaattccacttatcgtccaagatcttcgagaagatctgtctgccccaacaatggattcgcttgaaaaagctgactttcctatctacatgttagacgaaaagacttttgcgccttgcatgactatcaatccacctggaaacactataggtatggccgccaagagtgggcctgtatttgcagttcaagcaaactttatctccggcggcctcgtcttaactattgtcgggcagcacaatattatggatataacaggacaggaaagtatcatcaacttgctcaataaatcttgccaccaaaaacctttctctgatgaagaactgctcattggaaatatagataaaagcaaatctattcctttgtttgatgaaacttgggaacccgacaccacgctagttcatgaaatagtggaaacctctagaaatacaagtggagaggaaaaggaacagtcttgttcttcgaactctacttgggcttatgttgaattttctgctatctcattgcagaatctgaggattttggcaatgcagacatgtacttctggcacaaaatttgtctccactgatgatatcgtcactgctttcatctggaaatcagtttctcgagcccgtttatctcgacttaaaccagaaacgaaatcaaatttagggcgtgctgtggatgttagaaaacggctaggactccccgaaacgtatccagggttattagtcaacatgacctttaatacaggttccctgaaaagcttggatcataaaagtttgggcgttcttgcatcacagattcgcaggaagctagaccctaaagtcttcgatttggcctataatacatgcgcacttgctacgctccttagccgatgcccggacaagactaaggtttctatacctcaaccaattgatactttatctggaattatggtcagttcgtgggcaaaagtcagcctgtatgacgttgatttcaatctagggcttgggaagcccaagagtgtacgacggccgcgcttcatttcccttgagagcctaatatattttatgcctagatcctccagaggtgaaatggtggttgctctttgccttagagataaagattgggagtgcctgaatgcggataaagaatggacaaattatgctacacatataggatga

SEQ ID NO: 7078 - DNA, 1425 bp, Artificial Sequence
  Description of Artificial Sequence: Synthetic polynucleotide
atgtttagagtcaagatcatctctcagaaacgtacaaaaagtgtacagatgttggaaaacgatcaacttgatattttgggacaacaaccttctttgtacaaactttacactcaaatatgctctatctaccgtgtaccagatccttctgctcatgaccatatcgtaaataccttaacaagaggacttgaaacattggctaaaaatttccagtggttggcaggaaatgtcgtaaatgaaggtgctgacgaaggtaacactggtacctacagaattgtcccgtctgacaaaattccacttatcgtccaagatcttagagaagatttatctgccccaacaatggattctcttgaaaaagctgactttcctatctacatgttagacgaaaagacttttgcgccttgcatgactatcaatccacctggaaacactataggtatggccgccaagagtgggcctgtatttgcagttcaagcaaactttatctccggcggcctcgtcttaactattgtcgggcagcacaatattatggatataacaggacaggaaagtatcatcaacttgctcaataaatcttgccaccaaaaacctttctctgatgaagaattactcattggaaatatagataaaagcaaatctattcctttgtttgatgaaacttgggaacccgacaccacgttagttcatgaaatagtggaaacctctagaaatacaagtggagaggaaaaggaacagtcttgttcttccaactctacttgggcttatgttgaattttctgctatctctttgcagaatttaaggattttggcaatgcagacatgtacttctggcacaaaatttgtctccactgatgatatcgtcactgctttcatctggaaatctgtttctcgtgcccgtttatctaggcttaaaccagaaacgaaatctaatttagggcgtgctgtggatgttagaaaaagattaggactccccgaaacgtatccagggttattagtcaacatgacctttaatacaggttccttgaaaagcttggatcataaaagtttgggcgttcttgcatcccagattcgcaggaagttggaccctaaagtcttcgatttggcctataatacatgcgcacttgctacgctccttagcagatgcccggacaagactaaggtttctatacctcaaccaattgatactttatctggaattatggtcagttcttgggcaaaagtcagcttgtatgacgttgatttcaatttggggcttgggaagcccaagagtgtaaggagaccgcgcttcatttcccttgagagcttgatatattttatgcctagatcctccagaggtgaaatggtggttgctctttgccttagagataaagattgggagtgcttgaatgcggataaagaatggacaaattatgctacacatataggatga

SEQ ID NO: 7079 - DNA, 975 bp, Saccharomyces cerevisiae
atgaagcgcattccaatcaaagaactaatagttgagcaccccggaaaagttcttatccttgatggtggacagggtacagaattggaaaacagaggcattaacataaatagtccggtatggtctgcagctccttttacgagcgaatccttttgggagccatcttctcaagagcgaaaggtggtagaagaaatgtacagagactttatgattgctggcgcaaacatattaatgacaattacttaccaggcaaactttcaaagcatatctgagaatacctcgattaaaactctggctgcttacaagcgttttctcgataaaatcgtgtcatttactcgtgaatttattggtgaggaaaggtacttaatcgggagtattggcccatgggcagcacatgtatcctgtgaatatactggtgactatggtccccatcctgagaatattgattactacggctttttcaaaccccagctggagaacttcaaccaaaatagagatattgatcttattggttttgaaacgattccaaattttcatgagttaaaggctattttatcctgggatgaagatattatttcgaagcccttttatattgggttgtcggtggatgacaatagtttgctacgagacggtaccactttggaagaaatttctgtccatataaaaggcctcggaaataaaattaacaagaatctcttattaatgggagttaactgtgtcagtttcaatcaatcggcattaattcttaaaatgttgcacgagcatctacctggcatgcctctgctagtttacccaaacagtggagaaatctacaatcccaaagagaagacatggcaccggccgactaataagttggatgactgggagaccacggttaagaaattcgttgataatggtgcgcgcattattggcggttgttgtagaacgtctcctaaagatatcgccgaaattgcatcagctgtagataaatactcctaa

SEQ ID NO: 7080 - DNA, 975 bp, Artificial Sequence
  Description of Artificial Sequence: Synthetic polynucleotide
atgaagcgcattccaatcaaagaattgatagttgagcaccccggaaaagttcttatccttgatggtggacagggtacagaattggaaaacagaggcattaacataaatagtccggtatggtctgcagctccttttacgagcgaatccttttgggagccatcttctcaagagagaaaggtggtagaagaaatgtacagagactttatgattgctggcgcaaacatattaatgacaattacttaccaggcaaactttcaaagcatatctgagaatacctctattaaaactttggctgcttacaagcgttttctcgataaaatcgtgtcctttactcgtgaatttattggtgaggaaaggtacttaatcgggagtattggcccatgggcagcacatgtatcctgtgaatatactggtgactatggtccccatcctgagaatattgattactacggctttttcaaaccccagttggagaacttcaaccaaaatagagatattgatcttattggttttgaaacgattccaaattttcatgagttaaaggctattttatcctgggatgaagatattatttccaagcccttttatattgggttgtctgtggatgacaatagtttgttaagagacggtaccactttggaagaaatttctgtccatataaaaggcctcggaaataaaattaacaagaatctcttattaatgggagttaactgtgtcagtttcaatcaaagtgcattaattcttaaaatgttgcacgagcatttacctggcatgcctttattggtttacccaaacagtggagaaatctacaatcccaaagagaagacatggcacaggccgactaataagttggatgactgggagaccacggttaagaaattcgttgataatggtgcgcgcattattggcggttgttgtagaacgtctcctaaagatatcgccgaaattgcatctgctgtagataaatactcctga

SEQ ID NO: 7081 - DNA, 1752 bp, Saccharomyces cerevisiae
atggatgaatttgaatctaccaaactttcgaaggttcagttttccactagcgtgttaagtacgccttcgaatgaaggaaataatctaatacacagattcaagaactctttcaagcgaaatgattcaccagcgatccaagaaggtttgctgtattcggagctttcagaggaagaaaaaatacaatgggacttagccaaccagccgtataaaaaggtcctagatcaaagacacctgaccatgatagccattggaggtactctagggacgggtcttttcattggtttaggggaatcactagcgtccggacctgcttctttgctaattggtttcttgttggtcggcgcatctatgctctgtgttgttcagtgtggggccgaactttcatgtcagtaccctgtttccggctcctatgcgctgcacgccagtagatttatagacccatcagtcggcttcagtataggaattaactacttattgatgtggctcatatcttaccctagcgagctggtaggatgttcgcttaccatctcttattgggcaccatcggtcaatcctgctgcctgggttgcaatcgcgttcgttttaagcatgctattgaatctttttggggcaagaggctttgcagaatcagagttttatatgtcaattttcaaaattgtggctctattcatttttataattattggtattgttctcattgcaggtggtgggcctgattctactggatacatcggcacgaagtattggcacgatccaggctccttcgctgttcctgttttcaaaaacctctgcaatacttttgtttcggcagcatactcctttagtggtacagaaatggttgttttaaccagcactgaagcaaggagtgtttcctcagtctctcgggcagcgaaaggtacgttctggagaattatcatcttttatattgttacagtgattataattggttgcctggtcccttataatgatcctcgtctgattagcggttcatccagtgaggatattactgcttccccgtttgttattgccttgagcaatactggtgctatgggaacaagagtgtctcattttatgaatgcggtcatcttgatagccgtattttctgtttgcaattcctgcgtttacgcatcctctagattgattcagggtttggcgacagcaggccaacttccaaagatctgcgcttacatggacaggaatggtcggcctttagttggcatggctatatgtggcgcttttggattgttaggctttttggttgtttccaagaaccagggtacagttttcacatggttgtttgcgttgtgttccatttcatttttcacaacttggttctgtatttgcttctgtcaagtcagatttaggatggcaatgaaagctcaaggaaggtcaaaggatgacattatctatagatcgacattagggatatacggaggaattttcggctgtatcttaaatgttctattggtaattggagaaatatatgtatcggctgcacccgtgggtagtcccagttctgctgctaatttctttgaatattgtatgagtattcccataatgattgctgtatatattggccatagaatttaccgcagagactggagacactggtacatcaagcggatggatattgacctcgatagcggacattcgttagaggacttcgaagccaccaagcttgagagggatgaggataagaaatacgtttcctctaagccactttactataggatctatcggtttttctgttaa

SEQ ID NO: 7082 - DNA, 1752 bp, Artificial Sequence
  Description of Artificial Sequence: Synthetic polynucleotide
atggatgaatttgaatctaccaaactttccaaggttcagttttccactagcgtgttaagtacgccttccaatgaaggaaataatttgatacacagattcaagaactctttcaagagaaatgattctccagcgatccaagaaggtttgttatattctgagctttctgaggaagaaaaaatacaatgggacttagccaaccagccgtataaaaaggtcttggatcaaagacacttgaccatgatagccattggaggtactttggggacgggtcttttcattggtttaggggaatctttagcgtccggacctgcttctttgttaattggtttcttgttggtcggcgcatctatgctctgtgttgttcagtgtggggccgaactttcctgtcagtaccctgtttccggctcctatgcgttgcacgccagtagatttatagacccaagtgtcggcttcagtataggaattaactacttattgatgtggctcatatcttaccctagcgagttggtaggatgttctcttaccatctcttattgggcaccaagtgtcaatcctgctgcctgggttgcaatcgcgttcgttttaagcatgcttttgaatctttttggggcaagaggctttgcagaaagtgagttttatatgtctattttcaaaattgtggctttattcatttttataattattggtattgttctcattgcaggtggtgggcctgattctactggatacatcggcacgaagtattggcacgatccaggctccttcgctgttcctgttttcaaaaacctctgcaatacttttgtttctgcagcatactcctttagtggtacagaaatggttgttttaaccagcactgaagcaaggagtgtttcctctgtctctagagcagcgaaaggtacgttctggagaattatcatcttttatattgttacagtgattataattggttgcttagtcccttataatgatcctcgtttaattagcggttcttccagtgaggatattactgcttccccgtttgttattgccttgagcaatactggtgctatgggaacaagagtgtctcattttatgaatgcggtcatcttgatagccgtattttctgtttgcaattcctgcgtttacgcatcctctagattgattcagggtttggcgacagcaggccaacttccaaagatctgcgcttacatggacaggaatggtagacctttagttggcatggctatatgtggcgcttttggattgttaggctttttggttgtttccaagaaccagggtacagttttcacatggttgtttgcgttgtgttccatttcctttttcacaacttggttctgtatttgcttctgtcaagtcagatttaggatggcaatgaaagctcaaggaaggtctaaggatgacattatctatagatctacattagggatatacggaggaattttcggctgtatcttaaatgttttattggtaattggagaaatatatgtatccgctgcacccgtgggtagtcccagttctgctgctaatttctttgaatattgtatgagtattcccataatgattgctgtatatattggccatagaatttaccgcagagactggagacactggtacatcaagagaatggatattgacctcgatagcggacattctttagaggacttcgaagccaccaagcttgagagggatgaggataagaaatacgtttcctctaagccactttactataggatctataggtttttctgttga

SEQ ID NO: 7083 - DNA, 702 bp, Saccharomyces cerevisiae
atgaatggcagaggtttcctgatttacaatggaggtgaaaagatgaaacaaaaaatgataatatatgacacacccgcagggccttatccggcccgagtccgcattgccttggctgagaagaacatgctatcaagtgtgcaatttgtgaggatcaacctctggaagggagagcacaagaagcctgaatttcttgccaagaactattcaggcacagtgccagtgcttgaacttgatgacgggactttaatcgctgaatgcacagccattactgaatacattgatgcacttgatggtacacccactcttaccggcaaaacaccgctggaaaaaggcgtaatccacatgatgaacaaacgcgcagagttggaactgctcgaccctgttagtgtttattttcaccatgctacacctggattggggcctgaagtcgagctttaccaaaacaaagagtggggacttcgccagcgcgacaaagccctacatggaatgcattattttgataccgttctcagagaacgcccatatgttgctggtgattcattctcaatggctgacatcacagtaatagctggtctaatatttgctgcaattgtaaaactacaagtgccggaagagtgcgaggcgcttcgagcttggtataagagaatgcaacagcgccccagcgtgaagaaactgctagaaatccgttcaaaatcctcgtaa

SEQ ID NO: 7084 - DNA, 702 bp, Artificial Sequence
  Description of Artificial Sequence: Synthetic polynucleotide
atgaatggcagaggtttcttgatttacaatggaggtgaaaagatgaaacaaaaaatgataatatatgacacacccgcagggccttatccggccagggtccgcattgccttggctgagaagaacatgctttccagtgtgcaatttgtgaggatcaacctctggaagggagagcacaagaagcctgaatttcttgccaagaactattctggcacagtgccagtgcttgaacttgatgacgggactttaatcgctgaatgcacagccattactgaatacattgatgcacttgatggtacacccactcttaccggcaaaacaccgttggaaaaaggcgtaatccacatgatgaacaaacgcgcagagttggaattactcgaccctgttagtgtttattttcaccatgctacacctggattggggcctgaagtcgagctttaccaaaacaaagagtggggacttcgccagcgcgacaaagccttgcatggaatgcattattttgataccgttctcagagaacgcccatatgttgctggtgattctttctccatggctgacatcacagtaatagctggtttgatatttgctgcaattgtaaaattacaagtgccggaagagtgcgaggcgcttagagcttggtataagagaatgcaacagcgccccagcgtgaagaaattattggaaatccgttctaaatccagctga

SEQ ID NO: 7085 - DNA, 1728 bp, Saccharomyces cerevisiae
atgacggaaattgaatttgggcaaccccttcccagcaatctagactatgctgtttcttttggcattcctacatgggattcggcaataggctatgcggaaaaggtgccagaggtaataggcaaaatggctacaggatatccgaggtactttcctcaaccccccgtccagaggctttgtgcttactttgttaagaaatttgggcgaggttcagaaaactgtcgtccttttccatccgttaacctgggtttaaagtgtttcgagtacgtaaaatctgtctcaggacctgaaagtaaagctcaccttgaagtggaaacagttacgattaaaaaccgtggggcaaaaacgtcgaaagaaccggcggaattggtgctaaccattgctgctgtccttgcatcggaggaagagttcgagactgtgaaagagtattggaaattaagaggtgaatgtgtatctagtcgattggcgttgtctgtcaaccaacttcttgactgcgctaatcatggctcagagcaggtattgcgtgagctagaggctggtgtttttgcagcaaagaagggggaggagaaagcaaagaacctgataaagggaaggatagttgagaatcgcttcaggccctttggtttggagaagaaaaccccgaattgggagggactcaacctcaacccaaatgaagacgtttatcttgtatcaagtggcatgtctgcaatatctacggctcgtaatttactcaccttttgggaggagaagaagaattcaggagattcattaaacaagaccacctctgaccaaaagaaaaagccattattatgtgacactgttggcatcttcggcttccctttcaaagatacgcaggtcattatgactaaatttggaaaatgtaaattttttggatttggaaattctagagacgttgtcgaattacaaaagtttttagaaacaagcaaacaacgcattcttgccgttttcgtcgagacaccttcaaatcctctgctgaatatgccggatttgaaaaaattgaggagtttggccgaccagtatggcttttttattgtaattgatgatactattgggggccttaacgttgacatcttgccctatgctgatatagtcagcacgtccctgactaagcttttcaatggtgctagtaatgtaatgggcggctctgtcgttttaaatccgaaatcatctctgtatccatatgctcgtgagtacttcaggagcgctaatttcgaggatttgttatggtgtgaagatgcgatagttttagaacgtaattccagggattttgaagatagaactttacgtgctaatgcaaacacaggaatattgttgaatgatttgcttttacccgaggaggggaaaatatgcaaaaagatttattatccaactgttacttctaaggagacctttgagaactacgaaagtgtacgtaatgaacgtggtggctatggatgcttgttctctgtagcctttttcaatgagggcgatgcaaaagcattctatgactctttaaaggtattcaagggaccttctaatggtactaactttaccttagcatgtccatatgtccatctggcgcaccactcagaattagaagaagtttccaagtttggggccgaccccaacattattagagtaagcgtaggtttagaagatatccagtggttattgaaagttttttcaagtgctttagatgttgtgaaaagcagaggctccaaacactcatga

SEQ ID NO: 7086 - DNA, 1728 bp, Artificial Sequence
  Description of Artificial Sequence: Synthetic polynucleotide
atgacggaaattgaatttgggcaaccccttcccagcaatttggactatgctgtttcttttggcattcctacatgggattctgcaataggctatgcggaaaaggtgccagaggtaataggcaaaatggctacaggatatccgaggtactttcctcaaccccccgtccagaggctttgtgcttactttgttaagaaatttgggagaggttctgaaaactgtcgtccttttccatccgttaacttgggtttaaagtgtttcgagtacgtaaaatctgtcagtggacctgaaagtaaagctcaccttgaagtggaaacagttacgattaaaaaccgtggggcaaaaacgtccaaagaaccggcggaattggtgttgaccattgctgctgtccttgcaagtgaggaagagttcgagactgtgaaagagtattggaaattaagaggtgaatgtgtatctagtagattggcgttgtctgtcaaccaacttcttgactgcgctaatcatggcagtgagcaggtattgcgtgagttagaggctggtgtttttgcagcaaagaagggggaggagaaagcaaagaacttgataaagggaaggatagttgagaatcgcttcaggccctttggtttggagaagaaaaccccgaattgggagggactcaacctcaacccaaatgaagacgtttatcttgtatctagtggcatgtctgcaatatctacggctcgtaatttactcaccttttgggaggagaagaagaattctggagattctttaaacaagaccacctctgaccaaaagaaaaagccattattatgtgacactgttggcatcttcggcttccctttcaaagatacgcaggtcattatgactaaatttggaaaatgtaaattttttggatttggaaattctagagacgttgtcgaattacaaaagtttttagaaacaagcaaacaacgcattcttgccgttttcgtcgagacaccttccaatcctttattgaatatgccggatttgaaaaaattgaggagtttggccgaccagtatggcttttttattgtaattgatgatactattgggggccttaacgttgacatcttgccctatgctgatatagtcagcacgtccttgactaagcttttcaatggtgctagtaatgtaatgggcggctctgtcgttttaaatccgaaatcttctttgtatccatatgctcgtgagtacttcaggagcgctaatttcgaggatttgttatggtgtgaagatgcgatagttttagaacgtaattccagggattttgaagatagaactttacgtgctaatgcaaacacaggaatattgttgaatgatttgcttttacccgaggaggggaaaatatgcaaaaagatttattatccaactgttacttctaaggagacctttgagaactacgaaagtgtacgtaatgaacgtggtggctatggatgcttgttctctgtagcctttttcaatgagggcgatgcaaaagcattctatgactctttaaaggtattcaagggaccttctaatggtactaactttaccttagcatgtccatatgtccatttagcgcaccacagtgaattagaagaagtttccaagtttggggccgaccccaacattattagagtaagcgtaggtttagaagatatccagtggttattgaaagttttttctagtgctttagatgttgtgaaaagcagaggctccaaacactcttga

SEQ ID NO: 7087 - DNA, 1239 bp, Saccharomyces cerevisiae
atgtctcctgcagcagctcaaacagcaatccctcttccatctaccgatttaccagtcaaaatcattacaaatgggttgaaaaacctgaattatacctccaagcaaggttacgggaattttgatacccatttttatgatggccaagatgaggtctctccatctggtttattgaaaatccgtaaatcttatagagagaaatcgaagtatccagattatttgcctacatgggatcctactgaaaagtatggcccgctggaatttcacgaataccatgatcctgctttgagagctgacggtaacttttcaaacctttttgcaaaagaaaacgttggtcaactaaaggtgaagaagatcaccccgaaattaggtctcgagatcaatgggatccagctaactgatctttctgatgctgcaaaagatgaactcgctttgcttgtcgcccaaaagggagtagttgtctttagaaatcagaattttgctgacgagggacccgattatgtgactgaatacggaagacattttggcaagttgcacattcatcaaactagtggccaccctcaaaacaatcctgagctgcatatcactttccgaagacctgatgcggaagaatttgcaagagtttttgatgactcgacatcatctggtggctggcacacagacgtctcttacgagttacagccaccttcttatactttctttagtgttgttgaaggtcctgatggtggtggagatacgttatttgcggatacgatcgaggctttcgacaggttgtcgaagcctttgcaagatttcttgagcacgcttcatgtcatccatagctcaaaggaacaggcagagaattcacagcgccagggcggcataaaaagaagagcacctgtcacgcatattcatccactggtcagagttcatcctgtcttgaaaaagaaatgcttgtatgtcaatcgtgcattttctaggaaaatagtcgaattgaaaagacaagaatctgaatcacttttgaatttcttgtacaatctagtggagagcagccatgatttacagttaagagccaaatgggaacctcattccgtcgtcatttgggataaccgcagagttcaacattcagcagtgattgattgggaagaaccaattcacagacatgcgttcaggattactccacaagcggaaaggcccgtggaagatctaaagtttttgaatgatgaaaattattatccttcttcattaactttggatatttga

SEQ ID NO: 7088 - DNA, 1239 bp, Artificial Sequence
  Description of Artificial Sequence: Synthetic polynucleotide
atgtctcctgcagcagctcaaacagcaatccctcttccatctaccgatttaccagtcaaaatcattacaaatgggttgaaaaacttgaattatacctccaagcaaggttacgggaattttgatacccatttttatgatggccaagatgaggtctctccatctggtttattgaaaatccgtaaatcttatagagagaaatccaagtatccagattatttgcctacatgggatcctactgaaaagtatggcccgttggaatttcacgaataccatgatcctgctttgagagctgacggtaacttttccaacctttttgcaaaagaaaacgttggtcaattgaaggtgaagaagatcaccccgaaattaggtctcgagatcaatgggatccagttgactgatctttctgatgctgcaaaagatgaactcgctttgcttgtcgcccaaaagggagtagttgtctttagaaatcagaattttgctgacgagggacccgattatgtgactgaatacggaagacattttggcaagttgcacattcatcaaactagtggccaccctcaaaacaatcctgagttacatatcactttcagaagacctgatgcggaagaatttgcaagagtttttgatgactctacatcttctggtggctggcacacagacgtctcttacgagttacagccaccttcttatactttctttagtgttgttgaaggtcctgatggtggtggagatacgttatttgcggatacgatcgaggctttcgacaggttgtccaagcctttgcaagatttcttgagcacgcttcatgtcatccatagctctaaggaacaggcagagaattctcagcgccagggcggcataaaaagaagagcacctgtcacgcatattcatccattagtcagagttcatcctgtcttgaaaaagaaatgcttgtatgtcaatcgtgcattttctaggaaaatagtcgaattgaaaagacaagaatctgaatctcttttgaatttcttgtacaatttggtggagagcagccatgatttacagttaagagccaaatgggaacctcattccgtcgtcatttgggataaccgcagagttcaacattctgcagtgattgattgggaagaaccaattcacagacatgcgttcaggattactccacaagcggaaaggcccgtggaagatttgaagtttttgaatgatgaaaattattatccttcttctttaactttggatatttga

SEQ ID NO: 7089 - DNA, 897 bp, Saccharomyces cerevisiae
atgaaagtatttataactggtgcttctggcttcattggttctgccgtattatctgaactaatatcctcgggtcatgaagttgttggcttggcaaggtcagacgaggctgctgcaaagattaagtcgattgatcctgctgcaaaaatccttcgcggtgatctcaaggatctggaaattttgaaaaaaggtgccactgaatctgatggcgttattcatttaggatttgtgcatgattttaaaaattttgaacagtgctgcgaaattgaccgtcaggccactgtagctatgctagagtcacttaaaggttctaacaagcctttcttatatacgaatggtacactttctttgcgaccaaacaaagttgctaacgaacaggatggtattgatgaagattccaaaattttgcgtgctgtcactgaacaggttgccttgagttacaaagacaaaggtgtttcagcaagaattgtcagactcccattctcggttcatggcaagggggacaaggcttttgtaccaatattaatgaatattgccaaagctgccggaaaatctggctatgtcggacaaggcacaaacgcttgggcggctgtacatcgtttggatacggctcctctgttcagacttgttttagagaaaggaaaaacaggacaagtgtatcattgcgttggtgaacaaggtataccattcaaagatattgcgcgtgtgattggagaaattttgaatgttcccgtggcctctatccctgttgatgacgcggaaagtcattttggcttcctcacttgttttgtcactagagatggcccagtttcaagcgaaggtaccagaaaagagctgggatggcagccacaacaaatcggtcttcttgaagatatccgtgcgaactatagcttaaactga

SEQ ID NO: 7090 - DNA, 897 bp, Artificial Sequence
  Description of Artificial Sequence: Synthetic polynucleotide
atgaaagtatttataactggtgcttctggcttcattggttctgccgtattatctgaattgatatccagtggtcatgaagttgttggcttggcaaggagtgacgaggctgctgcaaagattaagtctattgatcctgctgcaaaaatccttcgcggtgatctcaaggatttggaaattttgaaaaaaggtgccactgaatctgatggcgttattcatttaggatttgtgcatgattttaaaaattttgaacagtgctgcgaaattgaccgtcaggccactgtagctatgttagagtctcttaaaggttctaacaagcctttcttatatacgaatggtacactttctttgagaccaaacaaagttgctaacgaacaggatggtattgatgaagattccaaaattttgcgtgctgtcactgaacaggttgccttgagttacaaagacaaaggtgtttctgcaagaattgtcagactcccattctctgttcatggcaagggggacaaggcttttgtaccaatattaatgaatattgccaaagctgccggaaaatctggctatgtcggacaaggcacaaacgcttgggcggctgtacatcgtttggatacggctcctcttttcagacttgttttagagaaaggaaaaacaggacaagtgtatcattgcgttggtgaacaaggtataccattcaaagatattgcgcgtgtgattggagaaattttgaatgttcccgtggcctctatccctgttgatgacgcggaaagtcattttggcttcctcacttgttttgtcactagagatggcccagtttccagcgaaggtaccagaaaagagttaggatggcagccacaacaaatcggtcttcttgaagatatccgtgcgaactatagcttaaactga

SEQ ID NO: 7091 - DNA, 1596 bp, Saccharomyces cerevisiae
atgtcaaaagttgacgtaaaaattggagcagactcgatctcctcttctgatgaaatcctagttccttcgagactcgctgatgttacgctagcattcatggaggagaatgacgcagcagttccagaaatcacgcctgaacaagaaaaaaaattaaagagaaagctttttctcacaatattcacctttgtctctgccattaaccttttactttacatggacaaagccactttatcctatgattcgattctaggcttctttgaagatacaggtcttacccaaaatacttacaatactgtaaatacgctgttttacgttggttttgcaatcggccaatttcctggacaatacttggctcaaaagttaccacttgggaaattcttgggtgggttgttggccacatggactatacttattttcctaagttgtaccgcatacaacttttccggtgtcgttgcgttgagatttttcttggggctaacagagagtgttgttatcccgatattaattaccactatgggtatgttcttcgatgcttcagaaagagctgctgctcagccatttttctttgcagcatgtatggggtctccaattccaactgggtttattgcttatggtgttcttcatataacaaatcccagcatttcgttatggaaaatattcactatcatcattggtggtttgacttttatcatgacggttgttgtaattctgtggtttcctaataatcctgctgatgtgaaattcttttcaatacaagaaagggtatggattatcaggagagttcaggcatccacaggctcttccattgaacaaaaagtcttcaaaaagagtcaattcagagaggcaatgaaagattatataacctggttatttggattgttttttcttcttcaacagttagccaacaatctgccctatcaacagaacctgctatttgaaggaatgggtggagttgatgctctaggttcgacattggtatcagttgccggtgctggtttcgccgtcgtttgtgccttcatcgctacgttgatgttagcaaaatggaaaaatatttcagctttaacagccatcttttggactttaccagcattggtgggatccatcgctgcagctgctttaccatgggacaataagattggtatcttagcaaatatctgtatggcaggacaaatatttggtattccttttattatagctcttagctgggcaagttcaagtgcatctgggtacaccaaaaaactcacaagaagttcggtgtccttatttgcgatgggaattgctaatatcatatcaccacaaatatggagagagaaggactctcctcgctttttacctgcctggattgttcaaatcgttttatcattctctcttgcaccagccattttgttactgatccatttcatactaaaaagaaggaataatcaaagactaaaaaattatgacgaaaatttacaaaattatttggacagaattcaactcattgaaagcgaaaatccttcttccattgaagaagggaaagtggtaacccacgagaacaatttggcagtctttgatttgactgatttagaaaacgaaacttttatatatcctttgtaa

SEQ ID NO: 7092 - DNA, 1596 bp, Artificial Sequence
  Description of Artificial Sequence: Synthetic polynucleotide
atgtccaaagttgacgtaaaaattggagcagactctatctcctcttctgatgaaatcttggttccttccagactcgctgatgttacgttggcattcatggaggagaatgacgcagcagttccagaaatcacgcctgaacaagaaaaaaaattaaagagaaagctttttctcacaatattcacctttgtctctgccattaaccttttactttacatggacaaagccactttatcctatgattctattttgggcttctttgaagatacaggtcttacccaaaatacttacaatactgtaaatacgttgttttacgttggttttgcaatcggccaatttcctggacaatacttggctcaaaagttaccacttgggaaattcttgggtgggttgttggccacatggactatacttattttcttaagttgtaccgcatacaacttttccggtgtcgttgcgttgagatttttcttggggttgacagagagtgttgttatcccgatattaattaccactatgggtatgttcttcgatgcttctgaaagagctgctgctcagccatttttctttgcagcatgtatggggtctccaattccaactgggtttattgcttatggtgttcttcatataacaaatcccagcatttctttatggaaaatattcactatcatcattggtggtttgacttttatcatgacggttgttgtaattttatggtttcctaataatcctgctgatgtgaaattcttttccatacaagaaagggtatggattatcaggagagttcaggcatccacaggctcttccattgaacaaaaagtcttcaaaaagagtcaattcagagaggcaatgaaagattatataacctggttatttggattgttttttcttcttcaacagttagccaacaatttgccctatcaacagaacttactttttgaaggaatgggtggagttgatgctttgggttctacattggtatctgttgccggtgctggtttcgccgtcgtttgtgccttcatcgctacgttgatgttagcaaaatggaaaaatatttctgctttaacagccatcttttggactttaccagcattggtgggatccatcgctgcagctgctttaccatgggacaataagattggtatcttagcaaatatctgtatggcaggacaaatatttggtattccttttattatagctcttagctgggcaagtagtagtgcatctgggtacaccaaaaaactcacaagaagttctgtgtccttatttgcgatgggaattgctaatatcatatctccacaaatatggagagagaaggactctcctcgctttttacctgcctggattgttcaaatcgttttatctttctctcttgcaccagccattttgttattgatccatttcatattgaaaagaaggaataatcaaagattgaaaaattatgacgaaaatttacaaaattatttggacagaattcaactcattgaaagcgaaaatccttcttccattgaagaagggaaagtggtaacccacgagaacaatttggcagtctttgatttgactgatttagaaaacgaaacttttatatatcctttgtga

SEQ ID NO: 7093 - DNA, 2532 bp, Saccharomyces cerevisiae
atgagcattgcatctcagaaaaaggttaagccatcgtttgtttgcttgcggtgtaagcaaaggaaaatcaaatgtgataaactttggcctacttgctccaaatgcaaggcctcatcctcgatttgtagctacgaagtggaaccaggacggattaacaaatctcccactatcgaaaatgccccacatagagacattagaaacattactcctgcatcgatgtccgcaagtggttcctttacttccatacttaatccaagtactaaagactgggaaatgaaaaattttgccatgaatttatcgaatgcacacgacaagcttgttgtaatgaataacacaaccatcgttgatagtccttttgccttccatagcattcttcaacatgatttgtatgcgaaggccttgaccacctgcatacatgagaggatactgattgatgtcgaacgccatcgtgaaaacgtttctgccaacaataaaaaaagagaacttaacttaacaatcggtgatattggacctttgttttttattgataaagctgcacttaaatttattgaaaatacctcaaaaacaagcaaattgtatcctccaatagattttctgtataacacgtatgattatgaacaagcgcatcctgaagaaaataatgataaaatttccataaacatccttttggaagagttatccaaatatttcctcaataagaatgaggttgatggcttaatcgtggacttttacaaaacaatatatccggtctatccgttactggaaatatcattattcgaagataacataagggagctgttgcaattgaatgaatttaatgggtataacattgtatttgcgggcaaagactctagaagaaaactggagacaataacactgctaactatcatattggctttttcttacagacgtttgagtctaagtactagtcattcatttaaagaatcttttggtgtaaaatcgaataatttaacgctactcgctcataaacttcttgctctcatgaacgtttttcaatatgttaatgaacatacactttgttgtctgctctattttttcatattgcggtatttgaatccagatcaagctgacatgtatcctactcacagtgacatactaaacctaaaatttttggagaatgtagcaataaagctaggactgaatgaagaacccttccaatacactcgatacgtcagcgaatcggacgattatccaagattattcaatttaagaaggaaattatggcttggcgtgcaatttttgaagtttggaatattgattccagaaggagattctgacattctaagtttggaatatttaagatcctttatgaaaactgacgaatctctaccagaactatttgagagaaattacgcttctactaataatctagacttatcgttgatggctacagcagagaatatctatcatttacatttatctttacaggtattactgacttcttgttttccaataaatggcccttcctacttgaaggaagtattggataacatcgacaagacaaaagattttttaaatcagaaattccctctcattttaagttctcttggagaaccaaggatgaagagcttacatatcaatgttccctcttccttagcaaatgaagaatcttttgactttagcacttttgaggaaaatgaaacattcatagctaatgtgattagctacacttgtacaatgaacatctatgatagcttatctttgcattttgaaaatcaatgtttcaaaaacgctttggagtacaaaacatattatcaccgctttacttttaccgctatacaagattatttaacgttgctaaaattaatctcggaatactttaatggatctcttctgcatttacgggaaccttttgggtttgccactcagaaagttgttcgcttttcgatacatcgattactcatattccaggccaccttgctcgtgagattattttataagaaggatacatgcgacagatcctctgcagccatgggaatgttgaatgatagaaacggaagacttagtcgagtcattgaaaaaatgatcaagttgatgtcatatcatatgaaattacttgtagaaattgttatctcgaaactggaaaagagttatctcggttcgttcatttctgtctctattttcaggtatatcatttatttggtggatactgacgcgctgtctgcgtttatatccgactactggaagagtgacgccgttatggatgaaagatattcaagaatccataggattgtcggtttaaaatggggtatgggaagggataagtccttttcgttcacatcaaaattaaacaatccacaattcttgggaagtcttgatttggagattttggaagaattagaaaaactcatttccgcacaagaattttccagaaacttcactgaagatgttgacgaatctttacagagtgaaattgacctcatgaattatgacaatgaagccttgaatcaactaatggcaattgatcttgataagctacttggaattttccctaacctgagtaacttttga

SEQ ID NO: 7094 - DNA, 2532 bp, Artificial Sequence
  Description of Artificial Sequence: Synthetic polynucleotide
atgagcattgcatctcagaaaaaggttaagccatcttttgtttgcttgagatgtaagcaaaggaaaatcaaatgtgataaactttggcctacttgctccaaatgcaaggcctcttccagtatttgtagctacgaagtggaaccaggaagaattaacaaatctcccactatcgaaaatgccccacatagagacattagaaacattactcctgcatctatgtccgcaagtggttcctttacttccatacttaatccaagtactaaagactgggaaatgaaaaattttgccatgaatttatccaatgcacacgacaagcttgttgtaatgaataacacaaccatcgttgatagtccttttgccttccatagcattcttcaacatgatttgtatgcgaaggccttgaccacctgcatacatgagaggatattgattgatgtcgaacgccatcgtgaaaacgtttctgccaacaataaaaaaagagaacttaacttaacaatcggtgatattggacctttgttttttattgataaagctgcacttaaatttattgaaaatacctccaaaacaagcaaattgtatcctccaatagattttttatataacacgtatgattatgaacaagcgcatcctgaagaaaataatgataaaatttccataaacatccttttggaagagttatccaaatatttcctcaataagaatgaggttgatggcttaatcgtggacttttacaaaacaatatatccggtctatccgttattggaaatatctttattcgaagataacataagggagttattgcaattgaatgaatttaatgggtataacattgtatttgcgggcaaagactctagaagaaaattagagacaataacattgttgactatcatattggctttttcttacagacgtttgagtttaagtactagtcattcttttaaagaatcttttggtgtaaaatctaataatttaacgcttctcgctcataaacttcttgctctcatgaacgtttttcaatatgttaatgaacatacactttgttgtttactctattttttcatattgagatatttgaatccagatcaagctgacatgtatcctactcacagtgacatattaaacttgaaatttttggagaatgtagcaataaagttgggattgaatgaagaacccttccaatacactcgttacgtcagcgaaagtgacgattatccaagattattcaatttaagaaggaaattatggcttggcgtgcaatttttgaagtttggaatattgattccagaaggagattctgacattttaagtttggaatatttaagatcctttatgaaaactgacgaatctttaccagaattatttgagagaaattacgcttctactaataatttggacttatctttgatggctacagcagagaatatctatcatttacatttatctttacaggtattattaacttcttgttttccaataaatggcccttcctacttgaaggaagtattggataacatcgacaagacaaaagattttttaaatcagaaattccctctcattttaagttctcttggagaaccaaggatgaagagcttacatatcaatgttccctcttccttagcaaatgaagaatcttttgactttagcacttttgaggaaaatgaaacattcatagctaatgtgattagctacacttgtacaatgaacatctatgatagcttatctttgcattttgaaaatcaatgtttcaaaaacgctttggagtacaaaacatattatcaccgctttacttttaccgctatacaagattatttaacgttgttgaaattaatcagtgaatactttaatggatctcttttacatttaagagaaccttttgggtttgccactcagaaagttgttcgcttttccatacatagattactcatattccaggccaccttgctcgtgagattattttataagaaggatacatgcgacagatcctctgcagccatgggaatgttgaatgatagaaacggaagacttagtagggtcattgaaaaaatgatcaagttgatgtcttatcatatgaaattacttgtagaaattgttatctccaaattagaaaagagttatctcggttctttcatttctgtctctattttcaggtatatcatttatttggtggatactgacgcgctttctgcgtttatatccgactactggaagagtgacgccgttatggatgaaagatattctagaatccataggattgtcggtttaaaatggggtatgggaagggataagtccttttctttcacaagtaaattaaacaatccacaattcttgggaagtcttgatttggagattttggaagaattagaaaaactcatttccgcacaagaattttccagaaacttcactgaagatgttgacgaatctttacagagtgaaattgacctcatgaattatgacaatgaagccttgaatcaattgatggcaattgatcttgataagcttcttggaattttccctaacttgagtaacttttga

SEQ ID NO: 7095 - DNA, 459 bp, Saccharomyces cerevisiae
atgtggtttcctcagatcattgctgggatggctgctggtggtgccgctagtgctatgactccaggcaaggttctctttactaatgctttgggtttaggctgttccagatctagggggttgtttttggaaatgtttggtactgctgtgttgtgtttaacagttttgatgactgctgttgaaaaacgtgaaactaactttatggctgcgcttccaattggtatttctttattcatggctcacatggctttgaccggttacactggtaccggtgtcaaccctgcaagatctctgggtgccgccgttgctgccagatatttccctcattaccactggatctactggattagcccacttttgggtgccttcttagcctggtcagtgtggcaattattacaaatccttgattacactacatacgttaatgccgaaaaggcggcaggtcaaaagaaggaagactga

SEQ ID NO: 7096 - DNA, 459 bp, Artificial Sequence
  Description of Artificial Sequence: Synthetic polynucleotide
atgtggtttcctcagatcattgctgggatggctgctggtggtgccgctagtgctatgactccaggcaaggttctctttactaatgctttgggtttaggctgttccagatctagggggttgtttttggaaatgtttggtactgctgtgttgtgtttaacagttttgatgactgctgttgaaaaacgtgaaactaactttatggctgcgcttccaattggtatttctttattcatggctcacatggctttgaccggttacactggtaccggtgtcaaccctgcaagatctttgggtgccgccgttgctgccagatatttccctcattaccactggatctactggattagcccacttttgggtgccttcttagcctggtctgtgtggcaattattacaaatccttgattacactacatacgttaatgccgaaaaggcggcaggtcaaaagaaggaagactga

SEQ ID NO: 7097 - DNA, 450 bp, Saccharomyces cerevisiae
atgtctaacgaatctaacgaccttgaaaaaaacatttcgcacttggacccgaccggtgttgacaatgcttatattccacctgaacagccggaaacgaagcattcgcgttttaatattgacagagataccttaagaaaccactttatcgctgctgtgggtgagttttgcggtaccttcatgtttttatggtgtgcttacgtcatttgtaatgtcgctaaccatgatgtggctttgacaaccgagcctgagggctctcatccaggtcaattgatcatgattgcccttggtttcggtttctctgtgatgttttctatctggtgtttctggtggggctttgaacccagccgtttctctctctttgtgtttggccagagccatctcaccagccagatgtgtagtgatgtggtttcctcagatcattgctgggatggctgctggtggtgccgctag

SEQ ID NO: 7098 - DNA, 450 bp, Artificial Sequence
  Description of Artificial Sequence: Synthetic polynucleotide
atgtctaacgaatctaacgaccttgaaaaaaacatttctcacttggacccgaccggtgttgacaatgcttatattccacctgaacagccggaaacgaagcattctcgttttaatattgacagagataccttaagaaaccactttatcgctgctgtgggtgagttttgcggtaccttcatgtttttatggtgtgcttacgtcatttgtaatgtcgctaaccatgatgtggctttgacaaccgagcctgagggctctcatccaggtcaattgatcatgattgcccttggtttcggtttctctgtgatgttttctatctggtgtttctggtggggctttgaacccagccgtttctctctctttgtgtttggccagagccatctcaccagccagatgtgtagtgatgtggtttccagtgatcattgctgggatggctgctggtggtgccgctga

SEQ ID NO: 7099 - DNA, 2139 bp, Saccharomyces cerevisiae
atgcatagaacgcttctgtttttaacgtggctgatatctttaacaaaggcttttaatataaaattaccacacactgaaaaaaaagaccatttggaatccaacgctgtgctggcatgcgcatcctatataaatactctgaagtggtcatttgatagctccgtcgtaccgggtttctattctaccatatgctcttattcaccagcgtttgatacttggtcactttgtatcttcaattcgcttacagaccagattattcccatggacaacacaagtttcgaagaaagcttgggtaacgtacgaaaaacgtgctcgtttgtcgataaaaagtttagcaatatttcactggagcaatactactcatctttaaataatgcttcttctcacgctttggaagactatggttctattgaaagtttatcgacatccattcgagtcgatcgtgagacaagatctagatggatacgagcttttcatgcgcatgcctataatttagatatcagcagtgtttatggtgcatatttaacttactacttcgtcatagtgggtattatcgccgtcttcttccatatgagtcactataacggcctgaatcgagcgctatttgcaagccggttcgtcaattatattcggggccattttgtgttgcctacgtttttagtagataagcacgctaatcacttcaagtttctaaacgtggaagtctttacgggactgatgccgaattccttggaggcatggatcatttttggatacacattggcgaacatcatatttttgtccataagttacatcatagacccatataacctcattttcaacagtcacctgtcgcagtttacaagactgttggctgatagatctgggatactggcgtttactcagttccctctcattatcatttttacggcaaggaatagttttctcgaatttttaacaggagtcaagttcaattcctttattagtttccataaatggatcggtagaatcatggtcttaaacgcaacgatacattcgctttcttattcattattcgcaattatcaaccatgccttcaaaataagcaacaaacagctctattggaagtttggtattgcatccataacagtgctttgcgttctactagttctatcgctcggaatagtaaggaaaagacattacgaatttttcctgtacacccacatcatactagcccttttgttcttttactgttgttggcaacacgtcaaaattttcaacggttggaaagaatggatagtggtatccttgctcatttgggggctggaaaagcttttcagaatatggaacattttgcagtttagatttccgaaagcaacactaatcaatttgaacaccagcaacaacccgcacgatgaaatgtttaaagtaatcatacccaaatataaccggagatggcattcgaaaccgggtcaatattgtttcatttattttttacatccattggtattttggcaatgccatccatttaccattatcgacgaaggtgagaagtgtgttttagtgatcaaacctaaaagtggtctcactagattcatttataaccatattttgcaatctttaaatggtaaattacaactccgagtggccattgagggaccttatgggcccagtaatcttcacctcgataaattcgaccatttgctgttactaagtggaggaacaggcttgcctggtccattagatcatgccattaagctgtcacgaaaccctgataaacccaagagtatagatttgatcatggcgatcaaaaatccttcttttcttaacggctataaatccgagatactagagctaaaaaatagccgatcccacgtcaacgtgcaggtttaccttacacagaaaacagctgttacaaaggcagcaaacgcacgagaccaattaatacattttgatgatataatgaccgaactgacaagcttcgcccacatcggcaatgcaagacctaattttagcaatgtaattgaaaacgcaataaaaagtacgccgcctggagattcattagcggtcgtgtgctgcggccctcctgttctggtggacgatgttagaaacaccgtttctcaaaaactcctcggttacccagagagaattatagagtatttcgaggaatatcagtgttggtaa

SEQ ID NO: 7100 - DNA, 2139 bp, Artificial Sequence
  Description of Artificial Sequence: Synthetic polynucleotide
atgcatagaacgcttttatttttaacgtggttgatatctttaacaaaggcttttaatataaaattaccacacactgaaaaaaaagaccatttggaatccaacgctgtgttggcatgcgcatcctatataaatactttgaagtggtcttttgatagctccgtcgtaccgggtttctattctaccatatgctcttattctccagcgtttgatacttggagtctttgtatcttcaattctcttacagaccagattattcccatggacaacacaagtttcgaagaaagcttgggtaacgtaagaaaaacgtgctcttttgtcgataaaaagtttagcaatatttctttggagcaatactactcttctttaaataatgcttcttctcacgctttggaagactatggttctattgaaagtttatctacatccattcgtgtcgatcgtgagacaagatctagatggataagagcttttcatgcgcatgcctataatttagatatcagcagtgtttatggtgcatatttaacttactacttcgtcatagtgggtattatcgccgtcttcttccatatgagtcactataacggcttgaatagagcgttatttgcaagcaggttcgtcaattatattagaggccattttgtgttgcctacgtttttagtagataagcacgctaatcacttcaagtttttgaacgtggaagtctttacgggattaatgccgaattccttggaggcatggatcatttttggatacacattggcgaacatcatatttttgtccataagttacatcatagacccatataacctcattttcaacagtcacttgtctcagtttacaagattattggctgatagatctgggatattggcgtttactcagttccctctcattatcatttttacggcaaggaatagttttctcgaatttttaacaggagtcaagttcaattcctttattagtttccataaatggatcggtagaatcatggtcttaaacgcaacgatacattctctttcttattctttattcgcaattatcaaccatgccttcaaaataagcaacaaacagctctattggaagtttggtattgcatccataacagtgctttgcgttttgttggttttatctctcggaatagtaaggaaaagacattacgaatttttcttgtacacccacatcatattggcccttttgttcttttactgttgttggcaacacgtcaaaattttcaacggttggaaagaatggatagtggtatccttgctcatttgggggttggaaaagcttttcagaatatggaacattttgcagtttagatttccgaaagcaacattgatcaatttgaacaccagcaacaacccgcacgatgaaatgtttaaagtaatcatacccaaatataacagaagatggcattctaaaccgggtcaatattgtttcatttattttttacatccattggtattttggcaatgccatccatttaccattatcgacgaaggtgagaagtgtgttttagtgatcaaacctaaaagtggtctcactagattcatttataaccatattttgcaatctttaaatggtaaattacaactcagggtggccattgagggaccttatgggcccagtaatcttcacctcgataaattcgaccatttgttattattaagtggaggaacaggcttgcctggtccattagatcatgccattaagttaagtagaaaccctgataaacccaagagtatagatttgatcatggcgatcaaaaatccttcttttcttaacggctataaatccgagatattggagttgaaaaatagcagatcccacgtcaacgtgcaggtttaccttacacagaaaacagctgttacaaaggcagcaaacgcaagagaccaattaatacattttgatgatataatgaccgaattaacaagcttcgcccacatcggcaatgcaagacctaattttagcaatgtaattgaaaacgcaataaaaagtacgccgcctggagattctttagcggtcgtgtgctgcggccctcctgttttggtggacgatgttagaaacaccgtttctcaaaaactcctcggttacccagagagaattatagagtatttcgaggaatatcagtgttggtga

SEQ ID NO: 7101 - DNA, 432 bp, Saccharomyces cerevisiae
atgtctagatctggtgttgctgttgctgatgaatcccttaccgctttcaatgacttgaaattgggtaaaaaatacaaatttattttattcggattgaacgatgctaaaaccgaaatcgttgtcaaggaaacctctactgacccatcttacgatgccttcttagagaaattgccagaaaacgactgtctttacgccatttacgattttgaatacgaaattaatggtaatgaaggtaagagatccaagattgttttcttcacttggtctccagacactgctccagtcagatctaagatggtctatgcatcctccaaggatgccttaagaagagccttaaacggtgtctctaccgatgttcaaggtactgatttttccgaagtttcttacgattctgttttggaaagagtcagcagaggcgctggttctcattaa

SEQ ID NO: 7102 - DNA, 432 bp, Artificial Sequence
  Description of Artificial Sequence: Synthetic polynucleotide
atgtctagatctggtgttgctgttgctgatgaatcccttaccgctttcaatgacttgaaattgggtaaaaaatacaaatttattttattcggattgaacgatgctaaaaccgaaatcgttgtcaaggaaacctctactgacccatcttacgatgccttcttagagaaattgccagaaaacgactgtctttacgccatttacgattttgaatacgaaattaatggtaatgaaggtaagagatccaagattgttttcttcacttggtctccagacactgctccagtcagatctaagatggtctatgcatcctccaaggatgccttaagaagagccttaaacggtgtctctaccgatgttcaaggtactgatttttccgaagtttcttacgattctgttttggaaagagtcagcagaggcgctggttctcattga

SEQ ID NO: 7103 - DNA, 540 bp, Saccharomyces cerevisiae
atgcctggtcttaagcttgttgaagctttagaatacaggtgtgaccgattggagcggcttataggcgccggatacagcgcgaattccgatgtttcagtgcaattagatgaactatacaatcagttacatcgtctatatttccagggtctaaagtattctcaagatctcctgcaactctttaatactttcatggctgaagacatcgagaacgtgggagctcctgatgatatttgtatttttgctagttgctttgacgatatttatacattatatagtgcatttgacgaactaaacagccaatatatggagttttgccaaatcagtaaaagttcattggatcagatttccttcaaagacgcaaatattgaaacgaaacagttgaagaagttacccgagttggtggataactgcaacataatgattttgaggtcaattgcaattctaaaccgtttcatcgactggaatattgaagttaacggattcttccagttccagaaaaagaggctgttgaatttacaaaaggtaatttatagtacgtga

SEQ ID NO: 7104 - DNA, 540 bp, Artificial Sequence
  Description of Artificial Sequence: Synthetic polynucleotide
atgcctggtcttaagcttgttgaagctttagaatacaggtgtgacagattggagaggcttataggcgccggatacagcgcgaattccgatgtttctgtgcaattagatgaattatacaatcagttacatcgtttatatttccagggtttgaagtattctcaagatctcttacaactctttaatactttcatggctgaagacatcgagaacgtgggagctcctgatgatatttgtatttttgctagttgctttgacgatatttatacattatatagtgcatttgacgaattgaacagccaatatatggagttttgccaaatcagtaaaagttctttggatcagatttccttcaaagacgcaaatattgaaacgaaacagttgaagaagttacccgagttggtggataactgcaacataatgattttgaggtctattgcaattttgaaccgtttcatcgactggaatattgaagttaacggattcttccagttccagaaaaagaggttattgaatttacaaaaggtaatttatagtacgtga

SEQ ID NO: 7105 - DNA, 4986 bp, Saccharomyces cerevisiae
atgcatcacgtactcaattcaacgagacctgaccatcggttttggttttacgatgacgtaactcagtacggcagaacaaagtaccttaattattatactcccttagtgcttttaatattcacggtgttgttcataacttataacatatggaaacattattactactatgacgttctacacttgaagcaaaaaaatccaattgatgaacttttatactcatctaccgacgaagacgaacagagtccgttgataaataataacaccatcacaactaattacgtggacaataattgtacaaaagacgcactaaaaaatagacacttttctctggaaaagctgaaatcagttaaggtaaatggagaacctcatggtacacctgaaatagttagaagaggcttcattgaaaaatcaagaattatccttgaattttttttggtactttctcaagttataatacattcttttatactattacactatgtcaataaaaacccagagttcacccaacaaggtacgattactggtttggtagaatggtgtgcattgtttatcattgtctctttacgtttagcaaatgtcaaccaaaatttcaaattcataaacaaatatcccggaaatctatggtcggtatcgttcataaactatttggccttgtttatctctatgattttaccctttcgttccattttcattcaccatataaacagtcctatttcgagaaagtattacatttcacaaatatcgattaaccttgcccttttcttgctactcttttttgcgaggataagaaataattttgccatcatctataaaactgacagctggattactccatctccagaaccagtcacttctattgctggattcatatgctgggcttggttagacagttttgtttggaaagcacacaaagttagtatcaaagttaaggatatttggggattgatgatgcaagattattctttctttgtagtgaaaaaattcagatattttgttgaccataaggttaaaaggaagcgtattttttcactaaaccttttctttttcttttcgaattatttggtactacaatgcttttgggcatttttaggcagcgtcctttcttttattccaacagttttactaaaaaggatcctggaatatgttgaagatcagtcatctgctccctcaaatttagcttggttttacgtcactgtcatgtttgtaggtaggatattagtggctatttgtcaagcacaggcactattctttggaaggagagtttgtatcagaatgaaaagtattataatctctgagatttatactaaagctttgagaagaaagatttccaccaacaagactaaaccttctaatgaggatccacaggaaattaatgatcaaaaaagtatcaacggcgatgaggagtccacttcttctgccaaccttggagcgattattaatctcatggctattgacgctttcaaggtttctgaaatttgtggttaccttcattcatttttggaggcttttgttatgactgttgtcgcactggcgctgttataccgtctgctgggttttgctgcgattgtgggtgtcttaatcattgtcgcaatgcttccactgaattataagcttgccaagtacatcggcgatttgcaaaagaaaaacttggctgtcacagataatcgtattcaaaagttgaatgaagcttttcaagctatcagaatcatcaaatacttttcatgggaggagaattttgaaaaagatatcaatactattagagaaaatgaattatctctactgctaatgagatccattgtttggtctatcagttcctttctttggtttgttaccccaactattgtaacagccgcctcatttgcttactacatttacgttcaaggcgaggtattaaccactccggttgcctttactgcactttctttattcacgttattaagagatcctttggatcgtttgtctgatatgttaagttttgtcgttcaatcaaaggtctcgttagatagagttcaggatttcttaaatgaaaatgatacaaagaaatacgatcaactgaccatagatccaaatggaaacagatttgcctttgagaattccaccatctcttgggataaggacaatcaagatttcaaattgaaagacttgaacattgaattcaaaactggtaaactaaatgtcgttattggccccactggttctggtaagacatccctactaatggcattattaggtgaaatgtatctactcaatggtaaggttgtcgtcccagctctagaaccaaggcaggaactaatagtagatgcgaatggaaccactaactctatcgcttattgttctcaggccgcttggcttctaaatgatactgtaaaaaacaacattttattcaatagtccattcaatgaggcaagatataaagctgttgtcgaagcatgcggattgaaacgtgattttgagatcttgaaagccggtgacctaacagaaatcggtgagaagggtattactttatccggtggtcaaaagcagagagtctcccttgctagagccttgtattccaatgctaggcatgtccttttggatgattgtttaagtgcagttgattcacatactgcatcttggatttacgataattgtattactggaccattaatggaagataggacatgtattttggtttcacacaacatcgccttgaccttgagaaatgctgaattggtagtcttactagaagatggtagggttaaagaccaaggtgatccaatagacatgttacagaagggtttgtttggtgaagacgagttagtgaaaagtagtatcttatcgcgtgcaaactcttctgctaacttagccgcaaaaagtagcacaagcttaagtaacctacccgctgtcaaagaacaacaagttagcgtgaacaacaactcctcccactttgaagccaagaaacttcaaaaatcattgaggacagaagctgaacgcactgaagatggtaaattaataaaagaggaaacaaaagaagaaggtgtggttggtctggatgtctataaatggtatttgaaaatttttggtggttggaagattgtttcatttttagcttccttgttcttgatagcccaacttttgtatatcggacaatcatggtgggttcgtgcctgggcgtcacacaatgtcattgctaaaattattcccagagcacaacgcgctattgcatttatctccaagaaggctagtcatctaattgattggaggggctcgtcccaaatcagtatggcgtcagctgaaaaccaaccttccagtggacactctacaatgtattatctggttttgtacctaatcattggttttgctcaggctttattgggagctggtaaaactattttaaatttcgttgctggtatcaacgcgtcaagaaagatatttaatatgattctaaacaaggttttacactccaagataagattttttgatgctactccaacaggtagaattatgaacaggttttccaaggatatcgaagctattgatcaggaactgacaccttatatacaaggcgccttctattcgcttattgaatgtttatccaccgtcatactgattacatttattactccacagttcttatctgttgctatagttgtttcaatattgtattattttgttgggtatttctacatggcaggttctcgtgaattgaaaagatttgaatctatttctagatcaccgatctatcaacatttttccgagactcttgtcggtgttaccaccattcgtgcgtttggtgatgaagggaggtttatgcaagagaatttacacaaaattgatgaaaataataaaccattcttctacttgtgggttgctaatcgttggttggcctttaggatagatatgattggatccttggtcatttttggagctggtttgttcattctattcaatattaataatctggattcgggtatggctggtatatctttgacgtatgctatttccttcactgaaggggcattgtggttggtaagattgtactctgaagtggagatgaatatgaattctgttgaaagagtcaaagaatatatggaaattgagcaagagccatacaacgaacacaaagaaataccgccaccacaatggccacaagacggtaaaatcgaggttaatgatttatcattacggtatgctccaaatctacctagagtaattaaaaatgtttcattttctgtcgacgctcagtctaagatcggtattgttggtagaaccggtgccggtaaatcaactattattaccgccttgttcagatttttggaacctgagacaggccatatcaaaattgataatatcgatatttccggtgttgatttacaaagactgcgtcgttctataactattattccacaagatccaacactattctcagggacgattaaaacaaacctagacccatatgatgaatttagtgacagacagatctttgaagctttgaaacgtgtaaatctaattagtgaagaacaattacaacaaggcgccacaagagaaacaagcaatgaggcttcgtcgactaactccgaaaatgttaataaattcttggatttaagtagtgaaattagcgaaggtggatccaatttgtctcaaggacagcgccaattgatgtgccttgctagatctttactgaggagtccaaagatcatattgctggacgaagctacagcgtccatcgactacagttccgatgcgaagatccaagaaaccataagaaaagagttccaaggtagtacaattttgacaattgcacataggttgagatctgttatcgattatgataaaattttggtgatggatgcaggtgaggtaaaagagtatgatcacccatattctttgttacttaacaaacaaagtgccttttatagcatgtgtgagcatagtggagaattggatatcctaattgaattggctaaaaaagcctttgtggaaaaattgaactctaaaaaggactag

SEQ ID NO: 7106 - DNA, 4986 bp, Artificial Sequence
  Description of Artificial Sequence: Synthetic polynucleotide
atgcatcacgtactcaattctacgagacctgaccatagattttggttttacgatgacgtaactcagtacggcagaacaaagtaccttaattattatactcccttagtgcttttaatattcacggtgttgttcataacttataacatatggaaacattattactactatgacgttttgcacttgaagcaaaaaaatccaattgatgaacttttatactcttctaccgacgaagacgaacagagtccgttgataaataataacaccatcacaactaattacgtggacaataattgtacaaaagacgcattgaaaaatagacacttttctttggaaaagttgaaatctgttaaggtaaatggagaacctcatggtacacctgaaatagttagaagaggcttcattgaaaaatctagaattatccttgaattttttttggtactttctcaagttataatacattcttttatattattacactatgtcaataaaaacccagagttcacccaacaaggtacgattactggtttggtagaatggtgtgcattgtttatcattgtctctttacgtttagcaaatgtcaaccaaaatttcaaattcataaacaaatatcccggaaatttatggtctgtatctttcataaactatttggccttgtttatctctatgattttaccctttcgttccattttcattcaccatataaacagtcctatttctagaaagtattacatttctcaaatatctattaaccttgcccttttcttgttgctcttttttgcgaggataagaaataattttgccatcatctataaaactgacagctggattactccatctccagaaccagtcacttctattgctggattcatatgctgggcttggttagacagttttgtttggaaagcacacaaagttagtatcaaagttaaggatatttggggattgatgatgcaagattattctttctttgtagtgaaaaaattcagatattttgttgaccataaggttaaaaggaagcgtattttttctttgaaccttttctttttcttttctaattatttggtattacaatgcttttgggcatttttaggcagcgtcctttcttttattccaacagttttattgaaaaggatcttggaatatgttgaagatcagtcttctgctccctccaatttagcttggttttacgtcactgtcatgtttgtaggtaggatattagtggctatttgtcaagcacaggcattattctttggaaggagagtttgtatcagaatgaaaagtattataatctctgagatttatactaaagctttgagaagaaagatttccaccaacaagactaaaccttctaatgaggatccacaggaaattaatgatcaaaaaagtatcaacggcgatgaggagtccacttcttctgccaaccttggagcgattattaatctcatggctattgacgctttcaaggtttctgaaatttgtggttaccttcattcttttttggaggcttttgttatgactgttgtcgcattagcgttattataccgtttattgggttttgctgcgattgtgggtgtcttaatcattgtcgcaatgcttccattgaattataagcttgccaagtacatcggcgatttgcaaaagaaaaacttggctgtcacagataatcgtattcaaaagttgaatgaagcttttcaagctatcagaatcatcaaatacttttcttgggaggagaattttgaaaaagatatcaatactattagagaaaatgaattatctttattattgatgagatccattgtttggtctatcagttcctttctttggtttgttaccccaactattgtaacagccgcctcttttgcttactacatttacgttcaaggcgaggtattaaccactccggttgcctttactgcactttctttattcacgttattaagagatcctttggatcgtttgtctgatatgttaagttttgtcgttcaatccaaggtctctttagatagagttcaggatttcttaaatgaaaatgatacaaagaaatacgatcaattgaccatagatccaaatggaaacagatttgcctttgagaattccaccatctcttgggataaggacaatcaagatttcaaattgaaagacttgaacattgaattcaaaactggtaaattgaatgtcgttattggccccactggttctggtaagacatccttattgatggcattattaggtgaaatgtatttgctcaatggtaaggttgtcgtcccagctttggaaccaaggcaggaattgatagtagatgcgaatggaaccactaactctatcgcttattgttctcaggccgcttggcttttgaatgatactgtaaaaaacaacattttattcaatagtccattcaatgaggcaagatataaagctgttgtcgaagcatgcggattgaaacgtgattttgagatcttgaaagccggtgacttgacagaaatcggtgagaagggtattactttatccggtggtcaaaagcagagagtctcccttgctagagccttgtattccaatgctaggcatgtccttttggatgattgtttaagtgcagttgattctcatactgcatcttggatttacgataattgtattactggaccattaatggaagataggacatgtattttggtttctcacaacatcgccttgaccttgagaaatgctgaattggtagtcttattggaagatggtagggttaaagaccaaggtgatccaatagacatgttacagaagggtttgtttggtgaagacgagttagtgaaaagtagtatcttatctcgtgcaaactcttctgctaacttagccgcaaaaagtagcacaagcttaagtaacttgcccgctgtcaaagaacaacaagttagcgtgaacaacaactcctcccactttgaagccaagaaacttcaaaaatctttgaggacagaagctgaacgcactgaagatggtaaattaataaaagaggaaacaaaagaagaaggtgtggttggtttggatgtctataaatggtatttgaaaatttttggtggttggaagattgtttcttttttagcttccttgttcttgatagcccaacttttgtatatcggacaaagttggtgggttcgtgcctgggcgtcccacaatgtcattgctaaaattattcccagagcacaacgcgctattgcatttatctccaagaaggctagtcatttgattgattggaggggcagctcccaaatcagtatggcgtctgctgaaaaccaaccttccagtggacactctacaatgtattatttggttttgtacttgatcattggttttgctcaggctttattgggagctggtaaaactattttaaatttcgttgctggtatcaacgcgtccagaaagatatttaatatgattttgaacaaggttttacactccaagataagattttttgatgctactccaacaggtagaattatgaacaggttttccaaggatatcgaagctattgatcaggaattaacaccttatatacaaggcgccttctattctcttattgaatgtttatccaccgtcatattgattacatttattactccacagttcttatctgttgctatagttgtttctatattgtattattttgttgggtatttctacatggcaggttctcgtgaattgaaaagatttgaatctatttctagatctccgatctatcaacatttttccgagactcttgtcggtgttaccaccattcgtgcgtttggtgatgaagggaggtttatgcaagagaatttacacaaaattgatgaaaataataaaccattcttctacttgtgggttgctaatcgttggttggcctttaggatagatatgattggatccttggtcatttttggagctggtttgttcattcttttcaatattaataatttggattctggtatggctggtatatctttgacgtatgctatttccttcactgaaggggcattgtggttggtaagattgtactctgaagtggagatgaatatgaattctgttgaaagagtcaaagaatatatggaaattgagcaagagccatacaacgaacacaaagaaataccgccaccacaatggccacaagacggtaaaatcgaggttaatgatttatctttaagatatgctccaaatttacctagagtaattaaaaatgtttctttttctgtcgacgctcagtctaagatcggtattgttggtagaaccggtgccggtaaatctactattattaccgccttgttcagatttttggaacctgagacaggccatatcaaaattgataatatcgatatttccggtgttgatttacaaagattacgtcgttctataactattattccacaagatccaacattgttctctgggacgattaaaacaaacttggacccatatgatgaatttagtgacagacagatctttgaagctttgaaacgtgtaaatttaattagtgaagaacaattacaacaaggcgccacaagagaaacaagcaatgaggcttcttctactaactccgaaaatgttaataaattcttggatttaagtagtgaaattagcgaaggtggatccaatttgtctcaaggacagcgccaattgatgtgccttgctagatctttattgaggagtccaaagatcatattgttggacgaagctacagcgtccatcgactacagttccgatgcgaagatccaagaaaccataagaaaagagttccaaggtagtacaattttgacaattgcacataggttgagatctgttatcgattatgataaaattttggtgatggatgcaggtgaggtaaaagagtatgatcacccatattctttgttacttaacaaacaaagtgccttttatagcatgtgtgagcatagtggagaattggatatcttgattgaattggctaaaaaagcctttgtggaaaaattgaactctaaaaaggactga

SEQ ID NO: 7107 - DNA, 750 bp, Saccharomyces cerevisiae
atgctaatagaggagatagagttttataacgtcaacggaaaaaaaacaacaacagttgttcctgaaaatacaaaaataaaaaaaagagtactaaatgataggaggacattatatgtcggcaatcttcctaaaaactgccgtaaacaggacttgagagatttgtttgagccaaattatggtaagataacaataaatatgctaaagaaaaagccactcaagaaaccgctgaaaaggtttgcatttatagaatttcaagagggtgtgaatctgaaaaaagtgaaagagaagatgaacggtaaaatttttatgaatgaaaaaattgttattgaaaacatcttaacaaaagaggaaaaaagttttgaaaaaaaccagaaatcaaacaagaaaactgctcctgatctcaagccactatccacaaatactctctatgtgaaaaacattcccatgaaatcgacaaatgaagaccttgccaaaatctttggtgttgaccctaaaaatataaactttgtaagaagagaattggtggatttgagaacaaacaaagttttcttttccgacgagtttcacaccggcgaagccttcatcaagtttgacaacctggggactggagatagtattcaaaagaaatgtcgagaatttaaaggtcggaaggcaagtaatggtagagtattgttggttaagatagcctctgccaagaaaaatgaacagaaacaagaaggaggagataatacaaaaataaaacaaaattaa

SEQ ID NO: 7108 - DNA, 750 bp, Artificial Sequence
  Description of Artificial Sequence: Synthetic polynucleotide
atgttgatagaggagatagagttttataacgtcaacggaaaaaaaacaacaacagttgttcctgaaaatacaaaaataaaaaaaagagtattgaatgataggaggacattatatgtcggcaatcttcctaaaaactgccgtaaacaggacttgagagatttgtttgagccaaattatggtaagataacaataaatatgttgaagaaaaagccactcaagaaaccgttaaaaaggtttgcatttatagaatttcaagagggtgtgaatttgaaaaaagtgaaagagaagatgaacggtaaaatttttatgaatgaaaaaattgttattgaaaacatcttaacaaaagaggaaaaaagttttgaaaaaaaccagaaaagtaacaagaaaactgctcctgatctcaagccattgtccacaaatactctctatgtgaaaaacattcccatgaaatctacaaatgaagaccttgccaaaatctttggtgttgaccctaaaaatataaactttgtaagaagagaattggtggatttgagaacaaacaaagttttcttttccgacgagtttcacaccggcgaagccttcatcaagtttgacaacttggggactggagatagtattcaaaagaaatgtagagaatttaaaggtagaaaggcaagtaatggtagagtattgttggttaagatagcctctgccaagaaaaatgaacagaaacaagaaggaggagataatacaaaaataaaacaaaattga

SEQ ID NO: 7109 - DNA, 771 bp, Saccharomyces cerevisiae
atggctccaggtaagaaagttgctccagctccattcggtgctaagtccactaagtctaacaaggctaagaacccattgactcactctactccaaagaacttcggtattggccaagctgtccaaccaaagagaaacttgtccagatacgtcaaatggccagaatatgtcagattgcaaagacaaaagaagatcttgtccatcagattgaaggttcctccaaccattgctcaattccaatacactttggacagaaacaccgctgctgaaaccttcaagttgttcaacaagtacagaccagaaaccgctgctgaaaagaaggaaagattgaccaaggaagctgccgctatcgctgaaggtaagtctaagcaagacgcttctccaaagccatacgctgttaagtacggtttgaaccatgttgtctctttgattgaaaacaagaaggccaagttggttttgattgctaacgacgtcgacccaattgaattggttgttttcctaccagctttgtgtaagaagatgggtgttccatacgccattatcaagggtaaggctagattgggtactttggttaaccaaaagacttctgctgttgccgctttgaccgaagtcagagccgaagacgaagctgctttggctaagttggtttccaccattgacgctaacttcgctgacaaatacgatgaagtcaagaagcactggggcggtggtatccttggtaacaaggctcaagctaagatggacaagagagctaagacttccgactccgcttaa

SEQ ID NO: 7110 - DNA, 771 bp, Artificial Sequence
  Description of Artificial Sequence: Synthetic polynucleotide
atggctccaggtaagaaagttgctccagctccattcggtgctaagtccactaagtctaacaaggctaagaacccattgactcactctactccaaagaacttcggtattggccaagctgtccaaccaaagagaaacttgtccagatacgtcaaatggccagaatatgtcagattgcaaagacaaaagaagatcttgtccatcagattgaaggttcctccaaccattgctcaattccaatacactttggacagaaacaccgctgctgaaaccttcaagttgttcaacaagtacagaccagaaaccgctgctgaaaagaaggaaagattgaccaaggaagctgccgctatcgctgaaggtaagtctaagcaagacgcttctccaaagccatacgctgttaagtacggtttgaaccatgttgtctctttgattgaaaacaagaaggccaagttggttttgattgctaacgacgtcgacccaattgaattggttgttttcttaccagctttgtgtaagaagatgggtgttccatacgccattatcaagggtaaggctagattgggtactttggttaaccaaaagacttctgctgttgccgctttgaccgaagtcagagccgaagacgaagctgctttggctaagttggtttccaccattgacgctaacttcgctgacaaatacgatgaagtcaagaagcactggggcggtggtatccttggtaacaaggctcaagctaagatggacaagagagctaagacttccgactccgcttga

SEQ ID NO: 7111 - DNA, 2010 bp, Saccharomyces cerevisiae
atgagtaatcctcaaaaagctctaaacgactttctgtccagtgaatctgttcatacacatgatagttctaggaaacaatctaataagcagtcatccgacgaaggacgctcttcatcacaaccttcacatcatcactctggtggtactaacaacaataataacaataataataataataataacagtaacaacaacaacaacggcaacgatgggggaaatgatgacgactatgattatgaaatgcaagattatagaccttctccgcaaagtgcgcggcctactcccacgtatgttccacaatattctgtagaaagtgggactgctttcccgattcaagaggttattcctagcgcatacattaacacacaagatataaaccataaagataacggtccgccgagtgcaagcagtaatagagcattcaggcctagagggcagaccacagtgtcggccaacgtgcttaacattgaagatttttacaaaaatgcagacgatgcgcataccatcccggagtcacatttatcgagaaggagaagtaggtcgagggctacgagtaatgctgggcacagtgccaatacaggcgccacgaatggcaggactactggtgcccaaactaatatggaaagcaatgaatcaccacgtaacgtccccattatggtgaagccaaagacattataccagaaccctcaaacacctacagtcttgccctccacataccatccaattaataaatggtcttccgtcaaaaacacttatttgaaggaatttttagccgagtttatgggaacaatggttatgattattttcggtagtgctgttgtttgtcaggtcaatgttgctgggaaaatacagcaggacaatttcaacgtggctttggataaccttaacgttaccgggtcttctgcagaaacgatagacgctatgaagagtttaacatccttggtttcatccgttgcgggcggtacctttgatgatgtggcattgggctgggctgctgccgtggtgatgggctatttctgcgctggtggtagtgccatctcaggtgctcatttgaatccgtctattacattagccaatttggtgtatagaggttttcccctgaagaaagttccttattactttgctggacaattgatcggtgccttcacaggcgctttgatcttgtttatttggtacaaaagggtgttacaagaggcatatagcgattggtggatgaatgaaagtgttgcgggaatgttttgcgtttttccaaagccttatctaagttcaggacggcaatttttttccgaatttttatgtggagctatgttacaagcaggaacatttgcgctgaccgatccttatacgtgtttgtcctctgatgttttcccattgatgatgtttattttgattttcattatcaatgcttccatggcttatcagacaggtacagcaatgaatttggctcgtgatctgggcccacgtcttgcactatatgcagttggatttgatcataaaatgctttgggtgcatcatcatcatttcttttgggttcccatggtaggcccatttattggtgcgttaatgggggggttggtttacgatgtctgtatttatcagggtcatgaatctccagtcaactggtctttaccagtttataaggaaatgattatgagagcctggtttagaaggcctggttggaagaagagaaatagagcaagaagaacatcggacctgagtgacttctcatacaataacgatgatgatgaggaatttggagaaagaatggctcttcaaaagacaaagaccaagtcatctatttcagacaacgaaaatgaagcaggagaaaagaaagtgcaatttaaatctgttcagcgcggcaaaagaacgtttggtggtataccaacaattcttgaagaagaagattccattgaaactgcttcgctaggtgcgacgacgactgattctattgggttatccgacacatcatcagaagattcgcattatggtaatgctaagaaggtaacatga

SEQ ID NO: 7112 - DNA, 2010 bp, Artificial Sequence
  Description of Artificial Sequence: Synthetic polynucleotide
atgagtaatcctcaaaaagctttgaacgactttctttccagtgaatctgttcatacacatgatagttctaggaaacaatctaataagcagtcttccgacgaaggacgctcttcttctcaaccttctcatcatcactctggtggtactaacaacaataataacaataataataataataataacagtaacaacaacaacaacggcaacgatgggggaaatgatgacgactatgattatgaaatgcaagattatagaccttctccgcaaagtgcgcgccctactcccacgtatgttccacaatattctgtagaaagtgggactgctttcccgattcaagaggttattcctagcgcatacattaacacacaagatataaaccataaagataacggtccgccgagtgcaagcagtaatagagcattcaggcctagagggcagaccacagtgtctgccaacgtgcttaacattgaagatttttacaaaaatgcagacgatgcgcataccatcccggagtctcatttatctagaaggagaagtaggagtagggctacgagtaatgctgggcacagtgccaatacaggcgccacgaatggcaggactactggtgcccaaactaatatggaaagcaatgaatctccacgtaacgtccccattatggtgaagccaaagacattataccagaaccctcaaacacctacagtcttgccctccacataccatccaattaataaatggtcttccgtcaaaaacacttatttgaaggaatttttagccgagtttatgggaacaatggttatgattattttcggtagtgctgttgtttgtcaggtcaatgttgctgggaaaatacagcaggacaatttcaacgtggctttggataaccttaacgttaccgggtcttctgcagaaacgatagacgctatgaagagtttaacatccttggtttcttccgttgcgggcggtacctttgatgatgtggcattgggctgggctgctgccgtggtgatgggctatttctgcgctggtggtagtgccatcagtggtgctcatttgaatccgtctattacattagccaatttggtgtatagaggttttcccttgaagaaagttccttattactttgctggacaattgatcggtgccttcacaggcgctttgatcttgtttatttggtacaaaagggtgttacaagaggcatatagcgattggtggatgaatgaaagtgttgcgggaatgttttgcgtttttccaaagccttatttgagtagtggaagacaatttttttccgaatttttatgtggagctatgttacaagcaggaacatttgcgttgaccgatccttatacgtgtttgtcctctgatgttttcccattgatgatgtttattttgattttcattatcaatgcttccatggcttatcagacaggtacagcaatgaatttggctcgtgatttgggcccacgtcttgcattatatgcagttggatttgatcataaaatgctttgggtgcatcatcatcatttcttttgggttcccatggtaggcccatttattggtgcgttaatgggggggttggtttacgatgtctgtatttatcagggtcatgaatctccagtcaactggtctttaccagtttataaggaaatgattatgagagcctggtttagaaggcctggttggaagaagagaaatagagcaagaagaacaagtgacttgagtgacttctcttacaataacgatgatgatgaggaatttggagaaagaatggctcttcaaaagacaaagaccaagtcttctatttctgacaacgaaaatgaagcaggagaaaagaaagtgcaatttaaatctgttcagcgcggcaaaagaacgtttggtggtataccaacaattcttgaagaagaagattccattgaaactgcttctttgggtgcgacgacgactgattctattgggttatccgacacatcttctgaagattctcattatggtaatgctaagaaggtaacatga

SEQ ID NO: 7113 - DNA, 504 bp, Saccharomyces cerevisiae
atgattccttaccaggagtggcatagccaactgcaatcgttgtatgactcccagattttccataactgggccctttgccaagatgtccatttgaatgatgaaaaggatggacttcttttgcgtttaatacctactcgacaactgcagaaaaatactgagcgtatagaaaataaattactaaatcatatagaattatatcttacatattcaaaagtatataacgagcccttactacttttgcgaatatgggaggagaaaagcatagatggtattccaatgaccaaattgatgctcccaactgatatcgaatcgctgcttgatgttcaaggcaaattccaactaggtttggatactatcattaacctggaaggtagcgtttggtattctttccatccatgcgatacatcatgtatagtaggtgaccaggctgagttcatgtcaacttacttaagacgatgggtcagtattttcatatttagttggttaggttatgaagattcatag

SEQ ID NO: 7114 - DNA, 504 bp, Artificial Sequence
  Description of Artificial Sequence: Synthetic polynucleotide
atgattccttaccaggagtggcatagccaattacaatctttgtatgactcccagattttccataactgggccctttgccaagatgtccatttgaatgatgaaaaggatggacttcttttgcgtttaatacctactaggcaattgcagaaaaatactgagcgtatagaaaataaattattgaatcatatagaattatatcttacatattctaaagtatataacgagcccttattacttttgagaatatgggaggagaaaagcatagatggtattccaatgaccaaattgatgctcccaactgatatcgaatctttacttgatgttcaaggcaaattccaattgggtttggatactatcattaacttggaaggtagcgtttggtattctttccatccatgcgatacatcttgtatagtaggtgaccaggctgagttcatgtctacttacttaagaagatgggtcagtattttcatatttagttggttaggttatgaagatagttga

SEQ ID NO: 7115 - DNA, 801 bp, Saccharomyces cerevisiae
atgttgaacgtgctattgagaaggaaggccttttgtttggtgacgaagaagggtatggctactgccacaacagctgcagctacgcatacccccagattgaaaacttttaaagtttacagatggaatccagacgagccaagtgctaaacctcatttacagtcatatcaagtggatctgaatgactgtgggcccatggtacttgatgcgctgttaaagatcaaagacgaacaggattctaccctaacttttagaagatcatgtagagaaggtatctgcggttcatgtgccatgaacattggcggtagaaacacgctagcttgtatatgtaagatcgaccagaacgaatccaaacaactcaagatctatccattaccccacatgtttattgtcaaagatttggtacctgatttaactaacttctaccaacaatacaaatctatccaaccttacttacagagatcatcgtttccaaaggatggaacggaagtgctacaaagtattgaagatcgtaagaaactggatggtctttacgaatgtattctgtgtgcatgctgctctacttcatgtccatcgtactggtggaaccaagaacagtatttgggccctgccgtgctaatgcaagcctaccgttggctaattgactctagagaccaagctacaaagacaagaaaggccatgctaaacaactccatgtcattgtacagatgtcacaccatcatgaactgtactagaacttgtccaaagggcttgaatcctggtttggctattgctgaaattaagaaatctttggcatttgcctag

SEQ ID NO: 7116 - DNA, 801 bp, Artificial Sequence
  Description of Artificial Sequence: Synthetic polynucleotide
atgttgaacgtgttattgagaaggaaggccttttgtttggtgacgaagaagggtatggctactgccacaacagctgcagctacgcatacccccagattgaaaacttttaaagtttacagatggaatccagacgagccaagtgctaaacctcatttacagagttatcaagtggatttgaatgactgtgggcccatggtacttgatgcgttattaaagatcaaagacgaacaggattctaccttaacttttagaagatcttgtagagaaggtatctgcggttcttgtgccatgaacattggcggtagaaacacgttggcttgtatatgtaagatcgaccagaacgaatccaaacaactcaagatctatccattaccccacatgtttattgtcaaagatttggtacctgatttaactaacttctaccaacaatacaaatctatccaaccttacttacagagatcttcttttccaaaggatggaacggaagtgttgcaaagtattgaagatcgtaagaaattggatggtctttacgaatgtattctttgtgcatgctgctctacttcttgtccatcttactggtggaaccaagaacagtatttgggccctgccgtgttgatgcaagcctaccgttggttgattgactctagagaccaagctacaaagacaagaaaggccatgttgaacaactccatgtctttgtacagatgtcacaccatcatgaactgtactagaacttgtccaaagggcttgaatcctggtttggctattgctgaaattaagaaatctttggcatttgcctga

SEQ ID NO: 7117 - DNA, 9435 bp, Saccharomyces cerevisiae
atgttagagtctttagctgctaatttgctaaaccgattgctaggctcatatgtggaaaatttcgaccctaatcaattaaatgtcggcatatggagtggtgatgtgaagttaaaaaacttaaaactaagaaaagactgtttggactcattaaatttacccatagatgtgaaatcagggatactgggtgatttggtcttaacggtcccatggtcaagtttaaagaataagcccgtgaaaatcattatcgaggactgttatttattatgctcaccacgttcagaagatcacgaaaatgatgaggagatgataaagagagcttttcggttgaagatgaggaaggtaagtgaatgggaactgacaaatcaggctcgcatactgagtacccaatcagagaacaaaacctcttcttcttcttcagaaaaaaataacgccgggtttatgcagtctttgactacaaagatcatagacaatttacaagttaccataaaaaatatccatttaaggtacgaggacatggacggaatcttcactacaggcccatcttccgttggattaactttgaacgagctatcagctgtatctacagattccaactgggctccaagtttcattgatattacacagaatatcacgcataaactattgactttaaattcactctgtttgtattggaatacagactctccgcccttgatttctgatgatgatcaagatagaagcctggaaaattttgtaaggggtttcaaagatatgattgcatcgaaaaattccactgcccccaagcatcaatacattttgaaaccggttagcgggctagggaagcttagtatcaacaagctgggttccacggaggaacaacctcacattgacttgcaaatgttttatgatgaatttggtttagaattagatgatacagaatataatgatatcttgcatgtcctctccagtatacagttaagacaaattaccaaaaagtttaagaaagcaagaccatccttcgcagttagtgaaaacccgacagaatggtttaaatacattgctgcttgtgttattaatgaaattcatgaaaaaaacaaaatgtggacttgggaaagcatgaaggagaaatgtgaacaacggaggttgtacacaaaattatgggttgaaaagttaaagttaaaaaatttagaagctccgctacgtgaccccattcaggaggctcaattatctgaattgcataaagatttaacgtatgatgaaattattctcttcagatctgtcgctaagagacagtacgcgcaatataagttgggcatgacggaagactcacccacaccaacagctagctcaaatattgaaccacaaacttccaacaagtccgcaactaaaaataatggaagctggctctcttcttggtggaacggtaaacctacagaagaagtagacgaagatttaataatgactgaagaacagcgtcaggagctttatgatgctattgaatttgacgagaatgaagataaaggtcctgtactgcaagttcctagagaaagggttgaacttcgtgtaacgagtttgttaaaaaagggttcattcactatacgaaagaagaagcaaaatctaaatttgggttccataatttttgaaaattgtaaagttgattttgctcaaagacctgattcatttttatcgagtttccaattgaacaaattcagtctcgaagatggctcacccaacgcgttatataaacatatcattagtgtcagaaactcatctaaagatcaatcttcaattgacaaccacgctaccggggaggaagaagaagaggatgaacctttattacgtgcttcatttgaattgaatccactagatggattagcagattcgaacttaaacattaagttattgggaatgactgtgttttaccacgttcatttcattacagaggtccacaagttttttaaggcgtcaaaccaacacatggaaacaatcggcaatatcgtaaacgccgccgaggcaactgtagaaggttggacaacacaaacaagaatgggtattgagtctttgttggaagaccacaagaccgtaaatgtatctttagatttacaagcaccattaatcatattaccgttagacccacatgattgggataccccttgtgcgatcattgatgccggtcatatgtctatactcagtgatttagtgccaaaggagaagataaaggaaataaaagagttatcgccggaagaatatgacaagattgacggtaacgaaatcaataggttaatgtttgataggttccaaattttatctcaggatactcagatatttgttggtcctgatattcagtctactataggtaagatcaataccgcctcttccacgaatgattttagaatcttggataaaatgaaattagagttaactgtagatctatcaatccttcctaaagcatataaattacccacgataagagtttttggtcatttgcctcgcttaagtctttccataaatgacattcaatacaagactattatgaatttgattgctaattctataccttctatgattgatgatgaagaaaacaacggcgattacgttaattactcttctggttccgaaaaagaaatgaagaagcaaattcaattgcagttgaagaatactttgaaagcgttagaaaatatgcagccgcttcaaattgaacagaaattcttagagctccattttgatatcgatcaggcgaaaatagcattctttcaatgtatcaaaaatgattccagaaacagcgaaaaattggttgatatattgtgtcaaaggctaaatttcaattttgataagagagccaaagaaatgaatttagatctaagagtacattcattagatgttgaagattacatcgagctgactgataacaaggaattcaaaaacttgatatcatccggcgttgaaaaagtgacaagatctcaaaaagatttgtttacgctaaaatacaagagagtgcagagaattgtgcctcataacgatactttgattgaattattcgatcaagatattgttatgcatatgagtgaattgcaattggtattaacacctagatctgtattaactttaatgaattatgcaatgcttacttttacggatcctaacgctccagaaatgccggctgatgtgttgagacataataaagaagatagggacgatgcgccacaaaaaatcaatatgaaaattaaaatggaggccgtcaatgttatttttaatgatgattctataaagctggcaacgttagttctatcggctggtgaattcacaatggttttactaccggaaagatacaacattaacttaaaattaggcgggttggagttgactgatgaaacaaatgaatcgttttccagggattcggtatttagaaaaataattcaaatgaaaggtcaagaactagtcgaattgagctatgaatcattcgatccggctacaaataccaaagattatgattcgtttttaaaatattctacgggctctatgcatgttaattttatcgaaagtgctgttaacagaatggttaacttttttgctaaatttcaaaaatctaaagtatcctttgatagagctcgtcttgcagcgtacaaccaagccccttccattgacgccgtaaataacatgaaaatggacatagtaatcaaggcacctattatccagtttcctaaattagtaggcacacaagagaacaattacgatacaatgcggttttatttgggtgagttctttattgaaaacaaattttcggtaatagacgaatctcataaaataaaccatatcaaacttggtgtccgcgagggccaattatcctcgaacttaaacttcgatggttccagtcaacaattgtatctagttgaaaatataggtttacttttcaatatagacagagatccccttccgcaagatgacactccagaacttaaagtaacgagtaattttgaatcatttgcgttggatttgactgagaaccagctgacttacttattagaaatttccaataaagtatcctctgcattcaatatcacagacgaaaactctggtgaatcaggaggaaaaggcgagatcaaaagtccctctcctgaccctgcttctttaagtagcgaaagcgaacgcacagctactcctcagtctctacagggatcgaataaaagcaatataaaaaatccagaacaaaaatacttggatttttcttttaaagctccaaagattgcccttactttatataacaagacaaagggcgtcacttctttgaatgactgtggtctgacaagaattatgtttcaagacattgggtgcagccttggtttaaagaatgatgggaccgtcgatggtcaagcacatgttgctgctttccggatagaagatgttcgtaatataaaagataataagcatacagaactaataccaaagagtaagaataaagaatatcaatttgtggctaatatttccagaaagaacttagaggtcggacggctattgaacatttcgatgacaatggacagtccgaaaatgattttggcaatggactatttggtttctctcaaagaattttttgatgcaattatgtccaaaagccacgaaaacaatttatactatcctgaaaacacaaaccaaaagcctgaaaacaaggctattgttgaaagcgttcaagaaggtggtgatgtgactaaaatccaatactctgttaatatcatcgaaacggctctgatcttacttgctgatccttgcgacatgaatagtgaggctatttctttcaagataggacaatttttagtaaccgatcagaatattatgacagttgcagccaataatgttggtatcttcctattcaaaatgaattcgtctgaagaaaaattgagattattggacgacttttcatcctccttgacaattgataaaagaaactcaactcctcagaccctaatgacgaatatacagctttccgttcagcccctgttgatgcgtatttcacttagagatattcgtctggcgatgttaatattcaaacgagttaccacattgctaaataagatgacggaaaaagaggataatggagaggaggaggagagcacagacaaaatacaattttctcatgaatttgaaaggaaattagcggtgttggatccaagcattttaggtgagcgcagcagggctagccagagctcagattccgaatcaattgaagtgcctactgcaattttgaaaaacgaaacattcaatgctgacttaggcggactgagatttattttaattggtgacgtccatgaaatgccaatattggacatgaatgtaaatgaaatcactgcttcagcaaaggattggtctaccgactttgaagctcttgcttctctagaaacctatgttaacatattcaactattcgagatctagctgggagccacttctggagatgattccaataacattccacctatcaaaagggcattctgaaatggatcctgctttctcttttgatattttaactcaaagaatcgcggaaattacactttctgctaggtcaatcgctatgctttctcacatcccggcgtctctaaccgaagagctgcccttagcttccagggtatctcagaagccatatcaactggtaaacgatacagaattagattttgacgtctggatacaggataaaacgactgaagacaacaaaaacgaagttgtgctcttaaaagcaaacacttctcttccttgggaatttgaagattggagaagtattagagagaaattggatattgataagtcgaagaacattttgggtgtttgtgtttctgggcaaaattataaaaccattatgaatattgatgccacaacagaaggtgaaaacttgcatgttttgagcccaccaagaaataatgtgcataatagaattgtttgtgaggccagatgtgatgagaataacgtgaagattattacgtttaggtcaactttagttatcgaaaacacaacttcaactgagattgagcttttggttgactccaaagatccaaataagccatctttaaaatatgctattaaaccacatcaaagtaaatctgttcctgtagaatatgcctacgattctgatattaggataagacccgcatcagaggatatatacgattggtctcaacagacgttatcttggaaaagcttgttgagcaaccaaatgtctatattctgttcttcaaaagaagattccaatcaaagatttcatttcgaaattggtgcaaagtatgatgaaagagaaccattggcaaagatctttcctcatatgaaaatcgtggtttcggcatctatgactattgaaaatttacttccagcagatattaacttctctatttttgacaaaagagaggagaagagaacagatttcttgaagactggagaaagtatggaagttcatcatatttctttggatagtttcctgctaatgtctgttcaaccattacaagatgaggcttctgcttcaaagccctccatcgttaatacaccacataaaagtcctttaaacccagaagattcgttgtctttgaccctatctggaggtcagaatttgttgttgaaactagattataaaaacatcgatggtacaaggtccaaagttattcggatatactccccttatattattatgaactctaccgatagagaactctacattcaaagtagtctcttaaatattgcacaatccaagattttgcttgaaaacgaaaaaagatatactattccaaaaatgttttcatttgataaagaagatgataaaagtaacagagctcgtattaggttcaaggaatcagagtggagttccaaattatcatttgacgctattggccaatcatttgatgcatctgttcgcataaaaaataaggaacaagaatcaaatttaggcatcaacattagcgaaggtaaagggaagtacttgctaagtaaagttattgagattgcacctaggtatattataagcaatactttagatatccctattgaagtttgcgagacagggtctatggatgtccagcaaatagaatcgaacatcactaagcctttatacaggatgagaaacatcgtcgacaagcaattagtgctgaaattcttaggcggagactccaattggtcacaaccattctttatcaaaaatgtcggtgtaacatatttgaaagttttgaaaaattcacgccataagcttttaaagattgaaattcttttggacaaagcaacaatattcataagaatcaaggacggtggtgacagatggccattttccataagaaatttcagcgaccatgactttatattttaccaaagagatcctcgtaaagttagtgatccatacaaggatgaccagtctaacgagtcctcaagccgtagtttcaaacctatcttttacaggattccctcgaaaagtattatgccatacgcatgggattttcctacagctaaggagaaatatctggtgttagaatcaggtacacgtacaagggaagttcggttggctgagattggcgaattgccaccgttacgcctggataaaaggtcaaaggataaaccagcccccattgttggattacatgttgttgctgacgacgatatgcaggccttagttattgttaactataaggccaatgttgggttatacaaattgaaaactgcctctgcaactaccacgtcttcagtttcagtaaatagttcagtgactgatggctttgtgcaaaaggatgaggatgagaaggttaatacacagatagttgtttcgttcaaaggagttggtatctcattaatcaatggtcgtttacaggaacttctatatattaacatgagagggatcgaattaagatacaatgaatctaaagcataccagactttcagttggaaaatgaaatggatgcaaatagataatcaattattttcaggaaactactcaaatattctatatccaacagaaatcccctacacagaaaaggaaattgaaaatcatccagtgatatcaggttctatttctaaagtcaacgattccttacaggctgtcccatactttaaacatgttacgttattaatccaggaattttccatacaattagatgaagacatgctgtatgctatgatggacttcataaaattcccaggatccccatggatcatggattcaagagattataagtacgatgaagaaatccagttacctgatgtttctgaattaaaaacggcgggtgatatatatttcgagatcttccatattcagcccaccgtcttacatctgtcctttatacgctccgatgaaattagtccaggattggctgaagagaccgaggagtcattttcgtcatcattgtactatgtccatatgtttgctatgacattaggtaatataaatgaggcgccggttaaagttaattctttgttcatggataatgtaagagtcccattgcccattctgatggaccatattgagagacactatacgacccagttcgtgtatcagatccacaaaattttaggatcagcagattgttttggtaatcctgtaggtcttttcaacacaattagttccggtgtctgggacttattctatgaaccatatcaaggttacatgatgaatgataggcctcaagaaattggtatacatctggctaaaggtggactaagttttgcaaagaaaacagtctttggcctctctgatagtatgtccaagtttacggggtcgatggccaagggcctgtcagttacacaagatctggaattccaaagggtcaggagattacaacaaagaataaataaaaacaacaggaatgccttggcaaactcagcgcaatcctttgccagcacactgggaagcgggttgagcggaattgcactggacccatacaaggccatgcaaaaggaaggcgccgctggtttcctcaaaggccttggtaaaggtatcgttgggctgccaactaagacagccattggattcttagatcttacaagtaacttaagtcaaggcgtgaaaagtaccaccactgtgcttgacatgcaaaagggttgcagagtgcgtctaccaaggtacgtggaccatgatcaaatcatcaagccttatgatctacgtgaggcccaaggacaatactggctcaagaccgtgaatggaggagtatttatgaatgatgaatacctgtcgcacgttatattgccaggcaaagaactagcagtaattgtgtccatgcagcacattgctgaggtgcaaatggccacccaagagcttatgtggagcacaggatatccttccatccagggaattacattggaaagatccggtcttcaaattaaactcaagtctcaatccgaatacttcattcccatcagcgatcctgaagaacgtcggtccttgtacaggaacatcgccattgctgttagagaatacaataagtactgtgaagctatcctatga

SEQ ID NO: 7118 - DNA, 9435 bp, Artificial Sequence
  Description of Artificial Sequence: Synthetic polynucleotide
atgttagagtctttagctgctaatttgttgaacagattgttgggctcctatgtggaaaatttcgaccctaatcaattaaatgtcggcatatggagtggtgatgtgaagttaaaaaacttaaaattgagaaaagactgtttggactctttaaatttacccatagatgtgaaaagtgggatattaggtgatttggtcttaacggtcccatggtctagtttaaagaataagcccgtgaaaatcattatcgaggactgttatttattatgctctccacgttctgaagatcacgaaaatgatgaggagatgataaagagagcttttagattgaagatgaggaaggtaagtgaatgggaattaacaaatcaggctcgcatattgagtacccaaagtgagaacaaaacctcttcttcttcttctgaaaaaaataacgccgggtttatgcagtctttgactacaaagatcatagacaatttacaagttaccataaaaaatatccatttaaggtacgaggacatggacggaatcttcactacaggcccatcttccgttggattaactttgaacgagttatctgctgtatctacagattccaactgggctccaagtttcattgatattacacagaatatcacgcataaacttttgactttaaatagtctctgtttgtattggaatacagactctccgcccttgatttctgatgatgatcaagatagaagcttggaaaattttgtaaggggtttcaaagatatgattgcatccaaaaattccactgcccccaagcatcaatacattttgaaaccggttagcgggttagggaagcttagtatcaacaagttgggttccacggaggaacaacctcacattgacttgcaaatgttttatgatgaatttggtttagaattagatgatacagaatataatgatatcttgcatgtcctctccagtatacagttaagacaaattaccaaaaagtttaagaaagcaagaccatccttcgcagttagtgaaaacccgacagaatggtttaaatacattgctgcttgtgttattaatgaaattcatgaaaaaaacaaaatgtggacttgggaaagcatgaaggagaaatgtgaacaaagaaggttgtacacaaaattatgggttgaaaagttaaagttaaaaaatttagaagctccgttacgtgaccccattcaggaggctcaattatctgaattgcataaagatttaacgtatgatgaaattattctcttcagatctgtcgctaagagacagtacgcgcaatataagttgggcatgacggaagactctcccacaccaacagctagcagtaatattgaaccacaaacttccaacaagtccgcaactaaaaataatggaagctggctctcttcttggtggaacggtaaacctacagaagaagtagacgaagatttaataatgactgaagaacagcgtcaggagctttatgatgctattgaatttgacgagaatgaagataaaggtcctgtattacaagttcctagagaaagggttgaacttcgtgtaacgagtttgttaaaaaagggttctttcactataagaaagaagaagcaaaatttgaatttgggttccataatttttgaaaattgtaaagttgattttgctcaaagacctgattcttttttatccagtttccaattgaacaaattcagtctcgaagatggctcccccaacgcgttatataaacatatcattagtgtcagaaactcttctaaagatcaatcttccattgacaaccacgctaccggggaggaagaagaagaggatgaacctttattacgtgcttcttttgaattgaatccattagatggattagcagattccaacttaaacattaagttattgggaatgactgtgttttaccacgttcatttcattacagaggtccacaagttttttaaggcgtccaaccaacacatggaaacaatcggcaatatcgtaaacgccgccgaggcaactgtagaaggttggacaacacaaacaagaatgggtattgagtctttgttggaagaccacaagaccgtaaatgtatctttagatttacaagcaccattaatcatattaccgttagacccacatgattgggataccccttgtgcgatcattgatgccggtcatatgtctatactcagtgatttagtgccaaaggagaagataaaggaaataaaagagttatctccggaagaatatgacaagattgacggtaacgaaatcaataggttaatgtttgataggttccaaattttatctcaggatactcagatatttgttggtcctgatattcagtctactataggtaagatcaataccgcctcttccacgaatgattttagaatcttggataaaatgaaattagagttaactgtagatttatctatccttcctaaagcatataaattacccacgataagagtttttggtcatttgcctcgcttaagtctttccataaatgacattcaatacaagactattatgaatttgattgctaattctataccttctatgattgatgatgaagaaaacaacggcgattacgttaattactcttctggttccgaaaaagaaatgaagaagcaaattcaattgcagttgaagaatactttgaaagcgttagaaaatatgcagccgcttcaaattgaacagaaattcttagagctccattttgatatcgatcaggcgaaaatagcattctttcaatgtatcaaaaatgattccagaaacagcgaaaaattggttgatatattgtgtcaaaggttgaatttcaattttgataagagagccaaagaaatgaatttagatttgagagtacattctttagatgttgaagattacatcgagttaactgataacaaggaattcaaaaacttgatatcttccggcgttgaaaaagtgacaagatctcaaaaagatttgtttacgttgaaatacaagagagtgcagagaattgtgcctcataacgatactttgattgaattattcgatcaagatattgttatgcatatgagtgaattgcaattggtattaacacctagatctgtattaactttaatgaattatgcaatgcttacttttacggatcctaacgctccagaaatgccggctgatgtgttgagacataataaagaagatagggacgatgcgccacaaaaaatcaatatgaaaattaaaatggaggccgtcaatgttatttttaatgatgattctataaagttagcaacgttagttttatctgctggtgaattcacaatggttttattaccggaaagatacaacattaacttaaaattaggcgggttggagttgactgatgaaacaaatgaaagtttttccagggattctgtatttagaaaaataattcaaatgaaaggtcaagaattggtcgaattgagctatgaatctttcgatccggctacaaataccaaagattatgattcttttttaaaatattctacgggctctatgcatgttaattttatcgaaagtgctgttaacagaatggttaacttttttgctaaatttcaaaaatctaaagtatcctttgatagagctcgtcttgcagcgtacaaccaagccccttccattgacgccgtaaataacatgaaaatggacatagtaatcaaggcacctattatccagtttcctaaattagtaggcacacaagagaacaattacgatacaatgagattttatttgggtgagttctttattgaaaacaaatttagcgtaatagacgaatctcataaaataaaccatatcaaacttggtgtccgcgagggccaattatccagtaacttaaacttcgatggttccagtcaacaattgtatttggttgaaaatataggtttacttttcaatatagacagagatccccttccgcaagatgacactccagaacttaaagtaacgagtaattttgaaagttttgcgttggatttgactgagaaccagttgacttacttattagaaatttccaataaagtatcctctgcattcaatatcacagacgaaaactctggtgaatctggaggaaaaggcgagatcaaaagtccctctcctgaccctgcttctttaagtagcgaaagcgaacgcacagctactcctcagtctttgcagggaagtaataaaagcaatataaaaaatccagaacaaaaatacttggatttttcttttaaagctccaaagattgcccttactttatataacaagacaaagggcgtcacttctttgaatgactgtggtttaacaagaattatgtttcaagacattgggtgcagccttggtttaaagaatgatgggaccgtcgatggtcaagcacatgttgctgctttcagaatagaagatgttcgtaatataaaagataataagcatacagaattgataccaaagagtaagaataaagaatatcaatttgtggctaatatttccagaaagaacttagaggtcggaagattattgaacatttccatgacaatggacagtccgaaaatgattttggcaatggactatttggtttctctcaaagaattttttgatgcaattatgtccaaaagccacgaaaacaatttatactatcctgaaaacacaaaccaaaagcctgaaaacaaggctattgttgaaagcgttcaagaaggtggtgatgtgactaaaatccaatactctgttaatatcatcgaaacggctttgatcttacttgctgatccttgcgacatgaatagtgaggctatttctttcaagataggacaatttttagtaaccgatcagaatattatgacagttgcagccaataatgttggtatcttccttttcaaaatgaattcttctgaagaaaaattgagattattggacgacttttcttcctccttgacaattgataaaagaaactctactcctcagaccttgatgacgaatatacagctttccgttcagcccttattgatgcgtatttctcttagagatattcgtttggcgatgttaatattcaaaagagttaccacattgttgaataagatgacggaaaaagaggataatggagaggaggaggagagcacagacaaaatacaattttctcatgaatttgaaaggaaattagcggtgttggatccaagcattttaggtgagcgcagcagggctagccagagcagtgattccgaaagtattgaagtgcctactgcaattttgaaaaacgaaacattcaatgctgacttaggcggattaagatttattttaattggtgacgtccatgaaatgccaatattggacatgaatgtaaatgaaatcactgcttctgcaaaggattggtctaccgactttgaagctcttgcttctttggaaacctatgttaacatattcaactattctagatctagctgggagccacttttggagatgattccaataacattccacttatccaaagggcattctgaaatggatcctgctttctcttttgatattttaactcaaagaatcgcggaaattacactttctgctaggtctatcgctatgctttctcacatcccggcgtctttaaccgaagagttgcccttagcttccagggtatctcagaagccatatcaattggtaaacgatacagaattagattttgacgtctggatacaggataaaacgactgaagacaacaaaaacgaagttgtgctcttaaaagcaaacacttctcttccttgggaatttgaagattggagaagtattagagagaaattggatattgataagtccaagaacattttgggtgtttgtgtttctgggcaaaattataaaaccattatgaatattgatgccacaacagaaggtgaaaacttgcatgttttgagcccaccaagaaataatgtgcataatagaattgtttgtgaggccagatgtgatgagaataacgtgaagattattacgtttaggtctactttagttatcgaaaacacaacttctactgagattgagcttttggttgactccaaagatccaaataagccatctttaaaatatgctattaaaccacatcaaagtaaatctgttcctgtagaatatgcctacgattctgatattaggataagacccgcaagtgaggatatatacgattggtctcaacagacgttatcttggaaaagcttgttgagcaaccaaatgtctatattctgttcttctaaagaagattccaatcaaagatttcatttcgaaattggtgcaaagtatgatgaaagagaaccattggcaaagatctttcctcatatgaaaatcgtggtttctgcatctatgactattgaaaatttacttccagcagatattaacttctctatttttgacaaaagagaggagaagagaacagatttcttgaagactggagaaagtatggaagttcatcatatttctttggatagtttcttattgatgtctgttcaaccattacaagatgaggcttctgcttccaagccctccatcgttaatacaccacataaaagtcctttaaacccagaagattctttgtctttgaccctttctggaggtcagaatttgttgttgaaattggattataaaaacatcgatggtacaaggtccaaagttattagaatatactccccttatattattatgaactctaccgatagagaactctacattcaaagtagtctcttaaatattgcacaatccaagattttgcttgaaaacgaaaaaagatatactattccaaaaatgttttcttttgataaagaagatgataaaagtaacagagctcgtattaggttcaaggaaagtgagtggagttccaaattatcttttgacgctattggccaaagttttgatgcatctgttcgcataaaaaataaggaacaagaaagtaatttaggcatcaacattagcgaaggtaaagggaagtacttgttaagtaaagttattgagattgcacctaggtatattataagcaatactttagatatccctattgaagtttgcgagacagggtctatggatgtccagcaaatagaatctaacatcactaagcctttatacaggatgagaaacatcgtcgacaagcaattagtgttgaaattcttaggcggagactccaattggtctcaaccattctttatcaaaaatgtcggtgtaacatatttgaaagttttgaaaaatagccgccataagcttttaaagattgaaattcttttggacaaagcaacaatattcataagaatcaaggacggtggtgacagatggccattttccataagaaatttcagcgaccatgactttatattttaccaaagagatcctcgtaaagttagtgatccatacaaggatgaccagtctaacgagtcctctagccgtagtttcaaacctatcttttacaggattccctctaaaagtattatgccatacgcatgggattttcctacagctaaggagaaatatttggtgttagaaagtggtacacgtacaagggaagttagattggctgagattggcgaattgccaccgttacgcttagataaaaggtctaaggataaaccagcccccattgttggattacatgttgttgctgacgacgatatgcaggccttagttattgttaactataaggccaatgttgggttatacaaattgaaaactgcctctgcaactaccacgtcttctgtttctgtaaatagttctgtgactgatggctttgtgcaaaaggatgaggatgagaaggttaatacacagatagttgtttctttcaaaggagttggtatctctttaatcaatggtcgtttacaggaacttttatatattaacatgagagggatcgaattaagatacaatgaatctaaagcataccagactttcagttggaaaatgaaatggatgcaaatagataatcaattattttctggaaactactctaatattctttatccaacagaaatcccctacacagaaaaggaaattgaaaatcatccagtgatatctggttctatttctaaagtcaacgattccttacaggctgtcccatactttaaacatgttacgttattaatccaggaattttccatacaattagatgaagacatgctttatgctatgatggacttcataaaattcccaggatccccatggatcatggattccagagattataagtacgatgaagaaatccagttacctgatgtttctgaattaaaaacggcgggtgatatatatttcgagatcttccatattcagcccaccgtcttacatttgtcctttatacgctccgatgaaattagtccaggattggctgaagagaccgaggagtctttttcttcttctttgtactatgtccatatgtttgctatgacattaggtaatataaatgaggcgccggttaaagttaattctttgttcatggataatgtaagagtcccattgcccattttgatggaccatattgagagacactatacgacccagttcgtgtatcagatccacaaaattttaggaagtgcagattgttttggtaatcctgtaggtcttttcaacacaattagttccggtgtctgggacttattctatgaaccatatcaaggttacatgatgaatgataggcctcaagaaattggtatacatttggctaaaggtggattgagttttgcaaagaaaacagtctttggcctctctgatagtatgtccaagtttacggggtccatggccaagggcttaagtgttacacaagatttggaattccaaagggtcaggagattacaacaaagaataaataaaaacaacaggaatgccttggcaaactctgcgcaatcctttgccagcacattaggaagcgggttgagcggaattgcattggacccatacaaggccatgcaaaaggaaggcgccgctggtttcctcaaaggccttggtaaaggtatcgttgggttaccaactaagacagccattggattcttagatcttacaagtaacttaagtcaaggcgtgaaaagtaccaccactgtgcttgacatgcaaaagggttgcagagtgcgtttgccaaggtacgtggaccatgatcaaatcatcaagccttatgatttacgtgaggcccaaggacaatactggctcaagaccgtgaatggaggagtatttatgaatgatgaatacttatcccacgttatattgccaggcaaagaattggcagtaattgtgtccatgcagcacattgctgaggtgcaaatggccacccaagagcttatgtggagcacaggatatccttccatccagggaattacattggaaagatccggtcttcaaattaaactcaagtctcaatccgaatacttcattcccatcagcgatcctgaagaacgtcgttccttgtacaggaacatcgccattgctgttagagaatacaataagtactgtgaagctatcttgtga

SEQ ID NO: 7119 - DNA, 1146 bp, Saccharomyces cerevisiae
atgcagattttcgtcaagactttgaccggtaaaaccataacattggaagttgaatcttccgataccatcgacaacgttaagtcgaaaattcaagacaaggaaggtatccctccagatcaacaaagattgatctttgccggtaagcagctagaagacggtagaacgctgtctgattacaacattcagaaggagtccaccttacatcttgtgctaaggctaagaggtggtatgcagatctttgttaagactttgaccggtaaaaccatcactttagaggttgaatcctccgacacgatcgataacgttaagtcgaaaatccaggacaaggaaggtatccctccggatcaacagaggttgatctttgccggtaagcagctagaagatggtagaaccttgtctgactacaacatccaaaaggaatctactcttcacttggtgttgagactgagaggtggtatgcaaatttttgtcaagacactgacaggtaagactataaccctagaggttgaatcttctgacactatcgacaacgttaagtcgaaaattcaagacaaggaaggtattcctccagatcaacaaagattgatttttgctggtaagcaactggaagacggtagaacgctgtctgattataacattcagaaagagtctacgttgcatttggtgttgagattgagaggtggtatgcaaattttcgtcaaaactctaacagggaagactataaccctagaggttgaatcttccgacactattgacaacgtcaaaagtaaaattcaagataaagaaggtatccctccggatcaacagagattgatttttgctggtaagcaactagaagatggtagaaccttgtctgactacaacatccaaaaggaatctactcttcacttggtgttgagactgagaggtggtatgcaaatttttgtcaagacactgacaggtaagactataaccctagaggttgaatcttctgacactattgacaacgttaagtcgaaaattcaagacaaggaaggtattcctccagaccagcaaagattgatttttgccggtaagcaactagaagatggtagaacgctgtcggactacaatattcaaaaggagtccactcttcaccttgtcttgaggttgaggggtggtaactga

SEQ ID NO: 7120 - DNA, 1146 bp, Artificial Sequence
  Description of Artificial Sequence: Synthetic polynucleotide
atgcagattttcgtcaagactttgaccggtaaaaccataacattggaagttgaatcttccgataccatcgacaacgttaagagtaaaattcaagacaaggaaggtatccctccagatcaacaaagattgatctttgccggtaagcagttagaagacggtagaacgttgtctgattacaacattcagaaggagtccaccttacatcttgtgttaaggttaagaggtggtatgcagatctttgttaagactttgaccggtaaaaccatcactttagaggttgaatcctccgacacgatcgataacgttaagagtaaaatccaggacaaggaaggtatccctccggatcaacagaggttgatctttgccggtaagcagttagaagatggtagaaccttgtctgactacaacatccaaaaggaatctactcttcacttggtgttgagattgagaggtggtatgcaaatttttgtcaagacattaacaggtaagactataaccttagaggttgaatcttctgacactatcgacaacgttaagagtaaaattcaagacaaggaaggtattcctccagatcaacaaagattgatttttgctggtaagcaattggaagacggtagaacgttgtctgattataacattcagaaagagtctacgttgcatttggtgttgagattgagaggtggtatgcaaattttcgtcaaaactttgacagggaagactataaccttagaggttgaatcttccgacactattgacaacgtcaaaagtaaaattcaagataaagaaggtatccctccggatcaacagagattgatttttgctggtaagcaattggaagatggtagaaccttgtctgactacaacatccaaaaggaatctactcttcacttggtgttgagattgagaggtggtatgcaaatttttgtcaagacattaacaggtaagactataaccttagaggttgaatcttctgacactattgacaacgttaagagtaaaattcaagacaaggaaggtattcctccagaccagcaaagattgatttttgccggtaagcaattggaagatggtagaacgttaagtgactacaatattcaaaaggagtccactcttcaccttgtcttgaggttgaggggtggtaactga

SEQ ID NO: 7121 - DNA, 744 bp, Saccharomyces cerevisiae
atgcctttgttagataccttcaagagttttattcaatcaccgacggaatcaaaggtgaaacaggctaccaacgaggacgaaacaagtggagcaacggggacgcttatgaacgaaatatcaatcttgacctacagccccaagacagtacgagaaatcatccaggtaatccggaagcgattgctacttgggcagaacagaagaaattctcatcgaaattgtatccaggtgatgaagacgctgactttggtctcatatctgatgaataacgggtccaatgaattcatcaagtggctgaaaggaaacatgatactaattgagatcctggaggattttcaggttcaggatcctcgggatgaacgtaaggcggaagatattcaaaagctaagcaggaacgttctggggctgctgcaagacgacgggttactagaaaaacaacgcaaggatgtaatacaattccgctcaagcatatcgactccgggcaggaagtccacggacaatagccatttgaagctggaggaaatgagaagcgagctcacgcgacaaagcttagaaaagaaagcaaagcctcccaccaccagcactagcttagatttccagagacaacggacaaggaatacgcacgaatatgcccgattctctttggatcccctggccgaagaagacagtgaagatacgcccggcgtggcgggtggaataagcaagctctcatttagacccaagtcttcaaataacccgttcagatga

SEQ ID NO: 7122 - DNA, 744 bp, Artificial Sequence
  Description of Artificial Sequence: Synthetic polynucleotide
atgcctttgttagataccttcaagagttttattcaatctccgacggaatccaaggtgaaacaggctaccaacgaggacgaaacaagtggagcaacggggacgcttatgaacgaaatatccatcttgacctacagccccaagacagtaagagaaatcatccaggtaatcagaaagagattgttacttgggcagaacagaagaaattctcatagaaattgtatccaggtgatgaagacgttgactttggtctcttatttaatgaataacgggtccaatgaattcatcaagtggttgaaaggaaacatgatattgattgagatcttggaggattttcaggttcaggatcctagagatgaacgtaaggcggaagatattcaaaagttgagcaggaacgttttggggttgttgcaagacgacgggttattggaaaaacaacgcaaggatgtaatacaattccgcagcagcatatctactccgggcaggaagtccacggacaatagccatttgaagttggaggaaatgagaagcgagctcacgaggcaaagcttagaaaagaaagcaaagcctcccaccaccagcactagcttagatttccagagacaaagaacaaggaatacgcacgaatatgccagattctctttggatcccttagccgaagaagacagtgaagatacgcccggcgtggcgggtggaataagcaagctcagttttagacccaagtcttccaataacccgttcagatga

SEQ ID NO: 7123 - DNA, 1512 bp, Saccharomyces cerevisiae
atgctttgtgctattagtgggaaagttcctagaaggccagttctatcacctaaatccaggactatttttgaaaagtcgctccttgaacagtatgttaaagatacggggaatgatccgataacaaatgagcccttaagcatcgaagaaatagtggaaatcgtacctagtgcgcaacaagcctcactaacagagtctacaaactctgctacgttaaaagcgaattattcgattccgaatctgttgacaagtttacagaatgaatgggatgctataatgctcgaaaactttaagttacgatcaactctagatagtttaacgaaaaaactgtcgactgtaatgtacgaaagagatgctgcaaagttggtcgctgcgcaactattgatggaaaaaaacgaagattcgaaggatttacccaaatcctcacagcaagcggtagctattacgagagaagaatttttacaagggctgttacaatcttctagagactttgtagcgaggggcaagctcaaagcacccaaatggccgattttaaaaaatttggagctattacaggcacaaaattactcccgtaacatcaaaacattcccatataaagagcttaacaaatctatgtactatgataaatgggtgtgcatgtgtcgctgtgaggatggtgctttacattttacccaattaaaagattcgaaaacgattaccacaataactacaccaaatccccgtaccgggggagagcatccagctattatttccagagggccttgtaatcgtttgctactactatatccaggtaaccaaataactatattggactcaaaaacaaacaaagtcctcagagaaatagaggtagattccgccaatgagattatatatatgtatggtcacaacgaggtcaacacagagtacttcatctgggcggataatagaggaaccataggatttcaatcctacgaggatgattcccagtatattgttcattctgctaaatcagatgttgagtacagcagcggtgtcctacataaggattcattattattagccctttactctccggacggtatattagacgtttacaacttgtcatcacctgaccaggcaagctctagattccccgtagatgaagaagccaagataaaagaggttaaatttgcagacaatgggtactggatggtagtagagtgtgaccaaactgtggtttgctttgacctaagaaaggatgtcggcacgctagcgtatccaacttacacaatcccagaattcaagacgggcaccgttacctatgacattgacgactctggaaagaatatgattgcatactcaaacgagagcaattcgctgacgatatacaaatttgacaagaaaacaaaaaattggactaaagacgaggagagcgccctctgtttgcaaagcgacactgccgatttcactgatatggacgtggtatgcggagatggtggtattgccgctattctgaagacaaatgatagtttcaatattgttgcattgacaccctaa

SEQ ID NO: 7124 - DNA, 1512 bp, Artificial Sequence
  Description of Artificial Sequence: Synthetic polynucleotide
atgctttgtgctattagtgggaaagttcctagaaggccagttttatctcctaaatccaggactatttttgaaaagtctctccttgaacagtatgttaaagatacggggaatgatccgataacaaatgagcccttaagcatcgaagaaatagtggaaatcgtacctagtgcgcaacaagcctctttaacagagtctacaaactctgctacgttaaaagcgaattattctattccgaatttattgacaagtttacagaatgaatgggatgctataatgctcgaaaactttaagttaagatctactttagatagtttaacgaaaaaattatctactgtaatgtacgaaagagatgctgcaaagttggtcgctgcgcaattattgatggaaaaaaacgaagattctaaggatttacccaaatcctctcagcaagcggtagctattacgagagaagaatttttacaagggttattacaatcttctagagactttgtagcgaggggcaagctcaaagcacccaaatggccgattttaaaaaatttggagttattacaggcacaaaattactcccgtaacatcaaaacattcccatataaagagcttaacaaatctatgtactatgataaatgggtgtgcatgtgtcgctgtgaggatggtgctttacattttacccaattaaaagattctaaaacgattaccacaataactacaccaaatccccgtaccgggggagagcatccagctattatttccagagggccttgtaatcgtttgttattattatatccaggtaaccaaataactatattggactctaaaacaaacaaagtcctcagagaaatagaggtagattccgccaatgagattatatatatgtatggtcacaacgaggtcaacacagagtacttcatctgggcggataatagaggaaccataggatttcaatcctacgaggatgattcccagtatattgttcattctgctaaatctgatgttgagtacagcagcggtgtcttgcataaggattctttattattagccctttactctccggacggtatattagacgtttacaacttgagtagccctgaccaggcaagctctagattccccgtagatgaagaagccaagataaaagaggttaaatttgcagacaatgggtactggatggtagtagagtgtgaccaaactgtggtttgctttgacttgagaaaggatgtcggcacgttggcgtatccaacttacacaatcccagaattcaagacgggcaccgttacctatgacattgacgactctggaaagaatatgattgcatactctaacgagagcaattctttgacgatatacaaatttgacaagaaaacaaaaaattggactaaagacgaggagagcgccctctgtttgcaaagcgacactgccgatttcactgatatggacgtggtatgcggagatggtggtattgccgctattttgaagacaaatgatagtttcaatattgttgcattgacaccctga

SEQ ID NO: 7125 - DNA, 1899 bp, Saccharomyces cerevisiae
atggtgatagattccaaacaggatctacctcaatataccaaagattcaggttcagaatcggactcagactcaagtaataatttcattgtggaatctccgtcaattccatcttcaaaaagtgcaaccgtagttctcaatagtgaagagtatgaggacgacgaaggtgatgacttgaacgggctggatgctgaattgatcgataatataacgtatgaaggagatgaagatgaaactatgtttgtggggttgaaagaaaaacagaagttacatttatctggtgttttccggctgcaagtggtgaaaggaggtattgtctacaacaatgtacactataacgcttcgagagaaattttaaccttctggcacccgttatcacagtccatacctactatagatttttcgcactttgcaggctggcaagacactttttttatgccgagaaacaacaggtttaaaattagagatgaagaattcaaatcatttccatgtgttcttcgcgtttttaattctaatcatacgggcttgttagaagcaggtcatttatatcgggatgttaattatctatggaaacctaaagaaccttactttccattaaacgagagaacaacgtatcatttattacatgagtcagaccgaattcaatctttatccgtgccgggatattggtcaactccgttagagaagttatatttgagtcacaagaacgctgcgtatgatacaagaatcatggtgattggtggtaaaaactctgggaagtctacattcttgaggcttttattggaaaaatttacgcaagatatacgagattctactacgagccaggaagaattggtatacctggatttagatcctggtcaacctgaatactcactacctgattcaatatccctgaataagattctttccagccctatttctctcggacaacatctctgccaaggttcaaatttccaaactttgttacagttctacgctggctcctcttccccgcaggacgagcccacatcatacctgaactgcgctgataaacttatagaccatttggaagagcaagccttcttcggaacgtcattgcttaatctacctgggtggataaaaggattcgggatgcagattttaaatcatataataaggaaatataagcccactcacttattgtttttggaaacagctaattcgaaaagacacctggatgaactaacaattccacagagtttttccacatcactacgagatgcatatgcacctgaagttgttcgcgttccagcccatagtctgaaccacaccttatcttctaggttccatgcatcacaactgagaacattcaaaatactggcactgtttcataaaataactcaatttgattatgattttgcgcctcttttaaaatctgcacctttgcaaatttcatatggcaaaggtaaaagcggtattaaaggcattcaatttcctatggaattccaggatctgaatcctcaagatatcaagtccgcattggaaggtactgtcattgggatatatacatattctggagaagactcactagaggtgaaatccttgaatacctttcccatcctacaatcgtgtacttcttcttctaaaaatttcataactctggggctgatacactctattgacacctcccagcaaataatgaacatttacgtgccaccttgccatacccagattttagataaacaacctgaggatgctcaatggataatagtaagaaataagacggaaactcctttttgtgactttcttccatccccccgcacaattacatgggatgataatatacaaataccgttcgcaacttttgaaagaaggaaaaaattggaacatgtgtggaaagttcgtaagaacgtcatgagacgtggccaattcatgaaaagatag

SEQ ID NO: 7126 - DNA, 1899 bp, Artificial Sequence
  Description of Artificial Sequence: Synthetic polynucleotide
atggtgatagattccaaacaggatttacctcaatataccaaagattctggttctgaaagtgacagtgacagcagtaataatttcattgtggaatctccgtctattccatcttctaaaagtgcaaccgtagttctcaatagtgaagagtatgaggacgacgaaggtgatgacttgaacgggttagatgctgaattgatcgataatataacgtatgaaggagatgaagatgaaactatgtttgtggggttgaaagaaaaacagaagttacatttatctggtgttttcagattacaagtggtgaaaggaggtattgtctacaacaatgtacactataacgcttccagagaaattttaaccttctggcacccgttatctcagtccatacctactatagatttttctcactttgcaggctggcaagacactttttttatgccgagaaacaacaggtttaaaattagagatgaagaattcaaaagttttccatgtgttcttcgcgtttttaattctaatcatacgggcttgttagaagcaggtcatttatatagagatgttaattatttatggaaacctaaagaaccttactttccattaaacgagagaacaacgtatcatttattacatgagagtgacagaattcaatctttatccgtgccgggatattggtctactccgttagagaagttatatttgagtcacaagaacgctgcgtatgatacaagaatcatggtgattggtggtaaaaactctgggaagtctacattcttgaggcttttattggaaaaatttacgcaagatataagagattctactacgagccaggaagaattggtatacttggatttagatcctggtcaacctgaatactctttgcctgattctatatccttgaataagattctttccagccctatttctctcggacaacatctctgccaaggtagtaatttccaaactttgttacagttctacgctggctcctcttccccgcaggacgagcccacatcttacttgaactgcgctgataaacttatagaccatttggaagagcaagccttcttcggaacgtctttgcttaatttacctgggtggataaaaggattcgggatgcagattttaaatcatataataaggaaatataagcccactcacttattgtttttggaaacagctaattctaaaagacacttggatgaattaacaattccacagagtttttccacatctttaagagatgcatatgcacctgaagttgttcgcgttccagcccatagtttgaaccacaccttatcttctaggttccatgcatctcaattgagaacattcaaaatattggcattatttcataaaataactcaatttgattatgattttgcgcctcttttaaaatctgcacctttgcaaatttcttatggcaaaggtaaaagcggtattaaaggcattcaatttcctatggaattccaggatttgaatcctcaagatatcaagtccgcattggaaggtactgtcattgggatatatacatattctggagaagactctttggaggtgaaatccttgaatacctttcccatcttgcaaagctgtacttcttcttctaaaaatttcataactttggggttgatacactctattgacacctcccagcaaataatgaacatttacgtgccaccttgccatacccagattttagataaacaacctgaggatgctcaatggataatagtaagaaataagacggaaactcctttttgtgactttcttccatccccccgcacaattacatgggatgataatatacaaataccgttcgcaacttttgaaagaaggaaaaaattggaacatgtgtggaaagttcgtaagaacgtcatgagacgtggccaattcatgaaaagatga

SEQ ID NO: 7127 - DNA, 2514 bp, Saccharomyces cerevisiae
atggttaaagtaaagtcgaaaaagaactcattaacaagttctctagataacaagatcgtcgatcttatctatcgtctcttggaagaaaaaactttggacagaaaaaggtctctgagacaagaatcccaaggagaagagggcgagaacaacgagggtgaagaagatgaggatatatttgaatccatgtttttcgctaaagatttaacagcaggtgagatttttaccttttgtttgactaaagatttatcacttcaaagagttaagaaagttgtcttacaaaagacaattgaccgcatgctaaaagacgtgattgaatcagaattggaagaatttggttcttacccaggttacaacaacgaagaggaagagaaaccaagcttggaagaagaactagctaagaaaaatatgatgattgagcgagacacaaatgagatgaacaaacgcataactagcacgtggtccaaatctggatctgtttccgagtctataacagaaactgatgatcctaagacagaagaggttaaaaaatctaaaaaaagatccaaagaaggtacatgtaaggtaaaacgtcaaaaaatcaaggaagatagatctccacctaattcgtctctgaaatccttaggtggtatggatgatgtcgttgcacaacttatggaactaataggtctacccattcttcatccagagatatttttatccacgggtgtcgaaccacctagaggtgttctgttgcatggcccaccgggttgcggtaagacgtcgattgctaatgcgttagctggagaattacaagtcccatttatatctatttctgcaccttcagtcgtaagtggtatgtctggggaaagcgagaaaaagattagggatttgtttgatgaagcgagaagcttggcaccatgtcttgttttctttgatgaaatagatgccattacaccaaaacgtgatggaggagcccaaagagaaatggagagaagaatagttgcccaattattgacctcaatggatgaattaacgatggaaaagacaaatggaaaacctgttattatcataggtgccacgaatagacctgactctttggatgcagcattgagaagagcaggtagattcgatagagaaatatgcctgaatgtcccgaatgaagtctcaaggttacatattttaaagaaaatgtctgataacctaaaaattgatggtgctatcgattttgccaaattggcaaaattaaccccaggctttgttggcgctgatttaaaggctttagttactgctgccggtacatgcgctattaaaagaattttccaaacctatgctaatataaaatccacaccaactacggcaacggacagttcagaagataacatggaaattgatgaaacagcaaacggagatgaatctagcctgaagaacactgcgaatatgatcgatccgttgcctttatccgtagtccaacaatttattcgtaattatcctgagcctttatcaggagagcagttatcattattatcgattaagtacgaagattttttgaaagcgttgccaacaattcaaccaacagcaaagagagaagggttcgctacggtacctgatgttacttgggctaatgtaggcgcattgcaaagagttagacttgaattaaatatggctattgtgcaacccatcaagagaccagagctttatgaaaaagtgggaattagcgcccctggtggtgttttattgtggggaccaccaggttgtggtaaaacgttactagcaaaagctgttgccaatgaatctcgtgcaaatttcatatcaatcaaaggtcctgaattattaaataaatacgttggtgaatcagaaaggtccatcagacaagtttttactagagcaagggcgtctgtaccgtgtgttatattttttgatgaactggacgctttggtgccaagaagagatacttctttgtccgaatcctcctcaagagtcgtcaacactttgttaacggaattagatgggctgaacgatagaaggggaatttttgtgattggcgccactaatagacctgatatgattgatcctgctatgttaagaccgggcagattggataagagtttgtttattgagttacctaatactgaggaaaaactagatattatcaaaactttgaccaaatcacacggaacacctctgagtagcgatgttgattttgaagaaattatcagaaatgagaagtgcaacaatttttcaggcgctgacttggctgctttagtcagggagagttcagtcttggctctaaaaaggaagttttttcagagcgaagaaatacaatctgttcttgataatgacttagacaaggaatttgaggatctatcggttggcgtatctggcgaagaaattattgtgaccatgtctgacttccgaagtgcattaagaaagattaaaccctctgtgagcgataaagatagactgaaatatgatagattaaataagaaaatgggtttaacggaggagatgaaggatgcggaagaaatgaaacaataa

SEQ ID NO: 7128 - DNA, 2514 bp, Artificial Sequence
  Description of Artificial Sequence: Synthetic polynucleotide
atggttaaagtaaagagtaaaaagaactctttaacaagttctttagataacaagatcgtcgatcttatctatcgtctcttggaagaaaaaactttggacagaaaaaggtctttgagacaagaatcccaaggagaagagggcgagaacaacgagggtgaagaagatgaggatatatttgaatccatgtttttcgctaaagatttaacagcaggtgagatttttaccttttgtttgactaaagatttatctcttcaaagagttaagaaagttgtcttacaaaagacaattgaccgcatgttgaaagacgtgattgaaagtgaattggaagaatttggttcttacccaggttacaacaacgaagaggaagagaaaccaagcttggaagaagaattggctaagaaaaatatgatgattgagagagacacaaatgagatgaacaaacgcataactagcacgtggtccaaatctggatctgtttccgagtctataacagaaactgatgatcctaagacagaagaggttaaaaaatctaaaaaaagatccaaagaaggtacatgtaaggtaaaacgtcaaaaaatcaaggaagatagatctccacctaattcttctttgaaatccttaggtggtatggatgatgtcgttgcacaacttatggaattgataggtttgcccattcttcatccagagatatttttatccacgggtgtcgaaccacctagaggtgttttattgcatggcccaccgggttgcggtaagacgtccattgctaatgcgttagctggagaattacaagtcccatttatatctatttctgcaccttctgtcgtaagtggtatgtctggggaaagcgagaaaaagattagggatttgtttgatgaagcgagaagcttggcaccatgtcttgttttctttgatgaaatagatgccattacaccaaaacgtgatggaggagcccaaagagaaatggagagaagaatagttgcccaattattgacctccatggatgaattaacgatggaaaagacaaatggaaaacctgttattatcataggtgccacgaatagacctgactctttggatgcagcattgagaagagcaggtagattcgatagagaaatatgcttgaatgtcccgaatgaagtctccaggttacatattttaaagaaaatgtctgataacttgaaaattgatggtgctatcgattttgccaaattggcaaaattaaccccaggctttgttggcgctgatttaaaggctttagttactgctgccggtacatgcgctattaaaagaattttccaaacctatgctaatataaaatccacaccaactacggcaacggacagttctgaagataacatggaaattgatgaaacagcaaacggagatgaatctagcttgaagaacactgcgaatatgatcgatccgttgcctttatccgtagtccaacaatttattcgtaattatcctgagcctttatctggagagcagttatctttattatccattaagtacgaagattttttgaaagcgttgccaacaattcaaccaacagcaaagagagaagggttcgctacggtacctgatgttacttgggctaatgtaggcgcattgcaaagagttagacttgaattaaatatggctattgtgcaacccatcaagagaccagagctttatgaaaaagtgggaattagcgcccctggtggtgttttattgtggggaccaccaggttgtggtaaaacgttattggcaaaagctgttgccaatgaatctcgtgcaaatttcatatccatcaaaggtcctgaattattaaataaatacgttggtgaaagtgaaaggtccatcagacaagtttttactagagcaagggcgtctgtaccgtgtgttatattttttgatgaattagacgctttggtgccaagaagagatacttctttgtccgaatcctccagcagagtcgtcaacactttgttaacggaattagatgggttgaacgatagaaggggaatttttgtgattggcgccactaatagacctgatatgattgatcctgctatgttaagaccgggcagattggataagagtttgtttattgagttacctaatactgaggaaaaattggatattatcaaaactttgaccaaatctcacggaacacctttgagtagcgatgttgattttgaagaaattatcagaaatgagaagtgcaacaatttttctggcgctgacttggctgctttagtcagggagagttctgtcttggctttgaaaaggaagttttttcagagcgaagaaatacaatctgttcttgataatgacttagacaaggaatttgaggatttaagtgttggcgtatctggcgaagaaattattgtgaccatgtctgacttcagaagtgcattaagaaagattaaaccctctgtgagcgataaagatagattgaaatatgatagattaaataagaaaatgggtttaacggaggagatgaaggatgcggaagaaatgaaacaatga

SEQ ID NO: 7129 - DNA, 693 bp, Saccharomyces cerevisiae
atgcgtaagccttctattacgataacaacagcaaaagctattataactccagactatactcttattaaatcgcattctaaataccaacttccttcacgttttcaaaagctagatgcagactcacctgagagaagtacagttgttaagctattttaccgccgatttatgaggcttaagcctttcatatcgaatgtgaaaatggttaaagatacttacagggattatgttcgatataagtttatgaaagaaaactacgaactcaaacgatacttggtattcaatcctgatggcttgaggtcgaaaatcaatcttgagcttctcagcaacacgaaatgttgtgaaaggatactccccgtgactgagatgcaaagaaccttggaatttgttctgaagagctgttcatacttgcccgaaacaaaagttcaaaagtgggatattgcaagggacaacacatattgcaggcaaattttaaagaaccttttaacaatgcaatatgaaaagtacagatcgattttgcatagaggaataggccatgatgagcttgacgtcaaattctctcatttgaaaactacttctagtccgctaactaagctaaataaaaccgaaaagaaaaagattccgcttttcaaagtatttagtgatttcgatacaacattgatatatctcaatgagacattaggtacaaggttataa

SEQ ID NO: 7130 - DNA, 693 bp, Artificial Sequence
  Description of Artificial Sequence: Synthetic polynucleotide
atgcgtaagccttctattacgataacaacagcaaaagctattataactccagactatactcttattaaatctcattctaaataccaacttccttctcgttttcaaaagttggatgcagactctcctgagagaagtacagttgttaagttattttaccgcagatttatgaggcttaagcctttcatatccaatgtgaaaatggttaaagatacttacagggattatgttagatataagtttatgaaagaaaactacgaactcaaaagatacttggtattcaatcctgatggcttgaggtccaaaatcaatcttgagcttctcagcaacacgaaatgttgtgaaaggatactccccgtgactgagatgcaaagaaccttggaatttgttttgaagagctgttcttacttgcccgaaacaaaagttcaaaagtgggatattgcaagggacaacacatattgcaggcaaattttaaagaaccttttaacaatgcaatatgaaaagtacagatctattttgcatagaggaataggccatgatgagcttgacgtcaaattctctcatttgaaaactacttctagtccgttgactaagttgaataaaaccgaaaagaaaaagattccgcttttcaaagtatttagtgatttcgatacaacattgatatatctcaatgagacattaggtacaaggttatga

SEQ ID NO: 7131 - DNA, 2478 bp, Saccharomyces cerevisiae
atggataacttcaaaatttacagtacagttatcacaactgcttttttacaagttccacacttatacacgacaaatagattatggaagcccatagaagcaccttttttagttgaatttcttcaaaaaagaataagctccaaagaacttaaaaacacaaaagcaatctgtcatatagatccctcatgggtcaatctaaatgcttctttcattagagatgacatgatctcaataaaagctaccacagatgatatggacctcgatgctatttgcaggatttctttgcccttacctatgaacacaaatgatctaacagcagaattggaaaaaatgaaacgtatactattggacttgagtgaaaaattcaatttagaactaatcatcaccaaagaaccagcttacttcacaccagaacagacaggcgagagcaaggaattatgtatttacgtgcatgcattaggattccgatctaatttaatggaatgcgaaccccagttattggcatttgtcgatttaataaagaagaatggtatgactttgcctccacaacactacattatcgaacctatggaactgaactcatactctgtgcttcccttatatatgggtgtagatatggaaaacttcaaacatatatccagagcttttaaaaccagcatttacgcaccttccctcattacgctgtctagggatcttaaggcaaatccacaaatcttcttctcaggcgctgtccattcactaagtttactggctaggaaaactctacgtgagtccataagcgtgaattcaaagagttttttttatcgtcgattgactaatattaccccaggaaaactactgtttatccgaaaatactaccaacaaaaggtaaaccagttaattttgaaataccaatcgcttattagagttactaacgaatacattgaatttcaatcgatttccacgaacttattagaaatggttattaagaacttcactattcaagtattacatgaaattgtagaagtacagatttcactcaatgaaaactgcgcaatgtccccggaattaataatcgacagctttttcggacacactggaaaccaaattgtagtaataactcccaaagaggattccttcaaccaattaatagtagttggtaaccaatcttccacagatgaggcgtccgatacttccatattgcattacttatctgattttattatgggctcaaatcaagtgattaatccaaacttaagacagataaaagccattttcgagatacatcctgattttgaagacttcatatcaggcaagaaaaatggtaaattaacacgtataatggaactatctgcttgcttaattcaactggaaatggaagaggaagatgataacctttatttaaatttggttagtgactctttccctgatttcaaggaatcatttaagaatgttataaatgaatttcctgccgaagaatctttcttcattcctgaagtttgtcacagaccgattataggtacaggtggttccttaattcaagccacaatgagaaagcataacgtcttcattcagttttccaatagtttcaatcttccacaaaataaaatttctatgatcaggtatgataatgtgataattaggtgccccaggaaaaacaaagctaatatatgcctagccaagaatgatttaaaacaaattgttcaagaatatgatagtttacaatcgaagacgctcattagattttctagtgggcaatatagacatattttgcatgttaacggccaaaagaatattataggacaaatcgaaaagaacgaaaatgtttacataatgataccgttaaaagagcccttggatggaacatctcaattgagtatacaaggaaatgatgagaatgcatcaagagccgctaacgaattggttaatagtgcgtttggttatgaatacgagttcaaaatagatcaagagatagatcccaataaagaatacgaattttataacctaattgttgttccatttttgcaaattatgaacataattgtaacttttgagaaggaccttatcacttttacttttgaaaaggatactaatgagaatactctaacaaaagcaatcgaattactatccaattatttggaaacacaaaagacgaaaataatatttaaaaaaataattaaaaaatttgttctagggtctgcctccagcaagagtaacaccagtaatagcaataccaatggcaatttcagatcaatgaataatgccaaaagtcgtacgaccatcgataataccagccaatcaggagcctcaccacaacgccacaaaatgcctgttataacgacggtaggaggagcccaagccatcaaaggatatataccaaacacttattacaacggatatgggtatggatacggatatacatacgagtacgattataattatgccaactctaataaagctcaaaccaataataggcataaatatcaaaatggcagaaaatga

SEQ ID NO: 7132 - DNA, 2478 bp, Artificial Sequence
  Description of Artificial Sequence: Synthetic polynucleotide
atggataacttcaaaatttacagtacagttatcacaactgcttttttacaagttccacacttatacacgacaaatagattatggaagcccatagaagcaccttttttagttgaatttcttcaaaaaagaataagctccaaagaacttaaaaacacaaaagcaatctgtcatatagatcccagctgggtcaatttgaatgcttctttcattagagatgacatgatctccataaaagctaccacagatgatatggacctcgatgctatttgcaggatttctttgcccttacctatgaacacaaatgatttaacagcagaattggaaaaaatgaaacgtatattattggacttgagtgaaaaattcaatttagaattgatcatcaccaaagaaccagcttacttcacaccagaacagacaggcgagagcaaggaattatgtatttacgtgcatgcattaggattcagatctaatttaatggaatgcgaaccccagttattggcatttgtcgatttaataaagaagaatggtatgactttgcctccacaacactacattatcgaacctatggaattgaactcttactctgtgcttcccttatatatgggtgtagatatggaaaacttcaaacatatatccagagcttttaaaaccagcatttacgcaccttccctcattacgttgtctagggatcttaaggcaaatccacaaatcttcttcagtggcgctgtccattctttgagtttattagctaggaaaactttacgtgagtccataagcgtgaattctaagagttttttttatcgtcgtttgactaatattaccccaggaaaattactttttatcagaaaatactaccaacaaaaggtaaaccagttaattttgaaataccaatctcttattagagttactaacgaatacattgaatttcaatctatttccacgaacttattagaaatggttattaagaacttcactattcaagtattacatgaaattgtagaagtacagatttctctcaatgaaaactgcgcaatgtccccggaattaataatcgacagctttttcggacacactggaaaccaaattgtagtaataactcccaaagaggattccttcaaccaattaatagtagttggtaaccaatcttccacagatgaggcgtccgatacttccatattgcattacttatctgattttattatgggcagtaatcaagtgattaatccaaacttaagacagataaaagccattttcgagatacatcctgattttgaagacttcatatctggcaagaaaaatggtaaattaacacgtataatggaattatctgcttgcttaattcaattggaaatggaagaggaagatgataacctttatttaaatttggttagtgactctttccctgatttcaaggaaagttttaagaatgttataaatgaatttcctgccgaagaatctttcttcattcctgaagtttgtcacagaccgattataggtacaggtggttccttaattcaagccacaatgagaaagcataacgtcttcattcagttttccaatagtttcaatcttccacaaaataaaatttctatgatcaggtatgataatgtgataattaggtgccccaggaaaaacaaagctaatatatgcttagccaagaatgatttaaaacaaattgttcaagaatatgatagtttacaatccaagacgctcattagattttctagtgggcaatatagacatattttgcatgttaacggccaaaagaatattataggacaaatcgaaaagaacgaaaatgtttacataatgataccgttaaaagagcccttggatggaacatctcaattgagtatacaaggaaatgatgagaatgcatctagagccgctaacgaattggttaatagtgcgtttggttatgaatacgagttcaaaatagatcaagagatagatcccaataaagaatacgaattttataacttgattgttgttccatttttgcaaattatgaacataattgtaacttttgagaaggaccttatcacttttacttttgaaaaggatactaatgagaatactttgacaaaagcaatcgaattattatccaattatttggaaacacaaaagacgaaaataatatttaaaaaaataattaaaaaatttgttttggggtctgcctccagcaagagtaacaccagtaatagcaataccaatggcaatttcagaagtatgaataatgccaaaagtcgtacgaccatcgataataccagccaaagtggagcctctccacaacgccacaaaatgcctgttataacgacggtaggaggagcccaagccatcaaaggatatataccaaacacttattacaacggatatgggtatggatacggatatacatacgagtacgattataattatgccaactctaataaagctcaaaccaataataggcataaatatcaaaatggcagaaaatga

SEQ ID NO: 7133 - DNA, 3054 bp, Saccharomyces cerevisiae
atggatgaaaagacaattaaaaagtcgattctttcatcttccaatgatgaaaaaataatatacaaatcgcgaataaagaaatttcaaaagaatcataaattttatattattctattggttttcatcgccattttacaattcatatcaatagcttttttcactcggggattcttactgtcaagacacgttcttgataatatttcctcacaaaacgaaacgagtaagttacctcctaggttcaacaaggcggtgattttggttattgacgctttgagatttgatttcgctattcctgtaaacgaatcccactctaattacaacttgaactatcataataatatattatcattgtatgattcttttgcaagcgataaggatgcatcttccctattgttgaagttcattgccgacccaccaaccactactttacaaagactcaagggtctcacaacagggtccttaccgactttcattgatgccgggtctaacttcgatggaacagtaatcgaagaggataactttcttaaacagctccatttggcaaataagactgtcaaatttgccggagatgatacatggatggctctgttccatccgttcctttccaacgatagtttcccactagaatcactcaatgtgtgggacttagatactgtcgataacggtgttatggattacttccatgatcatttacagcaggacaaggaatgggacgtcatgattggacacatgctaggtattgaccatgtgggccacaaatatggccccgaccattttactatgagggaaaaacaaattcaagtagatcaatttatcgattggatactaaaatcgatcgatgatgataccttattggttattttgggtgaccatggaatggaccatacgggcaatcacggtggcgactccatcgacgagctcgaaagcactttatttctttattctaagaagccggacatgtggagacttaaagaaacttcgaattacaacattgataatttgggacacgattaccgttcagtgagacaaattgatttggtgtctagtttggcgttattgatgggccaaccgataccatttaacaatcttggatggcctattgacgaaatagcaagaaacgatagagaatggtctcaatttgtcaactcagcgataagccaattacaattatataaggacacgatgcagatccaccatggcaatgacgaaatattggaaccgttagcgaaaaatatatctaacacccccccaacaagcgatccagaaaaatttgttaagctgggtcataaataccaaaaggtcttcttgcagacctgcgaagaactatgggccaaattcgattattattccattgccaccggtataacgctactggccacttcactggtcctgttgatatccattacaaaattaattccttctattgttgtgaatcaaatggttccagaattcgttccgggaattatcataatggtcttagttacaaacctatgtttccatggaattttttacgtttatcaacaaccaagttttgtagaccaattctggggtaccctgttagcgactgcaattggtatcattattggttgttatatcacaatatttgataggtacaactttatttggattgctatgagactgggtgaaacattagctgattattggtcaagaattgctgtcatgtttatgattattcatgctttgcttttcacttccaattcatttactatttgggaggatagaattgtagcattccttttatctactttcggcatgttgacgttgtatgaatttgtcttcttaccaaaaaggcaatccaccactgcattattaactgcaacaatcagtgaaaaggaaggaaccacttcaggggtcaatccttcgacagcaaattcaaattacttaccattaacaagatttgcaagattactaggaggttaccattctgcagttttaatcatttttacccggttagcttctatgattaccatttgtagagaggaacaaggcgaatattgtattccaacatttaataatcaaaacaattcctcgtggtgggttttgggtctctgtttcctaatgatattcatattacctgcatgcatcaccggttattataatctaacatcgtcttatcaagctgcagctccaatttggataaacgttttcctaaagggtatccttggtttgaactttgtttattggtcattgacttcattagaaaataacagtgcggtaatagcaataccgttcttacgggacgtcactatttttaaatttacgttggctagaattattgccggtttttcattgattgcttctaatgtcggctggctaatgggaccactttgtattaaattaaacattcataatactgatgttaagtctcacgaagcaacaattttaggttatactaatatttacggctcagagttttttcttttggtcataaacgttctcattagtatcctactattcaacaaacccctggcccagttgtcatacttcctcatgtgcaaccaactactatcaattttagaaattatcgatcttttaaaattaaaggaaaacataattggtccaattgcgttgggactcttatcttaccaacattttttcaccaccggtcatcaagccacaattccatcagtgcaatgggatatcggatttatgctgtctgaaaaggtaacgttccccttcactcagatagccatcatcctaaatacatttgggcctcatattctcgtctccttatctgtagcgttactgacactgtggtcacagcctcctgatgtgttgaagccacaaacacttttaggaagaattgtgtcaaactgcggtatattactcacttacaatactattttatgtctaagctcctttatttgggttactcacttccgtagacacttgatggtttggaaaatcttctgcccaaggtttatctttgcttctttaagtttaatagtcactcaactggtcgttacttttggtacaattgcatttgctagtgggagattgattaagcacataaatgacattttttggaaatga

SEQ ID NO: 7134 - DNA, 3054 bp, Artificial Sequence
  Description of Artificial Sequence: Synthetic polynucleotide
atggatgaaaagacaattaaaaagtctattctttcttcttccaatgatgaaaaaataatatacaaatctagaataaagaaatttcaaaagaatcataaattttatattattttattggttttcatcgccattttacaattcatatccatagcttttttcactagaggattcttattatctagacacgttcttgataatatttcctctcaaaacgaaacgagtaagttacctcctaggttcaacaaggcggtgattttggttattgacgctttgagatttgatttcgctattcctgtaaacgaatcccactctaattacaacttgaactatcataataatatattatctttgtatgattcttttgcaagcgataaggatgcatcttccttattgttgaagttcattgccgacccaccaaccactactttacaaagactcaagggtctcacaacagggtccttaccgactttcattgatgccgggtctaacttcgatggaacagtaatcgaagaggataactttcttaaacagctccatttggcaaataagactgtcaaatttgccggagatgatacatggatggctttattccatccgttcctttccaacgatagtttcccattggaatctctcaatgtgtgggacttagatactgtcgataacggtgttatggattacttccatgatcatttacagcaggacaaggaatgggacgtcatgattggacacatgttgggtattgaccatgtgggccacaaatatggccccgaccattttactatgagggaaaaacaaattcaagtagatcaatttatcgattggatattgaaatctatcgatgatgataccttattggttattttgggtgaccatggaatggaccatacgggcaatcacggtggcgactccatcgacgagctcgaaagcactttatttctttattctaagaagccggacatgtggagacttaaagaaacttccaattacaacattgataatttgggacacgattaccgttctgtgagacaaattgatttggtgtctagtttggcgttattgatgggccaaccgataccatttaacaatcttggatggcctattgacgaaatagcaagaaacgatagagaatggtctcaatttgtcaactctgcgataagccaattacaattatataaggacacgatgcagatccaccatggcaatgacgaaatattggaaccgttagcgaaaaatatatctaacacccccccaacaagcgatccagaaaaatttgttaagttgggtcataaataccaaaaggtcttcttgcagacctgcgaagaattatgggccaaattcgattattattccattgccaccggtataacgttattagccacttctttggtcttattgatatccattacaaaattaattccttctattgttgtgaatcaaatggttccagaattcgttccgggaattatcataatggtcttagttacaaacttgtgtttccatggaattttttacgtttatcaacaaccaagttttgtagaccaattctggggtaccttattagcgactgcaattggtatcattattggttgttatatcacaatatttgataggtacaactttatttggattgctatgagattaggtgaaacattagctgattattggtccagaattgctgtcatgtttatgattattcatgctttgcttttcacttccaattcttttactatttgggaggatagaattgtagcattccttttatctactttcggcatgttgacgttgtatgaatttgtcttcttaccaaaaaggcaatccaccactgcattattaactgcaacaatcagtgaaaaggaaggaaccacttctggggtcaatccttctacagcaaatagtaattacttaccattaacaagatttgcaagattattaggaggttaccattctgcagttttaatcatttttaccagattagcttctatgattaccatttgtagagaggaacaaggcgaatattgtattccaacatttaataatcaaaacaattcctcttggtgggttttgggtctctgtttcttaatgatattcatattacctgcatgcatcaccggttattataatttgacatcttcttatcaagctgcagctccaatttggataaacgttttcttgaagggtatccttggtttgaactttgtttattggtctttgacttctttagaaaataacagtgcggtaatagcaataccgttcttaagagacgtcactatttttaaatttacgttggctagaattattgccggtttttctttgattgcttctaatgtcggctggttaatgggaccactttgtattaaattaaacattcataatactgatgttaagtctcacgaagcaacaattttaggttatactaatatttacggcagtgagttttttcttttggtcataaacgttctcattagtatcttattattcaacaaacccttagcccagttgagttacttcctcatgtgcaaccaattattatccattttagaaattatcgatcttttaaaattaaaggaaaacataattggtccaattgcgttgggactcttatcttaccaacattttttcaccaccggtcatcaagccacaattccatctgtgcaatgggatatcggatttatgctttctgaaaaggtaacgttccccttcactcagatagccatcatcttgaatacatttgggcctcatattctcgtctccttatctgtagcgttattaacattatggtctcagcctcctgatgtgttgaagccacaaacacttttaggaagaattgtgtctaactgcggtatattactcacttacaatactattttatgtttgagctcctttatttgggttactcacttccgtagacacttgatggtttggaaaatcttctgcccaaggtttatctttgcttctttaagtttaatagtcactcaattggtcgttacttttggtacaattgcatttgctagtgggagattgattaagcacataaatgacattttttggaaatga

SEQ ID NO: 7135 - DNA, 342 bp, Saccharomyces cerevisiae
atgtattttgcatttaaaggattatgcgggagaagatttctgcccattgcctcttttcttactatattgaatagaatattattccaatactggcttttttacaattcattaaaagaggaaaagacatttcagaaaattttcttctctatgaaccttaaatgtaggaaaaaaaaggaaccaaaccacatcatttactctcaaccgcctttcttgttggggttcatggtacaattgcaaagttgtgtcaagttgttgccactctatcttttgtttttgttacagggtaatggcgcacattatgcaagcgcgatgacgagcaaggtactttcttttttcctttaa

SEQ ID NO: 7136 - DNA, 342 bp, Artificial Sequence
  Description of Artificial Sequence: Synthetic polynucleotide
atgtattttgcatttaaaggattatgcgggagaagatttttgcccattgcctcttttcttactatattgaatagaatattattccaatactggcttttttacaattctttaaaagaggaaaagacatttcagaaaattttcttctctatgaaccttaaatgtaggaaaaaaaaggaaccaaaccacatcatttactctcaaccgcctttcttgttggggttcatggtacaattgcaaagttgtgtcaagttgttgccactctatcttttgtttttgttacagggtaatggcgcacattatgcaagcgcgatgacgagcaaggtactttcttttttcctttga

SEQ ID NO: 7137 - DNA, 2250 bp, Saccharomyces cerevisiae
atgacttcgaaaccatccaccagtgacggcagggctcactcgatttcccatgtacctggcacgcacatgagaggaacatcggcatcacacagccccagaccgtttaggccatgtgcggattgtacgtgttctccaggcttactgtctaggcaaggtcgtagagcctctctatttttaagacagttagaaaattcaaggaggtcctccagcatgcttctcaacgagttgaagggcgctggcggaggtagcagtgctggaaatgggtctgtttactcatgtgactctctatgcgctgttaacagggaagttaacactactgatagattgttgaagttgcgtcaggagatgaagaaacacgatttgtgttgttatattgtgcccagttgtgacgaacatcagtccgaatatgtatcattgcgagatcaaaggcgcgccttcatttcagggttttccggatcggccggtgtagcctgtatcaccagagacttgttaaatttcaacgatgaccatccggatgggaaatccattttgagtactgatggaagatatttcaatcaagctagacaagaactagattataattggacacttttgaggcaaaacgaagacccaatcacttggcaagaatggtgtgtcagagaagctttggaaatggccaagggacttggcaataaagagggaatggtgttgaagataggtattgacccaaaacttatcactttcaacgactatgtttcttttagaaaaatgattgacactaaatatgacgcaaagggtaaagtggagctggttcccgtggaggaaaacttagttgacagtatttggcctgattttgaaactctacctgaaaggccttgtaacgatttactactgttaaaatacgagtttcatggtgaagaattcaaagacaagaaggaaaagttactgaaaaagctgaatgataaggcttcctctgcgacgaccggtaggaatactttcatagtagttgcgttggatgaaatttgttggttgttgaacttgcgtggatccgacattgactataatccagtttttttctcctacgtggctattaacgaagacgaaaccattcttttcaccaataaccccttcaatgatgacatatcggaatattttaagataaacggtattgaagtcagaccttacgaacagatatgggaacatttaacaaagataacttcgcaggcttcttctgcggagcatgaatttttgattcctgatagtgcatcgtggcagatggttcgttgtttgaacacctcaaccaacgctaacggtgcaatagctaaaaaaatgactgcacaaaactttgcgataattcactcacccatcgatgttttgaaatctatcaagaatgacatcgaaataaaaaacgcacacaaggcgcaggtcaaagacgcagtatgtttagtgcagtattttgcatggctggagcagcaattagtggggcgcgaggcactgatagatgaatatcgtgccgcagaaaaattgaccgagattaggaaaacccaaaggaacttcatgggcaattccttcgaaacaatatcctccacaggtagtaacgccgccatcatacattattcgccgcccgtagagaactcttcgatgattgatcctaccaagatatatctttgcgactccggttcgcaattcttggagggtacaactgatataacaagaacaattcacttaacaaagccaaccaaagaagaaatggataattacacactggtacttaaaggtggcttagccctagagaggttgatttttcccgaaaacactcccgggtttaatatcgacgccatcgctaggcagtttttatggtcccgcgggttagattacaaacatggcacaggccatggtatcggatcatttttaaacgttcacgaaggacccatgggtgtcggctttaggccacatctgatgaatttccccttaagagcgggtaacataataagtaacgaaccaggttattataaggatggtgagtatggtatcaggattgaaagcgacatgttaatcaagaaggccactgagaagggtaacttcttgaaattcgaaaacatgactgtggttccctattgcaggaagttgatcaatactaagttactaaacgaagaagaaaaaacacagattaacgagtaccacgcaagggtatggaggacaatagtgcattttctgcagcctcagagtatttcatacaagtggctgaaaagagaaacaagcccactatga

SEQ ID NO: 7138 - DNA, 2250 bp, Artificial Sequence
  Description of Artificial Sequence: Synthetic polynucleotide
atgacttctaaaccatccaccagtgacggcagggctcactctatttcccatgtacctggcacgcacatgagaggaacaagtgcatctcacagccccagaccgtttaggccatgtgcggattgtacgtgttctccaggcttattatctaggcaaggtcgtagagcctctttatttttaagacagttagaaaattctaggaggtcctccagcatgcttctcaacgagttgaagggcgctggcggaggtagcagtgctggaaatgggtctgtttactcttgtgactctttatgcgctgttaacagggaagttaacactactgatagattgttgaagttgcgtcaggagatgaagaaacacgatttgtgttgttatattgtgcccagttgtgacgaacatcagtccgaatatgtatctttgagagatcaaaggcgcgccttcatttctgggttttccggatctgccggtgtagcctgtatcaccagagacttgttaaatttcaacgatgaccatccggatgggaaatccattttgagtactgatggaagatatttcaatcaagctagacaagaattagattataattggacacttttgaggcaaaacgaagacccaatcacttggcaagaatggtgtgtcagagaagctttggaaatggccaagggacttggcaataaagagggaatggtgttgaagataggtattgacccaaaacttatcactttcaacgactatgtttcttttagaaaaatgattgacactaaatatgacgcaaagggtaaagtggagttagttcccgtggaggaaaacttagttgacagtatttggcctgattttgaaactttacctgaaaggccttgtaacgatttattattattaaaatacgagtttcatggtgaagaattcaaagacaagaaggaaaagttattgaaaaagttgaatgataaggcttcctctgcgacgaccggtaggaatactttcatagtagttgcgttggatgaaatttgttggttgttgaacttgcgtggatccgacattgactataatccagtttttttctcctacgtggctattaacgaagacgaaaccattcttttcaccaataaccccttcaatgatgacatatctgaatattttaagataaacggtattgaagtcagaccttacgaacagatatgggaacatttaacaaagataacttctcaggcttcttctgcggagcatgaatttttgattcctgatagtgcatcttggcagatggttcgttgtttgaacacctccaccaacgctaacggtgcaatagctaaaaaaatgactgcacaaaactttgcgataattcactcccccatcgatgttttgaaatctatcaagaatgacatcgaaataaaaaacgcacacaaggcgcaggtcaaagacgcagtatgtttagtgcagtattttgcatggttggagcagcaattagtggggcgcgaggcattaatagatgaatatcgtgccgcagaaaaattgaccgagattaggaaaacccaaaggaacttcatgggcaattccttcgaaacaatatcctccacaggtagtaacgccgccatcatacattattctccgcccgtagagaactcttctatgattgatcctaccaagatatatctttgcgactccggttctcaattcttggagggtacaactgatataacaagaacaattcacttaacaaagccaaccaaagaagaaatggataattacacattggtacttaaaggtggcttagccttagagaggttgatttttcccgaaaacactcccgggtttaatatcgacgccatcgctaggcagtttttatggtcccgcgggttagattacaaacatggcacaggccatggtatcggaagttttttaaacgttcacgaaggacccatgggtgtcggctttaggccacatttaatgaatttccccttaagagcgggtaacataataagtaacgaaccaggttattataaggatggtgagtatggtatcaggattgaaagcgacatgttaatcaagaaggccactgagaagggtaacttcttgaaattcgaaaacatgactgtggttccctattgcaggaagttgatcaatactaagttattaaacgaagaagaaaaaacacagattaacgagtaccacgcaagggtatggaggacaatagtgcattttttgcagcctcagagtatttcttacaagtggttgaaaagagaaacaagcccattgtga

SEQ ID NO: 7139 - DNA, 1761 bp, Saccharomyces cerevisiae
atgtcggatcattctcccatttctaataaggaaaatcatctgctgccatcagactcgtcaagaagctcatccagcgatatgcattcgacgggcaccacgggaaccacaggcgtcgaacctgtagatttcaccggtgaaggtgccaaatacacaactgctacggagggcaatggtggtgcagatttagcgattcaaagaacgacgactatgaattctgctgcagaatcagaggttaatatcacgagaagattaactaaaatccttactgggtctgttaacgagcctgaccgtgtagaggttgattataccaattgtgcgcccatgggtggtgacagaccttaccctccatcgttgccgagcagagacctgtacgaggttacttttgatggtcctaacgacccactacatccatttaactggcccatgaagaagaaagtgctgctatgtctggtcttatgtctggattctattgccattgctatgtgttcttccatttttgcctctgcagtgccgcaaatctgcgagatataccacgtcatcgaagttgtcgccattttgggtatcacgctttttgttcttgggtttgcggcctcaccggttatctatgctcctctttctgaattgtacggtagaaagggtgttctggttttatctgcgtttggatttgcccttttccaatttgctgtcgctactgctgagaacctgcaaactattttcatatgtagattctttggtggttttatcggggcagcacccatggccgtcgtccccgccgcgtttgccgacatgtttgatactaatgttagaggtaaagccattgcgctattttctctaggtgtttttgtaggccccattttatcgcctgtcatgggttcttatatcgcacaaagaactacctggagatggttagaatatgttgtcggttgtttcgcttccgcagttttcgttgccatcgtattgttctttgaagaaacacatcaccctaccattttggttaacaaggccaaacagatgagaaagcaaagtaataactggggtattcatgctgctcatgaagacgtggagctatccatcaaagacattgtccaaaaaactgtgacgaggcctatcattatgcttttcgtggaaccattgctactattcgtgactatttacaactcttttgtctacggtatcttgtatttgttactggaagcctacccacttgtctttgtggagggttatgggtttactgaaaacggtgagttgccatacatcgccttgattatcggtatgatggtgtgtgctgctttcatttggtatatggacaacgattatttgaaaagatgtagagccaaggggaaattagtgcccgaggccagattgtacgcaatggtcattgcaggtaccgttttccctattggtatcttatggttctgttggacgggctactatcctcacaagattcattggatggtccccacagtaggaggggccttcatcgggttcggtttaatgggtattttcttgccatgtttaaactatatcattgaatcgtatctattgttggcagcttctgccgtcgcagcaaacactttcatgaggtctgcatttggtgcatgcttcccattgtttgcaggatatatgttccgtggcatgggtatcggttgggctggtttgttattaggtctatttgccgctgcgatgattcccgtgcctttactattcttaaaatatggtgaatctatcagaaagaaatccaagtatgcttacgccgcttaa

SEQ ID NO: 7140 - DNA, 1761 bp, Artificial Sequence
  Description of Artificial Sequence: Synthetic polynucleotide
atgagtgatcattctcccatttctaataaggaaaatcatttattaccatctgactcttctagaagctcttccagcgatatgcattctacgggcaccacgggaaccacaggcgtcgaacctgtagatttcaccggtgaaggtgccaaatacacaactgctacggagggcaatggtggtgcagatttagcgattcaaagaacgacgactatgaattctgctgcagaaagtgaggttaatatcacgagaagattaactaaaatccttactgggtctgttaacgagcctgaccgtgtagaggttgattataccaattgtgcgcccatgggtggtgacagaccttaccctccatctttgccgagcagagacttgtacgaggttacttttgatggtcctaacgacccattgcatccatttaactggcccatgaagaagaaagtgcttttatgtttggtcttatgtttggattctattgccattgctatgtgttcttccatttttgcctctgcagtgccgcaaatctgcgagatataccacgtcatcgaagttgtcgccattttgggtatcacgctttttgttcttgggtttgcggcctctccggttatctatgctcctctttctgaattgtacggtagaaagggtgttttggttttatctgcgtttggatttgcccttttccaatttgctgtcgctactgctgagaacttacaaactattttcatatgtagattctttggtggttttatcggggcagcacccatggccgtcgtccccgccgcgtttgccgacatgtttgatactaatgttagaggtaaagccattgcgttattttctttgggtgtttttgtaggccccattttatctcctgtcatgggttcttatatcgcacaaagaactacctggagatggttagaatatgttgtcggttgtttcgcttccgcagttttcgttgccatcgtattgttctttgaagaaacacatcaccctaccattttggttaacaaggccaaacagatgagaaagcaaagtaataactggggtattcatgctgctcatgaagacgtggagctttccatcaaagacattgtccaaaaaactgtgacgaggcctatcattatgcttttcgtggaaccattgttattattcgtgactatttacaactcttttgtctacggtatcttgtatttgttattggaagcctacccacttgtctttgtggagggttatgggtttactgaaaacggtgagttgccatacatcgccttgattatcggtatgatggtgtgtgctgctttcatttggtatatggacaacgattatttgaaaagatgtagagccaaggggaaattagtgcccgaggccagattgtacgcaatggtcattgcaggtaccgttttccctattggtatcttatggttctgttggacgggctactatcctcacaagattcattggatggtccccacagtaggaggggccttcatcgggttcggtttaatgggtattttcttgccatgtttaaactatatcattgaaagttatcttttgttggcagcttctgccgtcgcagcaaacactttcatgaggtctgcatttggtgcatgcttcccattgtttgcaggatatatgttccgtggcatgggtatcggttgggctggtttgttattaggtttatttgccgctgcgatgattcccgtgcctttattattcttaaaatatggtgaatctatcagaaagaaatccaagtatgcttacgccgcttga

SEQ ID NO: 7141 - DNA, 753 bp, Saccharomyces cerevisiae
atgataaacacaggaagaagcaggaattcagtactgctggcacacagattcctttcaactggaggattttggcgaggcggtacgaatggcacaatgtctcgcacaatcaacaacgtaaatcctttcaaattaaaattcataccgaagacagtgcccgcagctgcagactctgtctctccagatagtcaacgtccaggtaagaagcccttcaaattcatagtttccaatcagagcaagagtagcaaggcttctaaaagcccgaagtggtcgagctacgcattcccttcgcgtgagaccatcaaatctcatgaggaggccatcaagaagcagaataaagctatagacgagcaaatagctgctgcagtatccaagaatgactgctcttgcacagaacctcccaagaaaagaaagaggaaattgagaccaagaaaggcgctgatcaccctgagtccgaaggcaatcaagcatttaagggcactgctagctcagccggaacctaaattgattagagttagcgctagaaaccgtggatgttcaggactaacgtacgatctacaatatatcaccgagccggggaaattcgatgaggtagtagaacaagatggcgttaaaattgtcatcgattcaaaggcgttattcagcatcattggaagtgaaatggactggatcgacgacaagttggcctctaagtttgtcttcaagaatccaaactccaagggcacatgcggttgtggcgagagtttcatggtttaa

SEQ ID NO: 7142 - DNA, 753 bp, Artificial Sequence
  Description of Artificial Sequence: Synthetic polynucleotide
atgataaacacaggaagaagcaggaattctgtattgttggcacacagattcctttctactggaggattttggagaggcggtacgaatggcacaatgtctcgcacaatcaacaacgtaaatcctttcaaattaaaattcataccgaagacagtgcccgcagctgcagactctgtctctccagatagtcaacgtccaggtaagaagcccttcaaattcatagtttccaatcagagcaagagtagcaaggcttctaaaagcccgaagtggtctagctacgcattcccttctcgtgagaccatcaaatctcatgaggaggccatcaagaagcagaataaagctatagacgagcaaatagctgctgcagtatccaagaatgactgctcttgcacagaacctcccaagaaaagaaagaggaaattgagaccaagaaaggcgttgatcaccttaagtccgaaggcaatcaagcatttaagggcattattagctcagccggaacctaaattgattagagttagcgctagaaaccgtggatgttctggattaacgtacgatttgcaatatatcaccgagccggggaaattcgatgaggtagtagaacaagatggcgttaaaattgtcatcgattctaaggcgttattcagcatcattggaagtgaaatggactggatcgacgacaagttggcctctaagtttgtcttcaagaatccaaactccaagggcacatgcggttgtggcgagagtttcatggtttga

SEQ ID NO: 7143 - DNA, 2727 bp, Saccharomyces cerevisiae
atgaacgaccaaacgcaatttacagaaagggctctaacgattttgacgttggctcaaaaattggcttcggatcatcaacatccacaattacaacctatacatattctagctgccttcattgaaacgccagaagatggatcagtcccttacctacagaatctaattgagaagggccgttacgactatgatcttttcaagaaagtggttaatagaaatctagtaagaattcctcaacagcaacctgcacctgcggagataactccaagttatgctttggggaaagtccttcaagacgctgctaagattcaaaaacaacagaaggactcatttatagcgcaagaccatatattgtttgctctattcaatgattcgtctattcagcaaatatttaaggaagctcaagtagatattgaggccatcaagcaacaagctcttgaacttcgtggtaacactagaattgactctcgtggcgctgatacgaacacacctttggaatatttatcaaagtacgccattgatatgactgagcaggctcgtcaaggtaaacttgaccctgtcatcggccgtgaagaagaaataagaagcactattagagttttagcaagaagaattaagtccaacccatgtttaattggtgagccaggtatcggtaagaccgctattattgaaggtgttgctcaaagaatcattgacgatgacgttcccactatcttacaaggcgctaaattgttcagtctagatttggccgcattaaccgcaggtgctaaatacaaaggtgatttcgaagaaagattcaaaggtgttttgaaggaaatcgaagaatcaaagactctaattgtgttattcattgatgaaattcacatgttaatgggtaatggtaaggacgacgctgctaacatcttgaagccagctttgtccagaggccaattgaaggtcatcggtgccaccaccaataacgaatatagatctattgtggaaaaggatggtgcctttgaaagaagattccagaaaattgaagtcgctgaaccaagtgtgagacaaacagtggccatattgagaggtctgcaaccaaagtatgaaatacatcatggtgtaaggattctggatagcgccttagtcactgctgctcaattagccaagcgttacttgccatatagaagattgccagattctgctttggatttagttgatatttcttgtgctggtgtcgccgtcgcaagagattctaagccagaagaattggattccaaggaacgtcaattgcaattgattcaagtagagataaaagctctagagagagatgaagatgccgactccaccactaaagatagattaaagttagctaggcagaaggaagcttcattgcaagaagaattggaacctctaagacaacgttacaatgaagaaaagcatggccatgaagaattgacacaagctaaaaagaaattggatgaactggaaaacaaggcccttgatgctgaacgtagatatgatactgctaccgccgctgatttaaggtacttcgccatcccagatatcaaaaagcaaatcgaaaagcttgaagatcaggttgctgaggaagagagacgtgctggtgccaactccatgatccaaaatgtggtcgattcagacaccatttctgaaacagctgcaagattgactggtatccctgttaagaagttgtcagaatctgaaaatgaaaaattgattcatatggaacgtgacttatcatctgaagtcgtgggccaaatggatgccattaaagctgtttccaatgccgttagattgtctagatcaggtttagctaatccaaggcaaccagcatccttcttatttttaggtttgtccggttccggtaaaactgaattggctaaaaaagttgctggatttttgtttaatgatgaggacatgatgatcagggtcgattgttctgaattaagcgagaagtatgcggtctctaagttgttgggtaccacggcaggttatgtcgggtacgatgaaggtggctttttaactaaccaactgcaatacaaaccatactccgttttgttattcgatgaagtagaaaaggcacatcctgatgttttgactgtcatgctacaaatgttggatgacggtagaattacttctggtcaaggtaagacgatcgactgttccaattgtattgtcatcatgacttccaatctaggtgctgaatttatcaattctcaacaaggatcaaagatccaagaatctaccaagaatttggtcatgggtgctgttaggcaacatttcagaccagaatttttgaacagaatttctagtatagtcattttcaacaagctatctagaaaagctattcataagatcgtggatattcgtttgaaggaaattgaagagagattcgagcaaaatgataaacattacaagttgaatttaactcaagaggccaaggacttcttggccaaatatggttattccgatgatatgggtgcacgtccactgaacaggttaattcaaaacgaaattttgaacaaactggcactaaggatcttaaagaatgaaatcaaggataaggaaactgtcaatgtcgtcttgaagaagggtaaatctcgtgatgaaaatgttcctgaggaagctgaagaatgtctggaagttctaccaaatcacgaagctactataggggctgacacgttaggtgatgacgataatgaggacagtatggaaattgatgatgacctagattaa

SEQ ID NO: 7144 - DNA, 2727 bp, Artificial Sequence
  Description of Artificial Sequence: Synthetic polynucleotide
atgaacgaccaaacgcaatttacagaaagggctttgacgattttgacgttggctcaaaaattggcttctgatcatcaacatccacaattacaacctatacatattttggctgccttcattgaaacgccagaagatggatctgtcccttacttacagaatttaattgagaagggccgttacgactatgatcttttcaagaaagtggttaatagaaatttggtaagaattcctcaacagcaacctgcacctgcggagataactccaagttatgctttggggaaagtccttcaagacgctgctaagattcaaaaacaacagaaggactcttttatagcgcaagaccatatattgtttgctttattcaatgattcttctattcagcaaatatttaaggaagctcaagtagatattgaggccatcaagcaacaagctcttgaacttcgtggtaacactagaattgactctcgtggcgctgatacgaacacacctttggaatatttatccaagtacgccattgatatgactgagcaggctcgtcaaggtaaacttgaccctgtcatcggccgtgaagaagaaataagaagcactattagagttttagcaagaagaattaagtccaacccatgtttaattggtgagccaggtatcggtaagaccgctattattgaaggtgttgctcaaagaatcattgacgatgacgttcccactatcttacaaggcgctaaattgttcagtttggatttggccgcattaaccgcaggtgctaaatacaaaggtgatttcgaagaaagattcaaaggtgttttgaaggaaatcgaagaatccaagactttgattgtgttattcattgatgaaattcacatgttaatgggtaatggtaaggacgacgctgctaacatcttgaagccagctttgtccagaggccaattgaaggtcatcggtgccaccaccaataacgaatatagatctattgtggaaaaggatggtgcctttgaaagaagattccagaaaattgaagtcgctgaaccaagtgtgagacaaacagtggccatattgagaggtttacaaccaaagtatgaaatacatcatggtgtaaggattttagatagcgccttagtcactgctgctcaattagccaagcgttacttgccatatagaagattgccagattctgctttggatttagttgatatttcttgtgctggtgtcgccgtcgcaagagattctaagccagaagaattggattccaaggaacgtcaattgcaattgattcaagtagagataaaagctttggagagagatgaagatgccgactccaccactaaagatagattaaagttagctaggcagaaggaagcttctttgcaagaagaattggaacctttgagacaacgttacaatgaagaaaagcatggccatgaagaattgacacaagctaaaaagaaattggatgaattggaaaacaaggcccttgatgctgaacgtagatatgatactgctaccgccgctgatttaaggtacttcgccatcccagatatcaaaaagcaaatcgaaaagcttgaagatcaggttgctgaggaagagagacgtgctggtgccaactccatgatccaaaatgtggtcgattctgacaccatttctgaaacagctgcaagattgactggtatccctgttaagaagttgagtgaatctgaaaatgaaaaattgattcatatggaacgtgacttatcttctgaagtcgtgggccaaatggatgccattaaagctgtttccaatgccgttagattgtctagatctggtttagctaatccaaggcaaccagcatccttcttatttttaggtttgtccggttccggtaaaactgaattggctaaaaaagttgctggatttttgtttaatgatgaggacatgatgatcagggtcgattgttctgaattaagcgagaagtatgcggtctctaagttgttgggtaccacggcaggttatgtcgggtacgatgaaggtggctttttaactaaccaattacaatacaaaccatactccgttttgttattcgatgaagtagaaaaggcacatcctgatgttttgactgtcatgttacaaatgttggatgacggtagaattacttctggtcaaggtaagacgatcgactgttccaattgtattgtcatcatgacttccaatttgggtgctgaatttatcaattctcaacaaggatccaagatccaagaatctaccaagaatttggtcatgggtgctgttaggcaacatttcagaccagaatttttgaacagaatttctagtatagtcattttcaacaagttatctagaaaagctattcataagatcgtggatattcgtttgaaggaaattgaagagagattcgagcaaaatgataaacattacaagttgaatttaactcaagaggccaaggacttcttggccaaatatggttattccgatgatatgggtgcacgtccattgaacaggttaattcaaaacgaaattttgaacaaattggcattaaggatcttaaagaatgaaatcaaggataaggaaactgtcaatgtcgtcttgaagaagggtaaatctcgtgatgaaaatgttcctgaggaagctgaagaatgtttagaagttttgccaaatcacgaagctactataggggctgacacgttaggtgatgacgataatgaggacagtatggaaattgatgatgacttggattga

SEQ ID NO: 7145 - DNA, 375 bp, Saccharomyces cerevisiae
atggtcaaattaacttcaattgctgctggtgtcgccgctattgccgctggtgtcgccgctgcaccagctaccaccactttatctccatctgacgaaagagttaacctggttgaattaggtgtctacgtctctgatatcagagctcatttggctgaatactatatgttccaagccgctcatccaactgaaacttacccagttgaaattgctgaagctgttttcaactacggtgatttcaccactatgttgaccggtatccccgctgaccaagtcactagagtcatcactggtgtcccatggtactctaccagattgagaccagccatctccagcgctctatctgcagacggtatctacactgctgtaccaaactag

SEQ ID NO: 7146 - DNA, 375 bp, Artificial Sequence
  Description of Artificial Sequence: Synthetic polynucleotide
atggtcaaattaacttctattgctgctggtgtcgccgctattgccgctggtgtcgccgctgcaccagctaccaccactttatctccatctgacgaaagagttaacttggttgaattaggtgtctacgtctctgatatcagagctcatttggctgaatactatatgttccaagccgctcatccaactgaaacttacccagttgaaattgctgaagctgttttcaactacggtgatttcaccactatgttgaccggtatccccgctgaccaagtcactagagtcatcactggtgtcccatggtactctaccagattgagaccagccatctccagcgctttatctgcagacggtatctacactgctgtaccaaactga

SEQ ID NO: 7147 - DNA, 1920 bp, Saccharomyces cerevisiae
atgtctaaagctgtcggtattgatttaggtactacctactcctgtgttgctcacttctctaatgatcgtgttgacattattgccaacgaccaaggtaacagaaccactccatctttcgttggtttcactgatactgaaagattgattggtgacgctgctaagaaccaagctgctatgaacccagctaacactgttttcgacgctaagcgtttgatcggtagaaacttcaatgacccagaagtccaaggtgatatgaagcacttcccattcaagttgatcgatgttgacggtaagccacaaattcaagttgaatttaagggtgaaaccaagaactttaccccagaacaaatctcctccatggtcttgggtaagatgaaggaaactgccgaatcttacttgggtgccaaggtcaatgacgctgtcgtcactgtcccagcttacttcaacgattctcaaagacaagctaccaaggatgctggtaccattgctggtttgaatgtcttgcgtattattaacgaacctaccgccgctgccattgcttacggtttggacaagaagggtaaggaagaacacgtcttgattttcgacttgggtggtggtactttcgatgtctctttgttgtccattgaagacggtatctttgaagttaaggccaccgctggtgacacccatttgggtggtgaagattttgacaacagattggtcaaccacttcatccaagaattcaagagaaagaacaagaaggacttgtctaccaaccaaagagctttgagaagattaagaactgcttgtgaaagagccaagagaactttgtcttcctccgctcaaacttccgttgaaattgactctttgttcgaaggtatcgatttctacacttccatcaccagagccagattcgaagaattgtgtgctgacttgttcagatctactttggacccagttgaaaaggtcttgagagatgctaaattggataaatctcaagtcgatgaaattgtcttggtcggtggttctaccagaattccaaaggtccaaaaattggtcactgactacttcaacggtaaggaaccaaacagatctatcaacccagatgaagctgttgcttacggtgctgctgttcaagctgctattttgactggtgacgaatcttccaagactcaagatctattgttgttggatgtcgctccattatccttgggtattgaaactgctggtggtgtcatgaccaagttgattccaagaaactctaccattccaactaagaaatccgaagttttctctacttatgctgacaaccaaccaggtgtcttgattcaagtctttgaaggtgaaagagccaagactaaggacaacaacttgttgggtaagttcgaattgagtggtattccaccagctccaagaggtgtcccacaaattgaagtcactttcgatgtcgactctaacggtattttgaatgtttccgccgtcgaaaagggtactggtaagtctaacaagatcactattaccaacgacaagggtagattgtccaaggaagatatcgaaaagatggttgctgaagccgaaaaattcaaggaagaagatgaaaaggaatctcaaagaattgcttccaagaaccaattggaatccattgcttactctttgaagaacaccatttctgaagctggtgacaagctagagcaagctgacaaggacgctgtcactaagaaggctgaagaaactattgcttggttagacagcaacaccactgctaccaaggaagaattcgatgaccaattgaaggaattgcaagaggttgccaacccaatcatgtctaaattgtaccaagctggtggtgctccagaaggcgcagctccaggtggtttcccaggtggtgctcctccagctccagaagctgaaggtccaactgtcgaagaagttgattaa

SEQ ID NO: 7148 - DNA, 1920 bp, Artificial Sequence
  Description of Artificial Sequence: Synthetic polynucleotide
atgtctaaagctgtcggtattgatttaggtactacctactcctgtgttgctcacttctctaatgatcgtgttgacattattgccaacgaccaaggtaacagaaccactccatctttcgttggtttcactgatactgaaagattgattggtgacgctgctaagaaccaagctgctatgaacccagctaacactgttttcgacgctaagcgtttgatcggtagaaacttcaatgacccagaagtccaaggtgatatgaagcacttcccattcaagttgatcgatgttgacggtaagccacaaattcaagttgaatttaagggtgaaaccaagaactttaccccagaacaaatctcctccatggtcttgggtaagatgaaggaaactgccgaatcttacttgggtgccaaggtcaatgacgctgtcgtcactgtcccagcttacttcaacgattctcaaagacaagctaccaaggatgctggtaccattgctggtttgaatgtcttgcgtattattaacgaacctaccgccgctgccattgcttacggtttggacaagaagggtaaggaagaacacgtcttgattttcgacttgggtggtggtactttcgatgtctctttgttgtccattgaagacggtatctttgaagttaaggccaccgctggtgacacccatttgggtggtgaagattttgacaacagattggtcaaccacttcatccaagaattcaagagaaagaacaagaaggacttgtctaccaaccaaagagctttgagaagattaagaactgcttgtgaaagagccaagagaactttgtcttcctccgctcaaacttccgttgaaattgactctttgttcgaaggtatcgatttctacacttccatcaccagagccagattcgaagaattgtgtgctgacttgttcagatctactttggacccagttgaaaaggtcttgagagatgctaaattggataaatctcaagtcgatgaaattgtcttggtcggtggttctaccagaattccaaaggtccaaaaattggtcactgactacttcaacggtaaggaaccaaacagatctatcaacccagatgaagctgttgcttacggtgctgctgttcaagctgctattttgactggtgacgaatcttccaagactcaagatttattgttgttggatgtcgctccattatccttgggtattgaaactgctggtggtgtcatgaccaagttgattccaagaaactctaccattccaactaagaaatccgaagttttctctacttatgctgacaaccaaccaggtgtcttgattcaagtctttgaaggtgaaagagccaagactaaggacaacaacttgttgggtaagttcgaattgagtggtattccaccagctccaagaggtgtcccacaaattgaagtcactttcgatgtcgactctaacggtattttgaatgtttccgccgtcgaaaagggtactggtaagtctaacaagatcactattaccaacgacaagggtagattgtccaaggaagatatcgaaaagatggttgctgaagccgaaaaattcaaggaagaagatgaaaaggaatctcaaagaattgcttccaagaaccaattggaatccattgcttactctttgaagaacaccatttctgaagctggtgacaagttggagcaagctgacaaggacgctgtcactaagaaggctgaagaaactattgcttggttagacagcaacaccactgctaccaaggaagaattcgatgaccaattgaaggaattgcaagaggttgccaacccaatcatgtctaaattgtaccaagctggtggtgctccagaaggcgcagctccaggtggtttcccaggtggtgctcctccagctccagaagctgaaggtccaactgtcgaagaagttgattga

SEQ ID NO: 7149 - DNA, 840 bp, Saccharomyces cerevisiae
atgtcatcaagacccgctaataaccaaggccccccaaacctccctgccagagataagtcgctcgtgcaaaggttcatggcagtagccaagagcttgcagtttgcatggtttaccggtcattccgtcgtattgatcagctccattctttacctgctcaagatgtcagaattttattacagatcggcatatctcggtgtcatcgaatctttcggtatcatcatttaccagcaatttttcacccgcaatgaaccattgcagactcaagatgccgctgccactaaggcttccataaaatcacgcgttgctggactcctaaagagtgaagacgtgctttatttggttttggccaacttctggttgttcactccaagattttcattcagcttaatcccatttttcgcgtttgctgtattccatgttttaatctacgttgaaaaagttctcttaccaaaagtcttccacctttccagtaaagattcaagtaagatcctcagcttcatcgacaagtttgttgttcagtacaatgacttgtgcatgcactgggtcggtactgctgagctgcttattttcattttggtccttttcagagccattctgtgcttccaaaggtcttggatcatacttgttgtgtacgccatctttattaagttaagatacgaaaactccaagtacatgaaagccgcctttgctcaatggagagttagaatggacgggatcataagccacccatctatcccaccattcgtcaaaagagcttataatgcaattaaaatgagcttgatccgcttgtctgagtaccgcttaagcggtgccccacaagtgaccaagaagcagaattga

SEQ ID NO: 7150 - DNA, 840 bp, Artificial Sequence
  Description of Artificial Sequence: Synthetic polynucleotide
atgtcttctagacccgctaataaccaaggccccccaaacctccctgccagagataagtctctcgtgcaaaggttcatggcagtagccaagagcttgcagtttgcatggtttaccggtcattccgtcgtattgatcagctccattctttacttgctcaagatgtctgaattttattacagaagtgcatatctcggtgtcatcgaatctttcggtatcatcatttaccagcaatttttcacccgcaatgaaccattgcagactcaagatgccgctgccactaaggcttccataaaaagccgcgttgctggactcttgaagagtgaagacgtgctttatttggttttggccaacttctggttgttcactccaagattttctttcagcttaatcccatttttcgcgtttgctgtattccatgttttaatctacgttgaaaaagttctcttaccaaaagtcttccacctttccagtaaagattctagtaagatcctcagcttcatcgacaagtttgttgttcagtacaatgacttgtgcatgcactgggtcggtactgctgagttgcttattttcattttggtccttttcagagccattttgtgcttccaaaggtcttggatcatacttgttgtgtacgccatctttattaagttaagatacgaaaactccaagtacatgaaagccgcctttgctcaatggagagttagaatggacgggatcataagccacccatctatcccaccattcgtcaaaagagcttataatgcaattaaaatgagcttgatccgcttgtctgagtaccgcttaagcggtgccccacaagtgaccaagaagcagaattga

SEQ ID NO: 7151 - DNA, 1158 bp, Saccharomyces cerevisiae
atgaaactaagggcagaagacgtgttggcaaacggaactagcagacataaagttcaaattgatatggaaagacaggttcaaattgcaaaagatttactcgcacagaaaaagttcttagaagctgctaaacgctgccaacaaactttggactctctcccaaaagatggtttgttgcctgatcctgaactgtttactatattcgcacaagctgtatacaacatggaagtacagaattctggtaatctgtttggggacgctcttctggcaggtgacgatggatctgggtctgagtctgagtctgagcctgagtctgatgtgagcaatggagaagaggggaacgagaacggtcaaacagaaattcctaattctaggatgttccaattcgaccaagaagaggaagacttgactggtgatgtcgacagtggtgatagtgaggacagtggcgaaggtagcgaagaagaggaagaaaacgtggagaaagaggaagaacgcttagctttgcacgaattggctaacttcagtccagcgaatgaacatgacgatgaaattgaagacgtatcgcaacttcgcaagtctggtttccacatttactttgaaaatgatctgtatgagaatgctttggacctactggcgcaggccttgatgctgttgggccgccctacagcagatggccaatctctaaccgagaacagcagattgcgcatcggtgatgtgtatatcctgatgggtgacatcgaaagggaggcggagatgttcagtagagccattcatcattacttgaaggcgcttggctattacaagaccttgaaacccgcagaacaagtaactgagaaggtgatacaagcagaatttttggtgtgtgatgctttaaggtgggttgatcaggtgccggctaaggacaaactaaaaagattcaagcatgccaaggctctgcttgaaaaacacatgactacaagacccaaggacagcgagttacagcaggcaaggctcgcacagattcaagacgatattgatgaggtgcaagaaaatcagcagcacggctccaagaggcctctttcgcagcccacgacctccatcggcttccccgccctcgaaaagccccttggtgacttcaatgatctctctcaactggtcaagaagaagcctagaaggcattga

SEQ ID NO: 7152 - DNA, 1158 bp, Artificial Sequence
  Description of Artificial Sequence: Synthetic polynucleotide
atgaaattgagggcagaagacgtgttggcaaacggaactagcagacataaagttcaaattgatatggaaagacaggttcaaattgcaaaagatttactcgcacagaaaaagttcttagaagctgctaaacgctgccaacaaactttggactctctcccaaaagatggtttgttgcctgatcctgaattatttactatattcgcacaagctgtatacaacatggaagtacagaattctggtaatttatttggggacgctcttttagcaggtgacgatggatctgggtctgagtctgagtctgagcctgagtctgatgtgagcaatggagaagaggggaacgagaacggtcaaacagaaattcctaattctaggatgttccaattcgaccaagaagaggaagacttgactggtgatgtcgacagtggtgatagtgaggacagtggcgaaggtagcgaagaagaggaagaaaacgtggagaaagaggaagaacgcttagctttgcacgaattggctaacttcagtccagcgaatgaacatgacgatgaaattgaagacgtatctcaacttcgcaagtctggtttccacatttactttgaaaatgatttatatgagaatgctttggacttattggcgcaggccttgatgcttttgggccgccctacagcagatggccaatctttaaccgagaacagcagattgcgcatcggtgatgtgtatatcttgatgggtgacatcgaaagggaggcggagatgttcagtagagccattcatcattacttgaaggcgcttggctattacaagaccttgaaacccgcagaacaagtaactgagaaggtgatacaagcagaatttttggtgtgtgatgctttaaggtgggttgatcaggtgccggctaaggacaaattgaaaagattcaagcatgccaaggctttacttgaaaaacacatgactacaagacccaaggacagcgagttacagcaggcaaggctcgcacagattcaagacgatattgatgaggtgcaagaaaatcagcagcacggctccaagaggcctctttctcagcccacgacctccatcggcttccccgccctcgaaaagccccttggtgacttcaatgatctctctcaattggtcaagaagaagcctagaaggcattga

SEQ ID NO: 7153 - DNA, 4401 bp, Saccharomyces cerevisiae
atgggtacgtcaagcgaggtttctctcgcacatcatagagatatcttccattactacgtctcactgaagacttttttcgaggtgactggcgaaaatcgtgacaggtcaaattcgacacgagctcaaaaggccagagccaagctgttgaagctatcttcttcgcaattttacgagctgagtacagacgtgtccgatgagctgcagaggagaatcggtgaagatgctaaccaaccagattaccttttgccgaaggcaaatttccacatgaaaaggaaccaggctagacagaaactggccaatctatcacaaactcgatttaatgatttgttggacgatatcctttttgagatcaagagaagagggttcgacaaggatttggatgctccacggcccccattaccgcagccgatgaaacaagaggtcagcaaagacagcgatgatactgcaagaacatccacaaattcttcctctgtgactcaagtagctccaaacgtctccgtacaaccttctttggtcattcctaagatggcatctatcgattggtcttctgaggaagaagaagaggagcaagtaaaggagaagccaaatgaaccggagggaaaacaaacaagcatggatgaaaagaaagaggctaaacctgctctaaaccccatagttacagattctgatctgcctgactcccaagtgctcgctcgtgatatcacatcaatggcaaggactccaacaacgacgcataaaaattactgggacgttaatgattctccaattatcaaggtagataaagatatcgataacgaaaagggtcccgaacagttgaagagccctgaagtacaacgggctgagaacaataaccctaactcagagatggaagacaaggttaaagaactgactgatttaaacagcgacttacatttgcaaattgaagatttgaatgctaagttagcatctttaaccagcgagaaggaaaaggagaagaaggaagagaaggaggaaaaagaaaaggaaaagaacttaaagattaactacaccattgatgaaagttttcagaaagaattgctgtcattaaactctcaaatcggtgaattatcaattgagaatgaaaatttgaagcagaaaatttcagaattcgaactgcatcaaaaaaagaatgacaaccataatgatttgaaaatcactgacggttttattagcaagtactcttctgccgatgggctcattccagctcaatacatcttaaacgctaacaacttgataattcaatttactactaggctttccgcagtacccataggcgactccacggcaatttcccatcaaattggcgaagagttatttcaaatattatcccagttatcgaacctaatctcccagctattactatcggccgacctattacagtacaaagatcaggtcattttactgaaggcatcattatcgcatgcgatcacatcgataagatatttctctgtttacggtcccgtattaattccgaaaataactgtgcaagctgctgtttcagaggtttgttttgccatgtgtaatctaattgattcagcgaaaataaaatccgattcaaatggtgagagcaccacctctaatgaaggtaaccgacaggtattagaatattcttcaccaactgctaccaccccaatgacgccaactttcccctcgacttctggaataaatatgaagaaggggtttataaacccaagaaaaccagcatctttcttgaatgatgtggaggaagaagaatctccagtcaagccattgaaaattacacaaaaggcaattaacagtccgatcataagaccgtcatcgtctaatggagttccaacaacctcaagaaaaccttcaggaacggggctatttagtttaatgattgattcatcaattgctaagaatagctcccataaagaggataatgataaatatgtctcgcccataaaggcagtaacatcggcctccaattctgcaagtagcaatatttccgaaattcctaaactaacactacctccacaagccaaaatcggtactgttattccaccgtcagagaatcaagttcccaatattaaaatcgagaatacagaagaggataataaaaggagtgacataacaaatgaaatctctgttaaaccaacttctagcattgctgataaactgaaacaatttgagcaaagttccgaaaagaaatcatcaccaaaggaaaatcctatagcaaaagaagaaatggattcaaaaccaaaactatccaataaatttatcacttcaatgaatgatgtgtccacagatgattcaagctctgatggtaacgaaaatgacgatgcagacgatgatgatgattttacctatatggcattgaaacaaacaatgaagagagaaggttcaaaaattgaaaaaaataatgacagcaaactacctgcaaatatagtggaacttgatttacatgagtcaccggagtccgtgaagattgaatctcctgaatcgataaaggaaatcacgtcatctgaaatgtcttcagaaatgccaagtagttcgctgcctaagagattagtagaggatgttgagccttcagaaatgccagagaagggcgcatctgtagaatcagtcaggaagaaaaattttcaagaaccacttggtaatgtcgaatctccggatatgacgcagaaggtcaagtctttgggtatgacaggaaaggctgtaggcccagaatcagatagtagggtcgaatctccgggcatgacaggacagattaaatctttgaatatggcaggaaaagttgtaggcccagaagcagatagtagggtcgaatctccgggcatgaaagagcagattaagtctttgggtatgacaggaaaaattacagctcaagaatcaatcaagtccccggaagcggctaggaagttggcgtcatcaggagaagttgacaaaattgaatctccaagaatggtaagggaaagcgagtccttggaggcagtaggcaatactatcccctcaaacatgacagtgaaaatggaatccccaaatttaaagggaaatactgtgtctgaacctcaagaaataaggagagacattgcctcctcagagccgatagagaatgttgaccccccaaaagtactaaaaaagattgtctttccaaaggctgttaatagaactggatcaccaaaatcagtcgaaaagactccatcttcagctacactgaaaaagagcgggctcccagaaccgaatagccaaattgtttctcctgaattggcaaaaaattcacctctagcaccgataaagaaaaatgtcgagttacgagaaactaataaaccacatactgagactatcacttctgtggaaccaacaaacaaggatgccaatacttcttggagagacgccgacttaaaccgtacgatcaaacgagaggaggaggacgaagattttgatagagtgaaccacaatatccagatcactggtgcatatacgaaaactggaaaaattgattatcataaaatacctgttgatcgtaaagcaaaaagcgaagcagaagtgcatacttccgaggaagatattgatgaatcaaataatgttaatggaaaaagagctgatgcccaaatacacatcactgaaagaaagcatgctttcgtaaatccaactgaaaattcacaggtaaaaaagacgagccactcaccatttttaaacagtaaaccggttcaatacgagaactcagagtcgaacggcggcattaacaaccacataaagataaaaaatactggagaaactacggcacatgacgagaaacattatagtgatgatgatgattctagctatcaatttgttcccatgaaacatgaagaacaagaacaagaacaaaacagaagtgaggaagaggaaagtgaagatgacgatgaagaggaagaagacagtgattttgatgtggatacatttgacattgaaaatccggataatacactatcagagttactattgtatttagaacatcaaacaatggacgtcatatccacgattcaatcgcttttgacatcgatcaagaaaccacaggtgacgaagggtaatttgaggggagaatcgaatgcaatcaaccaagtcataggtcaaatggtggacgctactagcatatcaatggagcaaagcagaaatgccaatttgaagaaacacggtgattgggtggtgcaaagtctaagagactgttcgcgtagaatgacaattttgtgccaattaactggcgatggaatactagcgaaggaaaagagcgatcaagattatgctgacaaaaacttcaaacagcggttggcagggattgcgtttgatgttgccaaatgtacaaaggagctggtaaaaactgtagaagaggcaagtttgaaggacgaaataaattatttgaattcgaagttgaagtaa

SEQ ID NO: 7154 - DNA, 4401 bp, Artificial Sequence
  Description of Artificial Sequence: Synthetic polynucleotide
atgggtacgtctagcgaggtttctctcgcacatcatagagatatcttccattactacgtctctttgaagacttttttcgaggtgactggcgaaaatcgtgacaggtctaattctacaagagctcaaaaggccagagccaagttgttgaagttatcttcttctcaattttacgagttgagtacagacgtgtccgatgagttacagaggagaatcggtgaagatgctaaccaaccagattaccttttgccgaaggcaaatttccacatgaaaaggaaccaggctagacagaaattggccaatttatctcaaactagatttaatgatttgttggacgatatcctttttgagatcaagagaagagggttcgacaaggatttggatgctccaagacccccattaccgcagccgatgaaacaagaggtcagcaaagacagcgatgatactgcaagaacatccacaaattcttcctctgtgactcaagtagctccaaacgtctccgtacaaccttctttggtcattcctaagatggcatctatcgattggtcttctgaggaagaagaagaggagcaagtaaaggagaagccaaatgaaccggagggaaaacaaacaagcatggatgaaaagaaagaggctaaacctgctttgaaccccatagttacagattctgatttacctgactcccaagtgctcgctcgtgatatcacatctatggcaaggactccaacaacgacgcataaaaattactgggacgttaatgattctccaattatcaaggtagataaagatatcgataacgaaaagggtcccgaacagttgaagagccctgaagtacaaagagctgagaacaataaccctaacagtgagatggaagacaaggttaaagaattgactgatttaaacagcgacttacatttgcaaattgaagatttgaatgctaagttagcatctttaaccagcgagaaggaaaaggagaagaaggaagagaaggaggaaaaagaaaaggaaaagaacttaaagattaactacaccattgatgaaagttttcagaaagaattgttatctttaaactctcaaatcggtgaattatccattgagaatgaaaatttgaagcagaaaatttctgaattcgaattacatcaaaaaaagaatgacaaccataatgatttgaaaatcactgacggttttattagcaagtactcttctgccgatgggctcattccagctcaatacatcttaaacgctaacaacttgataattcaatttactactaggctttccgcagtacccataggcgactccacggcaatttcccatcaaattggcgaagagttatttcaaatattatcccagttatctaacttgatctcccagcttttattatctgccgacttattacagtacaaagatcaggtcattttattgaaggcatctttatctcatgcgatcacatctataagatatttctctgtttacggtcccgtattaattccgaaaataactgtgcaagctgctgtttctgaggtttgttttgccatgtgtaatttaattgattctgcgaaaataaaatccgattctaatggtgagagcaccacctctaatgaaggtaacagacaggtattagaatattcttctccaactgctaccaccccaatgacgccaactttcccctccacttctggaataaatatgaagaaggggtttataaacccaagaaaaccagcatctttcttgaatgatgtggaggaagaagaatctccagtcaagccattgaaaattacacaaaaggcaattaacagtccgatcataagaccgtcttcttctaatggagttccaacaacctccagaaaaccttctggaacggggttgtttagtttaatgattgattcttccattgctaagaatagctcccataaagaggataatgataaatatgtctctcccataaaggcagtaacatctgcctccaattctgcaagtagcaatatttccgaaattcctaaattaacattgcctccacaagccaaaatcggtactgttattccaccgagtgagaatcaagttcccaatattaaaatcgagaatacagaagaggataataaaaggagtgacataacaaatgaaatctctgttaaaccaacttctagcattgctgataaattgaaacaatttgagcaaagttccgaaaagaaatcttctccaaaggaaaatcctatagcaaaagaagaaatggattctaaaccaaaactttccaataaatttatcacttctatgaatgatgtgtccacagatgattctagctctgatggtaacgaaaatgacgatgcagacgatgatgatgattttacctatatggcattgaaacaaacaatgaagagagaaggttccaaaattgaaaaaaataatgacagcaaattacctgcaaatatagtggaacttgatttacatgagtctccggagtccgtgaagattgaatctcctgaaagtataaaggaaatcacgtcttctgaaatgtcttctgaaatgccaagtagttctttgcctaagagattagtagaggatgttgagccttctgaaatgccagagaagggcgcatctgtagaatctgtcaggaagaaaaattttcaagaaccacttggtaatgtcgaatctccggatatgacgcagaaggtcaagtctttgggtatgacaggaaaggctgtaggcccagaaagtgatagtagggtcgaatctccgggcatgacaggacagattaaatctttgaatatggcaggaaaagttgtaggcccagaagcagatagtagggtcgaatctccgggcatgaaagagcagattaagtctttgggtatgacaggaaaaattacagctcaagaaagtatcaagtccccggaagcggctaggaagttggcgagtagtggagaagttgacaaaattgaatctccaagaatggtaagggaaagcgagtccttggaggcagtaggcaatactatcccctctaacatgacagtgaaaatggaatccccaaatttaaagggaaatactgtgtctgaacctcaagaaataaggagagacattgcctcctctgagccgatagagaatgttgaccccccaaaagtattgaaaaagattgtctttccaaaggctgttaatagaactggatctccaaaatctgtcgaaaagactccatcttctgctacattaaaaaagagcgggctcccagaaccgaatagccaaattgtttctcctgaattggcaaaaaattctcctttggcaccgataaagaaaaatgtcgagttaagagaaactaataaaccacatactgagactatcacttctgtggaaccaacaaacaaggatgccaatacttcttggagagacgccgacttaaaccgtacgatcaaaagagaggaggaggacgaagattttgatagagtgaaccacaatatccagatcactggtgcatatacgaaaactggaaaaattgattatcataaaatacctgttgatcgtaaagcaaaaagcgaagcagaagtgcatacttccgaggaagatattgatgaaagtaataatgttaatggaaaaagagctgatgcccaaatacacatcactgaaagaaagcatgctttcgtaaatccaactgaaaattctcaggtaaaaaagacgagccactctccatttttaaacagtaaaccggttcaatacgagaacagtgagagcaacggcggcattaacaaccacataaagataaaaaatactggagaaactacggcacatgacgagaaacattatagtgatgatgatgattctagctatcaatttgttcccatgaaacatgaagaacaagaacaagaacaaaacagaagtgaggaagaggaaagtgaagatgacgatgaagaggaagaagacagtgattttgatgtggatacatttgacattgaaaatccggataatacattatctgagttattattgtatttagaacatcaaacaatggacgtcatatccacgattcaatctcttttgacatctatcaagaaaccacaggtgacgaagggtaatttgaggggagaaagtaatgcaatcaaccaagtcataggtcaaatggtggacgctactagcatatccatggagcaaagcagaaatgccaatttgaagaaacacggtgattgggtggtgcaaagtttgagagactgttctcgtagaatgacaattttgtgccaattaactggcgatggaatattggcgaaggaaaagagcgatcaagattatgctgacaaaaacttcaaacagcgtttggcagggattgcgtttgatgttgccaaatgtacaaaggagttggtaaaaactgtagaagaggcaagtttgaaggacgaaataaattatttgaattctaagttgaagtga

SEQ ID NO: 7155 - DNA, 2214 bp, Saccharomyces cerevisiae
atgtcacagaatattcaaattggcactagaaaacgttcaagagcaaatatgaataattccactactacgggccctgctaacaatacaagctctaacaagacctttttggataatttcgaagaaacgcgcacaaacaagctgctggacgagatgtttgctcggcaaaattcttttctaacagacaatctgaggaacagtctagacctgaatcaagcagacaatccgctccgtcctcggcaacaccaacaccagttgttcttggacaatgaaaatgccatagaactagacgaggagccgcgtatcattaacaccacaatcaataacagtaataatcataacagtagtcgagtggacgaggatgctgacgatgacatcatttttatcaaagagcagccaattcagttttcgtcacctttgattctgcctagtagcagcagtatcaataacaacaataatattgttacttcaaataatccagggtgcggtaccgcagctacaagcaatagtacgtatatcacgacaccaaagaaattcaagaagcaaagaaccatctcactgcctcagttgcctctatcgaagctgagctaccaatcgaactattttaatgttcctgatcaaaccaacgctatcgtgccaagagtaacgcaaactgaaaatgagctgttgcatctaacggggtcgtgtgcaaagactctggagggcaacaaggcagtgaatctcacgattgctcacagcacttctcccttttccaacccaccagcacaaatagcttccctgcctcaatccaacctcaagaaacaaattggttcttcactacggaaatttacatcaaacggctcttcagaaagcgcatcatccaataaatcaaatttcaaaacggacaaagacggtcactacgtttaccaggaaaacgacatatttggcagtggcggccgctttgttgtgaaggacctattgggccaaggcacgtttggtaaagtacttaaatgcatcgataacaagtatgaacctaattacgtggctgtaaaagtgataagggctgtagatagatatagagaagccgccaaaacagaactaagaattctacagactatcctgaataatgaccctcaaggtcagttccagtgcctcttgctaagggagtgcttcgattacaaaaatcacatttgtttggtgacagatctatacggcaggtccatttacgattttatgtgctccaacggcattgccaggttccccggctctcatattcaggccattgccagacagctaatcagatctgtctgcttcttgcacgatttgggcataatacacacggatttgaaaccagaaaatatcctgatttgtgacgaaacccatattgctcaaaaattgcctttgaaaaccgtacagtcgctaagcaagagacgccgtgaagccagtaaggggaagcgcaaaatcttgaaaaatccagaaatcaaaatcattgatttcggtagcgcaattttccattacgaatatcatcctcctgtaatatccactcgtcactatagagccccggaaattgtccttggcttgggctggtcgttcccctgcgacatttggtccatcgcgtgtgtcctagtagaactggttattggcgaatctctttaccccattcatgaaaatctagaacatatggctatgatgcaacgaatcaatggaacccctttccccacagacattattgataagatgttttacaaatctaaacataaattgggcaactctccatcagacctaaattcaacggtgataaagcatttcgacagaaaaactttaagcttacaatggcctgaaaaaaataaacgcggagataccataaccaccgaaaagtcaatgaaaagggtcttgcagtcatgtgatcgcttagatatttacatctcaaaggtcttgaaacaggattacggcgatagcttaagcatcaattggaatctaccgccggagaaaaactggtctttgataaattcgaaattggcatggaaaagacaaacacattcctcttcttcctcaactactgatgaactcgataaggaaactttcttgttttggtactggttcatcgatctactcaggaaaatgtttgagttcgacccaacaaaaaggattaccgcaaaggacgctctggaccatgaatggtttaatctgggcatactggatgatggtattgcaacttataataatacccaaggatag

SEQ ID NO: 7156 - DNA, 2214 bp, Artificial Sequence
  Description of Artificial Sequence: Synthetic polynucleotide
atgtctcagaatattcaaattggcactagaaaacgttccagagcaaatatgaataattccactactacgggccctgctaacaatacaagctctaacaagacctttttggataatttcgaagaaacgcgcacaaacaagttattagacgagatgtttgctagacaaaattcttttttaacagacaatttaaggaacagtttggacttgaatcaagcagacaatccgctccgtcctagacaacaccaacaccagttgttcttggacaatgaaaatgccatagaattagacgaggagccgcgtatcattaacaccacaatcaataacagtaataatcataacagtagtagagtggacgaggatgctgacgatgacatcatttttatcaaagagcagccaattcagttttcttctcctttgattttacctagtagcagcagtatcaataacaacaataatattgttacttccaataatccagggtgcggtaccgcagctacaagcaatagtacgtatatcacgacaccaaagaaattcaagaagcaaagaaccatctctttgcctcagttgcctttatccaagttgagctaccaaagtaactattttaatgttcctgatcaaaccaacgctatcgtgccaagagtaacgcaaactgaaaatgagttattgcatttaacggggtcctgtgcaaagactttagagggcaacaaggcagtgaatctcacgattgctcacagcacttctcccttttccaacccaccagcacaaatagcttccttacctcaatccaacctcaagaaacaaattggttcttctttaagaaaatttacaagtaacggctcttctgaaagcgcatcttccaataaatctaatttcaaaacggacaaagacggtcactacgtttaccaggaaaacgacatatttggcagtggcggccgctttgttgtgaaggacttgttgggccaaggcacgtttggtaaagtacttaaatgcatcgataacaagtatgaacctaattacgtggctgtaaaagtgataagggctgtagatagatatagagaagccgccaaaacagaattgagaattttacagactatcttgaataatgaccctcaaggtcagttccagtgcctcttgttgagggagtgcttcgattacaaaaatcacatttgtttggtgacagatttatacggcaggtccatttacgattttatgtgctccaacggcattgccaggttccccggctctcatattcaggccattgccagacagttaatcagatctgtctgcttcttgcacgatttgggcataatacacacggatttgaaaccagaaaatatcttgatttgtgacgaaacccatattgctcaaaaattgcctttgaaaaccgtacagtccttaagcaagagacgccgtgaagccagtaaggggaagcgcaaaatcttgaaaaatccagaaatcaaaatcattgatttcggtagcgcaattttccattacgaatatcatcctcctgtaatatccactcgtcactatagagccccggaaattgtccttggcttgggctggagtttcccctgcgacatttggtccatcgcgtgtgtcttggtagaattggttattggcgaatctctttaccccattcatgaaaatttggaacatatggctatgatgcaaagaatcaatggaacccctttccccacagacattattgataagatgttttacaaatctaaacataaattgggcaactctccatctgacttgaattctacggtgataaagcatttcgacagaaaaactttaagcttacaatggcctgaaaaaaataaacgcggagataccataaccaccgaaaagtctatgaaaagggtcttgcagtcctgtgatcgcttagatatttacatctccaaggtcttgaaacaggattacggcgatagcttaagcatcaattggaatttaccgccggagaaaaactggtctttgataaattctaaattggcatggaaaagacaaacacattcctcttcttccagcactactgatgaactcgataaggaaactttcttgttttggtactggttcatcgatttactcaggaaaatgtttgagttcgacccaacaaaaaggattaccgcaaaggacgctttggaccatgaatggtttaatttgggcatattggatgatggtattgcaacttataataatacccaaggatga

SEQ ID NO: 7157 - DNA, 297 bp, Saccharomyces cerevisiae
atgtcagggaacccaggaagctcgctgagcgcattgagacctactccacccgagagaggttcgttcccgctagaccacgacggcgaatgcaccaagtacatgcaagagtatctcaaatgtatgcagcttgtgcagaacgaaaatgcaatgaattgtagactactggcaaaggactacctgcggtgcaggatggaccaccaattgatggactacgatgaatggtcacatttaggtcttcctgaggatgctccaggcaacaacggtaaaaccataaaagacgccaccgataataaatag

SEQ ID NO: 7158 - DNA, 297 bp, Artificial Sequence
  Description of Artificial Sequence: Synthetic polynucleotide
atgagtgggaacccaggaagcagtttaagcgcattgagacctactccacccgagagaggttctttcccgttagaccacgacggcgaatgcaccaagtacatgcaagagtatctcaaatgtatgcagcttgtgcagaacgaaaatgcaatgaattgtagattattggcaaaggactacttaagatgcaggatggaccaccaattgatggactacgatgaatggtctcatttaggtcttcctgaggatgctccaggcaacaacggtaaaaccataaaagacgccaccgataataaatga

SEQ ID NO: 7159 - DNA, 1674 bp, Saccharomyces cerevisiae
atgtctcaagacgaaaatattgtcaaagctgttgaagaatccgcagaacctgctcaagttattcttggggaagatggtaagccattgtccaagaaggccttgaagaaattgcagaaagagcaagagaaacagagaaagaaggaggaaagagctctccagttggaagctgaaagagaagcccgtgaaaagaaagccgctgccgaagacaccgcaaaggacaactacggtaagttgccattgatccagtctcgtgactctgacagaactggtcagaagcgtgtcaagtttgttgacttggatgaggctaaggatagcgacaaagaagtcctcttcagggcaagagtccacaacaccagacaacaaggtgcaacattggcctttttaactttaaggcaacaagcttccttgatccaaggtctagtaaaggccaacaaggaaggtaccatcagcaaaaacatggtcaaatgggctggttcattgaatttggagtccattgtccttgtcagaggtattgtcaagaaggtagatgagccaatcaagtctgctactgtgcaaaacctggaaattcacattaccaagatttataccatttccgagactccagaagcattgccaatccttttggaagatgcctcccgttccgaagctgaagctgaagctgcaggtttgcccgtggtcaacttggacaccagattagactaccgtgtcattgacttgagaaccgtcaccaaccaagctattttcaggattcaagctggtgtttgtgagttgttcagagaatatttggccacaaagaaatttaccgaagtacacacaccaaaactgttgggtgcaccaagtgaaggtggttccagtgtgtttgaggtgacatacttcaaagggaaggcctacctagctcaatctccacaatttaacaagcaacaattgattgtggccgactttgaaagagtttacgaaatcgggcctgtgttcagggctgaaaactccaacacccaccgtcacatgaccgagtttactggtttggacatggaaatggctttcgaagaacattaccacgaagttttggacacgttgagtgagttgtttgtgtttattttcagtgaattgcccaagagatttgctcatgaaattgagttggtacgtaagcaataccctgttgaagaattcaagttacctaaagatggtaagatggttcgtctaacatacaaagaaggtattgaaatgctaagagctgccggtaaggaaattggtgattttgaagacttgagtaccgaaaatgaaaagttcttgggtaagttggttcgcgacaaatacgacaccgacttttacatcctagacaagttccccttggagatccgtcccttctacacaatgcccgacccagccaaccctaagtattctaactcgtatgatttcttcatgaggggtgaagaaatcttgtccggtgcacaacgtatccacgaccatgctctattacaagaaaggatgaaagcccatggtttgtctcctgaggacccaggtctaaaggactactgtgacggcttcagctatgggtgtcctccacacgccggtggtggtatcggtttggaaagagttgttatgttctatttggatttgaaaaatatcagaagagcttcattgttcccaagagatccaaagagattaagaccatga

SEQ ID NO: 7160 - DNA, 1674 bp, Artificial Sequence
  Description of Artificial Sequence: Synthetic polynucleotide
atgtctcaagacgaaaatattgtcaaagctgttgaagaatccgcagaacctgctcaagttattcttggggaagatggtaagccattgtccaagaaggccttgaagaaattgcagaaagagcaagagaaacagagaaagaaggaggaaagagctctccagttggaagctgaaagagaagcccgtgaaaagaaagccgctgccgaagacaccgcaaaggacaactacggtaagttgccattgatccagtctcgtgactctgacagaactggtcagaagcgtgtcaagtttgttgacttggatgaggctaaggatagcgacaaagaagtcctcttcagggcaagagtccacaacaccagacaacaaggtgcaacattggcctttttaactttaaggcaacaagcttccttgatccaaggtttagtaaaggccaacaaggaaggtaccatcagcaaaaacatggtcaaatgggctggttctttgaatttggagtccattgtccttgtcagaggtattgtcaagaaggtagatgagccaatcaagtctgctactgtgcaaaacttggaaattcacattaccaagatttataccatttccgagactccagaagcattgccaatccttttggaagatgcctcccgttccgaagctgaagctgaagctgcaggtttgcccgtggtcaacttggacaccagattagactaccgtgtcattgacttgagaaccgtcaccaaccaagctattttcaggattcaagctggtgtttgtgagttgttcagagaatatttggccacaaagaaatttaccgaagtacacacaccaaaacttttgggtgcaccaagtgaaggtggttccagtgtgtttgaggtgacatacttcaaagggaaggcctacttggctcaatctccacaatttaacaagcaacaattgattgtggccgactttgaaagagtttacgaaatcgggcctgtgttcagggctgaaaactccaacacccaccgtcacatgaccgagtttactggtttggacatggaaatggctttcgaagaacattaccacgaagttttggacacgttgagtgagttgtttgtgtttattttcagtgaattgcccaagagatttgctcatgaaattgagttggtacgtaagcaataccctgttgaagaattcaagttacctaaagatggtaagatggttcgtttaacatacaaagaaggtattgaaatgttgagagctgccggtaaggaaattggtgattttgaagacttgagtaccgaaaatgaaaagttcttgggtaagttggttcgcgacaaatacgacaccgacttttacatcttggacaagttccccttggagatccgtcccttctacacaatgcccgacccagccaaccctaagtattctaacagttatgatttcttcatgaggggtgaagaaatcttgtccggtgcacaacgtatccacgaccatgctttattacaagaaaggatgaaagcccatggtttgtctcctgaggacccaggtttgaaggactactgtgacggcttcagctatgggtgtcctccacacgccggtggtggtatcggtttggaaagagttgttatgttctatttggatttgaaaaatatcagaagagcttctttgttcccaagagatccaaagagattaagaccatga

SEQ ID NO: 7161 - DNA, 4680 bp, Saccharomyces cerevisiae
atgtcttcactagaagtggtagatgggtgcccctatggataccgaccatatccagatagtggcacaaatgcattaaatccatgttttatatcagtaatatccgcctggcaagccgtctttttcctattgattggtagctatcaattgtggaaactttataagaacaataaagtaccacccagatttaagaactttcctacattaccaagtaaaatcaacagtcgacatctaacgcatttgaccaatgtttgctttcagtccacgcttataatttgtgaactggccttggtatcccaatctagcgatagggtttatccatttatactaaagaaggctctgtacttgaatctccttttcaatttgggtatttctctccctactcaatacttagcttattttaaaagtacattttcaatgggcaaccagcttttctattacatgtttcaaattcttctacagctcttcttgatattgcagaggtactatcatggttctagtaacgaaaggcttactgttattagcggacaaactgctatgattttagaagtgctccttcttttcaattctgtggcaatttttatttatgatctatgcatttttgagccaattaacgaattatctgaatactacaagaaaaatgggtggtatccccccgttcatgtactatcctatattacatttatctggatgaacaaactgattgtggaaacttaccgtaacaagaaaatcaaagatcctaaccagttaccattgccgccagtagatctgaatattaagtcgataagtaaggaatttaaggctaactgggaattggaaaaatggttgaatagaaattctctttggagggccatttggaagtcatttggtaggactatttctgtggctatgctgtatgaaacgacatctgatttactttctgtagtacagccccagtttctacggatattcatagatggtttgaacccggaaacatcttctaaatatcctcctttaaatggtgtatttattgctctaacccttttcgtaatcagcgtggtttctgtgttcctcaccaatcaattttatattggaatttttgaggctggtttggggataagaggctctttagcttctttagtgtatcagaagtccttaagattgacgctagcagagcgtaacgaaaaatctactggtgacatcttaaatttgatgtctgtggatgtgttaaggatccagcggtttttcgaaaatgcccaaaccattattggcgctcctattcagattattgttgtattaacttccctgtactggttgctaggaaaggctgttattggagggttggttactatggctattatgatgcctatcaatgccttcttatctagaaaggtaaaaaagctatcaaaaactcaaatgaagtataaggacatgagaatcaagactattacagagcttttgaatgctataaaatctattaaattatacgcctgggaggaacctatgatggcaagattgaatcatgttcgtaatgatatggagttgaaaaattttcggaaaattggtatagtgagcaatctgatatattttgcgtggaattgtgtacctttaatggtgacatgttccacatttggcttattttctttatttagtgattctccgttatctcctgccattgtcttcccttcattatctttatttaatattttgaacagtgccatctattccgttccatccatgataaataccattatagagacaagcgtttctatggaaagattaaagtcattcctacttagtgacgaaattgatgattcgttcatcgaacgtattgatccttcagcggatgaaagagcgttacctgctatagagatgaataatattacatttttatggaaatcaaaagaagtattaacatctagccaatctggagataatttgaggacagatgaagagtctattatcggatcttctcaaattgcgttgaagaatatcgatcattttgaagcaaaaaggggtgatttagtttgtgttgttggtcgggtaggagctggtaaatcaacatttttgaaggcaattcttggtcaacttccttgcatgagtggttctagggactcgataccacctaaactgatcattagatcatcgtctgtagcctactgttcacaagaatcctggataatgaacgcatctgtaagagaaaacattctatttggtcacaagttcgaccaagattattatgacctcactattaaagcatgtcaattgctacccgatttgaaaatactaccagatggtgatgaaactttggtaggtgaaaagggcatttccctatcaggcggtcagaaggcccgtctttcattagccagagcggtgtactcgagagcagatatttatttgttggatgacattttatctgctgttgatgcagaagttagtaaaaatattattgaatatgttttgatcggaaagacggctttattaaaaaataaaacaattattttaactaccaatactgtatcaattttaaaacattcgcagatgatatatgcgctagaaaacggtgaaattgttgaacaagggaattatgaggatgtaatgaaccgtaagaacaatacttcaaaactgaaaaaattactagaggaatttgattctccgattgataatggaaatgaaagcgatgtccaaactgaacaccgatccgaaagtgaagtggatgaacctctgcagcttaaagtaactgaatcagaaactgaggatgaggttgttactgagagtgaattagaactaatcaaagccaattctagaagagcttctctagctacgctaagacctagaccctttgtgggagcacaattggattccgtgaagaaaacggcgcaaaaggccgagaagacagaggtgggaagagtcaaaacaaagatttatcttgcgtatattaaggcttgtggagttttaggtgttgttttatttttcttgtttatgatattaacaagggttttcgacttagcagagaatttttggttaaagtactggtcagaatctaatgaaaaaaatggttcaaatgaaagggtttggatgtttgttggtgtgtattccttaatcggagtagcatcggccgcattcaataatttacggagtattatgatgctactgtattgttctattaggggttctaagaaactgcatgaaagcatggccaaatctgtaattagaagtcctatgactttctttgagactacaccagttggaaggatcataaacaggttctcatctgatatggatgcagtggacagtaatctacagtacattttctccttttttttcaaatcaatactaacctatttggttactgttatattagtcgggtacaatatgccatggtttttagtgttcaatatgtttttggtggttatctatatttactatcaaacattttacattgtgctatctagggagctaaaaagattgatcagtatatcttactctccgattatgtccttaatgagtgagagcttgaacggttattctattattgatgcatacgatcattttgagagattcatctatctaaattatgaaaaaatccaatacaacgttgattttgtcttcaactttagatcaacgaatagatggttatccgtgagattgcaaactattggtgctacaattgttttggctactgcaatcttagcactagcaacaatgaatactaaaaggcaactaagttcgggtatggttggtctactaatgagctattcattagaggttacaggttcattgacttggattgtaaggacaactgtgacgattgaaaccaacattgtatcagtggagagaattgttgagtactgcgaattaccacctgaagcacagtccattaaccctgaaaagaggccagatgaaaattggccatcaaagggtggtattgaattcaaaaactattccacaaaatacagagaaaatttggatccagtgctgaataatattaacgtgaagattgagccatgtgaaaaggttgggattgttggcagaacaggtgcagggaagtctacactgagcctggcattatttagaatactagaacctaccgaaggtaaaattattattgacggcattgatatatccgacataggtctgttcgatttaagaagccatttggcaattattcctcaggatgcacaagcttttgaaggtacagtaaagaccaatttggaccctttcaatcgttattcagaagatgaacttaaaagggctgttgagcaggcacatttaaagcctcatctggaaaaaatgctgcacagtaaaccaagaggtgatgattctaatgaagaggatggcaatgttaatgatattctggatgtcaagattaatgagaacggtagtaacttgtcagtggggcaaagacaactactatgtttggcaagagcgctgctaaaccgttccaaaatattggtccttgatgaagcaacggcttctgtggatatggaaaccgataaaattatccaagacactataagaagagaatttaaggaccgtaccatcttaacaattgcacatcgtatcgacactgtattggacagtgataagataattgttcttgaccagggtagtgtgagggaattcgattcaccctcgaaattgttatccgataaaacgtctattttttacagtctttgtgagaaaggtgggtatttgaaataa

SEQ ID NO: 7162 - DNA, 4680 bp, Artificial Sequence
  Description of Artificial Sequence: Synthetic polynucleotide
atgtcttctttggaagtggtagatgggtgcccctatggatacagaccatatccagatagtggcacaaatgcattaaatccatgttttatatctgtaatatccgcctggcaagccgtctttttcttgttgattggtagctatcaattgtggaaactttataagaacaataaagtaccacccagatttaagaactttcctacattaccaagtaaaatcaacagtagacatttaacgcatttgaccaatgtttgctttcagtccacgcttataatttgtgaattggccttggtatcccaatctagcgatagggtttatccatttatattgaagaaggctttgtacttgaatctccttttcaatttgggtatttctctccctactcaatacttagcttattttaaaagtacattttccatgggcaaccagcttttctattacatgtttcaaattcttttacagctcttcttgatattgcagaggtactatcatggttctagtaacgaaaggcttactgttattagcggacaaactgctatgattttagaagtgctccttcttttcaattctgtggcaatttttatttatgatttatgcatttttgagccaattaacgaattatctgaatactacaagaaaaatgggtggtatccccccgttcatgtattgtcctatattacatttatctggatgaacaaattgattgtggaaacttaccgtaacaagaaaatcaaagatcctaaccagttaccattgccgccagtagatttgaatattaagagtataagtaaggaatttaaggctaactgggaattggaaaaatggttgaatagaaattctctttggagggccatttggaagagctttggtaggactatttctgtggctatgctttatgaaacgacatctgatttactttctgtagtacagccccagtttttaagaatattcatagatggtttgaacccggaaacatcttctaaatatcctcctttaaatggtgtatttattgctttgacccttttcgtaatcagcgtggtttctgtgttcctcaccaatcaattttatattggaatttttgaggctggtttggggataagaggctctttagcttctttagtgtatcagaagtccttaagattgacgttggcagagcgtaacgaaaaatctactggtgacatcttaaatttgatgtctgtggatgtgttaaggatccagagatttttcgaaaatgcccaaaccattattggcgctcctattcagattattgttgtattaacttccttgtactggttgttgggaaaggctgttattggagggttggttactatggctattatgatgcctatcaatgccttcttatctagaaaggtaaaaaagttatccaaaactcaaatgaagtataaggacatgagaatcaagactattacagagcttttgaatgctataaaatctattaaattatacgcctgggaggaacctatgatggcaagattgaatcatgttcgtaatgatatggagttgaaaaattttagaaaaattggtatagtgagcaatttgatatattttgcgtggaattgtgtacctttaatggtgacatgttccacatttggcttattttctttatttagtgattctccgttatctcctgccattgtcttcccttctttatctttatttaatattttgaacagtgccatctattccgttccatccatgataaataccattatagagacaagcgtttctatggaaagattaaagagtttcttgcttagtgacgaaattgatgattctttcatcgaacgtattgatccttctgcggatgaaagagcgttacctgctatagagatgaataatattacatttttatggaaatctaaagaagtattaacatctagccaatctggagataatttgaggacagatgaagagtctattatcggatcttctcaaattgcgttgaagaatatcgatcattttgaagcaaaaaggggtgatttagtttgtgttgttggtagagtaggagctggtaaatctacatttttgaaggcaattcttggtcaacttccttgcatgagtggttctagggacagtataccacctaaattaatcattagatcttcttctgtagcctactgttctcaagaatcctggataatgaacgcatctgtaagagaaaacattttatttggtcacaagttcgaccaagattattatgacctcactattaaagcatgtcaattgttgcccgatttgaaaatattgccagatggtgatgaaactttggtaggtgaaaagggcatttccttaagtggcggtcagaaggcccgtctttctttagccagagcggtgtactctagagcagatatttatttgttggatgacattttatctgctgttgatgcagaagttagtaaaaatattattgaatatgttttgatcggaaagacggctttattaaaaaataaaacaattattttaactaccaatactgtatctattttaaaacattctcagatgatatatgcgttagaaaacggtgaaattgttgaacaagggaattatgaggatgtaatgaaccgtaagaacaatacttctaaattgaaaaaattattggaggaatttgattctccgattgataatggaaatgaaagcgatgtccaaactgaacacagatccgaaagtgaagtggatgaacctttgcagcttaaagtaactgaaagtgaaactgaggatgaggttgttactgagagtgaattagaattgatcaaagccaattctagaagagcttctttggctacgttgagacctagaccctttgtgggagcacaattggattccgtgaagaaaacggcgcaaaaggccgagaagacagaggtgggaagagtcaaaacaaagatttatcttgcgtatattaaggcttgtggagttttaggtgttgttttatttttcttgtttatgatattaacaagggttttcgacttagcagagaatttttggttaaagtactggtctgaatctaatgaaaaaaatggtagtaatgaaagggtttggatgtttgttggtgtgtattccttaatcggagtagcatctgccgcattcaataatttaagaagtattatgatgttattatattgttctattaggggttctaagaaattgcatgaaagcatggccaaatctgtaattagaagtcctatgactttctttgagactacaccagttggaaggatcataaacaggttcagttctgatatggatgcagtggacagtaatttacagtacattttctccttttttttcaaatctatattgacctatttggttactgttatattagtcgggtacaatatgccatggtttttagtgttcaatatgtttttggtggttatctatatttactatcaaacattttacattgtgttatctagggagttgaaaagattgatcagtatatcttactctccgattatgtccttaatgagtgagagcttgaacggttattctattattgatgcatacgatcattttgagagattcatctatttgaattatgaaaaaatccaatacaacgttgattttgtcttcaactttagatctacgaatagatggttatccgtgagattgcaaactattggtgctacaattgttttggctactgcaatcttagcattggcaacaatgaatactaaaaggcaattgagttctggtatggttggtttattgatgagctattctttagaggttacaggttctttgacttggattgtaaggacaactgtgacgattgaaaccaacattgtatctgtggagagaattgttgagtactgcgaattaccacctgaagcacagtccattaaccctgaaaagaggccagatgaaaattggccatctaagggtggtattgaattcaaaaactattccacaaaatacagagaaaatttggatccagtgttgaataatattaacgtgaagattgagccatgtgaaaaggttgggattgttggcagaacaggtgcagggaagtctacattgagcttagcattatttagaatattggaacctaccgaaggtaaaattattattgacggcattgatatatccgacataggtcttttcgatttaagaagccatttggcaattattcctcaggatgcacaagcttttgaaggtacagtaaagaccaatttggaccctttcaatcgttattctgaagatgaacttaaaagggctgttgagcaggcacatttaaagcctcatttggaaaaaatgttgcacagtaaaccaagaggtgatgattctaatgaagaggatggcaatgttaatgatattttagatgtcaagattaatgagaacggtagtaacttgtctgtggggcaaagacaattattatgtttggcaagagcgttattaaaccgttccaaaatattggtccttgatgaagcaacggcttctgtggatatggaaaccgataaaattatccaagacactataagaagagaatttaaggaccgtaccatcttaacaattgcacatcgtatcgacactgtattggacagtgataagataattgttcttgaccagggtagtgtgagggaattcgattctccctctaaattgttatccgataaaacgtctattttttacagtctttgtgagaaaggtgggtatttgaaatga

SEQ ID NO: 7163 - DNA, 327 bp, Saccharomyces cerevisiae
atgagctcaaatgaagaggtatttactcagataaacgcaactgcgaatgtggttgataataagaagcgtttacttttcgtgcaagatagctcagcacttgttctagggcttgttgcaggatttttgcaaatcgagtcagtccatgggtttatttggttcctgattctgtacaacttgattaatgtcatttacattgtttggatctgtcaacttcaaccaggaaagttctaccaaagcccacttcatgacatttttttcgaatcgttttttagagagataactggttttgtcatggcatggacatttggatacgccctaatcggatga

SEQ ID NO: 7164 - DNA, 327 bp, Artificial Sequence
  Description of Artificial Sequence: Synthetic polynucleotide
atgagcagtaatgaagaggtatttactcagataaacgcaactgcgaatgtggttgataataagaagcgtttacttttcgtgcaagatagcagcgcacttgttttggggcttgttgcaggatttttgcaaatcgagtctgtccatgggtttatttggttcttgattttatacaacttgattaatgtcatttacattgtttggatctgtcaacttcaaccaggaaagttctaccaaagcccacttcatgacatttttttcgaaagtttttttagagagataactggttttgtcatggcatggacatttggatacgccttgatcggatga

SEQ ID NO: 7165 - DNA, 2640 bp, Saccharomyces cerevisiae
atggaaatgaacatggatatggatatggatatggaactcgcatccatagtttcttctttaagcgccctgtcccatagtaacaacaacggcggtcaggccgccgcggccggcattgtgaacggcggtgctgctggatcacagcaaattggcggcttcagaaggtcgagtttcaccacggcaaatgaagtagattcagagatcttgctgcttcacggttccagtgaatcttcaccgatcttcaagaaaaccgccctatcagttggtactgctccgccattctccacgaactcgaaaaagttttttggtaacggcggcaattattaccagtacagatcaaccgacactgcctccctgtcatccgcatcgtacaataactatcatactcatcatactgcggctaatctcgggaaaaacaacaaggtcaaccatcttctgggccagtattcagcttccattgctggtcccgtttactacaatggcaatgacaacaacaactctggtggggaagggttttttgagaagttcggaaaatctttgattgacggtacaagggaactggaatctcaagatagacccgacgctgtcaatactcagtcccaattcatatcaaaaagcgtctctaacgccagcttagacacacagaatactttcgagcaaaatgtcgagtctgacaaaaacttcaacaaattgaataggaacactactaacagtggttcgctttaccactccagttcaaattcaggctcatctgcgtctttagagtccgaaaatgctcattaccccaagagaaatatctggaacgtagccaacacaccagtatttagacctagtaacaatccagccgctgttggggccacaaatgtcgcgcttcctaaccaacaagatgggcctgcaaataacaatttccccccctacatgaacggcttcccacccaatcagtttcatcagggccctcattaccaaaacttccccaactacttgatcggatctccttcaaatttcatctcccagatgatttcagtacagattccagcaaatgaagacaccgaagactcaaatggtaagaaaaagaagaaggcaaacagaccttcttctgtttcttcaccttcgtcccctccaaacaattctccgttcccgtttgcctaccccaacccaatgatgtttatgccacctccaccactctctgctccccagcaacaacagcaacagcaacaacaacaacaacaagaagaccaacaacagcaacagcaacaggagaatccttatatttactaccctactccaaatcctatacctgtcaaaatgcccaaggacgaaaaaaccttcaagaaaagaaataacaagaatcatcctgcaaataactccaacaacgccaacaaacaggcaaatccttatctagaaaattctatacccacaaagaatacctctaaaaagaatgcttcttccaaatctaatgagtcaacggccaacaaccataaatctcactctcattctcatcctcattctcaaagtctacagcaacagcagcaaacgtatcatcgatcgccgttgttagagcaactaagaaacagtagttctgacaaaaattcaaactcgaacatgtcactaaaagacatctttggccattccttagagttttgcaaagatcaacatggttcacggttcattcagcgcgagttggccacctcaccagcctcagaaaaggaggtcatattcaatgaaattcgcgatgacgccattgagctttcgaacgatgtatttggtaattacgtcattcagaagttttttgaatttggtagcaaaattcaaaaaaatactttggttgatcaatttaaaggtaacatgaaacagttatctctacaaatgtacgcatgtcgtgtaattcaaaaggcgttagaatatattgattccaatcaaagaattgagttagtcctggaattatctgactccgttttgcaaatgatcaaagatcagaacggtaatcacgtaattcaaaaggccatcgaaacaattcctatcgaaaaattaccttttatcttaagttctttaactggccacatttaccatctatctacccactcctacggctgtagggtcattcaaagattgttagaatttggttcgagcgaagatcaggaaagcattttaaacgaattgaaagatttcataccatatctaattcaagaccaatatggtaactatgtcattcaatatgttttgcaacaagatcagttcaccaataaggaaatggtcgatatcaaacaggaaatcatagaaactgtggccaataatgttgtcgaatactctaaacataaatttgcctccaacgtggtcgaaaaatctattctttatggctctaaaaatcagaaggatttaataatttctaagattttaccaagagacaaaaatcatgctttgaatctggaagacgattctccaatgattttaatgatcaaggatcaatttgccaactatgtgattcaaaaattagttaatgtctctgagggtgagggtaagaaattgatcgtcattgccattagagcatatttggataaactaaacaaatctaactccctaggaaatagacatttagccagtgttgagaaacttgcagcattggttgaaaatgcggaggtgtga

SEQ ID NO: 7166 - DNA, 2640 bp, Artificial Sequence
  Description of Artificial Sequence: Synthetic polynucleotide
atggaaatgaacatggatatggatatggatatggaactcgcatccatagtttcttctttaagcgccctttcccatagtaacaacaacggcggtcaggccgccgcggccggcattgtgaacggcggtgctgctggatctcagcaaattggcggcttcagaaggtctagtttcaccacggcaaatgaagtagattctgagatcttgttacttcacggttccagtgaatcttctccgatcttcaagaaaaccgccttgagtgttggtactgctccgccattctccacgaactccaaaaagttttttggtaacggcggcaattattaccagtacagatctaccgacactgcctccttatcttccgcaagctacaataactatcatactcatcatactgcggctaatctcgggaaaaacaacaaggtcaaccatcttttgggccagtattctgcttccattgctggtcccgtttactacaatggcaatgacaacaacaactctggtggggaagggttttttgagaagttcggaaaatctttgattgacggtacaagggaattggaatctcaagatagacccgacgctgtcaatactcagtcccaattcatatccaaaagcgtctctaacgccagcttagacacacagaatactttcgagcaaaatgtcgagtctgacaaaaacttcaacaaattgaataggaacactactaacagtggttctctttaccactccagtagtaatagtggctcttctgcgtctttagagtccgaaaatgctcattaccccaagagaaatatctggaacgtagccaacacaccagtatttagacctagtaacaatccagccgctgttggggccacaaatgtcgcgcttcctaaccaacaagatgggcctgcaaataacaatttccccccctacatgaacggcttcccacccaatcagtttcatcagggccctcattaccaaaacttccccaactacttgatcggatctccttccaatttcatctcccagatgattagtgtacagattccagcaaatgaagacaccgaagactctaatggtaagaaaaagaagaaggcaaacagaccttcttctgtttcttctccttcttcccctccaaacaattctccgttcccgtttgcctaccccaacccaatgatgtttatgccacctccaccactctctgctccccagcaacaacagcaacagcaacaacaacaacaacaagaagaccaacaacagcaacagcaacaggagaatccttatatttactaccctactccaaatcctatacctgtcaaaatgcccaaggacgaaaaaaccttcaagaaaagaaataacaagaatcatcctgcaaataactccaacaacgccaacaaacaggcaaatccttatttggaaaattctatacccacaaagaatacctctaaaaagaatgcttcttccaaatctaatgagtctacggccaacaaccataaatctcactctcattctcatcctcattctcaaagtttacagcaacagcagcaaacgtatcataggtctccgttgttagagcaattgagaaacagtagttctgacaaaaatagcaactccaacatgtctttgaaagacatctttggccattccttagagttttgcaaagatcaacatggttccagattcattcagcgcgagttggccacctctccagccagtgaaaaggaggtcatattcaatgaaattcgcgatgacgccattgagctttccaacgatgtatttggtaattacgtcattcagaagttttttgaatttggtagcaaaattcaaaaaaatactttggttgatcaatttaaaggtaacatgaaacagttatctttacaaatgtacgcatgtcgtgtaattcaaaaggcgttagaatatattgattccaatcaaagaattgagttagtcttggaattatctgactccgttttgcaaatgatcaaagatcagaacggtaatcacgtaattcaaaaggccatcgaaacaattcctatcgaaaaattaccttttatcttaagttctttaactggccacatttaccatttatctacccactcctacggctgtagggtcattcaaagattgttagaatttggttccagcgaagatcaggaaagcattttaaacgaattgaaagatttcataccatatttgattcaagaccaatatggtaactatgtcattcaatatgttttgcaacaagatcagttcaccaataaggaaatggtcgatatcaaacaggaaatcatagaaactgtggccaataatgttgtcgaatactctaaacataaatttgcctccaacgtggtcgaaaaatctattctttatggctctaaaaatcagaaggatttaataatttctaagattttaccaagagacaaaaatcatgctttgaatttggaagacgattctccaatgattttaatgatcaaggatcaatttgccaactatgtgattcaaaaattagttaatgtctctgagggtgagggtaagaaattgatcgtcattgccattagagcatatttggataaattgaacaaatctaactccttgggaaatagacatttagccagtgttgagaaacttgcagcattggttgaaaatgcggaggtgtga

SEQ ID NO: 7167 - DNA, 1722 bp, Saccharomyces cerevisiae
atgggtgtttctgcggtgttgaaaagagctaggaatttactagcaacgttcatagtctgctgttttatggcagtagtgcttgttctggcgctggcacaccattttataaatgagcacagagacactaggagttcatcgacccaaatcgaagttgatgacgaaagtaaaagaaacgtacaccatgaccatgttctcactagaaccaatgcatacgcgacgccatacctcgatctggaacatgacaagaaaaacggtatcgtctacgatcatacaagaacggttgtccgtaaaaagaaccacgaagtggggtcctcgtcactgcataaaaacctttttcacaaatttttgacaaagcttatttttaggtttatcgagaaggaaaaagttaccgaaggcgtaacgcaaggaaagttcaataatagtagcaatgaaattgccaatcatgaaccggtttttgaaaaaattcctgtacagtgcgacaatccattacagaatctaatcttatcggaagacttgacattagttgcggatcttaattattattttaaccagtacaatattcaaatagaggaatttagattggagaccgaagatgggtttgttatagatttgtggcacttgataccaaaatatagaacgacagattctgacaagaagaagaggccacccattttgatgctacatggccttttgcaaagcagtggttcgttcgcatccaatggtagaaaatctctggcatattttctgtatcaatccggttacgacatatggttagggaataacagatgcgggtttaggccggaatggaacgaagcgaaagtaccgacactagcttccaggtgggactgggaccttcgcgagatggttaagtacgatctgacccttttgattgataccgtgttagctaagacgcagtttgaaaagcttactttgatctcgcattctcagggcactacacaggggtttatgggcttggtcaacgaagataagtttttccctcccggttcgggatctaaagaatcttttttcacttctaagatcgcaaactatattgccttggcccccgcagtgtatcctggtcccttacttaacgagaaattgtttgttaagcttatgacaaaggaaatcgaaaatccctggttctttggtgaaacgagcttttttgagataatgatgattgtaagaaacttgtgcgttggtgagagcttgttctcctttgtttgttacaccatcttcaattacctgtttgattggaacgataccctttgggataccgcattaagagatcgccatttcctgttttcgccagtccatgtttcagtgaagttgatgcaatggtggctgtcacccgaccccaacaaggtaagttttaaatttggttcccataagatgttccccgacaatgttaagtggttttcagacgcatcaaaggccccaaatatctacttgtttgttccaaagcaagatagattggtggacggagaaagactaatcaatcatttcgtcaatgtggagtcgaatgtcaactacaagatctggtacattgatgagtatgcccatattgatgtcctatgggcacatgatgtcatagagagaattggtaaaccaattttacagaatttgaacaactattactccaagaagccatccagcgcctttgaaagtgattgttcggacacagaggtggaaacggagctggaaatggttgctgagaaggcttga

SEQ ID NO: 7168 - DNA, 1722 bp, Artificial Sequence
  Description of Artificial Sequence: Synthetic polynucleotide
atgggtgtttctgcggtgttgaaaagagctaggaatttattggcaacgttcatagtctgctgttttatggcagtagtgcttgttttggcgttggcacaccattttataaatgagcacagagacactaggagttcttccacccaaatcgaagttgatgacgaaagtaaaagaaacgtacaccatgaccatgttctcactagaaccaatgcatacgcgacgccatacctcgatttggaacatgacaagaaaaacggtatcgtctacgatcatacaagaacggttgtccgtaaaaagaaccacgaagtggggtcctcttctttgcataaaaacctttttcacaaatttttgacaaagcttatttttaggtttatcgagaaggaaaaagttaccgaaggcgtaacgcaaggaaagttcaataatagtagcaatgaaattgccaatcatgaaccggtttttgaaaaaattcctgtacagtgcgacaatccattacagaatttgatcttatctgaagacttgacattagttgcggatcttaattattattttaaccagtacaatattcaaatagaggaatttagattggagaccgaagatgggtttgttatagatttgtggcacttgataccaaaatatagaacgacagattctgacaagaagaagaggccacccattttgatgttgcatggccttttgcaaagcagtggttctttcgcatccaatggtagaaaatctttggcatattttttatatcaatccggttacgacatatggttagggaataacagatgcgggtttaggccggaatggaacgaagcgaaagtaccgacattggcttccaggtgggactgggaccttcgcgagatggttaagtacgatttgacccttttgattgataccgtgttagctaagacgcagtttgaaaagcttactttgatctctcattctcagggcactacacaggggtttatgggcttggtcaacgaagataagtttttccctcccggttctggatctaaagaatcttttttcacttctaagatcgcaaactatattgccttggcccccgcagtgtatcctggtcccttacttaacgagaaattgtttgttaagcttatgacaaaggaaatcgaaaatccctggttctttggtgaaacgagcttttttgagataatgatgattgtaagaaacttgtgcgttggtgagagcttgttctcctttgtttgttacaccatcttcaattacttgtttgattggaacgataccctttgggataccgcattaagagatcgccatttcttattttctccagtccatgtttctgtgaagttgatgcaatggtggttatctcccgaccccaacaaggtaagttttaaatttggttcccataagatgttccccgacaatgttaagtggttttctgacgcatccaaggccccaaatatctacttgtttgttccaaagcaagatagattggtggacggagaaagattgatcaatcatttcgtcaatgtggagagcaatgtcaactacaagatctggtacattgatgagtatgcccatattgatgtcttgtgggcacatgatgtcatagagagaattggtaaaccaattttacagaatttgaacaactattactccaagaagccatccagcgcctttgaaagtgattgttctgacacagaggtggaaacggagttagaaatggttgctgagaaggcttga

SEQ ID NO: 7169 - DNA, 1470 bp, Saccharomyces cerevisiae
atgaagattaagaccattaaaagaagtgctgatgactatgtccctgttaaaagtacgcaggaatctcaaatgcccaggaatttgaaccctgaattgcatccttttgaaagggcacgtgaatatactaaagctttgaatgccaccaaattggaaagaatgtttgctaaaccctttgtgggtcagttaggatacggtcatagagatggtgtttatgctattgccaaaaattatggtagtctgaataaattggctactggttctgcagatggtgtgattaaatactggaacatgtctactagagaagaatttgtttcctttaaggcgcattatggactcgttactggtctttgtgtgacacagcctcgttttcatgacaagaagccagatttgaagagccaaaattttatgttatcttgcagtgatgacaaaactgtcaagctatggtcaataaatgttgatgattactccaataaaaactccagtgataacgactccgttactaacgaggaaggtttgattcgtacttttgacggtgaatctgcatttcaaggtatcgattcgcacagagaaaactccacgtttgccacaggtggggccaagatccatctttgggacgttaacagattgaagccagtttccgatctatcatggggagcagacaacattactagtttaaaattcaatcaaaatgaaacagatatcttggccagtactggtagtgataattctattgttctttacgacttgagaaccaactcccccacacaaaagattgttcaaacaatgaggacgaatgctatttgctggaatccaatggaggccttcaactttgtaactgccaatgaagatcataacgcctactattatgatatgaggaatttatcacgttcattgaatgtattcaaagatcacgtcagcgcagtaatggatgttgacttttctcctacgggggatgagattgttactggttcgtacgataagagtatcagaatatataagacgaatcacggacattcgagagaaatttatcatacgaagagaatgcagcatgttttccaggttaaatattccatggattctaaatatattatcagtggatctgatgatgggaatgttaggctatggagaagtaaagcttgggagaggtctaatgtcaaaactactcgtgaaaagaataaattagaatatgacgaaaaattaaaagaaagatttagacatatgccggagatcaaaagaatcagtagacatagacacgtgccacaagtcatcaaaaaggctcaggaaattaagaacattgagttgagttctattaagagaagagaagctaatgaaaggcgtactagaaaggatatgccatacatttccgaaaggaagaaacaaatcgttggtaccgtgcacaaatatgaagattcaggaagagataggaaaagaagaaaggaagatgacaaacgtgatactcaagaaaagtag

SEQ ID NO: 7170 - DNA, 1470 bp, Artificial Sequence
  Description of Artificial Sequence: Synthetic polynucleotide
atgaagattaagaccattaaaagaagtgctgatgactatgtccctgttaaaagtacgcaggaatctcaaatgcccaggaatttgaaccctgaattgcatccttttgaaagggcacgtgaatatactaaagctttgaatgccaccaaattggaaagaatgtttgctaaaccctttgtgggtcagttaggatacggtcatagagatggtgtttatgctattgccaaaaattatggtagtttgaataaattggctactggttctgcagatggtgtgattaaatactggaacatgtctactagagaagaatttgtttcctttaaggcgcattatggactcgttactggtctttgtgtgacacagcctcgttttcatgacaagaagccagatttgaagagccaaaattttatgttatcttgcagtgatgacaaaactgtcaagttatggtccataaatgttgatgattactccaataaaaactccagtgataacgactccgttactaacgaggaaggtttgattcgtacttttgacggtgaatctgcatttcaaggtatcgattctcacagagaaaactccacgtttgccacaggtggggccaagatccatctttgggacgttaacagattgaagccagtttccgatttatcttggggagcagacaacattactagtttaaaattcaatcaaaatgaaacagatatcttggccagtactggtagtgataattctattgttctttacgacttgagaaccaactcccccacacaaaagattgttcaaacaatgaggacgaatgctatttgctggaatccaatggaggccttcaactttgtaactgccaatgaagatcataacgcctactattatgatatgaggaatttatctcgttctttgaatgtattcaaagatcacgtcagcgcagtaatggatgttgacttttctcctacgggggatgagattgttactggttcttacgataagagtatcagaatatataagacgaatcacggacattccagagaaatttatcatacgaagagaatgcagcatgttttccaggttaaatattccatggattctaaatatattatcagtggatctgatgatgggaatgttaggctttggagaagtaaagcttgggagaggtctaatgtcaaaactactcgtgaaaagaataaattagaatatgacgaaaaattaaaagaaagatttagacatatgccggagatcaaaagaatcagtagacatagacacgtgccacaagtcatcaaaaaggctcaggaaattaagaacattgagttgagttctattaagagaagagaagctaatgaaaggcgtactagaaaggatatgccatacatttccgaaaggaagaaacaaatcgttggtaccgtgcacaaatatgaagattctggaagagataggaaaagaagaaaggaagatgacaaacgtgatactcaagaaaagtga

SEQ ID NO: 7171 - DNA, 1284 bp, Saccharomyces cerevisiae
atgggtttcatatcgtcaatactgtgctgctcttccgagacgacacaatccaattccaattctgcttatcgccaacaacagagcagttctctcaataaaaacagaagcgttaaacattccaacacgaaaagccgaacccgtggcgtacatcagacaaactctcctccttctaagacaaattcagccgctactttcagttccactgaacgatccaccggtaaatctgggataagcacgaacgataatgaaaaaaagaagccatcgtcgccgactgcagccgtcaccgccactactactaataatatgacaaaagtagagaagcgaattagtaaagatgatctttacgaggaaaaatacgaggttgacgaagatgaagagatcgacgatgaagataaccgtcgcagtcgtggcattgtacaggaaaaaggagatgctgtgaaagatacttccaggcagaaaaaacaacagcagcaacaacaacaacagtcacaaccacaaccacaaccccagtcacagtcacagtcacagtcgcagtcgcagtcgcagcagcgagggcctactgtacaagtatcgtctgaccatcttatccaagatatgaatttgagtagggtaagtagcagctctcaagccagtgaaacttccaacgatgccgacgacgaagacgatgaagatgaagaatatattgatctaacgcttttgcagcagggccagtatcatgcaccaggttacaacactctgctccccccacaagatgaaagtacaaagggcaagaaatgcctaatactggacctggatgaaaccttggtacactcttctttcaaatacttacgatctgcggattttgttttgtctgtggaaatagatgaccaagtacacaatgtctatgtcattaaaagacctggtgtggaagaatttttggaaagagtcggaaaattattcgaggttgtagtcttcacggctagtgtctctcgatacggtgatcctttgcttgatatattagacacagataaagtcattcatcacagattattcagagaggcttgctataactatgaaggaaactatataaaaaacttatcccagattggaaggccgttatcagatatcatcattctcgataactctccggcatcttatatttttcatccccaacatgcaataccgatttcgtcctggttctcagatactcatgataacgaattattagatattattcctcttttagaagacctttctgtgaaaacctcactggatgtgggcaaaattttggatgtaacaatataa

SEQ ID NO: 7172 - DNA, 1284 bp, Artificial Sequence
  Description of Artificial Sequence: Synthetic polynucleotide
atgggtttcatatcttctatattgtgctgctcttccgagacgacacaatccaattccaattctgcttatcgccaacaacagagcagttctctcaataaaaacagaagcgttaaacattccaacacgaaaagcagaacccgtggcgtacatcagacaaactctcctccttctaagacaaattctgccgctactttcagttccactgaaagatccaccggtaaatctgggataagcacgaacgataatgaaaaaaagaagccatcttctccgactgcagccgtcaccgccactactactaataatatgacaaaagtagagaagagaattagtaaagatgatctttacgaggaaaaatacgaggttgacgaagatgaagagatcgacgatgaagataaccgtcgcagtcgtggcattgtacaggaaaaaggagatgctgtgaaagatacttccaggcagaaaaaacaacagcagcaacaacaacaacagtctcaaccacaaccacaaccccagtctcagtctcagtctcagtctcagtctcagtctcagcagcgtgggcctactgtacaagtatcttctgaccatcttatccaagatatgaatttgagtagggtaagtagcagctctcaagccagtgaaacttccaacgatgccgacgacgaagacgatgaagatgaagaatatattgatttgacgcttttgcagcagggccagtatcatgcaccaggttacaacactttactccccccacaagatgaaagtacaaagggcaagaaatgcttaatattggacttggatgaaaccttggtacactcttctttcaaatacttaagatctgcggattttgttttgtctgtggaaatagatgaccaagtacacaatgtctatgtcattaaaagacctggtgtggaagaatttttggaaagagtcggaaaattattcgaggttgtagtcttcacggctagtgtctctcgttacggtgatcctttgcttgatatattagacacagataaagtcattcatcacagattattcagagaggcttgctataactatgaaggaaactatataaaaaacttatcccagattggaaggccgttaagtgatatcatcattctcgataactctccggcatcttatatttttcatccccaacatgcaataccgatttcttcctggttcagtgatactcatgataacgaattattagatattattcctcttttagaagacctttctgtgaaaacctccttggatgtgggcaaaattttggatgtaacaatatga

SEQ ID NO: 7173 - DNA, 210 bp, Saccharomyces cerevisiae
atgactgaaactgacaagaaacaagaacaagaaaaccacgcggagtgcgaggacaaacctaagccatgttgcgtttgtaagccagaaaaggaggagcgggatacatgcatcttattcaatggacaagactctgaaaaatgcaaggaattcattgaaaagtacaaagagtgcatgaagggttatggcttcgaagttccaagtgcaaattag

SEQ ID NO: 7174 - DNA, 210 bp, Artificial Sequence
  Description of Artificial Sequence: Synthetic polynucleotide
atgactgaaactgacaagaaacaagaacaagaaaaccacgcggagtgcgaggacaaacctaagccatgttgcgtttgtaagccagaaaaggaggagagagatacatgcatcttattcaatggacaagactctgaaaaatgcaaggaattcattgaaaagtacaaagagtgcatgaagggttatggcttcgaagttccaagtgcaaattga

SEQ ID NO: 7175 - DNA, 2259 bp, Saccharomyces cerevisiae
atggtggtaggaactaaaaaatactctaatttggactttgtccctacaatcagtgacagtgaagacgatgttccaattctagattcttctgatgacgaaaaagtcgaggctaagaagactacgaagaagcggaagggtaagaataacaagaaaaaggttagtgagggggataacctcgatgaggatgttcatgaggacttggacgcggggtttaagtttgatttggacgccgatgataccacttcgaacttccaaggctggaactttctagcagagggcgagtccaataaggacgatgccgaagcttttgtgaagaaggacgttgacttggataagattattagaagaaaaggtgggctggtgaaaatggcccatattgatagtaaacaagaagaagaaaccgagaaagaaaaagtagaaaaagaaaacgatagcgacgatgaggaattagcaatggacgggttcggtatgggagctcccatgaacaatggagacgaaaatcagtcagaagaagaagaagaagaggaggaaaaggaagaggaagaggaggaagaggaggaacaagaagagatgacgttagaaaaaggcggcaaagatgacgaaatagatgaagaagacgattctgaagaggcaaaagccgatttctatgcgcctgaaactgagggagatgaagctaaaaagcaaatgtacgaaaatttcaacagtttgtctttatctcgtccggttcttaagggccttgcaagtttgggttacgtcaagccttcccctattcaaagcgccacaatccccattgccttattgggtaaagacatcattgccggtgctgtgactggttccggtaagactgctgcgtttatgattcccataatcgagcgtttgttgtataaaccagccaaaatcgcttccaccagagttattgttctattgcccactcgtgagttagctatccaagtcgctgacgttggtaaacaaattgcacgtttcgtctccggtataacctttggtctggccgttggtggtttgaacttgagacaacaagaacaaatgttgaaatctcgtccggacatcgtcattgctaccccaggtagattcattgatcatatcaggaactcagcaagttttaatgtggactcagtagagattctggttatggatgaagccgatagaatgttagaagaaggttttcaagatgaactgaacgaaattatgggcctattaccaagcaatagacagaacctattgttttctgctacaatgaactccaaaattaaaagtttagttagtctttctctaaaaaaaccagtaaggattatgattgatcctccaaagaaagctgctactaagttgacacaagaattcgttcgtattcgtaaaagagaccatttgaagcctgccttgttatttaatttgattaggaaattggatccaacgggtcaaaagaggattgtcgtttttgtggctagaaaagaaactgctcataggttaaggattatcatgggtcttttaggtatgagtgtgggtgaattacacggttctttaacccaagaacagcgtttagattccgttaataaattcaaaaatttggaagttcctgtacttatctgtacggatttggcctccagaggtcttgatatccccaagattgaggttgttatcaactacgatatgcccaagagttatgagatctacctgcatagagttggtcgtaccgccagagctggtagggaaggtcgttccgtcaccttcgtcggtgaatcatctcaagatagaagtattgtacgtgctgctataaagagtgtagaagaaaataagtccctaactcaaggtaaagcacttggtagaaacgtagactgggttcaaatcgaagaaacaaacaaacttgttgaatccatgaacgatacgattgaagatattctggtggaagaaaaggaggagaaggaaatattaagggctgaaatgcaattaagaaagggtgaaaatatgttgaagcataaaaaggaaatccaggcaagaccaagaaggacatggttccaaagcgaatcagataagaaaaattccaaagtattaggtgctttatcaaggaacaagaaagtcactaacagcaaaaagagaaagcgtgaagaagctaaggcagatggcaatggtgcacgttcttatagaaaaaccaaaaccgaccgtattgcagatcaagaaagaacttttaaaaagcagaagagtacaaattcaaataagaagaagggcttcaaaagccgtaggtaa

SEQ ID NO: 7176 - DNA, 2259 bp, Artificial Sequence
  Description of Artificial Sequence: Synthetic polynucleotide
atggtggtaggaactaaaaaatactctaatttggactttgtccctacaatcagtgacagtgaagacgatgttccaattttagattcttctgatgacgaaaaagtcgaggctaagaagactacgaagaagagaaagggtaagaataacaagaaaaaggttagtgagggggataacctcgatgaggatgttcatgaggacttggacgcggggtttaagtttgatttggacgccgatgataccacttctaacttccaaggctggaactttttggcagagggcgagtccaataaggacgatgccgaagcttttgtgaagaaggacgttgacttggataagattattagaagaaaaggtgggttagtgaaaatggcccatattgatagtaaacaagaagaagaaaccgagaaagaaaaagtagaaaaagaaaacgatagcgacgatgaggaattagcaatggacgggttcggtatgggagctcccatgaacaatggagacgaaaatcagtctgaagaagaagaagaagaggaggaaaaggaagaggaagaggaggaagaggaggaacaagaagagatgacgttagaaaaaggcggcaaagatgacgaaatagatgaagaagacgattctgaagaggcaaaagccgatttctatgcgcctgaaactgagggagatgaagctaaaaagcaaatgtacgaaaatttcaacagtttgtctttatctcgtccggttcttaagggccttgcaagtttgggttacgtcaagccttcccctattcaaagcgccacaatccccattgccttattgggtaaagacatcattgccggtgctgtgactggttccggtaagactgctgcgtttatgattcccataatcgagcgtttgttgtataaaccagccaaaatcgcttccaccagagttattgttttattgcccactcgtgagttagctatccaagtcgctgacgttggtaaacaaattgcacgtttcgtctccggtataacctttggtttagccgttggtggtttgaacttgagacaacaagaacaaatgttgaaatctcgtccggacatcgtcattgctaccccaggtagattcattgatcatatcaggaactctgcaagttttaatgtggactctgtagagattttggttatggatgaagccgatagaatgttagaagaaggttttcaagatgaattgaacgaaattatgggcttattaccaagcaatagacagaaccttttgttttctgctacaatgaactccaaaattaaaagtttagttagtctttctttgaaaaaaccagtaaggattatgattgatcctccaaagaaagctgctactaagttgacacaagaattcgttcgtattcgtaaaagagaccatttgaagcctgccttgttatttaatttgattaggaaattggatccaacgggtcaaaagaggattgtcgtttttgtggctagaaaagaaactgctcataggttaaggattatcatgggtcttttaggtatgagtgtgggtgaattacacggttctttaacccaagaacagcgtttagattccgttaataaattcaaaaatttggaagttcctgtacttatctgtacggatttggcctccagaggtcttgatatccccaagattgaggttgttatcaactacgatatgcccaagagttatgagatctacttgcatagagttggtcgtaccgccagagctggtagggaaggtcgttccgtcaccttcgtcggtgaaagctctcaagatagaagtattgtacgtgctgctataaagagtgtagaagaaaataagtccttgactcaaggtaaagcacttggtagaaacgtagactgggttcaaatcgaagaaacaaacaaacttgttgaatccatgaacgatacgattgaagatattttggtggaagaaaaggaggagaaggaaatattaagggctgaaatgcaattaagaaagggtgaaaatatgttgaagcataaaaaggaaatccaggcaagaccaagaaggacatggttccaaagcgaaagtgataagaaaaattccaaagtattaggtgctttatctaggaacaagaaagtcactaacagcaaaaagagaaagcgtgaagaagctaaggcagatggcaatggtgcacgttcttatagaaaaaccaaaaccgaccgtattgcagatcaagaaagaacttttaaaaagcagaagagtacaaatagtaataagaagaagggcttcaaaagccgtaggtga

SEQ ID NO: 7177 - DNA, 1998 bp, Saccharomyces cerevisiae
atgaagcataacaggcagatgccagatgaaagcttggaaaacataaaagtgctactgaatcctaaattaggaaagccagtcaagtcacttacgagtgcacaatcaaaagcttgctatcatacgctgatcagtaataaaaatttgaacaagacaagtgatgaatacgaaaagttattggcaaactatatcctcctttgtgatgaaaaatacctatgtaaaaccgtaattccagattcccgattttgggctatattgtgtgataattgccaaaagctaaggtcagaaacgttggtagcaaatctcattaggatttttaatgtagcccttaaatgccaagattctaataagaatgaagttattgtgagcatctgccacatctccagagagaactctcagctcattggaatacttttacaacttttgtcccaaagacctattcatataccgttgtttacggacactatactatgcataaccctatttttaaaatgctcacttacattatgtgagacatcactatcacacgccgtagaatttgtacccagaatcctcattttgctatttcagtataactttccagcttccatgtctgaattactttacatagaagacttgcaaccactaatccttgaagaatttgtaccgttaaagcagaggctaataaattttctatcttcggttagtattgatgattattcctgttcgcttaaagctgatcttcttacagccatcaaagataactccgtattccaaaaagggttagaaatggaaatgggcgatcttcccagtataaatttattaaatgcgtatgatacattcacattcttaaacagtcctaatgggtctttcaagagactttacactgaacaattgttgtttggcgagaacgatttccctctttatgaagcaatatttaaactttcagaccaatttagaagacttttcaatctaagtgggaaaaaagagaaccaatactcagactcagagcgtgatttaaaattacaaattgctaccgctgttctcaatcgacaaacatgtttttacaaaacactcgagttgtttttgagattttggatagaatcattagcaaaatcgcaaagtgatttggtttcactgttaaatttagctattatcactttaaaatatgtttgtttgtcatccagtgatttggaagcagcaatacagacgaaatcccttctcaagacccaagttgttgcacttgactctatgagatataaatttgcaagaacattacaattagactcaatcaaaaaagaacagtatcgaacctggtcatctagtatcgctagcttcgataccatgctatcaggccaggttcgtgattacgttcgtcatcaaagacttcttcaattgcaaaagggaacgtgggtttacgcagagaacccactgaatcctgaagctggcacgcctaaagtctacttcctcatagtttcagataaccacgcaaatttattagccagagaattcgaaacacaaacaaacgatttaccttatctattcgacaataaaattttaacaagtccaggttctgaggcattagctaatggcagaacaaaagttgttgttttgaaacatataacctctttcaaaagcatagaacttactacaccgagtcgtcggacgagcagtaatgtttacatcaaattagatgaagccaatgtgtacactggagttgaattaaaagatcgtaacgacaggacagttttgaaattttatttagacacagaagagggaagatatatatggctagacggattgaaattgatatctccattccagcatgaagatatatcagaagacacgaaagaacaaatagacactttatttgatttgaggaaaaatgttcagatgataaatttgaacgttcgtcaggacatcatagtgcctccacctgaaccaagcgacgaggacgaagatgaagaattttataacttggaaacgttaaagaaagtaacccaaaatttttattttgattaa

SEQ ID NO: 7178 - DNA, 1998 bp, Artificial Sequence
  Description of Artificial Sequence: Synthetic polynucleotide
atgaagcataacaggcagatgccagatgaaagcttggaaaacataaaagtgttgttgaatcctaaattaggaaagccagtcaagtctcttacgagtgcacaaagtaaagcttgctatcatacgttgatcagtaataaaaatttgaacaagacaagtgatgaatacgaaaagttattggcaaactatatcctcctttgtgatgaaaaatacttgtgtaaaaccgtaattccagattccagattttgggctatattgtgtgataattgccaaaagttaaggtctgaaacgttggtagcaaatctcattaggatttttaatgtagcccttaaatgccaagattctaataagaatgaagttattgtgagcatctgccacatctccagagagaactctcagctcattggaatacttttacaacttttgtcccaaagacctattcatataccgttgtttacggacactatattgtgcataaccttatttttaaaatgcagccttacattatgtgagacatctttatcccacgccgtagaatttgtacccagaatcctcattttgttatttcagtataactttccagcttccatgtctgaattactttacatagaagacttgcaaccattgatccttgaagaatttgtaccgttaaagcagaggttgataaattttttatcttctgttagtattgatgattattcctgttctcttaaagctgatcttcttacagccatcaaagataactccgtattccaaaaagggttagaaatggaaatgggcgatcttcccagtataaatttattaaatgcgtatgatacattcacattcttaaacagtcctaatgggtctttcaagagactttacactgaacaattgttgtttggcgagaacgatttccctctttatgaagcaatatttaaactttctgaccaatttagaagacttttcaatttgagtgggaaaaaagagaaccaatacagtgactctgagcgtgatttaaaattacaaattgctaccgctgttctcaatagacaaacatgtttttacaaaacactcgagttgtttttgagattttggatagaatctttagcaaaatctcaaagtgatttggtttctttattaaatttagctattatcactttaaaatatgtttgtttgtcttccagtgatttggaagcagcaatacagacgaaatcccttctcaagacccaagttgttgcacttgactctatgagatataaatttgcaagaacattacaattagactctatcaaaaaagaacagtatagaacctggtcttctagtatcgctagcttcgataccatgctttctggccaggttcgtgattacgttcgtcatcaaagacttcttcaattgcaaaagggaacgtgggtttacgcagagaacccattgaatcctgaagctggcacgcctaaagtctacttcctcatagtttctgataaccacgcaaatttattagccagagaattcgaaacacaaacaaacgatttaccttatcttttcgacaataaaattttaacaagtccaggttctgaggcattagctaatggcagaacaaaagttgttgttttgaaacatataacctctttcaaaagcatagaacttactacaccgagtcgtagaacgagcagtaatgtttacatcaaattagatgaagccaatgtgtacactggagttgaattaaaagatcgtaacgacaggacagttttgaaattttatttagacacagaagagggaagatatatatggttagacggattgaaattgatatctccattccagcatgaagatatatctgaagacacgaaagaacaaatagacactttatttgatttgaggaaaaatgttcagatgataaatttgaacgttcgtcaggacatcatagtgcctccacctgaaccaagcgacgaggacgaagatgaagaattttataacttggaaacgttaaagaaagtaacccaaaatttttattttgattga

SEQ ID NO: 7179 - DNA, 177 bp, Saccharomyces cerevisiae
atgacacaattgagtcaatccaacgtggaacgggttgcccttgtatacatttcagtttacttcttttcatgtatttccttaatagtttattttttcactttctgcctatccgtttcaattccgaagaaccgtcaacatccaataaagatcatctacaacaataagtgcccctcataa

SEQ ID NO: 7180 - DNA, 177 bp, Artificial Sequence
  Description of Artificial Sequence: Synthetic polynucleotide
atgacacaattgagtcaatccaacgtggaaagagttgcccttgtatacatttctgtttacttcttttcttgtatttccttaatagtttattttttcactttctgcttatccgtttctattccgaagaaccgtcaacatccaataaagatcatctacaacaataagtgcccctcttga

SEQ ID NO: 7181 - DNA, 1281 bp, Saccharomyces cerevisiae
atgactgatagtgagaatgaatccaccgaaacggattcgttaatgacgtttgacgattatataagcaaagagctacctgaacatttacagagactaatcatggagaatttgaagggttctactactaatgacttaaagcaaacttcaaacaactcagagtttaatgtcagtaaaaacgggagcttcaaaggtctcgatgatgcaattcaagctttgcaaatgcaaagcgtgttgcatccttcttcgttaggatcgttagcaacgtcctccaaattttctggatggtcgtttgctcaagggttttttgtaggacagctaagcatagtgttgttgttcatctttttcctaaagttctttatattcagtgatgagccatctaaaagtaagaatccgaaacctgcagcctcccgtcacagatcaaaatttaaagaatatccctttatatctcgcgaattcctgacttctcttgttaggaagggtgctaaacaacactacgagctcaatgaagaggcagaaaatgaacatcttcaagaactagctcttattttagagaaaacctattataatgtcgacgtgcaccctgcagagtcattggactggttcaacgttttagttgcccaaataatacagcaattccgcagtgaggcttggcacagggacaatatccttcattccttgaatgattttattggaagaaaatcacccgatctgcctgaatatttggataccataaaaataactgaactggatacaggtgatgatttccccattttctcgaattgcagaatacaatattcgccaaattcaggaaataaaaagctagaggctaaaattgatatagatttaaatgaccacttaactttaggagtagaaacaaaactattacttaactatccaaagcctggtattgccgcactccccataaatctagtagtgtcaattgtgaggtttcaggcgtgtttgaccgtatctttaactaatgcagaggagtttgcttctacttcgaacggtagcagtagtgaaaacggtatggagggcaattcaggatactttttgatgttttctttttctcctgaatatagaatggaatttgaaatcaagtcgctaattggctcacggtctaaacttgaaaatattcccaagatcggcagtgtcattgaataccaaataaaaaaatggttcgttgaacgatgcgttgaaccaagattccaatttgtcaggttaccaagtatgtggccacgtagtaaaaatacgagagaagaaaagcctacagagttataa

SEQ ID NO: 7182 - DNA, 1281 bp, Artificial Sequence
  Description of Artificial Sequence: Synthetic polynucleotide
atgactgatagtgagaatgaatccaccgaaacggattctttaatgacgtttgacgattatataagcaaagagcttcctgaacatttacagagattgatcatggagaatttgaagggttctactactaatgacttaaagcaaacttctaacaacagtgagtttaatgtcagtaaaaacgggagcttcaaaggtctcgatgatgcaattcaagctttgcaaatgcaaagcgtgttgcatccttcttctttaggatctttagcaacgtcctccaaattttctggatggtcttttgctcaagggttttttgtaggacagttgagcatagtgttgttgttcatctttttcttgaagttctttatattcagtgatgagccatctaaaagtaagaatccgaaacctgcagcctcccgtcacagaagtaaatttaaagaatatccctttatatctcgcgaattcttgacttctcttgttaggaagggtgctaaacaacactacgagctcaatgaagaggcagaaaatgaacatcttcaagaattggctcttattttagagaaaacctattataatgtcgacgtgcaccctgcagagtctttggactggttcaacgttttagttgcccaaataatacagcaattccgcagtgaggcttggcacagggacaatatccttcattccttgaatgattttattggaagaaaaagtcccgatttacctgaatatttggataccataaaaataactgaattagatacaggtgatgatttccccattttcagtaattgcagaatacaatattctccaaattctggaaataaaaagttggaggctaaaattgatatagatttaaatgaccacttaactttaggagtagaaacaaaattattacttaactatccaaagcctggtattgccgcactccccataaatttggtagtgtccattgtgaggtttcaggcgtgtttgaccgtatctttaactaatgcagaggagtttgcttctacttctaacggtagcagtagtgaaaacggtatggagggcaattctggatactttttgatgttttctttttctcctgaatatagaatggaatttgaaatcaagtctttgattggctctcgttctaaacttgaaaatattcccaagatcggcagtgtcattgaataccaaataaaaaaatggttcgttgaaagatgcgttgaaccaagattccaatttgtcaggttaccaagtatgtggccacgtagtaaaaatacgagagaagaaaagcctacagagttatga

SEQ ID NO: 7183 - DNA, 2607 bp, Saccharomyces cerevisiae
atgaatgctactaaagaactgacttttaatttactgaataaatttcaagacaaagaaagatttggatctgcgcaaagacatgctggaatctcactaaaagggttcatatctggtatattgttttcttttttgtactttttatttcagctgtcactctttattattttaagatcaagattcaagactatatatcaggccaatgtcgttctgaaaatccatccaggttctaaagtttgttttgctaagaaaaaaataaaaaattattggtcattatttgcatttctcaagcaacttcccggaagaatgttagatcctatggaaaaattcgaacgaaacgaaaggtatggcctagacaattatctatttttacggtttctcaaacttttgatattcttttttgcagtgttatcaattatcaacattccaatactaattccaatccattatttttccagggatattttgaaagaaaatgaaggtgaacgttatgagcaaagtttcaggacgacaagtaaacttgacaagtggaccatgtcaaatctatcacctaattcatcgaatactttaatctgtcacttgtttttgagtatctttgttgtactctggtttcacttcattctttcttcggaactgaggttcgttaatcgactaggatattccgttttgacgaaaagtaaataccaaaacattctatatttggaaggattctcaagtaaattggttacccaaagtatttctttagaaactttttttcagccgctacacagtgattgctttggcgtgacgcatttcattccaaaaaatttgaagaaagtccacaaattagaaataaagttaaataaattacaaaaatcaaaagaacaaattatctttgagattattttagagaaatattttagaagagtttcaatacacaggcatttgatagcaaatcacaaaagatttttcttttcaaagttgaaaaaccatctattatttcagtacaaaaaattggtatttttaactcaatttagaatttcatactattgcacaaaaattcgtctgcgctggaaaaagtcaagcatctttccgttatattaccctaaactgtatgtaaatacagaaacaatattagaaaggaaatacagaatccttgataaaataatacgcaaggaaaaactcattaaattccaagtaaattccttgaaagcaacttcagaaaccaagcaggcactgcccgacgatttatcgtcgggcacagacatttatatggataagatgttcattaccttcaagtccacattattgtcaaacgttataggtgagttgctttcgtatagactacccacccaaaatttaaaagtaataataggccccaatgttaatgacattatttggagaaatatcctcgattcatcacccctttggaaaagtgccaaatatttctcggcaaatatattgcgaatttttgtgattataggctggattttgcctgtcgcgttccttgggttaatatcacaaataccaaatatttcctcactaataccgtttacaaaaataattcatttccaatctccatttataagagaagtggcaaagaatttgattccaatagtaaccttaataataataatagaaatcgtaccctactttttccgttggctgagttaccttcgagggttgaaaactggagcgcaaatagaagctgatgtccagaattggtatttcgtctttgtcttcattcatcttttcgtagttgttacaatatcttctggattttctataattattgagaggcttcttaacaatcctgtcagtatccctgctctcctggccaacgacttgcctaaatgcgcaaactttttctgttcttttgttttgattaggggaatggcttatgcaggcggtaatttgttaagaataaaagagctactttttgaattgttctactataaatggaaaaggagtactccacatgctcaatttaagaggttaaagacatctttatttttccaactaggatctatttatcctatattctcagtgttgggctgtattggtatcatatacagtgttgttgctcctattatattattattatgttgcatctcattttcgatggttttcttttctttcagttacttgttcaaataccaatataacaaagagaactattctgaaacgttcggtaaattgtacatacaggcccttatgcaattgtacgcgggcatttatttcatggaattttgtttactcgggctgttcactctttttgatcaatacacattgtcaactataatgcttgttgtctttgctctaacagtaatcacgcactccaaaatctccaaacaaataaaatcgaagcctcaacgcataccaactttggaatacttgtcgaatctaacagaggaaaggaaggaccaattctgtcaagaaagttatactttccatgatattttctccatttgtagaaattcggatgaaatttggctaccaagggacaaactaggaatttctgaagaagaacaatcatttttggagaagtcgtatcacctgaaattcgatcttaatatgtattcaatgaatttatttggtgattgtcacttggagaatagccacttgcactaa

SEQ ID NO: 7184 - DNA, 2607 bp, Artificial Sequence
  Description of Artificial Sequence: Synthetic polynucleotide
atgaatgctactaaagaattgacttttaatttattgaataaatttcaagacaaagaaagatttggatctgcgcaaagacatgctggaatctctttgaaagggttcatatctggtatattgttttcttttttgtactttttatttcagttatctctctttattattttaagatctagattcaagactatatatcaggccaatgtcgttttgaaaatccatccaggttctaaagtttgttttgctaagaaaaaaataaaaaattattggtctttatttgcatttctcaagcaacttcccggaagaatgttagatcctatggaaaaattcgaaagaaacgaaaggtatggccttgacaattatttatttttaagatttctcaaacttttgatattcttttttgcagtgttatccattatcaacattccaatattgattccaatccattatttttccagggatattttgaaagaaaatgaaggtgaacgttatgagcaaagtttcaggacgacaagtaaacttgacaagtggaccatgagtaatttatctcctaattcttccaatactttaatctgtcacttgtttttgagtatctttgttgtactctggtttcacttcattctttcttctgaattgaggttcgttaatagattaggatattccgttttgacgaaaagtaaataccaaaacattctttatttggaaggattctctagtaaattggttacccaaagtatttctttagaaactttttttcagccgttgcacagtgattgctttggcgtgacgcatttcattccaaaaaatttgaagaaagtccacaaattagaaataaagttaaataaattacaaaaatctaaagaacaaattatctttgagattattttagagaaatattttagaagagtttctatacacaggcatttgatagcaaatcacaaaagatttttcttttccaagttgaaaaaccatcttttatttcagtacaaaaaattggtatttttaactcaatttagaatttcttactattgcacaaaaattcgtttgcgctggaaaaagagcagcatctttccgttatattaccctaaactttatgtaaatacagaaacaatattagaaaggaaatacagaatccttgataaaataatacgcaaggaaaaactcattaaattccaagtaaattccttgaaagcaacttctgaaaccaagcaggcattgcccgacgatttatcttctggcacagacatttatatggataagatgttcattaccttcaagtccacattattgtctaacgttataggtgagttgctttcctatagattacccacccaaaatttaaaagtaataataggccccaatgttaatgacattatttggagaaatatcctcgattcttctcccctttggaaaagtgccaaatatttcagtgcaaatatattgagaatttttgtgattataggctggattttgcctgtcgcgttccttgggttaatatctcaaataccaaatatttcctctttgataccgtttacaaaaataattcatttccaatctccatttataagagaagtggcaaagaatttgattccaatagtaaccttaataataataatagaaatcgtaccctactttttccgttggttgagttaccttagggggttgaaaactggagcgcaaatagaagctgatgtccagaattggtatttcgtctttgtcttcattcatcttttcgtagttgttacaatatcttctggattttctataattattgagaggcttcttaacaatcctgtcagtatccctgctctcttggccaacgacttgcctaaatgcgcaaactttttctgttcttttgttttgattaggggaatggcttatgcaggcggtaatttgttaagaataaaagagttgctttttgaattgttctactataaatggaaaaggagtactccacatgctcaatttaagaggttaaagacatctttatttttccaattaggatctatttatcctatattctctgtgttgggctgtattggtatcatatacagtgttgttgctcctattatattattattatgttgcatctctttttccatggttttcttttctttcagttacttgttcaaataccaatataacaaagagaactattctgaaacgttcggtaaattgtacatacaggcccttatgcaattgtacgcgggcatttatttcatggaattttgtttactcgggcttttcactctttttgatcaatacacattgtctactataatgcttgttgtctttgctttaacagtaatcacgcactccaaaatctccaaacaaataaaatccaagcctcaacgcataccaactttggaatacttgagcaatttgacagaggaaaggaaggaccaattctgtcaagaaagttatactttccatgatattttctccatttgtagaaattctgatgaaatttggttaccaagggacaaattaggaatttctgaagaagaacaaagttttttggagaagagttatcacttgaaattcgatcttaatatgtattccatgaatttatttggtgattgtcacttggagaatagccacttgcactga

SEQ ID NO: 7185 - DNA, 1851 bp, Saccharomyces cerevisiae
atgagcgaccttaaccaatccaaaaagatgaacgtcagcgagtttgctgacgcccaaaggagccactatacagtataccccagtttgcctcaaagtaacaaaaatgataaacacattccctttgtcaaacttctatcaggcaaagaatcggaagtgaacgtggaaaaaagatgggaattgtatcatcagttacattcccactttcatgatcaagtagatcatattatcgataatattgaagcagacttgaaagcagagatttcagaccttttatatagtgaaactactcagaaaaggcgatgctttaacactattttcctattaggttcagatagtacgacaaaaattgaacttaaagacgaatcttctcgctacaacgttttgattgaattgactccgaaagaatctccgaatgtaagaatgatgcttcgtaggtctatgtacaaactttacagcgcagctgatgcagaagaacatccaactatcaagtatgaagacattaacgatgaagatggcgattttaccgagcaaaacaatgatgtatcatacgatctgtcacttgtggaaaacttcaaaaggctttttggaaaagacttagcaatggtatttaattttaaagatgtagattctattaacttcaacacattggataacttcataattctattgaaaagtgccttcaagtatgaccatgttaaaataagtttaatctttaatattaatacaaacttgtcaaatattgagaaaaatttgagacaatcaaccatacgacttctgaagagaaattatcataaactagacgtgtcgagtaataaaggatttaagtacggaaaccaaatctttcaaagctttttggatacggttgatggcaaactaaatctttcagatcgttttgtggaattcattctcagcaagatggcaaataatactaatcacaacttacaattattgacgaagatgctggattattcgttgatgtcgtactttttccagaatgccttttcagtattcattgaccctgtaaatgttgattttttgaacgacgactacttaaaaatactgagcagatgtcctacattcatgttctttgtcgaaggtcttataaagcagcatgctcctgctgacgaaattctttcattattgacaaacaaaaacagaggcctagaagagttttttgttgagtttttggtaagagagaacccgattaacgggcatgctaagtttgttgctcgattcctcgaagaagaattgaatataaccaattttaatctgatagaattatatcataatttgcttattggcaaactagactcctatctagatcgttggtcagcatgtaaagagtataaggatcggcttcattttgaacccattgatacaatttttcaagagctatttactttggacaacagaagtggattacttacccagtcgattttcccttcttacaagtcaaatatcgaagataacttactaagttgggagcaggtgctgccttcgcttgataaagaaaattatgatactctttctggagatttggataaaataatggctccggtactgggtcagctattcaagctttatcgtgaggcgaatatgactatcaacatttacgatttctacattgcgttcagagaaacattaccaaaagaggaaatattaaatttcataagaaaagatccctccaacaccaaactcttagaactagcagaaacaccggacgcatttgacaaagtagcactaattttattcatgcaagcaatcttcgcctttgaaaacatgggtctcattaagtttcaaagcaccaagagttacgatctggtagaaaaatgtgtctggagaggaatttag

SEQ ID NO: 7186 - DNA, 1851 bp, Artificial Sequence
  Description of Artificial Sequence: Synthetic polynucleotide
atgagcgaccttaaccaatccaaaaagatgaacgtcagcgagtttgctgacgcccaaaggagccactatacagtataccccagtttgcctcaaagtaacaaaaatgataaacacattccctttgtcaaacttttaagtggcaaagaaagtgaagtgaacgtggaaaaaagatgggaattgtatcatcagttacattcccactttcatgatcaagtagatcatattatcgataatattgaagcagacttgaaagcagagatttctgaccttttatatagtgaaactactcagaaaaggagatgctttaacactattttcttattaggttctgatagtacgacaaaaattgaacttaaagacgaatcttctcgctacaacgttttgattgaattgactccgaaagaatctccgaatgtaagaatgatgcttcgtaggtctatgtacaaactttacagcgcagctgatgcagaagaacatccaactatcaagtatgaagacattaacgatgaagatggcgattttaccgagcaaaacaatgatgtatcttacgatttatctcttgtggaaaacttcaaaaggctttttggaaaagacttagcaatggtatttaattttaaagatgtagattctattaacttcaacacattggataacttcataattttattgaaaagtgccttcaagtatgaccatgttaaaataagtttaatctttaatattaatacaaacttgagcaatattgagaaaaatttgagacaatccaccataaggcttttgaagagaaattatcataaattagacgtgtccagtaataaaggatttaagtacggaaaccaaatctttcaaagctttttggatacggttgatggcaaattgaatctttctgatcgttttgtggaattcattctcagcaagatggcaaataatactaatcacaacttacaattattgacgaagatgcttgattattctttgatgagttactttttccagaatgcctttagcgtattcattgaccctgtaaatgttgattttttgaacgacgactacttaaaaatattaagcagatgtcctacattcatgttctttgtcgaaggtcttataaagcagcatgctcctgctgacgaaattctttctttattgacaaacaaaaacagaggccttgaagagttttttgttgagtttttggtaagagagaacccgattaacgggcatgctaagtttgttgctagattcctcgaagaagaattgaatataaccaattttaatttgatagaattatatcataatttgcttattggcaaattagactcctatttggatcgttggtctgcatgtaaagagtataaggatagacttcattttgaacccattgatacaatttttcaagagttatttactttggacaacagaagtggattacttacccagagtattttcccttcttacaagagcaatatcgaagataacttattaagttgggagcaggtgttgccttctcttgataaagaaaattatgatactctttctggagatttggataaaataatggctccggtattgggtcagttattcaagctttatcgtgaggcgaatatgactatcaacatttacgatttctacattgcgttcagagaaacattaccaaaagaggaaatattaaatttcataagaaaagatccctccaacaccaaactcttagaattggcagaaacaccggacgcatttgacaaagtagcattgattttattcatgcaagcaatcttcgcctttgaaaacatgggtctcattaagtttcaaagcaccaagagttacgatttagtagaaaaatgtgtctggagaggaatttga

SEQ ID NO: 7187 - DNA, 2841 bp, Saccharomyces cerevisiae
atgggcaaattcggcacgacaaataaatcaacggagaatcttctgcgtgataaattcgtacccgagacatctccaactaatattcccactgatgtactcatcaagcaagggcaaataacggattccaccgaatcactaattcatggaggcgcagaaaggtatattgttaacgctttaaagcctatagaattaaataaaactgaaggctttttcgaagacccgccgttccatcttccttctccaccggttgattcgacaaatctggagtatgaagacgttaccgatcttcctaagaatggtttacgatatgatttgaatgatatatccgttgaggtaatcgaagatttataccgccagattgaagcttttttggttcatttcaaactatccagaagttttttacaaattttcaaaaactatgtcaatattcttattcaagaaggcatcaatcctttacgcgatgagtacttcacaatattggaagatgaactgaaaggttttttcactttcaattctgttatagaagagattttagaaatatttttaatccaccctcgcaacaaattcattgcattgtcccttgcagaatatacctacgctaagaacaaaatcagaagacattttaatcactggaagactgtatgtgaattgaatgaagaggcaaacaggtttgcaaatcaagcaaagctgagggtacaggaagccgtcttctatatttggagtgataaaacattaaaatactcacagatggccaacgatgaagctgaaagttttaggaatacttggctactatttcgctcgttccaacaatggataactttaacacaaactcttaaggagcagtcaaggttagcagatcaggcctttttgaataagatgtttaggaaaattttaaaggcacaagagcattggaaacacttagaaactgttaacactgacaacattaagaagatatttttacgaacaacatttcatatatggaagctaagacataaagaaataaactaccacgggttggaaagaaggattttcgaaagaataaaacagaaagttataaactatgaatacaataagagcattgcagaaaaagtgaggtcgttttctctacaaagaaaatatctgaataaatgggaaaagaaaaacattgaaaacgaagataaacttggggcactttatgaactggagaataaattcatcaaacaaaagttttttcgcaaattaaaccggtcatttcaacatagtcaacaagaggcaattgcaaagagtaaactaaatcagacacttttgaggtgcgtttttgagaagatgtggctgaaaagattcgaagaccatctgcatttgtattcaattgtaagtctaaaagaggctaacctcgtgaagcgtatttttcattcatggaaaaaacttctatatattgacctcaaagcaagcgattattcgaggactaatttgctcaagtcatcattgcgaagttggaaacttgaagtaaagttaaaaatatttgagcagaaatgtaaaaagagtattcaagcaagcgcgtatcgtacatggaggaaaagaatacagtatgggaaaatatcgagcgaacatgttaaaacggcattttgtgcaaaatatcttggtgtgtggaaaaggaggatgctacaaatgaattctatgaatgacgaagcatccaaattttacgaagagggtctcgtaaatgagtgtctagctatatggaaagaacgcctgattaaaactaaggaattggaggatagatacaatttcttatgtaagacacatgcaattttgactgtaaaacggacgctaatgcatattgataatgttcatttgctatatacgaaactggcgccctctatggatagagtaaagctttctaaggcctttttaaagtggcggaaagccacaaggttcaaagtcaggcataagttaaacgatattttacacgtttatgaaaagagtaaagagcgcgaacttcaaagccaactgttcaacgcttggcgaaatagattttgcttctacacagaagaatgtaacattcaggctatttcaaagagaaactaccagcttgaaaaaatggtgctgaagaaatttagagaaagacttttagagatagtaaaatcagaagaattagcagacgaagttcgcgaagaatttgtgttagtcaagacgttttatatttggaaaactcatctagacgaaatattttatatgagtacattattggaacaatcggaagctaataaacaattcataattacatccaaattcttgaaaatgtggagtcttcgattcctaaaaattaagcgtaatgatgagacagtcgaggtgtttcgtcatcggtgggacagggccactgtaaggggattgttattattatggaaaaatcgttcagacagttctccaaagagaaggaaggacttcaatcttaaacatgaactaaaaactcccataagatcagactctcaaaacgcctcaaccataccaggctcagaaagaataaagcagcacagaatggaagcgatgaagtcgcattatagcagggcaagaagagccataccaagtccggtgaaatcttccagtgttcttgattctacagctaaaaaacagatcaaccttgaaagtacgacaggcttaaacggatctccgacgcgaggaaaacctctaaggtattctcctaggcgtaccactagaaacatgccatccaaagttgaccatattgattttggcagaatacccgctgtaccttttagcctaagcgccaattctcctaaaatcgatcaagatatggattatataagagagcatgataaatccccgttaagtcgtaaacgtcaatag

SEQ ID NO: 7188 - DNA, 2841 bp, Artificial Sequence
  Description of Artificial Sequence: Synthetic polynucleotide
atgggcaaattcggcacgacaaataaatctacggagaatcttttgcgtgataaattcgtacccgagacatctccaactaatattcccactgatgtactcatcaagcaagggcaaataacggattccaccgaatctttgattcatggaggcgcagaaaggtatattgttaacgctttaaagcctatagaattaaataaaactgaaggctttttcgaagacccgccgttccatcttccttctccaccggttgattctacaaatttggagtatgaagacgttaccgatcttcctaagaatggtttaagatatgatttgaatgatatatccgttgaggtaatcgaagatttataccgccagattgaagcttttttggttcatttcaaactttccagaagttttttacaaattttcaaaaactatgtcaatattcttattcaagaaggcatcaatcctttacgcgatgagtacttcacaatattggaagatgaattgaaaggttttttcactttcaattctgttatagaagagattttagaaatatttttaatccaccctcgcaacaaattcattgcattgtcccttgcagaatatacctacgctaagaacaaaatcagaagacattttaatcactggaagactgtatgtgaattgaatgaagaggcaaacaggtttgcaaatcaagcaaagttaagggtacaggaagccgtcttctatatttggagtgataaaacattaaaatactctcagatggccaacgatgaagctgaaagttttaggaatacttggttgttatttcgctctttccaacaatggataactttaacacaaactcttaaggagcagtctaggttagcagatcaggcctttttgaataagatgtttaggaaaattttaaaggcacaagagcattggaaacacttagaaactgttaacactgacaacattaagaagatatttttaagaacaacatttcatatatggaagttgagacataaagaaataaactaccacgggttggaaagaaggattttcgaaagaataaaacagaaagttataaactatgaatacaataagagcattgcagaaaaagtgaggtctttttctttacaaagaaaatatttgaataaatgggaaaagaaaaacattgaaaacgaagataaacttggggcactttatgaattagagaataaattcatcaaacaaaagttttttcgcaaattaaacagatcttttcaacatagtcaacaagaggcaattgcaaagagtaaattgaatcagacacttttgaggtgcgtttttgagaagatgtggttgaaaagattcgaagaccatttgcatttgtattctattgtaagtttgaaagaggctaacctcgtgaagcgtatttttcattcttggaaaaaacttttatatattgacctcaaagcaagcgattattctaggactaatttgctcaagagttctttgagaagttggaaacttgaagtaaagttaaaaatatttgagcagaaatgtaaaaagagtattcaagcaagcgcgtatcgtacatggaggaaaagaatacagtatgggaaaatatctagcgaacatgttaaaacggcattttgtgcaaaatatcttggtgtgtggaaaaggaggatgttacaaatgaattctatgaatgacgaagcatccaaattttacgaagagggtctcgtaaatgagtgtttggctatatggaaagaacgcttaattaaaactaaggaattggaggatagatacaatttcttatgtaagacacatgcaattttgactgtaaaaagaacgttgatgcatattgataatgttcatttgttatatacgaaattagcgccctctatggatagagtaaagctttctaaggcctttttaaagtggagaaaagccacaaggttcaaagtcaggcataagttaaacgatattttacacgtttatgaaaagagtaaagagcgcgaacttcaaagccaattattcaacgcttggagaaatagattttgcttctacacagaagaatgtaacattcaggctatttccaagagaaactaccagcttgaaaaaatggtgttgaagaaatttagagaaagacttttagagatagtaaaaagtgaagaattagcagacgaagttcgcgaagaatttgtgttagtcaagacgttttatatttggaaaactcatttggacgaaatattttatatgagtacattattggaacaaagtgaagctaataaacaattcataattacatccaaattcttgaaaatgtggagtcttcgtttcttgaaaattaagcgtaatgatgagacagtcgaggtgtttcgtcatcgttgggacagggccactgtaaggggattgttattattatggaaaaatcgttccgacagttctccaaagagaaggaaggacttcaatcttaaacatgaattgaaaactcccataagaagtgactctcaaaacgccagcaccataccaggctctgaaagaataaagcagcacagaatggaagcgatgaagagtcattatagcagggcaagaagagccataccaagtccggtgaaatcttccagtgttcttgattctacagctaaaaaacagatcaaccttgaaagtacgacaggcttaaacggatctccgacgagaggaaaacctttaaggtattctcctaggcgtaccactagaaacatgccatccaaagttgaccatattgattttggcagaatacccgctgtaccttttagcttgagcgccaattctcctaaaatcgatcaagatatggattatataagagagcatgataaatccccgttaagtcgtaaacgtcaatga

SEQ ID NO: 7189 - DNA, 1311 bp, Saccharomyces cerevisiae
atgtcactgaatgacttcctaagttccgtgctacctgtcagtgaacaatttgaatacttatcgttgcaatctattccgttagaaacccatgctgtcgtaaccccaaataaggacgacaaaagggtcccaaaaagcacgatcaagactcaacacttctttagtctatttcaccaaggaaaagtttttttttcattagaagtgtatgtgtatgtcacgctttgggatgaagcagatgccgaacggttaatatttgtatcaaaggcagacactaatggttattgtaatacgagggtaagcgttagagatattacaaaaataatattagaatttatattatcaatcgacccgaattactatcttcaaaaagtaaaaccggcaataagatcatataagaagatatcccccgagctgattagcgcagccagtacgccagcaagaactttaaggattttggctagaaggcttaaacagtcaggcagcaccgttttgaaagaaatagaatctccacgttttcaacaagatctttatctctcattcacctgtcctcgtgagattttgaccaaaatttgtttatttactagacctgcatcccagtacctcttcccagattcttcaaaaaacagcaaaaagcatatactaaatggcgaggaactaatgaaatggtggggctttattttggatagattactaattgaatgctttcaaaatgatacacaagcaaaattaaggataccgggcgaagatcctgctcgagtaagatcatacctaagagggatgaaatatccactatggcaagtgggtgatatatttacctctaaagaaaattctcttgcggtatataatattccattattcccagacgatcctaaggctagatttatacaccaattggcagaggaagatcgcctcctcaaagtaagcttatcatccttctggattgaactacaagagcgtcaagagttcaaattaagtgtcacatcatctgtaatgggtatttcgggatactctcttgccactccatctttatttccatctagtgccgatgttattgtaccgaagtcaaggaagcagtttagggcaatcaagaagtacattactggagaggaatacgatacagaggaaggcgcaatagaagctttcaccaatattcgtgattttctattgctcagaatggcaacaaatcttcaatctttaacagggaagagggagcatcgggagagaaatcagccggttcctgcaagcaacatcaacacgttggcgataacaatgctaaaaccgcgtaaaaaagctaaagccttgcctaaaacttga

SEQ ID NO: 7190 - DNA, 1311 bp, Artificial Sequence
  Description of Artificial Sequence: Synthetic polynucleotide
atgtctttgaatgacttcttaagttccgtgttgcctgtcagtgaacaatttgaatacttatctttgcaatctattccgttagaaacccatgctgtcgtaaccccaaataaggacgacaaaagggtcccaaaaagcacgatcaagactcaacacttctttagtttatttcaccaaggaaaagtttttttttctttagaagtgtatgtgtatgtcacgctttgggatgaagcagatgccgaaagattaatatttgtatccaaggcagacactaatggttattgtaatacgagggtaagcgttagagatattacaaaaataatattagaatttatattatctatcgacccgaattactatcttcaaaaagtaaaaccggcaataagatcttataagaagatatcccccgagttgattagcgcagccagtacgccagcaagaactttaaggattttggctagaaggcttaaacagtctggcagcaccgttttgaaagaaatagaatctccacgttttcaacaagatctttatctctctttcacctgtcctcgtgagattttgaccaaaatttgtttatttactagacctgcatcccagtacctcttcccagattcttctaaaaacagcaaaaagcatatattgaatggcgaggaattgatgaaatggtggggctttattttggatagattattgattgaatgctttcaaaatgatacacaagcaaaattaaggataccgggcgaagatcctgctcgtgtaagatcttacttgagagggatgaaatatccattatggcaagtgggtgatatatttacctctaaagaaaattctcttgcggtatataatattccattattcccagacgatcctaaggctagatttatacaccaattggcagaggaagatcgcctcctcaaagtaagcttatcttccttctggattgaattacaagagcgtcaagagttcaaattaagtgtcacatcttctgtaatgggtatttctggatactctcttgccactccatctttatttccatctagtgccgatgttattgtaccgaagtccaggaagcagtttagggcaatcaagaagtacattactggagaggaatacgatacagaggaaggcgcaatagaagctttcaccaatattcgtgattttttattgctcagaatggcaacaaatcttcaatctttaacagggaagagggagcatagggagagaaatcagccggttcctgcaagcaacatcaacacgttggcgataacaatgttgaaaccgcgtaaaaaagctaaagccttgcctaaaacttga

SEQ ID NO: 7191 - DNA, 2274 bp, Saccharomyces cerevisiae
atggctagtttagaagatcttattcctactgtcaacaagctgcaggatgttatgtacgactccgggatcgatacactcgatttgcccattttagctgttgttgggtcacaatcctccgggaaatcctcgatattggaaacgttagttggaagagattttttacctaggggtactggtattgtcacaagaagaccgttagttcttcaacttaataacatatctccaaattctcctctaatagaggaagatgataactcagttaatccacatgatgaagttacaaaaatatcaggattcgaagctggtacgaagcccttggagtataggggcaaggaaagaaatcatgcagatgagtggggggaattcctgcatataccaggaaaacggttttatgatttcgacgatatcaaaagagaaatcgaaaacgaaacagcgaggatagccggtaaggataagggcatcagtaagattccgattaatttgaaagtgttttcccctcatgttttgaatctaacgctagtagatttgcctgggattacaaaggttcctattggggaacaaccacctgatattgaaaagcaaatcaagaatttgatcctagactatatagccactccaaattgtttaatcttggccgtctctccagctaacgttgatcttgttaattctgaatccttaaagttggccagagaggtagaccctcagggcaaaaggactattggtgtcattaccaaattagatttgatggattctgggactaatgctctagatatcttgtctggaaaaatgtatcctctgaaattggggtttgttggtgtagtgaatcgctcgcaacaggatattcaattgaacaaaaccgttgaagaatcattggacaaagaagaggactatttcaggaaacatccagtctacagaactatttcaacaaagtgtggtacgcgttatttagctaaattgctaaaccagacattattaagccacattagagacaagcttccggatattaaaaccaagttaaataccctgatctctcaaaccgaacaagagctcgctagatacggtggcgtaggagctactactaatgaaagcagagctagccttgttcttcaactaatgaataagttttctacaaacttcatttcatctatagatggtacatcctccgacattaatacgaaggaactctgtggtggtgcccgtatttattacatttacaataatgtttttgggaattctttgaagtcgattgatccaacttctaatttatccgttcttgatgttagaacagcgattagaaattctactggtccccgtcctacattatttgtacctgagttggcttttgacctattggttaaacctcaaattaaacttttactagaaccatctcaacgttgcgtcgagttagtttacgaggagctgatgaaaatatgccataaatgtggctccgctgagctagctagatatcctaaattgaagagtatgttaatagaagttataagcgaactacttagagaaaggttacaacctactcgctcttacgttgaaagcttgattgacatacatcgagcctacatcaatactaatcatcctaattttttaagtgcaacagaagcaatggatgacatcatgaaaacgcgtagaaaacggaatcaagagttattgaaaagtaagttgtctcaacaggagaatggacaaaccaacggtattaatggtacttcatctatctcttcgaatatagatcaagattctgctaaaaacagtgactacgatgatgatggtatcgacgcagaatcgaagcaaacgaaggacaaatttttaaattatttctttggcaaggataaaaagggtcaacctgtgttcgatgcatcagacaagaaaagatccattgccggtgatggaaatattgaagattttagaaatttacaaatatcagatttttcactgggcgatatagatgaccttgaaaacgctgaacctccactgaccgagagagaagaattggagtgcgaattaattaaacgtctgattgtttcatactttgatattataagagaaatgattgaagatcaagtaccaaaggcagttatgtgtttactcgtcaattattgtaaggattctgttcaaaacagattggtaaccaaactctacaaagaaacactgtttgaagaacttttagttgaggatcaaactttagctcaagatagagaactatgtgtgaaatcactcggagtttataaaaaggctgcaacccttattagtaatattctgtaa

SEQ ID NO: 7192 - DNA, 2274 bp, Artificial Sequence
  Description of Artificial Sequence: Synthetic polynucleotide
atggctagtttagaagatcttattcctactgtcaacaagttacaggatgttatgtacgactccgggatcgatacactcgatttgcccattttagctgttgttgggagccaatcctccgggaaatcctccatattggaaacgttagttggaagagattttttacctaggggtactggtattgtcacaagaagaccgttagttcttcaacttaataacatatctccaaattctcctttgatagaggaagatgataactctgttaatccacatgatgaagttacaaaaatatctggattcgaagctggtacgaagcccttggagtataggggcaaggaaagaaatcatgcagatgagtggggggaattcttacatataccaggaaaaagattttatgatttcgacgatatcaaaagagaaatcgaaaacgaaacagcgaggatagccggtaaggataagggcatcagtaagattccgattaatttgaaagtgttttcccctcatgttttgaatttaacgttggtagatttgcctgggattacaaaggttcctattggggaacaaccacctgatattgaaaagcaaatcaagaatttgatcttggactatatagccactccaaattgtttaatcttggccgtctctccagctaacgttgatcttgttaattctgaatccttaaagttggccagagaggtagaccctcagggcaaaaggactattggtgtcattaccaaattagatttgatggattctgggactaatgctttagatatcttgtctggaaaaatgtatcctttgaaattggggtttgttggtgtagtgaatcgctctcaacaggatattcaattgaacaaaaccgttgaagaatctttggacaaagaagaggactatttcaggaaacatccagtctacagaactatttctacaaagtgtggtacgcgttatttagctaaattgttgaaccagacattattaagccacattagagacaagcttccggatattaaaaccaagttaaataccttaatctctcaaaccgaacaagagctcgctagatacggtggcgtaggagctactactaatgaaagcagagctagccttgttcttcaattgatgaataagttttctacaaacttcatttcttctatagatggtacatcctccgacattaatacgaaggaactctgtggtggtgcccgtatttattacatttacaataatgtttttgggaattctttgaagtctattgatccaacttctaatttatccgttcttgatgttagaacagcgattagaaattctactggtccccgtcctacattatttgtacctgagttggcttttgacttgttggttaaacctcaaattaaacttttattggaaccatctcaacgttgcgtcgagttagtttacgaggagttgatgaaaatatgccataaatgtggctccgctgagttggctagatatcctaaattgaagagtatgttaatagaagttataagcgaattgcttagagaaaggttacaacctactcgctcttacgttgaaagcttgattgacatacatagagcctacatcaatactaatcatcctaattttttaagtgcaacagaagcaatggatgacatcatgaaaacgcgtagaaaaagaaatcaagagttattgaaaagtaagttgtctcaacaggagaatggacaaaccaacggtattaatggtacttcttctatctcttccaatatagatcaagattctgctaaaaacagtgactacgatgatgatggtatcgacgcagaatccaagcaaacgaaggacaaatttttaaattatttctttggcaaggataaaaagggtcaacctgtgttcgatgcaagtgacaagaaaagatccattgccggtgatggaaatattgaagattttagaaatttacaaatatctgatttttctttaggcgatatagatgaccttgaaaacgctgaacctccattgaccgagagagaagaattggagtgcgaattaattaaacgtttaattgtttcttactttgatattataagagaaatgattgaagatcaagtaccaaaggcagttatgtgtttactcgtcaattattgtaaggattctgttcaaaacagattggtaaccaaactctacaaagaaacattatttgaagaacttttagttgaggatcaaactttagctcaagatagagaattatgtgtgaaatctctcggagtttataaaaaggctgcaacccttattagtaatattttatga

SEQ ID NO: 7193 - DNA, 2589 bp, Saccharomyces cerevisiae
atgaacatggcaatccaaacaattaaatacattttttggctactgccgatattagggcttacacaagcacttctacaaaacccaggggacgattttccatttagcacagtaatagatatcctctcagaaaatgttgaattctcaacttttttaaggattattcagaaaactggtcacgtacagtacttaaatgagctacagaactttacactttttgctccgattaattcagcatttattaagggggaccaaaccacagaccaatttgaggagcatttccatattgaagatttccttattcatgatagggtattgcaagtgagagaccttgaaaacggtacctacctggagaaaagagctgcaaaagcacctttattgctgagaaagcatgagcgccattgctttgtcaatgaaattgctgttgtcgaacccgatttgctgcctagtttccagaatgcttcattacaaggtattaacaatcttttactaattcaacctcaaataaatgagttgctggtacaactagatgaagaaacccaagatttaaagatatttagtgattttatcagcagtttttcaaactataatgcatatacaaactcatccacagttttagtgcccttagatgttaattttcgaaaattcttcaatacaatcgaaataaactatctacttgacaaatataataaattgggtaaatctaatacaatttctcaggccaaatgggccgcagatagaacttcccttcttcaagaactcattattgatgacgtgtatggtggtattttacccaaggaactaattttagaaaataaaaacaatcgaaaactttttatgaagagtaattcagaaggtacatcagtaagtgtaaataattcagattactcacccatatcaaacagaatttttgaaataggcgtcgtgcatggattttctgacttagactttttacgaacgcatatacagtttgatgctgaaaagtacttgcacggtttgaactgctcagaattcgtaaaggagttatacttcagagaccttgaaaaattcattcaaaacggaaggaaaatcaccatatttgtaccacaagcctcttttaatgaggatcgtgggtacacaaaaccatcacttctgtaccattttgtagaaggtaaaattgaccttgaacaggacttttcctcattgcgcccgattcaatacgcacctacccaaatttatgactccgccttttgctcttcagctaaaagactaggtggacactgccaaaagttcaaaatcacaaggtctaataaaggttattacatcaatggtcgcttcaagattttaaacacaaaaccttatgagattggtaatacgtccatttattctattgacgatgatcttcaattaccgggcgacttagtgttgtcattagcaccagaaaaccactgttctatttccctaatgctcttgaaggaacttaaccttttggatctaccatcaaatcataaggggtacacgatacttcttccatgtatgaattcatgggacaataatgatttgactatagactatttgaggtcaaacaaaaccgccctaaatttacttatgaggaacctaatcttcgaagaccttatttattccaacaattatagtatttcgactactgtcaagaatttatacggaaattctgtatctattggcgtacaaaaaattgtgggaagccaaaaccttacgaaaatctcagtgagtactataaaggaaagtattattattgaggagagttccgatatatttttcaaccagggagttatccatcctatagaccaattggattttccagtcgatttggagatatccctaaaagagctgatagaaactactggaacaaaagaaatatttgacttttttaacttgttttatgacctttcttcaatcatttggaataacgaagagtactcgcttttagttccaacggcttcttctattccattaagtggcatcacggcgaactcgacaaacttaagaaaattcctcgaactccatttgattcctgctaatgtaacgcaaaacctactagactgcaatggctccattagcactaaactaggtacaaaactaaactgcagaaaagatcatctggacaacgtttttgttagcatacagggcgactggaccaaggaagttagagttcttaaaacaggatgcactactaatttgaaaagttcatgcatatttctgatcgacaaacccatatccttatcttggctaaacagcgagaaataccatctgcgcttgccagggatagcggttggatttggggttataataggtgttaccatagccatttctttattgttttgcataataattaccaggggtggaaaagtaaaagacaaaaatcaaagagggagaaatgatcgagcaacaacaccactgattcaacactctccgataatccacaacccttcttactcggcaacagcgcatttatcaccactttctcaacccacttttgaaggttcatattctgtgaacgctatacaaacccccagagatatacgaagggtgggatcagatcaaaagggcggtcgcagtgtcagtacctcataa

SEQ ID NO: 7194 - DNA, 2589 bp, Artificial Sequence
  Description of Artificial Sequence: Synthetic polynucleotide
atgaacatggcaatccaaacaattaaatacattttttggttgttaccgatattagggcttacacaagcacttttacaaaacccaggggacgattttccatttagcacagtaatagatatcctctctgaaaatgttgaattctctacttttttaaggattattcagaaaactggtcacgtacagtacttaaatgagttacagaactttacactttttgctccgattaattctgcatttattaagggggaccaaaccacagaccaatttgaggagcatttccatattgaagatttccttattcatgatagggtattgcaagtgagagaccttgaaaacggtacctacttggagaaaagagctgcaaaagcacctttattgttaagaaagcatgagcgccattgctttgtcaatgaaattgctgttgtcgaacccgatttgttacctagtttccagaatgcttctttacaaggtattaacaatcttttattgattcaacctcaaataaatgagttgttagtacaattggatgaagaaacccaagatttaaagatatttagtgattttatcagcagtttttccaactataatgcatatacaaactcttccacagttttagtgcccttagatgttaattttagaaaattcttcaatacaatcgaaataaactatttacttgacaaatataataaattgggtaaatctaatacaatttctcaggccaaatgggccgcagatagaacttcccttcttcaagaactcattattgatgacgtgtatggtggtattttacccaaggaattgattttagaaaataaaaacaatagaaaactttttatgaagagtaattctgaaggtacatctgtaagtgtaaataattctgattactctcccataagcaacagaatttttgaaataggcgtcgtgcatggattttctgacttagactttttaagaacgcatatacagtttgatgctgaaaagtacttgcacggtttgaactgcagtgaattcgtaaaggagttatacttcagagaccttgaaaaattcattcaaaacggaaggaaaatcaccatatttgtaccacaagcctcttttaatgaggatcgtgggtacacaaaaccaagtcttttataccattttgtagaaggtaaaattgaccttgaacaggacttttcctctttgcgcccgattcaatacgcacctacccaaatttatgactccgccttttgctcttctgctaaaagattaggtggacactgccaaaagttcaaaatcacaaggtctaataaaggttattacatcaatggtcgcttcaagattttaaacacaaaaccttatgagattggtaatacgtccatttattctattgacgatgatcttcaattaccgggcgacttagtgttgtctttagcaccagaaaaccactgttctatttccttgatgctcttgaaggaacttaaccttttggatttaccatccaatcataaggggtacacgatacttcttccatgtatgaattcttgggacaataatgatttgactatagactatttgaggtctaacaaaaccgccttgaatttacttatgaggaacttgatcttcgaagaccttatttattccaacaattatagtatttctactactgtcaagaatttatacggaaattctgtatctattggcgtacaaaaaattgtgggaagccaaaaccttacgaaaatcagtgtgagtactataaaggaaagtattattattgaggagagttccgatatatttttcaaccagggagttatccatcctatagaccaattggattttccagtcgatttggagatatccttgaaagagttgatagaaactactggaacaaaagaaatatttgacttttttaacttgttttatgacctttcttctatcatttggaataacgaagagtactctcttttagttccaacggcttcttctattccattaagtggcatcacggcgaactccacaaacttaagaaaattcctcgaactccatttgattcctgctaatgtaacgcaaaacttattagactgcaatggctccattagcactaaattgggtacaaaattgaactgcagaaaagatcatttggacaacgtttttgttagcatacagggcgactggaccaaggaagttagagttcttaaaacaggatgcactactaatttgaaaagttcctgcatatttttgatcgacaaacccatatccttatcttggttgaacagcgagaaataccatttacgcttgccagggatagcggttggatttggggttataataggtgttaccatagccatttctttattgttttgcataataattaccaggggtggaaaagtaaaagacaaaaatcaaagagggagaaatgatagagcaacaacaccattgattcaacactctccgataatccacaacccttcttacagtgcaacagcgcatttatctccactttctcaacccacttttgaaggttcttattctgtgaacgctatacaaacccccagagatataagaagggtgggaagtgatcaaaagggcggtcgcagtgtcagtaccagctga

SEQ ID NO: 7195 - DNA, 1992 bp, Saccharomyces cerevisiae
atggctaagagaaatagatctcaatttcgcattcaggaaaggactgcaaagaaaagaaagcacgaagattccttgttagaaggcaatgttttccaaaatgcaccggaagatatggatgaaaataccatatatagcgcaaaaggctcatcctgggatgaagaagaacaggattacgaaatggttcctcggaagaatcggtctgatacatcaaatcttgttgaaggcctgcctataaaagttaacggtaaagttgaaagaaaattgcataaagcccaagaaaaaccaaaggacgatgatgaggaagacgaagactctaatgactcttcagaagatgatgagggacctaatgaagaacaagaagcagaggcaaaggaggatgagcctgatacggaggaaaaaattctgcaactaaaagaagacattgccgatttagtcactaaagttatggaggagcctgaagaaaatactgctgcgttggggcgtctatgtaaaatggtggaatctaaaaatcctaatacttgtaagttttccatgttggctttggtccccgtgtttaagagtatcataccaggctatagaattcgaccactaactgaaactgaaaagaaggaaaaagtttctaaagaagtctccaagcttagaaactttgagcaagccttagtttataactacaaaaattacgtcggaagattacagagtctttcaaaaactcccagtaatgctgctcctatacaggtttcattagggattttggccactcaagccgcaaaagaattgatttcaacggcatcccatttcaactttagaacagacattttcactttactgttgcgtagaatttgtaaaccaagaatttcaacagatccaacttccattcaaataatccagacatttgaaactctattaaatgaggacgaagagggctcaatatcattcgagatactaagaattttcaacaaaatactaaagacgaggaacttcaacatcgaagaatctgttttaaatatgttattatcgttagatgtcttacatgactatgaccctaatactaaattgaaaggtaacgttagcgctcctaagctcaaaaagaaagatagggtccatctttctaagaagcaaagaaaagctcgaaaagagatgcaacaaattgaggaagaaatgcgtaacgctgagcaagctgtttctgcggaggaaagagaaagaaaccaatccgaaattctaaaaatcgttttcactatatatttgaatatcttgaaaaacaatgcaaaaacactcattggatcggttttggaaggtctaacgaagtttggtaatatggccaactttgatctattaggggacttcctcgaagtaatgaaagaacttattagtgacactgaattcgataacctttcctctgctgaggtccgtaaggctttgctttgtatcgttagtgcattctcacttatttcaaatacacaatatatgaaagttaatgtggatttgtccaaattcgtcgatgggctttacgcgctattaccttatatctgtcttgatgcagacatcgaattatcttatagatcgctaaggttggctgacccactcaataacgaaataataaaaccatcagttaacgtttctaccaaagcagaacttctgctaaaggctctggaccatgtatttttccgctctaaatcagggactaaagaaagggctacggcgtttaccaaaagattgtacatgtgcatcagccataccccagaaaaaacaagtattgccattcttaaatttattgataaattaatgaatagatatccagaaatttcaggcctttactcttccgaggatagaataggcaacggtcatttcataatggaagccgataatccttcaaggagtaacccagaggcagcaaccttatgggataatgctcttcttgaaaagcattattgtcctgtagttacaaaggggctacgctctctatcatctagatctaaagagtgttctaaatag

SEQ ID NO: 7196 - DNA, 1992 bp, Artificial Sequence
  Description of Artificial Sequence: Synthetic polynucleotide
atggctaagagaaatagatctcaatttcgcattcaggaaaggactgcaaagaaaagaaagcacgaagattccttgttagaaggcaatgttttccaaaatgcaccggaagatatggatgaaaataccatatatagcgcaaaaggcagctcctgggatgaagaagaacaggattacgaaatggttcctagaaagaatagatctgatacaagtaatcttgttgaaggcttacctataaaagttaacggtaaagttgaaagaaaattgcataaagcccaagaaaaaccaaaggacgatgatgaggaagacgaagactctaatgactcttctgaagatgatgagggacctaatgaagaacaagaagcagaggcaaaggaggatgagcctgatacggaggaaaaaattttacaattgaaagaagacattgccgatttagtcactaaagttatggaggagcctgaagaaaatactgctgcgttggggcgtctttgtaaaatggtggaatctaaaaatcctaatacttgtaagttttccatgttggctttggtccccgtgtttaagagtatcataccaggctatagaattagaccattgactgaaactgaaaagaaggaaaaagtttctaaagaagtctccaagcttagaaactttgagcaagccttagtttataactacaaaaattacgtcggaagattacagagtctttctaaaactcccagtaatgctgctcctatacaggtttctttagggattttggccactcaagccgcaaaagaattgatttctacggcatcccatttcaactttagaacagacattttcactttattattgcgtagaatttgtaaaccaagaatttctacagatccaacttccattcaaataatccagacatttgaaactttattaaatgaggacgaagagggctctatatctttcgagatattaagaattttcaacaaaatattgaagacgaggaacttcaacatcgaagaatctgttttaaatatgttattatctttagatgtcttacatgactatgaccctaatactaaattgaaaggtaacgttagcgctcctaagctcaaaaagaaagatagggtccatctttctaagaagcaaagaaaagctagaaaagagatgcaacaaattgaggaagaaatgcgtaacgctgagcaagctgtttctgcggaggaaagagaaagaaaccaatccgaaattttgaaaatcgttttcactatatatttgaatatcttgaaaaacaatgcaaaaacactcattggatctgttttggaaggtttaacgaagtttggtaatatggccaactttgatttattaggggacttcctcgaagtaatgaaagaacttattagtgacactgaattcgataacctttcctctgctgaggtccgtaaggctttgctttgtatcgttagtgcattctctcttatttctaatacacaatatatgaaagttaatgtggatttgtccaaattcgtcgatgggctttacgcgttattaccttatatctgtcttgatgcagacatcgaattatcttatagatccttaaggttggctgacccactcaataacgaaataataaaaccatctgttaacgtttctaccaaagcagaacttttattgaaggctttggaccatgtatttttccgctctaaaagtgggactaaagaaagggctacggcgtttaccaaaagattgtacatgtgcatcagccataccccagaaaaaacaagtattgccattcttaaatttattgataaattaatgaatagatatccagaaatttctggcctttactcttccgaggatagaataggcaacggtcatttcataatggaagccgataatccttctaggagtaacccagaggcagcaaccttatgggataatgctcttcttgaaaagcattattgtcctgtagttacaaaggggttacgctctttatcttctagatctaaagagtgttctaaatga

SEQ ID NO: 7197 - DNA, 876 bp, Saccharomyces cerevisiae
atgtctaatccagatgatttagatgatggactcgcctatgattttgatgccgaacatgaagtaatttttgacgccaaggatggtagtcccccaaccaaaaaggtacaaaagaggtctatagaacaagatgacgatgacgttgatgatatagatgggaaaaaagaggagagaaattcagaagatgattcgaatagacctatttcgaaaagacagaaaaagctacagaaaaaatcaaagctaattgagaaaaagaaagaggaaagccagtatatcgtctcacaacgaaaagcacttccagcaagttcaccagaaaaaattattgagtacctaacaactttgatacgagaaaaaaatcctgacttgagtgttttagaattagaggaactttacttcaaaagaaatgattttctttcgacagaaaaatttgacgctgaacgcagattaagcaatttcccagcctttattcaaaaattttccgtagctccaaaaaaaattgttttttctatgtctaatattagagtagcagacgtttatcgtagtctaaacggtggcaaaaattgcgtcaaattattctctaaaagtaaactaaaggatgacatagccaccgtggaacgtttacttactgacagctctaaaaaatcaaacaaaaataaagattcactatattttattgccactccaacaagaatgcagaaaattatagaagctactgacttacttttccaaggtaaggaaaagttagatatcattcttgatgcaagttatttagatcctaaggataatactatattatcattcgagaatgcagccgtcctctgccaagtcttgaaaacctttttgaataaaaaaagctccgtgaaaatactgttatattaa

SEQ ID NO: 7198 - DNA, 876 bp, Artificial Sequence
  Description of Artificial Sequence: Synthetic polynucleotide
atgtctaatccagatgatttagatgatggactcgcctatgattttgatgccgaacatgaagtaatttttgacgccaaggatggtagtcccccaaccaaaaaggtacaaaagaggtctatagaacaagatgacgatgacgttgatgatatagatgggaaaaaagaggagagaaattctgaagatgattctaatagacctatttccaaaagacagaaaaagttacagaaaaaatccaagttgattgagaaaaagaaagaggaaagccagtatatcgtctctcaaagaaaagcacttccagcaagttctccagaaaaaattattgagtacttgacaactttgataagagaaaaaaatcctgacttgagtgttttagaattagaggaactttacttcaaaagaaatgattttctttctacagaaaaatttgacgctgaacgcagattaagcaatttcccagcctttattcaaaaattttccgtagctccaaaaaaaattgttttttctatgtctaatattagagtagcagacgtttatcgtagtttgaacggtggcaaaaattgcgtcaaattattctctaaaagtaaattgaaggatgacatagccaccgtggaacgtttacttactgacagctctaaaaaaagtaacaaaaataaagattctttgtattttattgccactccaacaagaatgcagaaaattatagaagctactgacttacttttccaaggtaaggaaaagttagatatcattcttgatgcaagttatttagatcctaaggataatactatattatctttcgagaatgcagccgtcctctgccaagtcttgaaaacctttttgaataaaaaaagctccgtgaaaatattattatattga

SEQ ID NO: 7199 - DNA, 1572 bp, Saccharomyces cerevisiae
atgaaaaacatgtcacaacgatccatggacgtggagaagaaggcagctaacgctgatagttgttccgtaagtacctcgagcattaatgtagacgatgcggacgttgctttaagattcctgaaacagaacggtctcgacgaaagctccacggctaatgaagacgatgttgtagcaggcgaagaagccaacttctatggttcccatgaattatctcctaaggtcctgagaaaagttgacctcttcatcctgccctttttatgctgtacatatcttctgatgtttttggataaggctctgctgaactacgctgcatctatgggtatcaaagatcatttgaaaggtaacgaattttctaatttgggtactatcttttctgctgcttacattttcatggaacctgtggtcacttacttaattcaaaaattccccatttccaaaatcctaggtacttttattaccgtctggggtatcgtgttggcttgccatgctgcttgtaagacgtacgcctcgttgatggtcgttcgtactctcctaggtctctttgaatcctcgagtgcagttggttgtatcgctattagtggtatgtactatactaaatctgaacagagtgcaagaattggattctgggccacacaggctggtacaggttatattgtgggcgggttaatttcttttggctttttacattatcatggtaccgctttcacctcttggcaaataatgtttttggtcgttggtctggttacagttgcgtttggtgttctaacattcttataccttccagataacgtcaccaatgcttggttcctaaacaaagaggaaaaaattcaagttgttgagcatatcagagctaaccaaactggcctggaaacaaagaagtttaagaagcagcaagttaaagaactattccttcatgataagtttacttggccgatgcttttattaactgcatgttctcaaatttctactggtgccattggtacattttcagtgaccatcactggtacttttggtttcgacaagtacgaaacagcattactgcagttgcctattggtgccattacggctatgattattcttataacaactcaaatgttgtcccgctggggtcatatcacactcataaccacatctatgtatattccagctattataggttgtatcgttcttatcagtttacccttatcccataagatcggtaacttattttctctgtacttgctttacagtggttcctgtgtcattaccaatatttacatctggaattcatgcaacacctccggttacaccaaaagagtttttagaaatgctattacaatgattgtatacaatgtctcctgtattattgctccacagatgtttagggcatactctgctccacgttacataccagcaaagattgccttattggtcactcagtgtgtttgtgttcccctacaattatacattggctacatttgcaagaaggagaacgaaaagcgtgataaggaacaagaaggtcaagaaaggaagaagtaccaatttttggacttgactgatatcgaaaacagaaatttcaggtacatttactaa

SEQ ID NO: 7200 - DNA, 1572 bp, Artificial Sequence
  Description of Artificial Sequence: Synthetic polynucleotide
atgaaaaacatgtctcaaagatccatggacgtggagaagaaggcagctaacgctgatagttgttccgtaagtaccagtagcattaatgtagacgatgcggacgttgctttaagattcttgaaacagaacggtctcgacgaaagctccacggctaatgaagacgatgttgtagcaggcgaagaagccaacttctatggttcccatgaattatctcctaaggtcttgagaaaagttgacctcttcatcttgccctttttatgctgtacatatcttttgatgtttttggataaggctttattaaactacgctgcatctatgggtatcaaagatcatttgaaaggtaacgaattttctaatttgggtactatcttttctgctgcttacattttcatggaacctgtggtcacttacttaattcaaaaattccccatttccaaaatcttgggtacttttattaccgtctggggtatcgtgttggcttgccatgctgcttgtaagacgtacgcctctttgatggtcgttcgtactctcttaggtctctttgaatcctccagtgcagttggttgtatcgctattagtggtatgtactatactaaatctgaacagagtgcaagaattggattctgggccacacaggctggtacaggttatattgtgggcgggttaatttcttttggctttttacattatcatggtaccgctttcacctcttggcaaataatgtttttggtcgttggtttagttacagttgcgtttggtgttttgacattcttataccttccagataacgtcaccaatgcttggttcttgaacaaagaggaaaaaattcaagttgttgagcatatcagagctaaccaaactggccttgaaacaaagaagtttaagaagcagcaagttaaagaattattccttcatgataagtttacttggccgatgcttttattaactgcatgttctcaaatttctactggtgccattggtacattttctgtgaccatcactggtacttttggtttcgacaagtacgaaacagcattattgcagttgcctattggtgccattacggctatgattattcttataacaactcaaatgttgtcccgctggggtcatatcacactcataaccacatctatgtatattccagctattataggttgtatcgttcttatcagtttacccttatcccataagatcggtaacttattttctttgtacttgctttacagtggttcctgtgtcattaccaatatttacatctggaattcttgcaacacctccggttacaccaaaagagtttttagaaatgctattacaatgattgtatacaatgtctcctgtattattgctccacagatgtttagggcatactctgctccacgttacataccagcaaagattgccttattggtcactcagtgtgtttgtgttcccttgcaattatacattggctacatttgcaagaaggagaacgaaaagcgtgataaggaacaagaaggtcaagaaaggaagaagtaccaatttttggacttgactgatatcgaaaacagaaatttcaggtacatttactga

SEQ ID NO: 7201 - DNA, 1386 bp, Saccharomyces cerevisiae
atggctcctgtagttatttcagaatctgaagaggatgaggatagagttgccattactagaagaactaagagacaagttcattttgatggcgagggagatgatcgtgtagaccaacagcaacagcagcacagttcaagccacagggatagggataaacatgtgcagcgtaagaagaagaaaaggctctcgaatagaaacctgcaaggttcaaatggtgggtacgcttgggaggatgagatcaagagaagttgggatttggtgaaagtggacgatgaaggggatatggcatctcttgtggctagcatagtcgaggccagaaagaaacgtactgctaagaaaaacataacgccataccaaagaggtattatcagaagtttaatattaacactagattgtagtgaagctatgttggaaaaggatttgagaccaaacaggcatgccatgattatccagtacgccatagattttgtccatgaatttttcgaccaaaatccgatatctcaaatgggtattatcataatgagaaacggtttggcacaactggtcagccaagttagcggaaacccgcaggatcacattgatgcgttgaaatccatcaggaaacaagaaccgaaaggaaacccttcattgcaaaatgcattggaaatggcaagaggccttttattgcctgttcctgcgcattgtacaagggaagtactgattgtatttggtagtctttccacaactgatcctggagatattcaccaaactatcgattcgttagtttctgagaaaattagagtgaaggttttggggttatcagctcaagtggccatatgtaaagaattatgcaaggcaacgaattatggtgatgaatccttctataaaattttactcgatgaaactcacttaaaggagctatttaacgaggctgttacccctttacccgttaacaaaattaataagggtttcacactcgtaaagatggggtttccgacaaggatattcgaagatactccaactttttgttcgtgccattccaagttagtttacggcggatacttctgtcccaattgtcatagtaaagtttgttcattgcccacagtctgtccatgttgtgacttgatgctaatcctttctacccacctggccagatcatatcaccatctgatgccgttaaaaacatttgcagaagtacctacaacagaaaaatttcgatcagaagactgctttagttgccagtcaagatttcccatactgaaaaaccataaaaatggtaaactactgacaagttctcgctatcgttgtgaagattgtaaacaagaattttgtgttgactgcgatgtgttcatccatgaaatccttcataactgcccaggctgtgaatccaagcccgtaataacttaa

SEQ ID NO: 7202 - DNA, 1386 bp, Artificial Sequence
  Description of Artificial Sequence: Synthetic polynucleotide
atggctcctgtagttatttctgaatctgaagaggatgaggatagagttgccattactagaagaactaagagacaagttcattttgatggcgagggagatgatcgtgtagaccaacagcaacagcagcacagtagtagccacagggatagggataaacatgtgcagcgtaagaagaagaaaaggctctctaatagaaacttacaaggtagtaatggtgggtacgcttgggaggatgagatcaagagaagttgggatttggtgaaagtggacgatgaaggggatatggcatctcttgtggctagcatagtcgaggccagaaagaaacgtactgctaagaaaaacataacgccataccaaagaggtattatcagaagtttaatattaacattagattgtagtgaagctatgttggaaaaggatttgagaccaaacaggcatgccatgattatccagtacgccatagattttgtccatgaatttttcgaccaaaatccgatatctcaaatgggtattatcataatgagaaacggtttggcacaattggtcagccaagttagcggaaacccgcaggatcacattgatgcgttgaaatccatcaggaaacaagaaccgaaaggaaacccttctttgcaaaatgcattggaaatggcaagaggccttttattgcctgttcctgcgcattgtacaagggaagtacttattgtatttggtagtctttccacaactgatcctggagatattcaccaaactatcgattctttagtttctgagaaaattagagtgaaggttttggggttatctgctcaagtggccatatgtaaagaattatgcaaggcaacgaattatggtgatgaatccttctataaaattttactcgatgaaactcacttaaaggagttatttaacgaggctgttacccctttacccgttaacaaaattaataagggtttcacactcgtaaagatggggtttccgacaaggatattcgaagatactccaactttttgtagttgccattccaagttagtttacggcggatacttctgtcccaattgtcatagtaaagtttgttctttgcccacagtctgtccatgttgtgacttgatgttgatcctttctacccacttggccagatcttatcaccatttaatgccgttaaaaacatttgcagaagtacctacaacagaaaaatttagaagtgaagactgctttagttgccagtctagatttcccatattgaaaaaccataaaaatggtaaattattaacaagttctcgctatcgttgtgaagattgtaaacaagaattttgtgttgactgcgatgtgttcatccatgaaatccttcataactgcccaggctgtgaatccaagcccgtaataacttga

SEQ ID NO: 7203 - DNA, 2139 bp, Saccharomyces cerevisiae
atgctcaattctgcgttactgtggaaggtttggctacgaatagacaactccactgatgaagtaaaccaaccaattgctgtacagttcgatgaaatagatactgttgatgatttgaagagcaggttttttcagaaactgagttcgactcgatggcgagaaattaacgataatgcttccattgcaataggcctctacgcacctaaatttgacaatcaagccgacaataccagtagtaacaacactaacgataatagttgtcgaagtaagagtaacggtgctggaagtggcgccaacctttccgttaatagcaataccaagagttcagtgagccccacagcaggatcatttggtctttcaaaagaccttgcaaaggacaggaatgttctccagcatcctaaacctacgcagaaaagaggagcattatacgacgcctttgccgccgtgccgacagtggccgcgactaccaatgtggattttcctcccaacgaggcgccaatgctaagcccgcaaagaccatactctactagtcctaaacagtttccagcaacaactaaaagtccgttactgcgatttgcctcagtctcaccctaccctaaatttcattctgataatcaaattatggcatcagctggtcttacatacgtctcaccgcataataaaaataaatacacaaggccgttgattagaaaaggtttaaattttaccacagaatcagttaatgattgcacttataaaatcatctttgaaccggatgaattggctattaacatatataaggaactattcggaaccatgggttcccaacctgcatcgcagcctttgctgatattttcgaatgttaatttacgccaggatgtaccgcctttagatatcttaaatgttgtagactatgttcctacgaatgaagaaatttcgcagcagaaaactcaaccaacagaccatggggccgttggtgtttttcatctagacgaccatatttctccgggcgaacaaggtcttaagcaaacaattggtgataaagcagatcttaaaggtaaagatggcaatagcagccctcaggaatttaaattaataactgatgaagagcaattgagaagagcgtcacaagaactgaaggatgaggaaaaggatgccgagtctccttggcaagcaatcttgctgttaccaaaaggttataaaggaggggtagattttcgaaataaaccagtggcccacacggattcatctttcaataatgaagacacaattactcattcagagttagaagtgaacaccggatccccttcgcaagaaagcggatcacttaatgaagctggtataggcataacgcaacccatgtcggaagtacaaagaagaaaagaagacgttacgcccgcatcaccaatattaacaagtagtcaaacgccgcattactcaaactcgctttataacgcaccttttgctgtttcctctccaccagatcctttaccaaacctttttaccaccacaagtgaaaaagttttccccaaaattaatgttttaatagttgaagacaacgtcatcaaccaagctatcttaggttcctttctgaggaaacacaaaatctcatataaactggctaaaaatggtcaagaagctgttaatatttggaaggaaggcggtcttcatttaatatttatggatttacagctgcctgtcttgtctggtatagaagctgccaagcagattagggacttcgaaaaacaaaatggcattggcattcaaaaaagtctcaataactcacactccaatcttgaaaaaggtacttcaaagagattctctcaggcgcccgtgattattgtagcattgaccgcatctaactctcagatggataaaagaaaagcacttctttctggttgtaacgactacctgactaaaccagtgaatttacactggcttagtaagaaaattacagagtggggatgtatgcaagccttgattgattttgacagctggaagcagggagaaagccggatgaccgacagtgttttggttaaatctccacagaaacctattgcaccttccaaccctcactcattcaaacaagcgacatctatgacccctacacacagcccagtaagaaaaaattcaaacctctcgcccactcaaatagaattgtga

SEQ ID NO: 7204 - DNA, 2139 bp, Artificial Sequence
  Description of Artificial Sequence: Synthetic polynucleotide
atgctcaattctgcgttattatggaaggtttggttaagaatagacaactccactgatgaagtaaaccaaccaattgctgtacagttcgatgaaatagatactgttgatgatttgaagagcaggttttttcagaaattaagttctactagatggagagaaattaacgataatgcttccattgcaataggcctctacgcacctaaatttgacaatcaagccgacaataccagtagtaacaacactaacgataatagttgtaggagtaagagtaacggtgctggaagtggcgccaacctttccgttaatagcaataccaagagttctgtgagccccacagcaggaagttttggtctttctaaagaccttgcaaaggacaggaatgttctccagcatcctaaacctacgcagaaaagaggagcattatacgacgcctttgccgccgtgccgacagtggccgcgactaccaatgtggattttcctcccaacgaggcgccaatgttaagcccgcaaagaccatactctactagtcctaaacagtttccagcaacaactaaaagtccgttacttagatttgcctctgtctctccctaccctaaatttcattctgataatcaaattatggcatctgctggtcttacatacgtctctccgcataataaaaataaatacacaaggccgttgattagaaaaggtttaaattttaccacagaatctgttaatgattgcacttataaaatcatctttgaaccggatgaattggctattaacatatataaggaattattcggaaccatgggttcccaacctgcatcccagcctttgttaatattttctaatgttaatttacgccaggatgtaccgcctttagatatcttaaatgttgtagactatgttcctacgaatgaagaaatttctcagcagaaaactcaaccaacagaccatggggccgttggtgtttttcatttggacgaccatatttctccgggcgaacaaggtcttaagcaaacaattggtgataaagcagatcttaaaggtaaagatggcaatagcagccctcaggaatttaaattaataactgatgaagagcaattgagaagagcgtctcaagaattgaaggatgaggaaaaggatgccgagtctccttggcaagcaatcttgttattaccaaaaggttataaaggaggggtagattttagaaataaaccagtggcccacacggattcttctttcaataatgaagacacaattactcattctgagttagaagtgaacaccggatccccttctcaagaaagcggatctcttaatgaagctggtataggcataacgcaacccatgtctgaagtacaaagaagaaaagaagacgttacgcccgcatctccaatattaacaagtagtcaaacgccgcattactctaactctctttataacgcaccttttgctgtttcctctccaccagatcctttaccaaacctttttaccaccacaagtgaaaaagttttccccaaaattaatgttttaatagttgaagacaacgtcatcaaccaagctatcttaggttcctttttaaggaaacacaaaatcagttataaattggctaaaaatggtcaagaagctgttaatatttggaaggaaggcggtcttcatttaatatttatggatttacagttgcctgtcttgtctggtatagaagctgccaagcagattagggacttcgaaaaacaaaatggcattggcattcaaaaaagtctcaataactctcactccaatcttgaaaaaggtacttctaagagattctctcaggcgcccgtgattattgtagcattgaccgcatctaactctcagatggataaaagaaaagcacttctttctggttgtaacgactacttgactaaaccagtgaatttacactggcttagtaagaaaattacagagtggggatgtatgcaagccttgattgattttgacagctggaagcagggagaaagcagaatgaccgacagtgttttggttaaatctccacagaaacctattgcaccttccaaccctcactctttcaaacaagcgacatctatgacccctacacacagcccagtaagaaaaaatagcaacctctctcccactcaaatagaattgtga

SEQ ID NO: 7205 - DNA, 1011 bp, Saccharomyces cerevisiae
atggaggtacatgaagagcaggtctctgcacctgtaacaggggatgctacagcaaaatatctgctgcaatatatcttgtcagcaagaggcatttgccatgaaaatgctctcattctagccctaatgagattggaaaccgatgcttcaacgcttaacactgaatggtcgatccagcagtgggtcgacaagctaaatgattatataaacgctataaacgtaaaactgaaccttttgggttacaagatcattcggatcaaccacgggattggtagaaacgcagtgactttaaaggccaagcagaattttgagtccttcgaagataatacagcaataagggctcacaataatgattatgcagttttgcaatcgatagtacttccggagagtaacaggtttttcgtatatgttaacttagcatcaacagaagagactaagttagccacaaggtttaaccaaaacgagatcgagtttatgaaatgggccatagaacaattcatgatcagtggagagactatcgttgaagggcctgcactggaaacctcgataattgtgaaggaagtcaaccgtattctagtagcagctacaggagactcaaacctcgcgaaatggcgtaagttcagtacgtttactgtagggtccaccaatcttttccaatttcaagaattaacagcaacggacatcgaagacttactactccgattatgcgaactgaaatggttttacaggactcaggaagggaaattcggtattgatcttcgctgtatagcagaactagaagagtatctaacatccatgtacaatttgaacacttgccaaaattgccacaagctggcaattcaaggtgtcaggtgcggcaacgaatcatgccgagaagagaatgaggaaactggagagaatagtctgtctcaaatttggcatgttgattgtttcaagcattatattacccatgtaagcaagaattgtgatcgttgcggttcatcgctaatcacagagggcgtatacgttatttaa

SEQ ID NO: 7206 - DNA, 1011 bp, Artificial Sequence
  Description of Artificial Sequence: Synthetic polynucleotide
atggaggtacatgaagagcaggtctctgcacctgtaacaggggatgctacagcaaaatatttattacaatatatcttgagtgcaagaggcatttgccatgaaaatgctctcattttagccttgatgagattggaaaccgatgcttccacgcttaacactgaatggtctatccagcagtgggtcgacaagttgaatgattatataaacgctataaacgtaaaattgaaccttttgggttacaagatcattagaatcaaccacgggattggtagaaacgcagtgactttaaaggccaagcagaattttgagtccttcgaagataatacagcaataagggctcacaataatgattatgcagttttgcaaagtatagtacttccggagagtaacaggtttttcgtatatgttaacttagcaagcacagaagagactaagttagccacaaggtttaaccaaaacgagatcgagtttatgaaatgggccatagaacaattcatgatcagtggagagactatcgttgaagggcctgcattggaaaccagtataattgtgaaggaagtcaaccgtattttagtagcagctacaggagactccaacctcgcgaaatggcgtaagttcagtacgtttactgtagggtccaccaatcttttccaatttcaagaattaacagcaacggacatcgaagacttacttctcagattatgcgaattgaaatggttttacaggactcaggaagggaaattcggtattgatcttcgctgtatagcagaattggaagagtatttgacatccatgtacaatttgaacacttgccaaaattgccacaagttagcaattcaaggtgtcaggtgcggcaacgaaagttgcagagaagagaatgaggaaactggagagaatagtttatctcaaatttggcatgttgattgtttcaagcattatattacccatgtaagcaagaattgtgatcgttgcggttcttctttgatcacagagggcgtatacgttatttga

SEQ ID NO: 7207 - DNA, 507 bp, Saccharomyces cerevisiae
atgagttctcaaagtaatactggtaattctattgaggcaccacaactacccattcctggtcaaactaatggctctgcgaacgttactgttgatggagctggtgttaatgtcggtatccagaatggttcgcagggtcaaaagaccggaatggacctttattttgatcaagctttgaactacatgggagaacatcctgtgataacaggttttggggcctttttaactttatattttacagccggtgcatataaatcaatatcgaagggacttaacggtggaaaatccactactgccttcttgaaaggcggatttgacccgaaaatgaattctaaagaggctctacagattttgaatttgacagaaaatacattgactaaaaaaaagttgaaagaggttcataggaaaattatgttagctaatcatcctgacaaaggtggttctccatttttggccactaagataaacgaagctaaggactttttggaaaaaaggggtattagcaaataa

SEQ ID NO: 7208 - DNA, 507 bp, Artificial Sequence
  Description of Artificial Sequence: Synthetic polynucleotide
atgagttctcaaagtaatactggtaattctattgaggcaccacaattgcccattcctggtcaaactaatggctctgcgaacgttactgttgatggagctggtgttaatgtcggtatccagaatggttctcagggtcaaaagaccggaatggacctttattttgatcaagctttgaactacatgggagaacatcctgtgataacaggttttggggcctttttaactttatattttacagccggtgcatataaatctatatccaagggacttaacggtggaaaatccactactgccttcttgaaaggcggatttgacccgaaaatgaattctaaagaggctttacagattttgaatttgacagaaaatacattgactaaaaaaaagttgaaagaggttcataggaaaattatgttagctaatcatcctgacaaaggtggttctccatttttggccactaagataaacgaagctaaggactttttggaaaaaaggggtattagcaaatga

SEQ ID NO: 7209 - DNA, 600 bp, Saccharomyces cerevisiae
atgagaatttatcaatgccatttttgctcatccccatgttatccaggtcatgggatcatgtttgtgcgtaacgatgctaaagagtttaggttctgccgttctaagtgtcacaaggcattcaagcaacgtcgtaacccaagaaaactaaaatggaccaaagctttcagaaaggctgccggaaaagaattggctgtggattctaccttgacttttgcccaaagaagaaatgtccctgttagatacaatagagagttagttgccacaactttgaaggctatggctagaatcgaagaaattagacaaaaacgtgaaagagccttctacaagaatagaatgagaggtaacaaagaaaaggacttcttaagagataagaaattggtcgaatctaacccagaattattgagaatcagagaagttgaaattgccagaaagttggctaaagaacaagaaagagctgaatcagtatccgaacaagaggaatctgaagaagaagaggaggatatggaaatcgacagtgacgaggaagaggaagaacaattggaaaagcaaaagattctgctaaagaacagaagaagaaatacaaagaaaattgctttttag

SEQ ID NO: 7210 - DNA, 600 bp, Artificial Sequence
  Description of Artificial Sequence: Synthetic polynucleotide
atgagaatttatcaatgccatttttgctcttccccatgttatccaggtcatgggatcatgtttgtgcgtaacgatgctaaagagtttaggttctgccgttctaagtgtcacaaggcattcaagcaacgtcgtaacccaagaaaattgaaatggaccaaagctttcagaaaggctgccggaaaagaattggctgtggattctaccttgacttttgcccaaagaagaaatgtccctgttagatacaatagagagttagttgccacaactttgaaggctatggctagaatcgaagaaattagacaaaaacgtgaaagagccttctacaagaatagaatgagaggtaacaaagaaaaggacttcttaagagataagaaattggtcgaatctaacccagaattattgagaatcagagaagttgaaattgccagaaagttggctaaagaacaagaaagagctgaaagtgtatccgaacaagaggaatctgaagaagaagaggaggatatggaaatcgacagtgacgaggaagaggaagaacaattggaaaagcaaaagattttattgaagaacagaagaagaaatacaaagaaaattgctttttga

SEQ ID NO: 7211 - DNA, 483 bp, Saccharomyces cerevisiae
atgagccagttagttctagacttaaaatgtttgaaggataaaatagcaacgaattacgatattcataacaatgtttacggtggaaacggaatggaaccaaacattattcatccgtccaaaagattcaggattgttgttcgattagtagatttcttgttctgtaaatcggatgaagaattcattaaaggttttttctgtcaaatgatagttagaaatcttcattgcctcaattcaacaaatggcgcagaggagatgcgtttgtatatgagcgaaagattattttcagcccataaagatgatttgagattgataaatgggcaggtactggatgttcgcattggggtatggtatggaatacaccaaagtccgccaatttttgaaatcattgattttaagatactatccaggaatgacgttcgtgatttctgtgaatttgtcaaatcaccacttggtgagaagtttctgaacatctctaactcctaa

SEQ ID NO: 7212 - DNA, 483 bp, Artificial Sequence
  Description of Artificial Sequence: Synthetic polynucleotide
atgagccagttagttttggacttaaaatgtttgaaggataaaatagcaacgaattacgatattcataacaatgtttacggtggaaacggaatggaaccaaacattattcatccgtccaaaagattcaggattgttgttagattagtagatttcttgttctgtaaatctgatgaagaattcattaaaggttttttctgtcaaatgatagttagaaatcttcattgcctcaattctacaaatggcgcagaggagatgcgtttgtatatgagcgaaagattattttctgcccataaagatgatttgagattgataaatgggcaggtattggatgttcgcattggggtatggtatggaatacaccaaagtccgccaatttttgaaatcattgattttaagatattatccaggaatgacgttcgtgatttctgtgaatttgtcaaatctccacttggtgagaagtttttgaacatctctaactcctga

SEQ ID NO: 7213 - DNA, 576 bp, Saccharomyces cerevisiae
atgaaagtgggtattataatgggttctgtgagggcaaagagggtatgcccagaaattgcagcatacgtaaaacgtacaattgaaaatagcgaagaattaatagaccagaagctgaaaatacaagtagtagatttacaacagattgctcttcccttatatgaagatgatgacgaactgatccctgcgcaaataaagagcgtggatgagtatgcagacagcaaaactcgatcgtggagtcgcatcgtaaatgcattagatattattgtattcgttacacctcaatataattgggggtatccagcagccttaaaaaatgcaattgatcgtctttaccatgaatggcacggaaaacctgccctggtggtaagctacggcggtcatggcggtagtaagtgtaatgaccaacttcaagaggtactacatggtttgaagatgaatgttataggtggagtggcggtgaaaataccggtaggtacgataccgttacccgaggacattgtaccacaactcagcgtgcacaatgaagagatcctgcaattactcgcatcgtgcatcgaaacaacgaggaataaataa

SEQ ID NO: 7214 - DNA, 576 bp, Artificial Sequence
  Description of Artificial Sequence: Synthetic polynucleotide
atgaaagtgggtattataatgggttctgtgagggcaaagagggtatgcccagaaattgcagcatacgtaaaacgtacaattgaaaatagcgaagaattaatagaccagaagttgaaaatacaagtagtagatttacaacagattgctcttcccttatatgaagatgatgacgaattgatccctgcgcaaataaagagcgtggatgagtatgcagacagcaaaactaggagttggagtcgcatcgtaaatgcattagatattattgtattcgttacacctcaatataattgggggtatccagcagccttaaaaaatgcaattgatcgtctttaccatgaatggcacggaaaacctgccttagtggtaagctacggcggtcatggcggtagtaagtgtaatgaccaacttcaagaggtattacatggtttgaagatgaatgttataggtggagtggcggtgaaaataccggtaggtacgataccgttacccgaggacattgtaccacaactcagcgtgcacaatgaagagatcttgcaattactcgcatcttgcatcgaaacaacgaggaataaatga

SEQ ID NO: 7215 - DNA, 300 bp, Saccharomyces cerevisiae
atgaagactgtctattacaaagaaatcacctaccagcagtatcttcaactgcaacctgaacaacaggaaaaatacctggctttatgtcaaaaagattttgaacaagagactgaaagaattgcatttgatcgtcaaggaggtgtgcctggtattgctaggaaatttgcacaagaagaagttgcttggttcgatcgcgttacaacatggtcatatatgaatgcttatattccgagctacagaagaagaagaaaccttttaaagattgatatgttaaagatgtctaatgctgaagaatactga

SEQ ID NO: 7216 - DNA, 300 bp, Artificial Sequence
  Description of Artificial Sequence: Synthetic polynucleotide
atgaagactgtctattacaaagaaatcacctaccagcagtatcttcaattacaacctgaacaacaggaaaaatacttggctttatgtcaaaaagattttgaacaagagactgaaagaattgcatttgatcgtcaaggaggtgtgcctggtattgctaggaaatttgcacaagaagaagttgcttggttcgatcgcgttacaacatggagttatatgaatgcttatattccgagctacagaagaagaagaaaccttttaaagattgatatgttaaagatgtctaatgctgaagaatactga

SEQ ID NO: 7217 - DNA, 426 bp, Saccharomyces cerevisiae
atgaacattaagactttgtgtcatccagaatataaaagaatctccgttgaatcgttattgaatccggtagaggagacaatagactgcgaaaaacctcactctcaaacaaaaatcaatactgctaaacccattagtgcatctttgtatgtcacaacgaataatactgctgttgttcagcacaatgtccaaaagaggaaaggcgtcaccaggagatgtccacagtgtgcggtgataaaaacttctccgcaatggagagagggtcctgatggagaggtgacattgtgtaatgcctgtggattattttatagaaaaatatttttggtttttggcaaggatctggcaaaacggtactttaacgaaataaaaggtgtgagcgtcaaacgaaaagttccaaagagcctctatggagttacaagaacgcgttaa

SEQ ID NO: 7218 - DNA, 426 bp, Artificial Sequence
  Description of Artificial Sequence: Synthetic polynucleotide
atgaacattaagactttgtgtcatccagaatataaaagaatctccgttgaatctttattgaatccggtagaggagacaatagactgcgaaaaacctcactctcaaacaaaaatcaatactgctaaacccattagtgcatctttgtatgtcacaacgaataatactgctgttgttcagcacaatgtccaaaagaggaaaggcgtcaccaggagatgtccacagtgtgcggtgataaaaacttctccgcaatggagagagggtcctgatggagaggtgacattgtgtaatgcctgtggattattttatagaaaaatatttttggtttttggcaaggatttggcaaaaagatactttaacgaaataaaaggtgtgagcgtcaaaagaaaagttccaaagagcctctatggagttacaagaacgcgttga

SEQ ID NO: 7219 - DNA, 2715 bp, Saccharomyces cerevisiae
atgaagcagaaaaaatttaactccaaaaaaagtaatagaacagatttatcaaaaagaggagattctcctaatataggaatttccaaatctagaactgcatgtaaacgatgtcgattgaaaaaaattaaatgtgatcaggagtttcctagctgtaagaggtgtgcaaaattagaggtaccatgtgtttctttggacccagccaccggaaaggacgttccaagatcttacgtcttttttctggaagatagattggctgtcatgatgcgtgtgttgaaagaatatggagtagatcccacgaaaatacgaggaaatatacctgctacaagtgatgatgaaccttttgatttgaaaaagtacagttcagtttcatctttgggagaagagggaatattgccacataatggcttattggcggattatttggttcagaaagggaattctatggcatcctcagctataacgagcaagtctatggcaagcccacagactataaatgtacaacgcaaggaatttctggtaaactcaaaaaaacaagatggtagcgctttattacccgagacaggcagccctatgacttcagatgcaagagcggaagagctacgccgatgtaataaggagatcagtgcgctgggcacgatgagagaaagtagttttaactcttttttaggagattcatcgggtatttcctttgcgaaattagtcttcacggcaactaattttcgtcaagattccggagatgacgttctggatgaagatattaaacaaagggaacagaaatacaatggatatgcagaggctgaaaacaatccacactttgatccattggaactaccacctcgacatgccgctgaagttatgatatccaggttttttgtagatactaattcccagttacctttgctgcatagagaacttttcctgaaaaaatactttgaacctatttatggtccctggaatcccaatattgcattggcatctgatcagacaggcataaatagcgcgttcgaaattccaattaccagtgcttttagtgcgcatactgaaccaaaaagggagaacgttactgagaagattgacgtatgctcttccgtggatgttccatggtatgacacttgggagacatctcaaaaagtcaacatgcgtccgatagttgaactaccgacaaaatttcacataccttatttttttttaaacattatatttgctattggccatgctacgcaggtacttaagtcagatattactactgtcgcgacatataagagacgcgctactaaatatattgcatctttattttcatcttcagacaggttggaggcattggcaggcactttgctcatggtaatctattcaataatgagacctaatgtccccggtgtttggtatactatgggttctgtactaagactaacggttgacctaggactacattcggaaaaaattaataaaaattatgacgcctttaccagagaaatacgcaggcgtctattttggtgcgtttactccttagatcggcaaatttgctcgtattttggtcgaccttttggtatacctgaagaaagcatcaccaccaggtatcctagccttttggacgattccttcatcacattaactaaccgagaaattgacgactactcagacttaccaagcccaaatccgtcttcaaaagttatcgcattggccatgtataaaatcagaagaatccaagctagtatagtgagaatactctacgcgcccggtgcagaattgccgaggaggtttatggatctcgagagctggcggattgaaacctacaatgagcttgagcgttggttccaagtggacgttcccaaaaactttgagatgatgaattgcaaatttaacagcatctggtttgatctgaactatcattactcgaagagcattctttatggactttctccaaaattccctactttgaatgataccgcttttaaaattgtcctggacagtacgaagggcaccatagacgtattttacaatctttgtgtcaataaaaaaattggttacacgtgggtagcagttcataacatgttcatgacaggtatgacttacctttacgtaaatttttactcaaaaaacaacataaatgattgtcaagaaaaagtgtcagagtacactgaaaaagtgttgatagtactgaagaatctgataggtttttgcgaatctgcgaaaacctgttacacgagttacaaaattttatcatcagttgtaataaagttaaaatttatgcaaataaatgatgccaaagggatattttcggattcaaatcccctaacctctcaggcaaaccgcatgtcaagttatgataaaaaaacgaacgtacttggttttgacgacggtacttttgataacaaggtttttaatagaaccaattttgaagaaaaagcaccttttgatatacctctagatgaattttttaccgaactggaaaaacacagcaatgtttcccagtttaatactttagatgtaagcgaaggtaatcaagtgataaatgaaagtgcttctacaaatacgtcttctgcattgaattgccagtcgtataccaataatcaagatatcatggatatccttttccaggttacttcgggatctgtatgggatgagttttttgtcaggtctggtaacggaaacgaaggcgagtcttcttacgatatcagtaaaggaaagaactctgaatccggtggaatattttag

SEQ ID NO: 7220 - DNA, 2715 bp, Artificial Sequence
  Description of Artificial Sequence: Synthetic polynucleotide
atgaagcagaaaaaatttaactccaaaaaaagtaatagaacagatttatccaaaagaggagattctcctaatataggaatttccaaatctagaactgcatgtaaaagatgtagattgaaaaaaattaaatgtgatcaggagtttcctagctgtaagaggtgtgcaaaattagaggtaccatgtgtttctttggacccagccaccggaaaggacgttccaagatcttacgtcttttttttggaagatagattggctgtcatgatgcgtgtgttgaaagaatatggagtagatcccacgaaaataagaggaaatatacctgctacaagtgatgatgaaccttttgatttgaaaaagtacagttctgtttcttctttgggagaagagggaatattgccacataatggcttattggcggattatttggttcagaaagggaattctatggcatcctctgctataacgagcaagtctatggcaagcccacagactataaatgtacaacgcaaggaatttttggtaaactccaaaaaacaagatggtagcgctttattacccgagacaggcagccctatgacttctgatgcaagagcggaagagttacgccgttgtaataaggagatcagtgcgttgggcacgatgagagaaagtagttttaactcttttttaggagattcttctggtatttcctttgcgaaattagtcttcacggcaactaattttcgtcaagattccggagatgacgttttggatgaagatattaaacaaagggaacagaaatacaatggatatgcagaggctgaaaacaatccacactttgatccattggaattaccacctagacatgccgctgaagttatgatatccaggttttttgtagatactaattcccagttacctttgttgcatagagaacttttcttgaaaaaatactttgaacctatttatggtccctggaatcccaatattgcattggcatctgatcagacaggcataaatagcgcgttcgaaattccaattaccagtgcttttagtgcgcatactgaaccaaaaagggagaacgttactgagaagattgacgtatgctcttccgtggatgttccatggtatgacacttgggagacatctcaaaaagtcaacatgcgtccgatagttgaattaccgacaaaatttcacataccttatttttttttaaacattatatttgctattggccatgctacgcaggtacttaagagtgatattactactgtcgcgacatataagagacgcgctactaaatatattgcatctttattttcttcttctgacaggttggaggcattggcaggcactttgctcatggtaatctattctataatgagacctaatgtccccggtgtttggtatactatgggttctgtattaagattgacggttgacttgggattgcattctgaaaaaattaataaaaattatgacgcctttaccagagaaatacgcaggcgtttgttttggtgcgtttactccttagatagacaaatttgctcttattttggtagaccttttggtatacctgaagaaagcatcaccaccaggtatcctagccttttggacgattccttcatcacattaactaacagagaaattgacgactacagtgacttaccaagcccaaatccgtcttctaaagttatcgcattggccatgtataaaatcagaagaatccaagctagtatagtgagaatactctacgcgcccggtgcagaattgccgaggaggtttatggatctcgagagctggagaattgaaacctacaatgagcttgagcgttggttccaagtggacgttcccaaaaactttgagatgatgaattgcaaatttaacagcatctggtttgatttgaactatcattactccaagagcattctttatggactttctccaaaattccctactttgaatgataccgcttttaaaattgtcttggacagtacgaagggcaccatagacgtattttacaatctttgtgtcaataaaaaaattggttacacgtgggtagcagttcataacatgttcatgacaggtatgacttacctttacgtaaatttttactctaaaaacaacataaatgattgtcaagaaaaagtgtctgagtacactgaaaaagtgttgatagtattgaagaatttgataggtttttgcgaatctgcgaaaacctgttacacgagttacaaaattttatcttctgttgtaataaagttaaaatttatgcaaataaatgatgccaaagggatattttctgattctaatcccttgacctctcaggcaaaccgcatgagcagttatgataaaaaaacgaacgtacttggttttgacgacggtacttttgataacaaggtttttaatagaaccaattttgaagaaaaagcaccttttgatatacctttggatgaattttttaccgaattggaaaaacacagcaatgtttcccagtttaatactttagatgtaagcgaaggtaatcaagtgataaatgaaagtgcttctacaaatacgtcttctgcattgaattgccagagttataccaataatcaagatatcatggatatccttttccaggttacttctggatctgtatgggatgagttttttgtcaggtctggtaacggaaacgaaggcgagtcttcttacgatatcagtaaaggaaagaactctgaatccggtggaatattttga

SEQ ID NO: 7221 - DNA, 1518 bp, Saccharomyces cerevisiae
atgaagttgggtattataccttaccaggaaggtactgatattgtttacaagaatgctctccagggtcagcaagaagggaagagacctaatttaccacagatggaagcaacgcaccaaatcaagtcatcggttcagggtacaagttatgagtttgtccgcacagaagatattccattgaatcgaagacattttgtgtacagaccgtgttccgcaaatccctttttcactattttggggtatggctgtacagaatacccatttgaccactctggaatgagcgtcatggacagatctgaagggttgtcaattagtcgagatggaaatgatctggtaagtgtcccggatcaatacggttggagaactgcaagaagcgatgtgtgtattaaagaaggaatgacgtattgggaagtggaggtaattcgtggaggaaacaagaaattcgcagacggtgttaataataaggaaaatgctgatgattcagtagacgaagtacaaagtggcatatacgaaaaaatgcacaaacaagtgaatgacaccccgcatctacgatttggagtttgcagaagagaggccagtttagaggctcccgtagggtttgatgtgtacgggtatggtattagagacatttcgttagaatctatccacgaaggaaaattgaattgcgtcctagaaaatggttcgccattgaaagagggtgataaaatcggatttctactgagtcttcctagcattcatacacaaatcaaacaagctaaggagtttaccaaaagaagaatttttgcactgaactcccatatggatacgatgaatgaaccatggagagaagatgctgagaatgggccttcaaggaaaaaattaaaacaagagacaacgaacaaagaatttcaaagggcgctattagaagatattgaatataacgacgtcgtccgcgatcaaatcgccatcaggtataagaaccagttgttctttgaggcaacggactatgtaaagacaacgaaaccggaatattattcttctgataagagggaaaggcaagactattaccagttagaggattcatatcttgctatctttcaaaatggtaagtacctaggcaaagcatttgaaaatttaaagccgttgttaccaccgttcagtgagttacaatacaatgaaaagttctatcttggatattggcaacatggtgaagctcgtgatgagtccaatgataaaaacacaaccagtgccaaaaagaaaaagcagcaacaaaagaaaaagaagggattgatactcagaaacaaatacgtaaataataacaaactgggttactatccaacaatcagctgttttaacggtggaacagcgaggataattagtgaagaagataaattggagtacctcgatcaaatccgatcagcttactgtgttgacgggaattcaaaagttaacacactggatacattgtacaaagaacagatagctgaagacatagtatgggatataatcgatgagttggagcaaattgccctacagcaataa

SEQ ID NO: 7222 - DNA, 1518 bp, Artificial Sequence
  Description of Artificial Sequence: Synthetic polynucleotide
atgaagttgggtattataccttaccaggaaggtactgatattgtttacaagaatgctctccagggtcagcaagaagggaagagacctaatttaccacagatggaagcaacgcaccaaatcaagtcttctgttcagggtacaagttatgagtttgtccgcacagaagatattccattgaatagaagacattttgtgtacagaccgtgttccgcaaatccctttttcactattttggggtatggctgtacagaatacccatttgaccactctggaatgagcgtcatggacagatctgaagggttgtctattagtagagatggaaatgatttagtaagtgtcccggatcaatacggttggagaactgcaagaagcgatgtgtgtattaaagaaggaatgacgtattgggaagtggaggtaattcgtggaggaaacaagaaattcgcagacggtgttaataataaggaaaatgctgatgattctgtagacgaagtacaaagtggcatatacgaaaaaatgcacaaacaagtgaatgacaccccgcatttgagatttggagtttgcagaagagaggccagtttagaggctcccgtagggtttgatgtgtacgggtatggtattagagacatttctttagaatctatccacgaaggaaaattgaattgcgtcttggaaaatggttctccattgaaagagggtgataaaatcggatttttattaagtcttcctagcattcatacacaaatcaaacaagctaaggagtttaccaaaagaagaatttttgcattgaactcccatatggatacgatgaatgaaccatggagagaagatgctgagaatgggccttctaggaaaaaattaaaacaagagacaacgaacaaagaatttcaaagggcgttattagaagatattgaatataacgacgtcgtccgcgatcaaatcgccatcaggtataagaaccagttgttctttgaggcaacggactatgtaaagacaacgaaaccggaatattattcttctgataagagggaaaggcaagactattaccagttagaggattcttatcttgctatctttcaaaatggtaagtacttgggcaaagcatttgaaaatttaaagccgttgttaccaccgttcagtgagttacaatacaatgaaaagttctatcttggatattggcaacatggtgaagctcgtgatgagtccaatgataaaaacacaaccagtgccaaaaagaaaaagcagcaacaaaagaaaaagaagggattgatactcagaaacaaatacgtaaataataacaaattgggttactatccaacaatcagctgttttaacggtggaacagcgaggataattagtgaagaagataaattggagtacctcgatcaaatcagatctgcttactgtgttgacgggaattctaaagttaacacattagatacattgtacaaagaacagatagctgaagacatagtatgggatataatcgatgagttggagcaaattgccttgcagcaatga

SEQ ID NO: 7223 - DNA, 615 bp, Saccharomyces cerevisiae
atgtttcacagacgcaaaagaccttataacaccagaaattatggccatgatgacaagaaattcaaatcgcagtacatcgatattatgccagacttcagcccttccggtctgttagagctggagtcgaataacaaagaaggtatagctttaaaacatgtggagccgcaggacgctatttctccagataactacatggatatgctaggactggaggcgcgagataggactatgtatgaactagtgatatacagaaagaatgacaaggataaaggaccgtggaaaagatacgatttgaacggcaggagctgttatttagtcggtcgtgaactgggccacagtctggatacagatctcgacgatagaacggagatcgttgtcgcagacattggtatacccgaagaaacatcctcaaagcagcactgcgtcatccagttcaggaacgttcgtggcattttgaaatgttatgtaatggatttggattcgtccaatgggacatgtttgaacaacgttgtaattcctggagcgagatatatagagctacgaagtggtgacgtccttacactttcagaatttgaagaagataacgattacgaactcatcttcatgaatgtataa

SEQ ID NO: 7224 - DNA, 615 bp, Artificial Sequence
  Description of Artificial Sequence: Synthetic polynucleotide
atgtttcacagacgcaaaagaccttataacaccagaaattatggccatgatgacaagaaattcaaatctcagtacatcgatattatgccagacttcagcccttccggtttattagagttagagagcaataacaaagaaggtatagctttaaaacatgtggagccgcaggacgctatttctccagataactacatggatatgcttggattggaggcgagggataggactatgtatgaattagtgatatacagaaagaatgacaaggataaaggaccgtggaaaagatacgatttgaacggcaggagctgttatttagtcggtcgtgaattaggccacagtttggatacagatctcgacgatagaacggagatcgttgtcgcagacattggtatacccgaagaaacatcctccaagcagcactgcgtcatccagttcaggaacgttcgtggcattttgaaatgttatgtaatggatttggattcttccaatgggacatgtttgaacaacgttgtaattcctggagcgagatatatagagttaagaagtggtgacgtccttacactttctgaatttgaagaagataacgattacgaactcatcttcatgaatgtatga

SEQ ID NO: 7225 - DNA, 1014 bp, Saccharomyces cerevisiae
atgaacaggattaagaatacattttctgttgctaagagattaaaactaagcaaagttatgacgaactcagaattaccgagcatattcgaaggaactgttgatttagggattattggtggtacaggtttatataaccttgactgtctggagcccatcgctttgcttccacccatggtaacaccatggggtaccacatcgtctcctgtcacaatctctcagttcgtaggaactaacagccactttcacgttgcgttcatagccagacacggtattaaccacgaatacccacccactaaagtcccatttagagcaaacatggcggccttaaagaacttaaattgtaaagccgttctttcttttagtgccgtggggtctttacaaccccatataaagcctagagattttgtgttaccacagcaaataatcgacagaactaaaggcataagacattcttcatatttcaacgatgaaggcttggtaggtcacgttggtttcggacagccgttctctcaaaaattcgcagagtatatctatcaattcaagaacgagataacaaatcctgaatccgaagaaccgtgccatttgcattacgacaaggatatgaccgttgtgtgtatggaaggcccacaattctccacgcgcgctgaatccaagatgtacagaatgtttggtggccatgttattaacatgagtgttattccagaagccaaattggcgcgtgagtgtgagctgccttaccagatgatttgtatgtctaccgattacgacgcatggagagatgaggcagaacctgttaccgtagaaaccgttattggtaatttgacgaataatgggcgcaatgcaaatattttagcttctaagatcatcgtctcaatggccaaggaaatcccagagttcatgcatactggcgatgggctgcgcggttccatcaagaaatctatctctaccaaaccagaggctatgtccaaggaaaccttagaaagactaagatacttatttccaaactattggtaa

SEQ ID NO: 7226 - DNA, 1014 bp, Artificial Sequence
  Description of Artificial Sequence: Synthetic polynucleotide
atgaacaggattaagaatacattttctgttgctaagagattaaaattaagcaaagttatgacgaactctgaattaccgagcatattcgaaggaactgttgatttagggattattggtggtacaggtttatataaccttgactgtttagagcccatcgctttgcttccacccatggtaacaccatggggtaccacatcttctcctgtcacaatctctcagttcgtaggaactaacagccactttcacgttgcgttcatagccagacacggtattaaccacgaatacccacccactaaagtcccatttagagcaaacatggcggccttaaagaacttaaattgtaaagccgttctttcttttagtgccgtggggtctttacaaccccatataaagcctagagattttgtgttaccacagcaaataatcgacagaactaaaggcataagacattcttcttatttcaacgatgaaggcttggtaggtcacgttggtttcggacagccgttctctcaaaaattcgcagagtatatctatcaattcaagaacgagataacaaatcctgaatccgaagaaccgtgccatttgcattacgacaaggatatgaccgttgtgtgtatggaaggcccacaattctccacgcgcgctgaatccaagatgtacagaatgtttggtggccatgttattaacatgagtgttattccagaagccaaattggcgcgtgagtgtgagcttccttaccagatgatttgtatgtctaccgattacgacgcatggagagatgaggcagaacctgttaccgtagaaaccgttattggtaatttgacgaataatgggcgcaatgcaaatattttagcttctaagatcatcgtctccatggccaaggaaatcccagagttcatgcatactggcgatgggttacgcggttccatcaagaaatctatctctaccaaaccagaggctatgtccaaggaaaccttagaaagattgagatacttatttccaaactattggtga

SEQ ID NO: 7227 - DNA, 900 bp, Saccharomyces cerevisiae
atgaagattcaggcgggccaattgggcctggacgataatgacgtgccgggaccattgccggacacagacagcaaaccctcatcacaatcacaaaatgacacaccaatgtttaaattgggcaactttgaaagtcctgtgctcaaggagctatcacggcgaacggtaaacaaggaaatggagacgcagagaattatgacaaacgtaattgcgtttgcgttctggaacctgctggtgaagttcatcaagttcttttggaacaacactcatgttgggagacagttttgcaaccggctatccagaatccatctgtacatgttgacatttcacacgttaaagaaggctaacatcatatatcacaccacgttcagttggttgaatgcagaacttcttgactacttgttccacctattaatctcgctcaatatactgttttctctttggaagctcttatccaccgtcaaagtaagtgatttgaatctcactgacaggcaaaagaagctcctgggggtagacatgcaatcatctgtcgatactgggttgcagccacaacacccccactacgtatccacttctaagatcagccaaatggcacagaacaaaacacatattcctcaaacaaatctcaaaaatcatccagcatatctcttcaaaggcttagagacgcctttgaaagcaagacaaagggaaatggcggaggaacagacgaaactacaatctcaatccttacacacaaagaatgtatttggcacactgcagaggcatagcggtatcagtagcacattagtgagcgctaacaatgacaataactcgccgcatacccctgtaactaggaagggctacattccaagtagcaaatatgcatatatgatgaactcacagtccccaagggggaaaatataa

SEQ ID NO: 7228 - DNA, 900 bp, Artificial Sequence
  Description of Artificial Sequence: Synthetic polynucleotide
atgaagattcaggcgggccaattgggccttgacgataatgacgtgccgggaccattgccggacacagacagcaaaccctcttctcaatctcaaaatgacacaccaatgtttaaattgggcaactttgaaagtcctgtgctcaaggagttatccaggagaacggtaaacaaggaaatggagacgcagagaattatgacaaacgtaattgcgtttgcgttctggaacttattggtgaagttcatcaagttcttttggaacaacactcatgttgggagacagttttgcaacagattatccagaatccatctttacatgttgacatttcacacgttaaagaaggctaacatcatatatcacaccacgttcagttggttgaatgcagaacttcttgactacttgttccacttattaatctctctcaatatattgttttctctttggaagctcttatccaccgtcaaagtaagtgatttgaatctcactgacaggcaaaagaagctcttaggggtagacatgcaatcttctgtcgatactgggttgcagccacaacacccccactacgtatccacttctaagatcagccaaatggcacagaacaaaacacatattcctcaaacaaatctcaaaaatcatccagcatatctcttcaaaggcttagagacgcctttgaaagcaagacaaagggaaatggcggaggaacagacgaaattacaatctcaatccttacacacaaagaatgtatttggcacattacagaggcatagcggtatcagtagcacattagtgagcgctaacaatgacaataactctccgcatacccctgtaactaggaagggctacattccaagtagcaaatatgcatatatgatgaactctcagtccccaagggggaaaatatga

SEQ ID NO: 7229 - DNA, 1194 bp, Saccharomyces cerevisiae
atgggatttatagcaaatatactgtgctgttcttcagatacttccaaaacacatcgtcaacgccaaccaccagaaactaatcacaaccgcaaccgcaaccgtaagcacagttcaaacaaagctcaaactcagggtcgtaagcagaaggctactccaaacggcgacaagatgcaatattccacaccggagatccttttgtctagttccgattcaggcagcaatgcgggttccaagacaatgcaggagaatgggaatagcggcaatggaaaactagcacctttatcaagagatcactccaacaactcgtacgatgaggagaaagaatatgaagattataatgaaggagacgtagaaatgacggaggttaacaatgccggagaagaagaagaagaagatgacgaagcaaaagaaaagcaagaccatgtcgttcatgaatataacgttgacgcagatagaaattccagtattaatgacgaggcgccaccacaacagggtctgtatcaggtgggtcaagaagatatgaatccacaatatgtcgccagcagtcctgataatgatttaaacttgatacctacaacggaggaggacttctctgacctgacgcatttgcaaccagaccagtaccatgcccccggatacgacactctgctaccacccaagttgcaagaatttcaacagaaaaaatgtctgatattggatctagacgaaactttggtacattcttcctttaaatatatgcattcagctgatttcgttttgcccgtcgaaatcgatgatcaagttcacaatgtctatgttattaagaggccaggcgtcgatgagttcttgaacagggtgagtcaactatacgaagttgttgtgttcacggcaagtgtttcgaggtatgcaaacccccttttagatacgttggaccctaatggaaccatccatcatcgattattcagagaagcttgttataactacgaaggtaactacatcaagaacttatcgcagatcggaagaccattgtccgaaacaatcatcttagataattcgccggcctcttacatctttcatccgcaacatgctgttccgatatcttcttggttctctgatactcatgataatgagttactagatattatcccacttttggaggacctttcatcaggaaacgtgttggatgtggggagcgtgttggatgtgacgatatag

SEQ ID NO: 7230 - DNA, 1194 bp, Artificial Sequence
  Description of Artificial Sequence: Synthetic polynucleotide
atgggatttatagcaaatatattgtgctgttcttctgatacttccaaaacacatcgtcaacgccaaccaccagaaactaatcacaaccgcaaccgcaaccgtaagcacagtagtaacaaagctcaaactcagggtcgtaagcagaaggctactccaaacggcgacaagatgcaatattccacaccggagatccttttgtctagttccgattctggcagcaatgcgggttccaagacaatgcaggagaatgggaatagcggcaatggaaaattggcacctttatctagagatcactccaacaactcttacgatgaggagaaagaatatgaagattataatgaaggagacgtagaaatgacggaggttaacaatgccggagaagaagaagaagaagatgacgaagcaaaagaaaagcaagaccatgtcgttcatgaatataacgttgacgcagatagaaattccagtattaatgacgaggcgccaccacaacagggtttatatcaggtgggtcaagaagatatgaatccacaatatgtcgccagcagtcctgataatgatttaaacttgatacctacaacggaggaggacttctctgacttaacgcatttgcaaccagaccagtaccatgcccccggatacgacactttattaccacccaagttgcaagaatttcaacagaaaaaatgtttgatattggatttggacgaaactttggtacattcttcctttaaatatatgcattctgctgatttcgttttgcccgtcgaaatcgatgatcaagttcacaatgtctatgttattaagaggccaggcgtcgatgagttcttgaacagggtgagtcaattgtacgaagttgttgtgttcacggcaagtgtttccaggtatgcaaacccccttttagatacgttggaccctaatggaaccatccatcatagattattcagagaagcttgttataactacgaaggtaactacatcaagaacttatctcagatcggaagaccattgtccgaaacaatcatcttagataattctccggcctcttacatctttcatccgcaacatgctgttccgatatcttcttggttctctgatactcatgataatgagttattagatattatcccacttttggaggacctttcttctggaaacgtgttggatgtggggagcgtgttggatgtgacgatatga

SEQ ID NO: 7231 - DNA, 1617 bp, Saccharomyces cerevisiae
atggtaaataaggtggttgatgaggttcagcggttggtgagcgcaataattctcacttcgtttatgacggggttattcattttgtcactatggaagaattacgtgacagttcatttccaacataaaaatgatccaagagatacaagaagttcgagaaccaagatccagccaaatgacaagaagaagaaacgaccagcacgtcactctagacctttgtcaatatcttccacaacgcccttagatttacagcgggatcaggaaaataatattgaatatgaccgtactgtgactagcaagctgtccatgactagtaatgcctctttatcagagaacggtgatggaaatgctaatattaaaatggaaacgaatgtgaaccaagccccatatgctgcagagaatcccttccaaaacattgcgcttgcggaggataccaagctggtacctgacttaaagtactattataaagagtatggtattgatattgaagaatttgaggtggagacagacgacggttttatcattgatttgtggcacttcaagtccaggttaaacgatggcgtagaggaagtgaaacgtgaacccattttgctattacacggtcttttgcaaagttgcggggccttcgcatcttcaggtagaaaatctctggcatacttcctttatgaatctggatttgatgtttggttggggaataacagatgtggcttaaatgccaagtggaacatgaaaaaattaggtaatgatcattccaaaaaatgggattgggatatgcaccagatggttcaatacgatttaaaagcacttataaattatgtacttgatagtaccggatatgctaaactatcgctcgtggcgcattcacaaggtacaacacaagggtttatggggcttgtcaacggtgagaaactatacgcaagtgattttaaattagtcgataagctggaaaactttgttgctttggcacctgcagtgtaccctggacctttattggatgaaaaagcatttgtgaggctaatggcaaaaggtattgattctccgtggtactttggtagaagatcgtttatacctcttatgatgacaatgagaaaactaatggttgggaccaagattttttcgttcctctcatacatcatgtttaactacctatttgattggaacgatgtcttatgggatagagttttaagggaccgaaatttcttattttcaccagtccatatttccgtcaaactaatgcaatggtggttgtcacctcttcctaataagctaagttttaagaagggtgcagagaaaatttttccagataaaaagacatggtttcctattgccaagaatgatgatgacagtggcaataatttggataacaacaaactacacttaaatccgaaaagacaaaatagtgaagaatttccacacattataatgtttattccaaagcaagatagattagtagatggtgaacgattaattaatcacttcattaatcatgaagcaaatgcagtgtacaaaatctggtatattgatgagtattcccatctggacgttttatgggcgcatgatgttatagatagaattggtaagccaatgatagaaaatttgaggtttcctaatgcaaggtga

SEQ ID NO: 7232 - DNA, 1617 bp, Artificial Sequence
  Description of Artificial Sequence: Synthetic polynucleotide
atggtaaataaggtggttgatgaggttcagcgtttggtgagcgcaataattctcacttcttttatgacggggttattcattttgtccttatggaagaattacgtgacagttcatttccaacataaaaatgatccaagagatacaagaagtagtagaaccaagatccagccaaatgacaagaagaagaaaaggccagcacgtcactctagacctttgagcatatcttccacaacgcccttagatttacagagagatcaggaaaataatattgaatatgaccgtactgtgactagcaagttatccatgactagtaatgcctctttatctgagaacggtgatggaaatgctaatattaaaatggaaacgaatgtgaaccaagccccatatgctgcagagaatcccttccaaaacattgcgcttgcggaggataccaagttggtacctgacttaaagtactattataaagagtatggtattgatattgaagaatttgaggtggagacagacgacggttttatcattgatttgtggcacttcaagtccaggttaaacgatggcgtagaggaagtgaaacgtgaacccattttgttattacacggtcttttgcaaagttgcggggccttcgcatcttctggtagaaaatctttggcatacttcctttatgaatctggatttgatgtttggttggggaataacagatgtggcttaaatgccaagtggaacatgaaaaaattaggtaatgatcattccaaaaaatgggattgggatatgcaccagatggttcaatacgatttaaaagcacttataaattatgtacttgatagtaccggatatgctaaattatctctcgtggcgcattctcaaggtacaacacaagggtttatggggcttgtcaacggtgagaaactttacgcaagtgattttaaattagtcgataagttggaaaactttgttgctttggcacctgcagtgtaccctggacctttattggatgaaaaagcatttgtgaggttgatggcaaaaggtattgattctccgtggtactttggtagaagatcttttatacctcttatgatgacaatgagaaaattaatggttgggaccaagattttttctttcctctcttacatcatgtttaactacttgtttgattggaacgatgtcttatgggatagagttttaagggacagaaatttcttattttctccagtccatatttccgtcaaattaatgcaatggtggttgtctcctcttcctaataagttgagttttaagaagggtgcagagaaaatttttccagataaaaagacatggtttcctattgccaagaatgatgatgacagtggcaataatttggataacaacaaattacacttaaatccgaaaagacaaaatagtgaagaatttccacacattataatgtttattccaaagcaagatagattagtagatggtgaaagattaattaatcacttcattaatcatgaagcaaatgcagtgtacaaaatctggtatattgatgagtattcccatttggacgttttatgggcgcatgatgttatagatagaattggtaagccaatgatagaaaatttgaggtttcctaatgcaaggtga

SEQ ID NO: 7233 - DNA, 540 bp, Saccharomyces cerevisiae
atgatatcatatgaattccaaactcatctaccgaaaggaaaagatagctcattgaacgcttcatccgaaaacaaagaattgtatgtacaagccacgcactttaataacacaattctattgcaaatcagactaaatggggaaatggattccacctatgaggtatcttcaaaaggactaaacccaattctcgatatcaacgtaccactggcaggaaacctaggaaacacgggtggcgattatgacgatgaggaagaagaatttgtaagagaccatttatctgattatcaagtggttaccaagttgggagatagtgccgatcctaaagtacccgtggtatgcgtacagattgccgaactatataggagagttattctaccagaagtgagcggtacgatggcccaagacaacatgcaattcagcttgctgatatccatgagcagtaagatatggagagcaacgaaggaacaaagcgctgacgataatgattttggcaaattagtttttgtgttaaagtgtatcaaagatatgtatgcaaagtga

SEQ ID NO: 7234 - DNA, 540 bp, Artificial Sequence
  Description of Artificial Sequence: Synthetic polynucleotide
atgatatcttatgaattccaaactcatttaccgaaaggaaaagatagctctttgaacgcttcttccgaaaacaaagaattgtatgtacaagccacgcactttaataacacaattttattgcaaatcagattgaatggggaaatggattccacctatgaggtatcttctaaaggattgaacccaattctcgatatcaacgtaccattggcaggaaacttgggaaacacgggtggcgattatgacgatgaggaagaagaatttgtaagagaccatttatctgattatcaagtggttaccaagttgggagatagtgccgatcctaaagtacccgtggtatgcgtacagattgccgaattgtataggagagttattttaccagaagtgagcggtacgatggcccaagacaacatgcaattcagcttgttaatatccatgagcagtaagatatggagagcaacgaaggaacaaagcgctgacgataatgattttggcaaattagtttttgtgttaaagtgtatcaaagatatgtatgcaaagtga

SEQ ID NO: 7235 - DNA, 753 bp, Saccharomyces cerevisiae
atgcctatcaatcaaccgtcgggacagattaagttaactaatgtttcattagtgagattaaaaaaggctcgcaagagatttgaagtcgcgtgctaccaaaataaggtccaagactatcgaaaaggaattgaaaaagatctggatgaagtgctgcagatacatcaagttttcatgaatgtttcgaaaggcttggttgctaataaggaagatctacaaaagtgtttcgggactacaaatgttgatgatgtcatcgaggagatcatgcataagggagagattcaattatcggaaaaagaaagacaattaatgcttaataaagttaataacgaaatgcttacaatagttagcgctaaatgtataaatcctgtgtcaaagaaaagatatccgcccacaatgatccacaaagctttacaggaactgaagttcagccctgttattaacaaacctgccaaattgcaagctttagaggctatcaaattattggtttctaagcaaattattccaatagtaagggcgaagatgaaagtcaaagtggccataagtgagccatctagacaacccgaacttattgagaagattagtaaattgatagcttcatcgcctggagagtcaacgaagccggaattggatccttggacatgtacaggtcttatcgatcctgtcaattatagagatttgatgaccctatgtgataaaaagggaactgtgcaagtcttggatatggcagtcatagataatacaacgcataactaa

SEQ ID NO: 7236 - DNA, 753 bp, Artificial Sequence
  Description of Artificial Sequence: Synthetic polynucleotide
atgcctatcaatcaaccgtctggacagattaagttaactaatgtttctttagtgagattaaaaaaggctcgcaagagatttgaagtcgcgtgctaccaaaataaggtccaagactatagaaaaggaattgaaaaagatttggatgaagtgttacagatacatcaagttttcatgaatgtttccaaaggcttggttgctaataaggaagatttgcaaaagtgtttcgggactacaaatgttgatgatgtcatcgaggagatcatgcataagggagagattcaattatctgaaaaagaaagacaattaatgcttaataaagttaataacgaaatgcttacaatagttagcgctaaatgtataaatcctgtgagcaagaaaagatatccgcccacaatgatccacaaagctttacaggaattgaagttcagccctgttattaacaaacctgccaaattgcaagctttagaggctatcaaattattggtttctaagcaaattattccaatagtaagggcgaagatgaaagtcaaagtggccataagtgagccatctagacaacccgaacttattgagaagattagtaaattgatagcttcttctcctggagagtctacgaagccggaattggatccttggacatgtacaggtcttatcgatcctgtcaattatagagatttgatgaccttatgtgataaaaagggaactgtgcaagtcttggatatggcagtcatagataatacaacgcataactga

SEQ ID NO: 7237 - DNA, 1632 bp, Saccharomyces cerevisiae
atgatggactcgtcaagcaaaagcttaactcagtatataccctcacccatgggatctctatcaaggctaaagcagaagggtgtggacaattttcagaaggtgaaaaaatccggtaaatccatctataattacaactactcaaaattcgttcctcatccattttcaactattgatgaaagtgttaaacactctgaaagtgggcggtatgatgatttggagataattcgtccaacaaaagaaaaggaagtaacaagttctgtgtacaaaagaaacagtggcaagtctctgaatacagaatctcagttttcactgggagattcagatgcagccactttggtgaattcagtcgctactttcaagcttaacaatgcttctacatccacttcactggtgtcttcatcttcaactgtatgttctcaagcgaagtcctcgttacgttccccaacaagtcgtctcaatgatacaaaaatcaaagaggaaaacaattatatttccagcgtgaaagactattgcggtccaatgagaaaatccatggtaaagacggaaatcctcattgaagaacctttgaatcctactaccgatatcaagtcttttataaactcatacaaccatggcaaagcgtatagtctaggtgaaactcaacatttacattattatcagttgccattcccatggagggaaaacagatacataatccatggctataggttttacaatacccattccaaatctttgttgtctatctttaactggtacggctggcataatgaaacttcaaatatttggtctcatttgttaggagccatttatataatctacttggcaatttacgatttccctcagtctgaagtttggcggaattcccaggttccaccacaggctagatggattgttttcatgtttttggcagctgcgttgaaatgtatgctaagctccgtgttttggcatactttcaacggaacgtccttcttgaagctacgttctaaatttgcgtgtgtcgactatagcggtattacgatcttaattacagcttcgatattgacaacggagtttgttaccatgtattcatgttactgggcgatgtacacttacatgagtatttctctggcgctgggtgtatttggtgtgtttatgaattggtcgcctcgctttgatagacctgaagcaaggccattaagaattagattcttcattttgctggctactatgggtgtattgtcgtttttacatttgatatttttgactgatcttcattatgctgcaacgctatttagccccgtcacatacaaatctgttgtttggtatttggttggtgtggtattttacggttcgttcattcctgaacggttcagatctgacgttcaggttgataagaccattccaacaaactacgaattatctactgatttagaaatcatcacaaagcaaagggaaattcattttagagaggtgccaacagcccattccaaatgcagttcctgtccgtctcatgccaaatcatttaaatctctatggtgggttgactattttggttgttcgcacactttttggcatttcttcgtagtgttgggtgtcatcggccattatagagctattttagatatgtttgccaagaggtggattttgtcatga

SEQ ID NO: 7238 - DNA, 1632 bp, Artificial Sequence
  Description of Artificial Sequence: Synthetic polynucleotide
atgatggactcttctagcaaaagcttaactcagtatataccctctcccatgggatctttatctaggttaaagcagaagggtgtggacaattttcagaaggtgaaaaaatccggtaaatccatctataattacaactactctaaattcgttcctcatccattttccactattgatgaaagtgttaaacactctgaaagtgggcgttatgatgatttggagataattcgtccaacaaaagaaaaggaagtaacaagttctgtgtacaaaagaaacagtggcaagtctttgaatacagaatctcagttttctttgggagattctgatgcagccactttggtgaattctgtcgctactttcaagcttaacaatgcttctacatccacttctttggtgtcttcttcttctactgtatgttctcaagcgaagtcctctttacgttccccaacaagtcgtctcaatgatacaaaaatcaaagaggaaaacaattatatttccagcgtgaaagactattgcggtccaatgagaaaatccatggtaaagacggaaatcctcattgaagaacctttgaatcctactaccgatatcaagtcttttataaactcttacaaccatggcaaagcgtatagtttgggtgaaactcaacatttacattattatcagttgccattcccatggagggaaaacagatacataatccatggctataggttttacaatacccattccaaatctttgttgtctatctttaactggtacggctggcataatgaaacttccaatatttggtctcatttgttaggagccatttatataatctacttggcaatttacgatttccctcagtctgaagtttggagaaattcccaggttccaccacaggctagatggattgttttcatgtttttggcagctgcgttgaaatgtatgttaagctccgtgttttggcatactttcaacggaacgtccttcttgaagttgcgttctaaatttgcgtgtgtcgactatagcggtattacgatcttaattacagcttctatattgacaacggagtttgttaccatgtattcttgttactgggcgatgtacacttacatgagtatttctttagcgcttggtgtatttggtgtgtttatgaattggtctcctcgctttgatagacctgaagcaaggccattaagaattagattcttcattttgttggctactatgggtgtattgagttttttacatttgatatttttgactgatcttcattatgctgcaacgttgtttagccccgtcacatacaaatctgttgtttggtatttggttggtgtggtattttacggttctttcattcctgaaagattcagatctgacgttcaggttgataagaccattccaacaaactacgaattatctactgatttagaaatcatcacaaagcaaagggaaattcattttagagaggtgccaacagcccattccaaatgcagttcctgtccgtctcatgccaaaagttttaaatctctttggtgggttgactattttggttgttctcacactttttggcatttcttcgtagtgttgggtgtcatcggccattatagagctattttagatatgtttgccaagaggtggattttgtcttga

SEQ ID NO: 7239 - DNA, 5619 bp, Saccharomyces cerevisiae
atggaagattctgacctgtctataaccaatataagagattttcttaccgagctccccaaactcgcgaaatgcgaatatagcgaaaccactagttatttactatggaaaaccttaaatctacgccttaagcatagtgataacgatataaactggcgctctctcgtttcaatactcaattctgaagcctgggaaaacgaaaagtacagagacatactaaatggaagaaagtggaggaccctggagttcgagaatgaccaccactctgtgggtaatatgcatattggaacagcgtgtacgcgtttatgcttcccctctgagacaatttattactgttttacgtgctccacaaatccattgtatgaaatatgtgagctttgtttcgataaagaaaaacatgtaaatcattcttatgttgctaaagtggtaatgcgcccagaaggcagaatatgccattgtggtgacccctttgcctttaatgacccaagcgacgcgttcaagtgcaagaacgaattaaataatattcctatttctaacgacaatagtaacgtaaccgatgatgaaaacgtaatctccctattgaattatgttctggattttttaattgatgtaactgtttcatacaaagaggaggcagaagcccattcaagcgagagaaaagcatcctccctaatgcatcctaatcaaaacagcattactgatgatataatggaaaaacacgaatgtgaaccattggtcaatgatgaaaattttgttttctttgataacaattggtccaatacgagaaaagaagcacatatggagtgggctattcaaatcgaagaagaagagtgtaacgtacactacatggatttagcatctacaataacaagaattttgaatacaccggttgaatatgcaatctcaataacgaaggctttagaagattcacacgatgtagtgactgtgctacaaagtgagaattttttcgaaatagatcaaatagccaaggagtttcaaaaggaaaacatagtagttcatgtaagaaaagcggatgatatattcaagagaaagttaacagatgatttaacagattggttatattctctgtgctttaaggcggccacgtctttgcaaaataaatatgctcttagaatttccatgctagatgtttggtattcccatttttctaaaatgagagtatctcccacaaataccaatcctgacttttctaagattaacttattaggtggattcttaatatctaacgaagatagtgatgaatcatggtttaaaccttggtcattagagaacattgaagacgaaagaatttcaaaaatactcactaattacaatgaaaggttgatcagagcccattcgccgaacacagtaagccatttctacaatttctatggatctagattccaatatattatcatcaattctattaatatcctctcaaaaaaatctaaattcaaaatgttaaagatcatggcgtcattattctcgttaagggatgaaagcagaaagtttcttgccgcacaatatattgatgtttatctatcggtcttgtatgatgcagttgcatcagatgctaaagaatgtcaggtaactcttatgagtatattagggcaatacactttccaagaccccagcatagcaaatatgactataagctcgggattcattgaacgaactattagatttgcttttactctcatggcattcaatccagaagacttgatgtcatatttgcccatctctttatacaatggctttaagttgcccaccgaaacaatacgaaatcgaaggacaattatttgctttaaagacctttgtacgataatgtcagcgaacactgttccggaagaactactttcaaatgaggcaatttttaacgcaataattgagtccttctctgaattcagtaacgtgctgccattgaaaagggaaactaaagaacacgtggaggttgaaaactttgatttttctgcattttatttttttttctcatcaatactaataatgacagatggatacacacgtagtatatctttggtcaaagatgcggctttccgtaagcaaatcgtccttaaactacttgatgttgctcaaaccagggaatttgaatcactaaccaattctagaaaagctatatcacctgataacgcatcaacgaatgaaaatgattcgaacaaagcgactttgtctacagtcagagagacgatatgcaattatgtcgcagagactattaatttccaggtaggtgtaaatacacagtattttttcaatccaatgtcatatttgttcaaatttgttattcaatggagtcaatgtggtagatatgagccaattcctgcttctttgacaaactacattaatctcttcgaagtttttcaagataagcagaaggctttatatatatcagaatctgctttgtcaaccctagtcctaatcgggcaaataaacgtcggtttctgggtaagaaacggaactccaattactcaccaggcccggatgtatacaaaatacagtatgcgagaatttacttatattagtgacattttcaatgtgcaatttagtatggcaatgtgcaatcctgatgaactgatggttacttacctctcaaggtggggtttgaagcactgggcaaatggtgtacctatgtatgattatcctgatacagaaacaactgtagccgttgttaatgaatgcattctgttattgattcaattgcttactgaagtgagatcattggtcatgaaatcatcaaaggaaggcttcgagagaacgttcaaatcagaaataattcatgccctttgctttgatacatgctcttacgcacaaattgttaactgtattccagaacatatcaccaagcacccttcatttgatatatatctcgaaaaatacgccaattacacttctcctgtaagcttgactgacaatggcattttcgtgttgaaagaaaagtataaagatgagattgatccttattatatagggttgtcttccagtaggaggtatgatgtagagaaaaatatcaggctgaatatggcaaatttgaagaaaatgaaatatgaagatacttttgtaccagcaaaaaaggttaaagatttgttgaagaatacattattttctgggctgtattcaatatcatcagtgaatacttttggtttatttttgaaaaatactttagatcacattataaaatatgattatgacaatttattgccgagagtggttcatttgattcatttatgcgtggttaataatctgaatgaatttatggggatactgtggcatgaatacgcaattgtggacacagaattctgtcattaccacagcattggttctatcctgtattactgtttgttgaaggataatttttcggaatctcatggtaagattagggaaattttcaggtatttaatggaaacagcgcctcacgtaaatgtaaacagttatttgagggagcaaaccacgtcatatacaccaggaatattgtggcctacaaaggaagataaaagccacaaggataaagaatttgaaaggaaaaaacatcttgctcgattgagaaagaaaaaattaatgaagaagttggctcaacagcaaatgaaattcatggaaaacaatagtgtagatacttccgatattagtacacccagaaccacatcacctagtttatctcccactagaataaatgcagagaatagtagtaacacaatcaacagttgctgcgatgatgattgcgtattttgcaagatgccgaaggatgacgatgtatttgtttatttttcataccaagaacggaacatatgtgatcatggaattgattttacgaatcctacagatgttaatagaataaattcgctgttcagtggtaagcaaacaaaagacagtgcaatccaagaaaacccccaggatgatgatggaacgagattgaaatttactagctgtgaaccagtattaagagcatgcgggcatgggtctcataccaaatgtttaagtggccatatgaagtcgattcgcggaatacaaaaccaaactacaaaaaatattccattatcgtatggttcagggttgatatattgtcccgtatgcaattccttaagtaattcatttctaccaaaaacaaatgatatagataagagaacttcgagccagttttttatgtgtattgaaaagcgaagtgaagcggaagaaaaccttgacccaatgagctctatttgtattaaagcagcgatgattctaggtgatcttcagggtaaaaaagtcacgactatcgaagatgcatataaagttgttaatagtgtttttattaatactatttcaaatactgagctcagattaagatcgcacaaaaaggaaggaaaaatagtgaatatggaaagaatatccagtcagtgcattttaaccttacatttagtttgtgagctaaagtcgtttatttacaaaaaatttgttaattcaaaaacattcagcagcgaaatctctcgtaaaatatggaattggaatgagtttctaataaagggtaataatgtgaatctacttttgtatatgagtcaaaattttgataatattgatggaggaaaaaccccgcaaccgcctaacctatgtatctatgaaatgttcaaaagaaggttccatcaactactactgttgcttgcaagagatatgatgagagtaaacttttacaaagactgtcgaaataaaatcaaaatatcatcaaacggatctgaggaaccatcgacaagcttttcatatctattcaatacttttaaaaagtatgttgatctctttaaaccagacgacgttcggtttgattttacaagtttagagaaaattaaagactttatatgctctctattactagagtcattgtccattttttgtagaagaaccttcttattattcaacattcagtatgatgatgatggtgatggtgataataataataaccgcagcaataatttcatggacgtcaaacagcgtgaaatagagcttattttccggtattttaaattacccaatttaactcactttttgaaggattttttctacaacgaactaacacaaaatatagaaaggtataatgatggtaatgataatttgagaattcagcaagtaatatatgacatggtgcagaacataaacacaagagcatatccttcaccagagcatatccagcttatcgaactaccattgaacctttccaaattttcccttgataatgatgaaatatcgaataaatgtgataaatacgaaatcgcagtatgcttgttgtgtggccaaaaatgccatattcaaaaaagcatagcactgcaaggttatttacagggggaatgtactgatcatatgagaaatggatgcgaaatcacctccgcttacggagttttcttaatgaccggcacaaatgcgatatatctgtcatacggcaaaagaggtacattttatgctgcaccttatctaagtaaatacggagagaccaacgaagactacaaattcggtactcccgtctatttgaatcgggcgagatacgcgaatctagcgaatgagattgtttttggcaacatgattccgcacatagtgttccgactaacggacggcagtgcagatcttggtgggtgggagactatgtag

SEQ ID NO: 7240 - DNA, 5619 bp, Artificial Sequence
  Description of Artificial Sequence: Synthetic polynucleotide
atggaagattctgacttgtctataaccaatataagagattttcttaccgagctccccaaactcgcgaaatgcgaatatagcgaaaccactagttatttattatggaaaaccttaaatttacgccttaagcatagtgataacgatataaactggcgctctctcgtttctatactcaattctgaagcctgggaaaacgaaaagtacagagacatattgaatggaagaaagtggaggaccttagagttcgagaatgaccaccactctgtgggtaatatgcatattggaacagcgtgtacgcgtttatgcttcccctctgagacaatttattactgttttacgtgctccacaaatccattgtatgaaatatgtgagctttgtttcgataaagaaaaacatgtaaatcattcttatgttgctaaagtggtaatgcgcccagaaggcagaatatgccattgtggtgacccctttgcctttaatgacccaagcgacgcgttcaagtgcaagaacgaattaaataatattcctatttctaacgacaatagtaacgtaaccgatgatgaaaacgtaatctccttattgaattatgttttggattttttaattgatgtaactgtttcttacaaagaggaggcagaagcccattctagcgagagaaaagcatcctccttgatgcatcctaatcaaaacagcattactgatgatataatggaaaaacacgaatgtgaaccattggtcaatgatgaaaattttgttttctttgataacaattggtccaatacgagaaaagaagcacatatggagtgggctattcaaatcgaagaagaagagtgtaacgtacactacatggatttagcatctacaataacaagaattttgaatacaccggttgaatatgcaatctccataacgaaggctttagaagattctcacgatgtagtgactgtgttgcaaagtgagaattttttcgaaatagatcaaatagccaaggagtttcaaaaggaaaacatagtagttcatgtaagaaaagcggatgatatattcaagagaaagttaacagatgatttaacagattggttatattctttatgctttaaggcggccacgtctttgcaaaataaatatgctcttagaatttccatgcttgatgtttggtattcccatttttctaaaatgagagtatctcccacaaataccaatcctgacttttctaagattaacttattaggtggattcttaatatctaacgaagatagtgatgaaagttggtttaaaccttggtctttagagaacattgaagacgaaagaatttccaaaatactcactaattacaatgaaaggttgatcagagcccattctccgaacacagtaagccatttctacaatttctatggatctagattccaatatattatcatcaattctattaatatcctctctaaaaaatctaaattcaaaatgttaaagatcatggcgtctttattctctttaagggatgaaagcagaaagtttcttgccgcacaatatattgatgtttatttaagtgtcttgtatgatgcagttgcatctgatgctaaagaatgtcaggtaactcttatgagtatattagggcaatacactttccaagaccccagcatagcaaatatgactataagcagtggattcattgaaagaactattagatttgcttttactctcatggcattcaatccagaagacttgatgtcttatttgcccatctctttatacaatggctttaagttgcccaccgaaacaataagaaatagaaggacaattatttgctttaaagacctttgtacgataatgagtgcgaacactgttccggaagaattgctttctaatgaggcaatttttaacgcaataattgagtccttctctgaattcagtaacgtgttaccattgaaaagggaaactaaagaacacgtggaggttgaaaactttgatttttctgcattttatttttttttctcttctatattaataatgacagatggatacacacgtagtatatctttggtcaaagatgcggctttccgtaagcaaatcgtccttaaattacttgatgttgctcaaaccagggaatttgaatctttaaccaattctagaaaagctatatctcctgataacgcaagcacgaatgaaaatgattccaacaaagcgactttgtctacagtcagagagacgatatgcaattatgtcgcagagactattaatttccaggtaggtgtaaatacacagtattttttcaatccaatgtcttatttgttcaaatttgttattcaatggagtcaatgtggtagatatgagccaattcctgcttctttgacaaactacattaatctcttcgaagtttttcaagataagcagaaggctttatatatatctgaatctgctttgtccaccttggtcttgatcgggcaaataaacgtcggtttctgggtaagaaacggaactccaattactcaccaggccagaatgtatacaaaatacagtatgagagaatttacttatattagtgacattttcaatgtgcaatttagtatggcaatgtgcaatcctgatgaattgatggttacttacctctccaggtggggtttgaagcactgggcaaatggtgtacctatgtatgattatcctgatacagaaacaactgtagccgttgttaatgaatgcattttattattgattcaattgcttactgaagtgagaagtttggtcatgaaatcttccaaggaaggcttcgagagaacgttcaaaagtgaaataattcatgccctttgctttgatacatgctcttacgcacaaattgttaactgtattccagaacatatcaccaagcacccttcttttgatatatatctcgaaaaatacgccaattacacttctcctgtaagcttgactgacaatggcattttcgtgttgaaagaaaagtataaagatgagattgatccttattatatagggttgtcttccagtaggaggtatgatgtagagaaaaatatcaggttgaatatggcaaatttgaagaaaatgaaatatgaagatacttttgtaccagcaaaaaaggttaaagatttgttgaagaatacattattttctgggttatattctatatcttctgtgaatacttttggtttatttttgaaaaatactttagatcacattataaaatatgattatgacaatttattgccgagagtggttcatttgattcatttatgcgtggttaataatttgaatgaatttatggggatattatggcatgaatacgcaattgtggacacagaattctgtcattaccacagcattggttctatcttatattactgtttgttgaaggataatttttctgaatctcatggtaagattagggaaattttcaggtatttaatggaaacagcgcctcacgtaaatgtaaacagttatttgagggagcaaaccacgtcctatacaccaggaatattgtggcctacaaaggaagataaaagccacaaggataaagaatttgaaaggaaaaaacatcttgctagattgagaaagaaaaaattaatgaagaagttggctcaacagcaaatgaaattcatggaaaacaatagtgtagatacttccgatattagtacacccagaaccacatctcctagtttatctcccactagaataaatgcagagaatagtagtaacacaatcaacagttgctgcgatgatgattgcgtattttgcaagatgccgaaggatgacgatgtatttgtttatttttcttaccaagaaagaaacatatgtgatcatggaattgattttacgaatcctacagatgttaatagaataaattctttattcagtggtaagcaaacaaaagacagtgcaatccaagaaaacccccaggatgatgatggaacgagattgaaatttactagctgtgaaccagtattaagagcatgcgggcatgggtctcataccaaatgtttaagtggccatatgaagtctattcgcggaatacaaaaccaaactacaaaaaatattccattatcttatggttctgggttgatatattgtcccgtatgcaattccttaagtaattcttttttaccaaaaacaaatgatatagataagagaacttccagccagttttttatgtgtattgaaaagagaagtgaagcggaagaaaaccttgacccaatgagctctatttgtattaaagcagcgatgattttgggtgatcttcagggtaaaaaagtcacgactatcgaagatgcatataaagttgttaatagtgtttttattaatactatttctaatactgagctcagattaagaagtcacaaaaaggaaggaaaaatagtgaatatggaaagaatatccagtcagtgcattttaaccttacatttagtttgtgagttgaagagctttatttacaaaaaatttgttaattctaaaacattcagcagcgaaatctctcgtaaaatatggaattggaatgagtttttaataaagggtaataatgtgaatttacttttgtatatgagtcaaaattttgataatattgatggaggaaaaaccccgcaaccgcctaacttgtgtatctatgaaatgttcaaaagaaggttccatcaattattattattgcttgcaagagatatgatgagagtaaacttttacaaagactgtaggaataaaatcaaaatatcttccaacggatctgaggaaccatctacaagcttttcttatcttttcaatacttttaaaaagtatgttgatctctttaaaccagacgacgttagatttgattttacaagtttagagaaaattaaagactttatatgctctttattattggagtctttgtccattttttgtagaagaaccttcttattattcaacattcagtatgatgatgatggtgatggtgataataataataaccgcagcaataatttcatggacgtcaaacagcgtgaaatagagcttattttcagatattttaaattacccaatttaactcactttttgaaggattttttctacaacgaattaacacaaaatatagaaaggtataatgatggtaatgataatttgagaattcagcaagtaatatatgacatggtgcagaacataaacacaagagcatatccttctccagagcatatccagcttatcgaattaccattgaacctttccaaattttcccttgataatgatgaaatatccaataaatgtgataaatacgaaatcgcagtatgcttgttgtgtggccaaaaatgccatattcaaaaaagcatagcattacaaggttatttacagggggaatgtactgatcatatgagaaatggatgcgaaatcacctccgcttacggagttttcttaatgaccggcacaaatgcgatatatttatcttacggcaaaagaggtacattttatgctgcaccttatttgagtaaatacggagagaccaacgaagactacaaattcggtactcccgtctatttgaatagagcgagatacgcgaatttggcgaatgagattgtttttggcaacatgattccgcacatagtgttcagattgacggacggcagtgcagatcttggtgggtgggagactatgtga

SEQ ID NO: 7241 - DNA, 723 bp, Saccharomyces cerevisiae
atgtggtcatcactttttggttggacatcaagtaatgccaagaataaagagtcaccaacaaaggccatagtgcggttgagggagcatatcaaccttctatccaaaaagcaatcgcatttacgtactcaaattacaaatcaagagaatgaagctagaatctttttgacgaagggcaataaagtaatggcgaagaatgcacttaaaaagaagaagacaatcgaacaacttttaagtaaggtagaaggcacaatggagtctatggaacagcagctattctctatagaaagtgcaaacttaaatctagagacaatgagggctatgcaggaaggtgctaaggcaatgaaaactattcacagtggccttgacatagataaagtggatgaaactatggacgagataagggagcaagtcgaattaggagatgaaataagcgacgctatatccaggcctttaattactggggcaaacgaggtggatgaagatgagctggacgaggaattggacatgctggctcaagaaaatgctaaccaagaaacgtccaagatcgttaataataatgttaatgcggcgcctatctcagagaacaaagtctcactacctagtgttccaagtaataaaattaaacaaagtgagaactctgtgaaggacggggaagaggaagaggatgaagaagatgaagatgaaaaagcattaagagaactacaagcagaaatggggctttga

SEQ ID NO: 7242 - DNA, 723 bp, Artificial Sequence
  Description of Artificial Sequence: Synthetic polynucleotide
atgtggtcttctctttttggttggacatctagtaatgccaagaataaagagtctccaacaaaggccatagtgagattgagggagcatatcaaccttctttccaaaaagcaatctcatttacgtactcaaattacaaatcaagagaatgaagctagaatctttttgacgaagggcaataaagtaatggcgaagaatgcacttaaaaagaagaagacaatcgaacaacttttaagtaaggtagaaggcacaatggagtctatggaacagcagttattctctatagaaagtgcaaacttaaatttggagacaatgagggctatgcaggaaggtgctaaggcaatgaaaactattcacagtggccttgacatagataaagtggatgaaactatggacgagataagggagcaagtcgaattaggagatgaaataagcgacgctatatccaggcctttaattactggggcaaacgaggtggatgaagatgagttggacgaggaattggacatgttggctcaagaaaatgctaaccaagaaacgtccaagatcgttaataataatgttaatgcggcgcctatctctgagaacaaagtctctttgcctagtgttccaagtaataaaattaaacaaagtgagaactctgtgaaggacggggaagaggaagaggatgaagaagatgaagatgaaaaagcattaagagaattacaagcagaaatggggctttga

SEQ ID NO: 7243 - DNA, 1023 bp, Saccharomyces cerevisiae
atgaacataaaggatagaacttcagaatttcaacaaagtgtgttgagttacaagaaaagaaacaaaaactttagagaacagcagagggaacgtctacaagagaaagaaagtgaaaactttgccaacaacacaaccggcaatgggaaaagtgtctctgagtttcaaaaaaaggcttctggcatagctcacgaaatttcatccaccgcacaattattatcgaaattagcagtgctggccaaaaggaaaccgatgttcaatgacaaccctgtagagattgccgagctatcatttttgatcaaaaggaagatttatgccatcgaacaaagtttagtgcaattaagtcagctcaagaaaaccgacgtgaatggcaacacatcaaatcaatcttctaagcaacctagtgccgtacagcactccaaaaatgtcgtaaatcttttaaacacgcaaatgaaaaacatatcaggaagttttaaagacgtattggaggaaaggcaacgactagaaatggctaacaaagacagatggcaaaaactaaccaccgacactggacatgcaccagctgatgaccaaacgcaaagcaatcacgccgcggacttgaccacgtataacaactccaacccattcatgacctcactactagatgaatcctcagaaaagaataacaactcgtccaaccaaggagaactgtctttccctcaaaacgactctcaactaatgttaatggaagagggacagttatccaataacgtctacttacaagaaagaaatagggcggtggagacaatagaatccacaatccaggaagtgggaaatctcttccaacaactggcctccatggttcaagaacagggcgaagtaatccaaaggattgatgcaaacgtagacgacatcgatttaaacattagtggtgctcaaagggaacttttgaaatacttcgacaggataaagagtaatagatggttagccgcaaaggttttttttataatctttgtatttttcgttatttgggttttagtcaattaa

SEQ ID NO: 7244 - DNA, 1023 bp, Artificial Sequence
  Description of Artificial Sequence: Synthetic polynucleotide
atgaacataaaggatagaacttctgaatttcaacaaagtgtgttgagttacaagaaaagaaacaaaaactttagagaacagcagagggaacgtttacaagagaaagaaagtgaaaactttgccaacaacacaaccggcaatgggaaaagtgtctctgagtttcaaaaaaaggcttctggcatagctcacgaaatttcttccaccgcacaattattatccaaattagcagtgcttgccaaaaggaaaccgatgttcaatgacaaccctgtagagattgccgagttatcttttttgatcaaaaggaagatttatgccatcgaacaaagtttagtgcaattaagtcagctcaagaaaaccgacgtgaatggcaacacaagtaatcaatcttctaagcaacctagtgccgtacagcactccaaaaatgtcgtaaatcttttaaacacgcaaatgaaaaacatatctggaagttttaaagacgtattggaggaaaggcaaagattagaaatggctaacaaagacagatggcaaaaattgaccaccgacactggacatgcaccagctgatgaccaaacgcaaagcaatcacgccgcggacttgaccacgtataacaactccaacccattcatgacctctttattagatgaatccagtgaaaagaataacaactcttccaaccaaggagaattatctttccctcaaaacgactctcaattgatgttaatggaagagggacagttatccaataacgtctacttacaagaaagaaatagggcggtggagacaatagaatccacaatccaggaagtgggaaatctcttccaacaattggcctccatggttcaagaacagggcgaagtaatccaaaggattgatgcaaacgtagacgacatcgatttaaacattagtggtgctcaaagggaacttttgaaatacttcgacaggataaagagtaatagatggttagccgcaaaggttttttttataatctttgtatttttcgttatttgggttttagtcaattga

SEQ ID NO: 7245 - DNA, 1257 bp, Saccharomyces cerevisiae
atgtctgccactctgttcaataacatcgaattgctgccccctgatgccctttttggtattaagcaaaggtacgggcaagatcaacgtgctaccaaggtcgacttgggtatcggggcctacagagacgacaacggtaaaccatgggtcttgccaagtgttaaagccgccgaaaagctaattcataacgacagctcctacaaccatgaatacctcggtattaccggtctgccaagtttgacatctaacgccgccaagatcatcttcggtacgcaatccgatgcctttcaggaagacagagtaatctcagtacaatcactgtctggtacgggtgctcttcatatatctgcgaagtttttttcaaaattcttcccagataaactggtctatttgtctaagcctacttgggccaaccacatggccatttttgagaatcaaggcttgaaaacggcgacttacccttactgggccaacgaaactaagtctttggacctaaacggctttctaaatgctattcaaaaagctccagagggctccattttcgttctgcactcttgcgcccataacccaactggtctggaccctactagtgaacaatgggttcaaatcgttgatgctatcgcctcaaagaaccacatcgccttatttgacaccgcctaccaagggtttgccactggagatttggacaaggatgcctatgctgtgcgtctaggtgtggagaagctttcaacggtctctcccgtctttgtctgtcagtcctttgccaagaacgccggtatgtacggtgagcgtgtaggttgtttccatctagcacttacaaaacaagctcaaaacaaaactataaagcctgctgttacatctcaattggccaaaatcattcgtagtgaagtgtccaacccacccgcctacggcgctaagattgtcgctaaactgttggaaacgccagaattaacggaacagtggcacaaggatatggttaccatgtcctccagaattacgaaaatgaggcacgcattaagagaccatttagtcaagttgggcactcctggcaactgggatcatatagtaaatcaatgcgggatgttctcctttacaggattgactcctcaaatggttaaacgacttgaagaaacccacgcagtttacttggttgcctcaggtagagcttctattgctggattgaatcaaggaaacgtggaatacgtggctaaagccattgatgaagtggtgcgcttctatactattgaagctaaattgtaa

SEQ ID NO: 7246 - DNA, 1257 bp, Artificial Sequence
  Description of Artificial Sequence: Synthetic polynucleotide
atgtctgccactttattcaataacatcgaattgttgccccctgatgccctttttggtattaagcaaaggtacgggcaagatcaacgtgctaccaaggtcgacttgggtatcggggcctacagagacgacaacggtaaaccatgggtcttgccaagtgttaaagccgccgaaaagttgattcataacgacagctcctacaaccatgaatacctcggtattaccggtttgccaagtttgacatctaacgccgccaagatcatcttcggtacgcaatccgatgcctttcaggaagacagagtaatctctgtacaaagtttatctggtacgggtgctcttcatatatctgcgaagtttttttccaaattcttcccagataaattggtctatttgtctaagcctacttgggccaaccacatggccatttttgagaatcaaggcttgaaaacggcgacttacccttactgggccaacgaaactaagtctttggacttgaacggctttttgaatgctattcaaaaagctccagagggctccattttcgttttgcactcttgcgcccataacccaactggtttggaccctactagtgaacaatgggttcaaatcgttgatgctatcgcctccaagaaccacatcgccttatttgacaccgcctaccaagggtttgccactggagatttggacaaggatgcctatgctgtgcgtttgggtgtggagaagctttctacggtctctcccgtctttgtctgtcagtcctttgccaagaacgccggtatgtacggtgagcgtgtaggttgtttccatttagcacttacaaaacaagctcaaaacaaaactataaagcctgctgttacatctcaattggccaaaatcattcgtagtgaagtgtccaacccacccgcctacggcgctaagattgtcgctaaacttttggaaacgccagaattaacggaacagtggcacaaggatatggttaccatgtcctccagaattacgaaaatgaggcacgcattaagagaccatttagtcaagttgggcactcctggcaactgggatcatatagtaaatcaatgcgggatgttctcctttacaggattgactcctcaaatggttaaaagacttgaagaaacccacgcagtttacttggttgcctctggtagagcttctattgctggattgaatcaaggaaacgtggaatacgtggctaaagccattgatgaagtggtgcgcttctatactattgaagctaaattgtga

SEQ ID NO: 7247 - DNA, 1776 bp, Saccharomyces cerevisiae
atgggcaaatataccaagactgcgatcttgtcagtttatgataagacaggtttattagacttagccaagggattggtagagaacaatgttcgtatcctagcatccggtggtacggccaacatggtcagagaagctggttttccggtcgacgatgtttcttcaattacgcatgcaccagaaatgctagggggtagagtcaagactcttcaccctgctgtgcatgcaggtattcttgccagaaatttagagggcgatgaaaaagatttaaaagagcagcacattgataaggtggattttgttgtatgtaatctatatccgttcaaagaaactgtggctaaaattggtgttacagttcaagaagctgtagaggagatcgacattggcggtgtgactttgttgagagcagccgcaaagaaccattccagagtgactattctttcagaccctaatgactattctatctttctgcaagacctgtctaaggacggtgaaatttctcaggatttaagaaatagatttgcacttaaggcgtttgaacatacggccgattatgatgcggccatttctgactttttcaggaaacagtactccgaagggaaagcccaattaccgctaagatatggttgtaatccccaccaaagacctgcacaagcttatatcactcagcaggaggagttgcccttcaaagtgctctgcggtacaccaggatatataaatcttttggatgccttgaactcatggcccttagtgaaagagttatctgcatcattgaacttgcctgcggcagcatcgttcaagcacgtttctccagcaggtgctgctgtgggacttccattatccgatgtggaaagacaagtttattttgtgaatgatatggaggatttatcaccattggcatgcgcatacgctagggcccgtggtgcagataggatgtcatcctttggtgatttcattgcattgtccaatattgtagatgtcgccactgcaaaaatcatctctaaagaagtttccgatggtgttattgctccagggtatgaaccagaggcattgaatatactatctaagaagaaaaacggaaaatactgtattttacaaatcgatccaaactatgttcctggccaaatggaatcccgagaggtttttggcgtaacgttacaacaaaagagaaacgatgcgatcataaaccaatccactttcaaagaaattgtctccaaaaacaaagcacttaccgagcaagccgttatcgatctaactgttgctacgctggttttaaaatacacacaatcaaattctgtttgctacgcaaagaatggtatggttgtggggcttggggccggccaacaatcgcgtatacactgtaccagattagctggtgacaagacggacaactggtggttgagacaacatccaaaggttttgaacatgaagtgggccaagggaattaagagagcggacaagtcgaatgcgattgatctttttgttacagggcaaagaatagaaggcccggaaaaggtggattacgaaagcaaatttgaagaagtccctgaacctttcaccaaagaagaaagactagaatggttaagcaaattaaacaatgtatcgttatcatccgatgcgttctttcccttcccagacaacgtttatagagctgtgcagtctggtgtaaagttcatcacggctccttcggggtctgtcatggacaaagttgtcttccaagcggcggattcatttgatatcgtctacgtggagaacccaattcgtttattccaccactaa

SEQ ID NO: 7248 - DNA, 1776 bp, Artificial Sequence
  Description of Artificial Sequence: Synthetic polynucleotide
atgggcaaatataccaagactgcgatcttgagtgtttatgataagacaggtttattagacttagccaagggattggtagagaacaatgttcgtatcttggcatccggtggtacggccaacatggtcagagaagctggttttccggtcgacgatgtttcttccattacgcatgcaccagaaatgttggggggtagagtcaagactcttcaccctgctgtgcatgcaggtattcttgccagaaatttagagggcgatgaaaaagatttaaaagagcagcacattgataaggtggattttgttgtatgtaatttatatccgttcaaagaaactgtggctaaaattggtgttacagttcaagaagctgtagaggagatcgacattggcggtgtgactttgttgagagcagccgcaaagaaccattccagagtgactattctttctgaccctaatgactattctatctttttgcaagacttgtctaaggacggtgaaatttctcaggatttaagaaatagatttgcacttaaggcgtttgaacatacggccgattatgatgcggccatttctgactttttcaggaaacagtactccgaagggaaagcccaattaccgttaagatatggttgtaatccccaccaaagacctgcacaagcttatatcactcagcaggaggagttgcccttcaaagtgctctgcggtacaccaggatatataaatcttttggatgccttgaacagttggcccttagtgaaagagttatctgcaagtttgaacttgcctgcggcagcatctttcaagcacgtttctccagcaggtgctgctgtgggacttccattatccgatgtggaaagacaagtttattttgtgaatgatatggaggatttatctccattggcatgcgcatacgctagggcccgtggtgcagataggatgtcttcctttggtgatttcattgcattgtccaatattgtagatgtcgccactgcaaaaatcatctctaaagaagtttccgatggtgttattgctccagggtatgaaccagaggcattgaatatattatctaagaagaaaaacggaaaatactgtattttacaaatcgatccaaactatgttcctggccaaatggaatccagagaggtttttggcgtaacgttacaacaaaagagaaacgatgcgatcataaaccaatccactttcaaagaaattgtctccaaaaacaaagcacttaccgagcaagccgttatcgatttgactgttgctacgttagttttaaaatacacacaaagcaattctgtttgctacgcaaagaatggtatggttgtggggcttggggccggccaacaatcccgtatacactgtaccagattagctggtgacaagacggacaactggtggttgagacaacatccaaaggttttgaacatgaagtgggccaagggaattaagagagcggacaagagcaatgcgattgatctttttgttacagggcaaagaatagaaggcccggaaaaggtggattacgaaagcaaatttgaagaagtccctgaacctttcaccaaagaagaaagattagaatggttaagcaaattaaacaatgtatctttatcttccgatgcgttctttcccttcccagacaacgtttatagagctgtgcagtctggtgtaaagttcatcacggctccttctgggtctgtcatggacaaagttgtcttccaagcggcggattcttttgatatcgtctacgtggagaacccaattcgtttattccaccactga

SEQ ID NO: 7249 - DNA, 615 bp, Saccharomyces cerevisiae
atgggtgcctacaaatatttggaagaattgcaaagaaagaagcaatctgatgttttgagattcttgcaaagagtcagagtctgggaatacagacaaaagaatgtcattcacagagccgctagaccaactagaccagacaaggctagaagattgggttacaaagctaagcaaggtttcgttatctaccgtgtcagagttagacgtggtaacagaaagagacctgttccaaagggtgctacttacggtaagccaactaaccaaggtgtcaatgaattgaaataccaaagatccttgagagctaccgctgaagaaagagttggtcgtcgtgccgctaacttgagagtcttgaactcctactgggttaaccaagattctacttacaagtacttcgaagttatcttggtcgaccctcaacacaaggctatcagaagagatgctcgttacaactggatctgtgacccagttcacaagcaccgtgaagctagaggtttgactgccactggtaagaaatccagaggtatcaacaagggtcacaaattcaacaacaccaaggctggtagaagaaagacctggaagagacaaaacactttgtccttgtggagatacagaaaataa

SEQ ID NO: 7250 - DNA, 615 bp, Artificial Sequence
  Description of Artificial Sequence: Synthetic polynucleotide
atgggtgcctacaaatatttggaagaattgcaaagaaagaagcaatctgatgttttgagattcttgcaaagagtcagagtctgggaatacagacaaaagaatgtcattcacagagccgctagaccaactagaccagacaaggctagaagattgggttacaaagctaagcaaggtttcgttatctaccgtgtcagagttagacgtggtaacagaaagagacctgttccaaagggtgctacttacggtaagccaactaaccaaggtgtcaatgaattgaaataccaaagatccttgagagctaccgctgaagaaagagttggtcgtcgtgccgctaacttgagagtcttgaactcctactgggttaaccaagattctacttacaagtacttcgaagttatcttggtcgaccctcaacacaaggctatcagaagagatgctcgttacaactggatctgtgacccagttcacaagcaccgtgaagctagaggtttgactgccactggtaagaaatccagaggtatcaacaagggtcacaaattcaacaacaccaaggctggtagaagaaagacctggaagagacaaaacactttgtccttgtggagatacagaaaatga

SEQ ID NO: 7251 - DNA, 792 bp, Saccharomyces cerevisiae
atggaaggtgaacaaattatggagtatgttcaagagacaccgatcattccaaaaaggattatccattattcgattccaaaacaaatgatcacaaagcccgctccccatgtcgagatgacgttggtagctaatacttttcgggacatggacttgccgcagcatccggttatccatgattgttggcaaaataaagagtactcaactcaaagatattcaggaaatgtggctcaacagagattaagttttgaggaacatccaaatgaagagtgtcaaaattctgttgggttaatcaagagagtgagtactttctttaaaaagaggccattgtctcgaaagaatagcataaagtcaatcggtgacgtaaaatcggaggcacgtaaccggggagaaggcctcctgggtgaagttgataatcttaacgagcagaatgtccgagaaaacctgactagtgaacatgaaaagagtcctgaaggagattccaaaaggtatggcctgttctcctttgaagagaccccccctatacaagtgttggagcagggcaatatcaattctgagctttcttcatttaaaaacacttctttggcggaaaacaaacgctcttctgacagcttcgtttcgttaaaaccgggtgaagatgaacatagccctttagagattagtacgtgtggtaatttgactgaaagagaggatttgcaatctggcgaagaacggtttgactcagcagcccaaaatataaaggtagcttcgatgaaggaaaaaaaaaaaatcttcaaagggaacaaaacagattaa

SEQ ID NO: 7252 - DNA, 792 bp, Artificial Sequence
  Description of Artificial Sequence: Synthetic polynucleotide
atggaaggtgaacaaattatggagtatgttcaagagacaccgatcattccaaaaaggattatccattattctattccaaaacaaatgatcacaaagcccgctccccatgtcgagatgacgttggtagctaatacttttagagacatggacttgccgcagcatccggttatccatgattgttggcaaaataaagagtactccactcaaagatattctggaaatgtggctcaacagagattaagttttgaggaacatccaaatgaagagtgtcaaaattctgttgggttaatcaagagagtgagtactttctttaaaaagaggccattgtctagaaagaatagcataaagtctatcggtgacgtaaaaagtgaggcacgtaacagaggagaaggcctcttaggtgaagttgataatcttaacgagcagaatgtcagagaaaacttgactagtgaacatgaaaagagtcctgaaggagattccaaaaggtatggccttttctcctttgaagagaccccccctatacaagtgttggagcagggcaatatcaattctgagctttcttcttttaaaaacacttctttggcggaaaacaaacgctcttctgacagcttcgtttctttaaaaccgggtgaagatgaacatagccctttagagattagtacgtgtggtaatttgactgaaagagaggatttgcaatctggcgaagaaagatttgactctgcagcccaaaatataaaggtagcttccatgaaggaaaaaaaaaaaatcttcaaagggaacaaaacagattga

SEQ ID NO: 7253 - DNA, 561 bp, Saccharomyces cerevisiae
atgccggtcttaaatacgagaacttcttatcccaatatcgactttcatggtactaaggtttctgatgttctagatgcctttgaatttgaaaagcatgatgatcccttaagggataaatggaacactttacagtttttggaaaagagctttgaatctaaatttgaatctgcatcagagttaatccaaggaggcgagctagctgctattaaagaaagaaattttcaattagccaaactaaataatctttgctttcgggtacgagagtccatcaaaagaagacaagacctggagaaaaagttaagaactttatcgcaggacactgacaacgaattgctttttctgatgttggaaaatgagagaagaaagaaaagttcagtgataatagagtttctttctgagataatcagagagaaatccaaaagattaactgcagaagagcaaggctttgtaaatcaaaatgaagtaaaacccctcattctggacctttctgcacggataaatagattgaattctattctagaaacaaaaaatacttgtattagaagattaagtaatcaataa

SEQ ID NO: 7254 - DNA, 561 bp, Artificial Sequence
  Description of Artificial Sequence: Synthetic polynucleotide
atgccggtcttaaatacgagaacttcttatcccaatatcgactttcatggtactaaggtttctgatgttttggatgcctttgaatttgaaaagcatgatgatcccttaagggataaatggaacactttacagtttttggaaaagagctttgaatctaaatttgaatctgcaagtgagttaatccaaggaggcgagttggctgctattaaagaaagaaattttcaattagccaaattgaataatctttgctttagagtaagagagtccatcaaaagaagacaagacttggagaaaaagttaagaactttatctcaggacactgacaacgaattgctttttttgatgttggaaaatgagagaagaaagaaaagttctgtgataatagagtttctttctgagataatcagagagaaatccaaaagattaactgcagaagagcaaggctttgtaaatcaaaatgaagtaaaacccctcattttggacctttctgcaagaataaatagattgaattctattttggaaacaaaaaatacttgtattagaagattaagtaatcaatga

SEQ ID NO: 7255 - DNA, 3510 bp, Saccharomyces cerevisiae
atgagtcatattgaacaggaagaaaggaagaggttttttaacgatgaccttgacacttcagaaacatcgttaaacttcaaatctgagaataaagagtcgtttttatttgcaaatagtcataatgatgatgatgatgatgttgttgtatcagtgagtgatacaacagaaggagagggagaccgatctattgtgccagtcaggcgagaaatagaagaagaaggccagaatcagtttattacagagcttttaaggattattccagaaatgccaaaggatcttgtgatggaacttaatgaaaaattcggcagtcaggaggaagggctctctttagcattatcacattactttgatcacaatagcgggacgtctatcagcaaaataccgtcttccccgaatcaactaaatacactctcagatacctcaaattcaaccttgtccccatcttcattccatcctaaaagaagaagaatatacgggttcagaaaccaaacacgattagaagataaagttacttggaaaagatttataggtgctttgcaagtcactggtatggctaccagacccaccgtcaggcccttgaagtacggctctcagatgaagctaaagagatcaagtgaagagatttctgctactaaagtatatgactcacgtggtagaaagaaagcgtccatggctagtttggtaagaatttttgatatccaatatgatagagaaattggcagagtttcggaagacattgctcaaatactataccctcttttaagttcacacgaaataagttttgaagttacattgattttttgtgataataaacggttgagtataggtgatagctttattctacaattggattgctttttaacatctctcatttttgaggaacgtaatgatggagaatccttgatgaaaagaagacgtacagagggaggaaataaaagagagaaagacaatggaaattttggaagaacattgactgaaactgatgaagagctagaaagccgctcgaaaagactggctctactaaagttatttgataaattgaggctaaagcctattttggacgagcagaaggcattagaaaagcataaaatagagcttaatagtgaccccgaaatcattgatttagataacgacgagatttgctctaatcaagtgactgaagtccataacaatctccgagatactcagcacgaagaagaaacaatgaacttgaatcaattgaaaacattttataaggccgcacaatcatcagaatctttaaaaagtttgcctgaaacagaaccttctcgcgatgtcttcaagctagaactaagaaattatcaaaagcaaggtcttacttggatgctaaggagggagcaagagtttgccaaagcagcctctgatggtgaggcttcagaaacgggtgctaatatgataaacccattatggaagcagttcaaatggccaaatgatatgtcgtgggcagctcaaaatttgcagcaggaccatgtaaacgttgaagatggcatattcttttatgcgaacttacattctggtgaattttcgctagcaaaacctatattaaaaactatgataaagggtggcatattatcagatgaaatggggttgggtaaaacagtggcagcgtattctttagttttatcttgtcctcacgatagtgatgttgttgacaagaaactgtttgatattgagaacacagcagtctcagataatcttccaagcacttggcaagataataagaaaccatatgcttcaaaaacaacgctaatcgtggtcccaatgtctttgttaacgcagtggagtaacgagtttacaaaagctaataattcccccgatatgtatcatgaggtgtattatggtgggaatgtttccagtttgaaaaccctattaaccaagacaaaaacccctccaactgtagtccttactacatatggtattgttcaaaatgaatggactaaacattccaagggaaggatgacagatgaggacgtcaatatatcttcaggcttattttctgtcaatttttatcgcataataatcgacgagggtcataacattagaaacagaacgacagttacatctaaagcagtcatggctttacaaggcaaatgtaaatgggttttaacaggaacaccaattattaacaggcttgacgatttatacagtctggttaagtttttagagttagatccctggcggcaaattaattactggaagacctttgtatcaacgccttttgagagtaaaaattacaaacaagcatttgatgtggtgaatgcaattctggaacccgtattgttaagaaggacaaaacaaatgaaagataaagatggtaagccattagtagagttgccaccaaaggaggtcgttattaaaagacttcccttcagtaaatctcaagatcttctatacaagtttctgttggataaggctgaagtttctgttaaatcgggtattgcacgcggtgatttattgaaaaagtactccactatccttgtccatattttaagattgaggcaagtctgttgccatcccggtcttattgggagtcaagatgagaacgatgaggatttatctaaaaataataaattggttacggaacaaacggtggagcttgactctttaatgcgtgttgtttccgagagattcgataactcattttctaaggaggaattagatgcaatgatacaaagattaaaagttaaatatccagacaataaatcgtttcagtccttagagtgctccatctgcacaacggaacctatggatttggacaaggctttatttacagaatgcggccacagtttttgtgagaaatgtttatttgaatatattgagtttcagaacagtaagaatttgggtttaaagtgccccaattgccgtaaccaaatagacgcttgtcggttgttggcattggtacaaacgaatagcaactcgaaaaatttggaattcaaaccatattcaccagcctccaaatcaagcaaaatcactgctttattgaaggagcttcaattgctacaggatagttcggcaggcgaacaagttgtcattttttcccaattttctacatacttggatatcctggagaaagagctaactcatactttctcaaaagatgttgcaaaaatttataaattcgatggacgtctctcattaaaagaaagaactagtgtattagcagattttgccgttaaagactatagcaggcaaaaaatcctattactctcgctgaaggctggtggcgtgggtttgaatctaacgtgtgcttcccacgcttatatgatggacccatggtggtcgcccagtatggaagatcaggcaatcgatagactgcatagaattggccagacaaacagcgtcaaagttatgagatttatcatacaagatagcatagaagaaaaaatgctacgcattcaagaaaagaagagaaccatcggtgaggccatggacacagacgaagacgagagaagaaaaaggagaattgaagaaatccagatgctgtttgaatag

SEQ ID NO: 7256 - DNA, 3510 bp, Artificial Sequence
  Description of Artificial Sequence: Synthetic polynucleotide
atgagtcatattgaacaggaagaaaggaagaggttttttaacgatgaccttgacacttctgaaacaagtttaaacttcaaatctgagaataaagagtcttttttatttgcaaatagtcataatgatgatgatgatgatgttgttgtatctgtgagtgatacaacagaaggagagggagacagatctattgtgccagtcaggagagaaatagaagaagaaggccagaatcagtttattacagagcttttaaggattattccagaaatgccaaaggatcttgtgatggaacttaatgaaaaattcggcagtcaggaggaagggctctctttagcattatctcattactttgatcacaatagcgggacgtctatcagcaaaataccgtcttccccgaatcaattgaatacactctctgatacctctaattctaccttgtccccatcttctttccatcctaaaagaagaagaatatacgggttcagaaaccaaacaagattagaagataaagttacttggaaaagatttataggtgctttgcaagtcactggtatggctaccagacccaccgtcaggcccttgaagtacggctctcagatgaagttgaagagaagtagtgaagagatttctgctactaaagtatatgactctcgtggtagaaagaaagcgtccatggctagtttggtaagaatttttgatatccaatatgatagagaaattggcagagtttctgaagacattgctcaaatattataccctcttttaagttctcacgaaataagttttgaagttacattgattttttgtgataataaaagattgagtataggtgatagctttattttacaattggattgctttttaacatctctcatttttgaggaacgtaatgatggagaatccttgatgaaaagaagacgtacagagggaggaaataaaagagagaaagacaatggaaattttggaagaacattgactgaaactgatgaagagttagaaagccgctctaaaagattggctttgttgaagttatttgataaattgaggttaaagcctattttggacgagcagaaggcattagaaaagcataaaatagagcttaatagtgaccccgaaatcattgatttagataacgacgagatttgctctaatcaagtgactgaagtccataacaatctcagagatactcagcacgaagaagaaacaatgaacttgaatcaattgaaaacattttataaggccgcacaatcttctgaatctttaaaaagtttgcctgaaacagaaccttctcgcgatgtcttcaagttggaattgagaaattatcaaaagcaaggtcttacttggatgttaaggagggagcaagagtttgccaaagcagcctctgatggtgaggcttctgaaacgggtgctaatatgataaacccattatggaagcagttcaaatggccaaatgatatgtcttgggcagctcaaaatttgcagcaggaccatgtaaacgttgaagatggcatattcttttatgcgaacttacattctggtgaattttctttggcaaaacctatattaaaaactatgataaagggtggcatattaagtgatgaaatggggttgggtaaaacagtggcagcgtattctttagttttatcttgtcctcacgatagtgatgttgttgacaagaaattatttgatattgagaacacagcagtctctgataatcttccaagcacttggcaagataataagaaaccatatgcttccaaaacaacgttgatcgtggtcccaatgtctttgttaacgcagtggagtaacgagtttacaaaagctaataattcccccgatatgtatcatgaggtgtattatggtgggaatgtttccagtttgaaaaccttattaaccaagacaaaaacccctccaactgtagtccttactacatatggtattgttcaaaatgaatggactaaacattccaagggaaggatgacagatgaggacgtcaatatatcttctggcttattttctgtcaatttttatcgcataataatcgacgagggtcataacattagaaacagaacgacagttacatctaaagcagtcatggctttacaaggcaaatgtaaatgggttttaacaggaacaccaattattaacaggcttgacgatttatacagtttggttaagtttttagagttagatccctggagacaaattaattactggaagacctttgtatctacgccttttgagagtaaaaattacaaacaagcatttgatgtggtgaatgcaattttggaacccgtattgttaagaaggacaaaacaaatgaaagataaagatggtaagccattagtagagttgccaccaaaggaggtcgttattaaaagacttcccttcagtaaatctcaagatcttttatacaagtttttattggataaggctgaagtttctgttaaatctggtattgcacgcggtgatttattgaaaaagtactccactatccttgtccatattttaagattgaggcaagtctgttgccatcccggtcttattgggagtcaagatgagaacgatgaggatttatctaaaaataataaattggttacggaacaaacggtggagcttgactctttaatgcgtgttgtttccgagagattcgataactctttttctaaggaggaattagatgcaatgatacaaagattaaaagttaaatatccagacaataaaagttttcagtccttagagtgctccatctgcacaacggaacctatggatttggacaaggctttatttacagaatgcggccacagtttttgtgagaaatgtttatttgaatatattgagtttcagaacagtaagaatttgggtttaaagtgccccaattgccgtaaccaaatagacgcttgtagattgttggcattggtacaaacgaatagcaactccaaaaatttggaattcaaaccatattctccagcctccaaaagtagcaaaatcactgctttattgaaggagcttcaattgttacaggatagttctgcaggcgaacaagttgtcattttttcccaattttctacatacttggatatcttggagaaagagttaactcatactttctccaaagatgttgcaaaaatttataaattcgatggacgtctctctttaaaagaaagaactagtgtattagcagattttgccgttaaagactatagcaggcaaaaaatcttattactctctttgaaggctggtggcgtgggtttgaatttaacgtgtgcttcccacgcttatatgatggacccatggtggtcccccagtatggaagatcaggcaatcgatagattacatagaattggccagacaaacagcgtcaaagttatgagatttatcatacaagatagcatagaagaaaaaatgttacgcattcaagaaaagaagagaaccatcggtgaggccatggacacagacgaagacgagagaagaaaaaggagaattgaagaaatccagatgttatttgaatga

SEQ ID NO: 7257 - DNA, 1509 bp, Saccharomyces cerevisiae
atgacagaaagtgtaggtggaaataaactagtagattttttggtaaatgttcaatccattttgaatgctgcctctgtgaaatgtcatgtagtagatgaaagttttccagccaagttctttgagaaaaatccggataagatatatgaatcatattgtaaattcattaaaaatagaagtaactctgaaggtttgatacgtaatgaagataaattagttttgacaactatcaataagaggtttgaaaatggagagtacgaacccatacaaggtgggttttataagctgtatcacgacattaagctggtttgtacaatcctcattcacttttatcctcagggtacaagaaactaccaattagtcgacaagttctacaaattttcttcagagcttttattacgagaatgttgtaggataggaattgctctaacgcaaactaataatattaaatcaagaagtggtaagttgttgagcggaaacgagatggatgaatacgacgatgacgatgcaacagaactagacaaaataatctcttatgattttattaagatttctatgaattacacagtgccgatttctcaaacatatcagataagaacgaaggatatggaccttttttcttcgataatttctaaatctaatcttgacaaaagacctcatgaacttcctaatacaaacttcaaaataaacaacgtcttacctcaaactgatatagaaaacgaagctccaagattaggatttgtaggcgctaatactagtaatattccggaccctacgttaccaccaactgaaatgatgactagatttttgcatccaaattggtatgctttacctacaaccgtctggctaaaatatggtaattataattcttgggcaccttcctttaatgaaaacggcaccgttgtggattcgacaacaaggggtcttatttggcttgaaagaattggttatatggacttgtatgaaaaaaatgaaaagaaagtaaaacaagaagaattactgaacacgaatgaagaaggcataaacaggaagcagaacgatgaaaacaacaaaaatgttgacggcaaaagcaatggcgttcaggacgatggtggtgataatgataatgatgcgactatcgcttctgcaaattcagagagtactgagaataaggaacaattcataatcaagcttcaaaacttatataattggacaccatctaattacattggagatgacgaaattgagaactttcgaaatggcacaccagataagttggtttcagactctctcttaaaacttaaaagacttagaaaggagaggattttaaataaagttttgaagcctactacggaggaacgagaattatacttcaaagtgaaaagaatactaaaggaggttatcttagcaaagaaggtttccaaggttcctataaacaatgtaagggcctttccagtattacaaacaaactataatggtagcatacctgtggtaagggcgcaaccaggtcgtaaacggaaacacaagaaataa

SEQ ID NO: 7258 - DNA, 1509 bp, Artificial Sequence
  Description of Artificial Sequence: Synthetic polynucleotide
atgacagaaagtgtaggtggaaataaattagtagattttttggtaaatgttcaatccattttgaatgctgcctctgtgaaatgtcatgtagtagatgaaagttttccagccaagttctttgagaaaaatccggataagatatatgaaagttattgtaaattcattaaaaatagaagtaactctgaaggtttgatacgtaatgaagataaattagttttgacaactatcaataagaggtttgaaaatggagagtacgaacccatacaaggtgggttttataagctttatcacgacattaagttggtttgtacaatcctcattcacttttatcctcagggtacaagaaactaccaattagtcgacaagttctacaaattttcttctgagcttttattaagagaatgttgtaggataggaattgctttgacgcaaactaataatattaaatctagaagtggtaagttgttgagcggaaacgagatggatgaatacgacgatgacgatgcaacagaattagacaaaataatctcttatgattttattaagatttctatgaattacacagtgccgatttctcaaacatatcagataagaacgaaggatatggaccttttttcttctataatttctaaatctaatcttgacaaaagacctcatgaacttcctaatacaaacttcaaaataaacaacgtcttacctcaaactgatatagaaaacgaagctccaagattaggatttgtaggcgctaatactagtaatattccggaccctacgttaccaccaactgaaatgatgactagatttttgcatccaaattggtatgctttacctacaaccgtctggttgaaatatggtaattataattcttgggcaccttcctttaatgaaaacggcaccgttgtggattctacaacaaggggtcttatttggcttgaaagaattggttatatggacttgtatgaaaaaaatgaaaagaaagtaaaacaagaagaattattaaacacgaatgaagaaggcataaacaggaagcagaacgatgaaaacaacaaaaatgttgacggcaaaagcaatggcgttcaggacgatggtggtgataatgataatgatgcgactatcgcttctgcaaattctgagagtactgagaataaggaacaattcataatcaagcttcaaaacttatataattggacaccatctaattacattggagatgacgaaattgagaactttagaaatggcacaccagataagttggtttctgactctctcttaaaacttaaaagacttagaaaggagaggattttaaataaagttttgaagcctactacggaggaaagagaattatacttcaaagtgaaaagaatattgaaggaggttatcttagcaaagaaggtttccaaggttcctataaacaatgtaagggcctttccagtattacaaacaaactataatggtagcatacctgtggtaagggcgcaaccaggtcgtaaaagaaaacacaagaaatga

SEQ ID NO: 7259 - DNA, 1422 bp, Saccharomyces cerevisiae
atgcgatcttatatgcagattcttcaaaaatttgccaaatttattgggccagggatattagtcagtgtggcttatatggacccaggaaattatgccactagtgtttccggtggtgctcaatacaaatataccttattattctctatttttatatccaacatttttgccgtacttttgcaatgtctctgtgtgaagctgggtactatcactggctatgatttggctgaaaactgtcgtcataatttgcctaaaaagctaaactataccctttaccttttcgctgaagtggcaatcattgctactgatctggccgaggttgtaggcactgccatcgctttacaaattcttttcaaaataccactaacttggggtgtcttattaacggtgctagatgttttggtaattttaatgttctacacaccaaacggccagtccttaaaaaaagttagggttttcgaatttggcgttgggattttggtcattggaacttgcatttgctttgttttggagctgtttaaagtttcaatcccagacaaagctgaattgtttaaagggtttttgccttcaaatatcatttttaaggaacaacaagctctttacatttcattgggtatcttaggtgccactgtgatgcctcattcattatacttgggctcatccattgttaaaccaagattgcacgattacgatttgaagaaatacggtaaggttaatgcccgcccaagtttaagcgctataaaatatacgttaaactatgcgtacgctgaactaatcatttctttgttcttaattgccacctttgttaattccgctattttaattgttgcaggtgctactttatcaggccaacctgaggcagaggatgctgatttgttatctatttacaaattactggtccactacatatctcctgcggcagggttaatctttgcattggccatgttatgttctggtcaatctgccggtatcatctgtacacttgccgggcaaatcgtttctgagggatttttacagtggtctttaccaccttgggccacaagattgtgcaccagattgattgccattgtaccatgtttatttgttactttaaccatgggggaaaagggaatttcagatattttgaatttttctcaagtggtcttgtccttaattttaccaatcgtatccgctcctttaatttattttaccgcaaatagaaagttgatggttgttcatgacgaaaatggtgtggtaagagcacctgccgatgttaacgccattgctgatgaaaccactccattgaactccaagcacagtaaaatagttgattttactaacagtcgtttgttgacctatacctctgttttcgtatgggctttaatcgggagcttgaattgctatttggtgatttcctatctcttaggtgccgacatccatttttaa

SEQ ID NO: 7260 - DNA, 1422 bp, Artificial Sequence
  Description of Artificial Sequence: Synthetic polynucleotide
atgagatcttatatgcagattcttcaaaaatttgccaaatttattgggccagggatattagtcagtgtggcttatatggacccaggaaattatgccactagtgtttccggtggtgctcaatacaaatataccttattattctctatttttatatccaacatttttgccgtacttttgcaatgtctctgtgtgaagttgggtactatcactggctatgatttggctgaaaactgtcgtcataatttgcctaaaaagttgaactataccctttaccttttcgctgaagtggcaatcattgctactgatttggccgaggttgtaggcactgccatcgctttacaaattcttttcaaaataccattgacttggggtgtcttattaacggtgttggatgttttggtaattttaatgttctacacaccaaacggccagtccttaaaaaaagttagggttttcgaatttggcgttgggattttggtcattggaacttgcatttgctttgttttggagttatttaaagtttccatcccagacaaagctgaattgtttaaagggtttttgccttccaatatcatttttaaggaacaacaagctctttacatttctttgggtatcttaggtgccactgtgatgcctcattctttatacttgggcagctccattgttaaaccaagattgcacgattacgatttgaagaaatacggtaaggttaatgcccgcccaagtttaagcgctataaaatatacgttaaactatgcgtacgctgaattgatcatttctttgttcttaattgccacctttgttaattccgctattttaattgttgcaggtgctactttaagtggccaacctgaggcagaggatgctgatttgttatctatttacaaattattggtccactacatatctcctgcggcagggttaatctttgcattggccatgttatgttctggtcaatctgccggtatcatctgtacacttgccgggcaaatcgtttctgagggatttttacagtggtctttaccaccttgggccacaagattgtgcaccagattgattgccattgtaccatgtttatttgttactttaaccatgggggaaaagggaatttctgatattttgaatttttctcaagtggtcttgtccttaattttaccaatcgtatccgctcctttaatttattttaccgcaaatagaaagttgatggttgttcatgacgaaaatggtgtggtaagagcacctgccgatgttaacgccattgctgatgaaaccactccattgaactccaagcacagtaaaatagttgattttactaacagtcgtttgttgacctatacctctgttttcgtatgggctttaatcgggagcttgaattgctatttggtgatttcctatctcttaggtgccgacatccatttttga

SEQ ID NO: 7261 - DNA, 2088 bp, Saccharomyces cerevisiae
atgactatacatcagttatctccagaatcccaatggaagattgtttctagttcctttatttacggtccggtagctgctgtaagggaattattagataatagcatcgattcgggtgctaaaaaagtattcatcgatgtagattccactacgggaggatgtgaatatatatcagtcaaggacgatggatcaggtgtggatattatcgacagaccttctatgtgcttggaatacaccacatcaaagatgagtagtctcggagatatttcgattctgactactcttggattcagaggtgaagcattgtttcttttgtcaaacttgtgtaaccagaaaggctcaatgcaggttgaaacaaaaactgcagatgatgtcattggagaaaaatggttagttgatagtaagggtggtattaccaatggaaaaaggtacaaggtatcttgtcccgtggggactacagtaatattaaggaaacttctgggagggttacgagcaaggtatctcgaaatttcttcgaggccaagaaaaacattcgatgaactaatctatttaataaaccattattctctaattcatagaaatattcggttttatttttcgttggtgtcattacaaaaaaatggtgccatagagcgtaaacaaatgcaagaaacgttagaccctaagatttctagagctagaagtttgtccctactagctagactaaaaaagcctgtgccgctgaactttattgtagaagaaaactttgttatcgacgaaaaaataaatttagatttgatcttaccgaggatggtgccagaatctgacgttattaatataaagagacgatttaaatttttatctgttaatgagagagcgctatctttgaacttggagacggggaagactatttctaagttactatcgtcaatctatagagatttctctttactagatcctatggtttggtttattaatttaaattgcgatacaaagcttcttgacgtaaatatcgaaccagagaaaaatgacgtgatgatcaaaagttttgaagtgatatttaagaagatagagaataagttaaagttgttattggaggagagaattggcatcgaaacaaatatgctgggagataaacatgttcagccttctatcaacgaaaaaacttctcccgcactggtgatacctacacccgacgcagagaatgaaatatcaaagggctgtggtgctgttagtggtaaagacaagactgacatcccacaaaaaaactcagatttgatagtaccaactttttacgatgaagcaaacttagagaatacgaccattgtcgctgctactccttcacctacaaaatttagcgaggataaagctcttgacgaacaaactcagctgaccatttcaagttatagaagctcgagttccgggtctatggcttccgaggacagtactaattggcgacataatttccaacaagaactaagcgaaaatagtgaagtagcaggagctggatcctcaacattaccctcgtcattaacttataactatatagaaactattccagagaacgaggatttagaactttctaaggacgcttctatttctaatccttttatgatcacaaaaataagaaacgtcaacaagaaactgagcgaaaacttacttgaggccaaacgtactagctgtggagatgccaataaaaggggaatgcccaacgaaagacagctttcaaatacagaaaaaaaggaactaataaagcttcagcaaacctacggtaaaagaaacaataccgtggacatgaccattccacgaaattcgaaaaaaaaagtaactgataattatataaagaaagcatcctgcatgcacaaaacaaggccgaaactcatgcatttttccgagtataccaacaactacgtctataccctgaagaatgaaaaaattgttaagcatgacagcgataactttgccaaagaaactctgtggttacgatcgagggacgatgccacaagcccttcttccagtcttttgcaagccttgcgagcgcatgtgaagaaaccgggacacattgaagccacgacaaatgaatggtgcctcttcacgccagacagcccctga

SEQ ID NO: 7262 - DNA, 2088 bp, Artificial Sequence
  Description of Artificial Sequence: Synthetic polynucleotide
atgactatacatcagttatctccagaatcccaatggaagattgtttctagttcctttatttacggtccggtagctgctgtaagggaattattagataatagcatcgattctggtgctaaaaaagtattcatcgatgtagattccactacgggaggatgtgaatatatatctgtcaaggacgatggatctggtgtggatattatcgacagaccttctatgtgcttggaatacaccacatccaagatgagtagtctcggagatatttccattttgactactcttggattcagaggtgaagcattgtttcttttgtctaacttgtgtaaccagaaaggctctatgcaggttgaaacaaaaactgcagatgatgtcattggagaaaaatggttagttgatagtaagggtggtattaccaatggaaaaaggtacaaggtatcttgtcccgtggggactacagtaatattaaggaaacttttgggagggttaagagcaaggtatctcgaaatttcttccaggccaagaaaaacattcgatgaattgatctatttaataaaccattattctttgattcatagaaatattagattttatttttctttggtgtctttacaaaaaaatggtgccatagagcgtaaacaaatgcaagaaacgttagaccctaagatttctagagctagaagtttgtccttattagctagattgaaaaagcctgtgccgttgaactttattgtagaagaaaactttgttatcgacgaaaaaataaatttagatttgatcttaccgaggatggtgccagaatctgacgttattaatataaagagaagatttaaatttttatctgttaatgagagagcgctttctttgaacttggagacggggaagactatttctaagttattatcttctatctatagagatttctctttattagatcctatggtttggtttattaatttaaattgcgatacaaagcttcttgacgtaaatatcgaaccagagaaaaatgacgtgatgatcaaaagttttgaagtgatatttaagaagatagagaataagttaaagttgttattggaggagagaattggcatcgaaacaaatatgcttggagataaacatgttcagccttctatcaacgaaaaaacttctcccgcattggtgatacctacacccgacgcagagaatgaaatatccaagggctgtggtgctgttagtggtaaagacaagactgacatcccacaaaaaaacagtgatttgatagtaccaactttttacgatgaagcaaacttagagaatacgaccattgtcgctgctactccttctcctacaaaatttagcgaggataaagctcttgacgaacaaactcagttgaccatttccagttatagaagcagtagttccgggtctatggcttccgaggacagtactaattggagacataatttccaacaagaattgagcgaaaatagtgaagtagcaggagctggatcctctacattaccctcttctttaacttataactatatagaaactattccagagaacgaggatttagaactttctaaggacgcttctatttctaatccttttatgatcacaaaaataagaaacgtcaacaagaaattaagcgaaaacttacttgaggccaaacgtactagctgtggagatgccaataaaaggggaatgcccaacgaaagacagctttctaatacagaaaaaaaggaattgataaagcttcagcaaacctacggtaaaagaaacaataccgtggacatgaccattccaagaaattctaaaaaaaaagtaactgataattatataaagaaagcatcctgcatgcacaaaacaaggccgaaactcatgcatttttccgagtataccaacaactacgtctataccttgaagaatgaaaaaattgttaagcatgacagcgataactttgccaaagaaactttatggttaagaagtagggacgatgccacaagcccttcttccagtcttttgcaagccttgagggcgcatgtgaagaaaccgggacacattgaagccacgacaaatgaatggtgcctcttcacgccagacagcccctga

SEQ ID NO: 7263 - DNA, 612 bp, Saccharomyces cerevisiae
atgaaagaggcagaacttagtgcgacagaaagccaagatgagatcccaaagtctaattccttattaattatagaaaaattaacaaaggccgtttgtagcctttattttataaattgttttatggtgccatcagtagataatttgattgaaaagtacccaaaagcaatcatcattaagatcatagatatgattctgggggcggtaacaatttccctcgttattatagttttctttttatatcgaaagaacggtcattttaaaaatgaaaataaaacaaagccaaagagatgttcgaaggtagtatgtcccagctgtgctgccagaaaaaagtatcctaaatggtttcagctaaagtatttgttattggtatcaatgactgctttcagcttctacttttgtaccaaaattaggtttttttttaaaactgaccaaactattaatttacaccgactatcacagctatttagattgcagctaggctggatatgtactactgcattattattctatttttacgatgcgttgatattacatagcgggttcattgaagggtatagatgtgtcaatggaaagggagcgatgtctgaaggtaaaaccgggcaattaaattga

SEQ ID NO: 7264 - DNA, 612 bp, Artificial Sequence
  Description of Artificial Sequence: Synthetic polynucleotide
atgaaagaggcagaacttagtgcgacagaaagccaagatgagatcccaaagtctaattccttattaattatagaaaaattaacaaaggccgtttgtagcctttattttataaattgttttatggtgccatctgtagataatttgattgaaaagtacccaaaagcaatcatcattaagatcatagatatgattttgggggcggtaacaatttccctcgttattatagttttctttttatatagaaagaacggtcattttaaaaatgaaaataaaacaaagccaaagagatgttccaaggtagtatgtcccagctgtgctgccagaaaaaagtatcctaaatggtttcagttgaagtatttgttattggtatctatgactgctttcagcttctacttttgtaccaaaattaggtttttttttaaaactgaccaaactattaatttacaccgtttatctcagttatttagattgcagttaggctggatatgtactactgcattattattctatttttacgatgcgttgatattacatagcgggttcattgaagggtatagatgtgtcaatggaaagggagcgatgtctgaaggtaaaaccgggcaattaaattga

SEQ ID NO: 7265 - DNA, 375 bp, Saccharomyces cerevisiae
atggtcaaactaacttcaattgttgctggtgtcgctgctattgctgctggtgtcgctgctgccccagccaccactactttatctccctctgacgaaagagttaacctggtcgaattaggtgtctacgtctcagatatcagagctcatttggctgaatactatatgttccaagctgctcatccaactgaaacttacccagttgaaattgctgaagctgttttcaactacggtgatttcaccactatgttgactggtattcccgctgatcaagtcactagagtcatcactggtgtcccatggtactccaccagattgagaccagctatctccagcgctctatccaaggacggtatctacactgctgttccaaactaa

SEQ ID NO: 7266 - DNA, 375 bp, Artificial Sequence
  Description of Artificial Sequence: Synthetic polynucleotide
atggtcaaattaacttctattgttgctggtgtcgctgctattgctgctggtgtcgctgctgccccagccaccactactttatctccctctgacgaaagagttaacttggtcgaattaggtgtctacgtctctgatatcagagctcatttggctgaatactatatgttccaagctgctcatccaactgaaacttacccagttgaaattgctgaagctgttttcaactacggtgatttcaccactatgttgactggtattcccgctgatcaagtcactagagtcatcactggtgtcccatggtactccaccagattgagaccagctatctccagcgctttgtccaaggacggtatctacactgctgttccaaactga

SEQ ID NO: 7267 - DNA, 252 bp, Saccharomyces cerevisiae
atggctgatcaagaaaactctccactacatacagttggtttcgatgctagatttccccaacaaaaccaaacaaagcattgttggcaatcttatgtggattatcacaagtgtgttaatatgaagggcgaagattttgctccgtgcaaggtcttttggaagacctataacgccttatgtcccctagactggatcgaaaaatgggatgatcaaagagaaaaaggtattttcgcaggtgatatcaactcagactaa

SEQ ID NO: 7268 - DNA, 252 bp, Artificial Sequence
  Description of Artificial Sequence: Synthetic polynucleotide
atggctgatcaagaaaactctccattgcatacagttggtttcgatgctagatttccccaacaaaaccaaacaaagcattgttggcaatcttatgtggattatcacaagtgtgttaatatgaagggcgaagattttgctccgtgcaaggtcttttggaagacctataacgccttatgtcccttagactggatcgaaaaatgggatgatcaaagagaaaaaggtattttcgcaggtgatatcaacagcgactga

SEQ ID NO: 7269 - DNA, 3171 bp, Saccharomyces cerevisiae
atgttcatcaaacagtctgaaaaaaatacacctaaatgcctctacaaaaaaaaaggtaaggtaagagtgttattgaccggaagctgtaagaaactgaacacgtggaaaatgcacttatggccagtcagtccgccccaattgcttagaattccaccccgcaacgccgaattaggtgagggtactaaaatagatgattgcaatattcttcaatcaatgacactaccccaggccaatgttcttatcatgctaaccccaacaagagtgctcatttacaacttcaaaccaatggcactagtagctagccatgaacgaacaatggcttctcttaaggaatttggcgataacagatcaatgaaacgatcagctccatataatgatatcatcgaagggcttatttcaaaaaaggactcgcaatacttattgtggcaccagggaaagctgatattttacgtaatgactgataaaaacttccttttaacataccaaattttaaaaaactgcacaaatgaaataattttcaaagaatacggcatacccgtcatagagcctcttttaatgagtgaagaagaagcgaacagtgctgaatatgactataacaacgatgatgatactctcacggtatttgataaaaatagttcttcaagaattatacagaatggatttggcataactaaggaaaaagggtttttacactttctttctaatcaagaaaacattgatgaactccccgtgaaaaaactagaacttcgtttaaaagtagttcttaaatttgactatgaaatcatagacatgattggcatcaagacattttccaaagtcggggatgggcgttatgaagaagttttgatagttttattccctcatggattacaaatacttacaatatcggattttaaagttagcaagagctcgttggttgaagtgaagaagggatccaagacaattgtgtgtaataaacaattaatggttttatctcatgattccgtcgaaaagcagactattgtaagcattatagacattgaaaagcaagctgttgaagcaataccgttaacggacacaccagatgaacttttgacttgcctagaagttaatggatacctggtggtcgtttacaaagaaaaaataatctgctttgatacaagaattaaaaaagtaagccattcttggaaaccaccatttgtgataaaactttgcgataaaattaatgataaaatattacttttggtttctgaggatagtgttaacattcatttttacacagaatttgggaatctgctattcgctacatattttgacgaagatgattataatggtgataacaataatgacaacagcaaggataaaaatgagaaaaaggcggctgaatataaaatttctgattttgtatgcttggataaatcactaataacagtgtctcattccggaaaatatcaagtttggaaattatgggaagaaataaaacaaacacaatttgatttcagaaacccaaaatgttacgtattaaccaatacgaacaatgatgtaatcatatattcacctgtgacaagttcttcaatcaataatgataatttacaagtcataaaacttcctacaaagactttcaataatcatattgcttttgtaaaaattaattcttccttgaggttatttgctacttatgtgtcgaacaaaaacatactgcttatccacaatctagagaccaatatgtggtctagttttgctgaccaaaacgtgttggatttacattggctaggtgataattatttggtttgtcatatgaagaatgatgatggctcaacaaatctgaaatgtctgcagattccactgcaagaagcgaatccggacgtggaactatcagattatgtcatgtgggaatacaatgttccagagaatacgattgttttcagtttacatgttaatactttatcccggtataagttgttgaaaatgaaatccaagaatcacaatgcttctgaaaaacaacctgatgcattgcttaaaactgccgagattattttagttactgatacacagacaattgtcttcgatgtaatttctactgtacatccatgtggattaaacatcatcaaaaaattctaccagtatctcaaaattaacattccaattgatgttttacccaacaaaattgagtggataattaacatgaaggagggcttgttattttttgccgataggaaatttataaagcttggcaaagtggatggagggggctggcaaaccttaactttgttggataacatagaaaaaataatcgatgttatcagggacgaaatatttgtagttcaaggccataattacgtcgtatactctttggaagatttatgggatgataaaaagccactagtttccattccaatcgaagaagatttgtatccaatatcaaccaccccagaaacagctacaacacatacacttcactgcatttttaacgcgcgattttccaaattggtggtgaaacaccaaatatacctcgaccaattaatcttagccaaattagaagacaacacagatttggaggatatttcacacaattatcgttttttaaagccttacaaatttgcactcgaaaagattttgtctactaaaatactgcgaagcgactctttggatgatatcctgaaattaattaagatgtatgacaacaccgatcctgagcataatatttcaccaccaacccacagtggtatgttagaaattattagtaattgtttaaggaagatcgaaactaaatactggaaccatctattcactaatctaaagatgacaccaagagatttattagcactctgtatcgaagaaaatgaggctaaaatgcttggcgtacttctgttagtgtttttaaattacgatgagaaagatttgggagatgatctacattttaagaaatcagatttagggactgaggaaagcaaagctctaaatgataactctacaaaaaagtcagagaaatctgtcactaatttattgaaggatgaagaattaatgcttaaagtcttagagcttttggtgacaagtgctgcaaacgccacagacccaattaaagctaccgattcgtgggacatgtgtttccaattaatacgcttactcaaggaattagacagagaaaacaacacacaattggttcaaaaagcactcgagagattcaaataa

SEQ ID NO: 7270 - DNA, 3171 bp, Artificial Sequence
  Description of Artificial Sequence: Synthetic polynucleotide
atgttcatcaaacagtctgaaaaaaatacacctaaatgcctctacaaaaaaaaaggtaaggtaagagtgttattgaccggaagctgtaagaaattgaacacgtggaaaatgcacttatggccagtcagtccgccccaattgcttagaattccaccccgcaacgccgaattaggtgagggtactaaaatagatgattgcaatattcttcaatctatgacattaccccaggccaatgttcttatcatgttgaccccaacaagagtgctcatttacaacttcaaaccaatggcattggtagctagccatgaaagaacaatggcttctcttaaggaatttggcgataacagaagtatgaaaagatctgctccatataatgatatcatcgaagggcttatttccaaaaaggactctcaatacttattgtggcaccagggaaagttaatattttacgtaatgactgataaaaacttccttttaacataccaaattttaaaaaactgcacaaatgaaataattttcaaagaatacggcatacccgtcatagagcctcttttaatgagtgaagaagaagcgaacagtgctgaatatgactataacaacgatgatgatactctcacggtatttgataaaaatagttcttctagaattatacagaatggatttggcataactaaggaaaaagggtttttacactttctttctaatcaagaaaacattgatgaactccccgtgaaaaaattagaacttcgtttaaaagtagttcttaaatttgactatgaaatcatagacatgattggcatcaagacattttccaaagtcggggatgggcgttatgaagaagttttgatagttttattccctcatggattacaaatacttacaatatctgattttaaagttagcaagagctctttggttgaagtgaagaagggatccaagacaattgtgtgtaataaacaattaatggttttatctcatgattccgtcgaaaagcagactattgtaagcattatagacattgaaaagcaagctgttgaagcaataccgttaacggacacaccagatgaacttttgacttgcttagaagttaatggatacttggtggtcgtttacaaagaaaaaataatctgctttgatacaagaattaaaaaagtaagccattcttggaaaccaccatttgtgataaaactttgcgataaaattaatgataaaatattacttttggtttctgaggatagtgttaacattcatttttacacagaatttgggaatttattattcgctacatattttgacgaagatgattataatggtgataacaataatgacaacagcaaggataaaaatgagaaaaaggcggctgaatataaaatttctgattttgtatgcttggataaatctttgataacagtgtctcattccggaaaatatcaagtttggaaattatgggaagaaataaaacaaacacaatttgatttcagaaacccaaaatgttacgtattaaccaatacgaacaatgatgtaatcatatattctcctgtgacaagttcttctatcaataatgataatttacaagtcataaaacttcctacaaagactttcaataatcatattgcttttgtaaaaattaattcttccttgaggttatttgctacttatgtgtctaacaaaaacatattacttatccacaatttggagaccaatatgtggtctagttttgctgaccaaaacgtgttggatttacattggttaggtgataattatttggtttgtcatatgaagaatgatgatggctctacaaatttgaaatgtttacagattccattgcaagaagcgaatccggacgtggaattaagtgattatgtcatgtgggaatacaatgttccagagaatacgattgttttcagtttacatgttaatactttatccagatataagttgttgaaaatgaaatccaagaatcacaatgcttctgaaaaacaacctgatgcattgcttaaaactgccgagattattttagttactgatacacagacaattgtcttcgatgtaatttctactgtacatccatgtggattaaacatcatcaaaaaattctaccagtatctcaaaattaacattccaattgatgttttacccaacaaaattgagtggataattaacatgaaggagggcttgttattttttgccgataggaaatttataaagcttggcaaagtggatggagggggctggcaaaccttaactttgttggataacatagaaaaaataatcgatgttatcagggacgaaatatttgtagttcaaggccataattacgtcgtatactctttggaagatttatgggatgataaaaagccattagtttccattccaatcgaagaagatttgtatccaatatctaccaccccagaaacagctacaacacatacacttcactgcatttttaacgcgaggttttccaaattggtggtgaaacaccaaatatacctcgaccaattaatcttagccaaattagaagacaacacagatttggaggatatttctcacaattatcgttttttaaagccttacaaatttgcactcgaaaagattttgtctactaaaatattaagaagcgactctttggatgatatcttgaaattaattaagatgtatgacaacaccgatcctgagcataatatttctccaccaacccacagtggtatgttagaaattattagtaattgtttaaggaagatcgaaactaaatactggaaccatcttttcactaatttgaagatgacaccaagagatttattagcactctgtatcgaagaaaatgaggctaaaatgcttggcgtacttttattagtgtttttaaattacgatgagaaagatttgggagatgatttgcattttaagaaatctgatttagggactgaggaaagcaaagctttgaatgataactctacaaaaaagagtgagaaatctgtcactaatttattgaaggatgaagaattaatgcttaaagtcttagagcttttggtgacaagtgctgcaaacgccacagacccaattaaagctaccgattcttgggacatgtgtttccaattaatacgcttactcaaggaattagacagagaaaacaacacacaattggttcaaaaagcactcgagagattcaaatga

SEQ ID NO: 7271 - DNA, 675 bp, Saccharomyces cerevisiae
atgatatttgctccttctttctccctcattaaaaatattctcctggtaagctttctaatcagccacagttttgctgccaaaactttaacgtctagttccaatgacgatacacttgccaggtccgcagctgcagatgcagacatggcattcttcatggagtttttaaacgatttcgacaccgcttttccacagtatacctcatacatgatgcaaaaccatttaaccctacctcaacctgttgctgactactactatcacatggttgatttggcctcaacagcagatttacaatctgatattgctcagagttttccgttcactcaattccaaacattcattacggcctttccatggtatacctctttgctaaacaaagcctccgccaccaccatataccttccccaacacttcataacaggtgagacagaagctaccatgactaactcatcttatgccagccaaaaaaactccgtttccaattctgttcctttctcgacagcgaacgcaggccagtccatgatttccatggctaatgaagaaaacagtacaacagcacttatatccgcatcaaactcttcttcaacatccagaactagtcaatcacagaatggtgcccatgccaaaagcttatatttccccatggcgttgttcggaatctttgcagttgccctttaa

SEQ ID NO: 7272 - DNA, 675 bp, Artificial Sequence
  Description of Artificial Sequence: Synthetic polynucleotide
atgatatttgctccttctttctccctcattaaaaatattctcttagtaagctttttgatcagccacagttttgctgccaaaactttaacgtctagttccaatgacgatacacttgccaggtccgcagctgcagatgcagacatggcattcttcatggagtttttaaacgatttcgacaccgcttttccacagtatacctcttacatgatgcaaaaccatttaaccttacctcaacctgttgctgactactactatcacatggttgatttggcctctacagcagatttacaatctgatattgctcagagttttccgttcactcaattccaaacattcattacggcctttccatggtatacctctttgttgaacaaagcctccgccaccaccatataccttccccaacacttcataacaggtgagacagaagctaccatgactaactcttcttatgccagccaaaaaaactccgtttccaattctgttcctttcagtacagcgaacgcaggccagtccatgatttccatggctaatgaagaaaacagtacaacagcacttatatccgcatctaactcttcttctacatccagaactagtcaatctcagaatggtgcccatgccaaaagcttatatttccccatggcgttgttcggaatctttgcagttgccctttga

SEQ ID NO: 7273 - DNA, 486 bp, Saccharomyces cerevisiae
atgaagatcagtcaatttggctctttagctttcgccccaattgtgctactacaactgttcattgttcaagcgcaacttctcacagattcaaatgctcaggatttgaatactgcccttggacagaaagtgcaatacacctttcttgacactggaaattctaacgatcaactacttcatcttccaagcaccacctcttccagcattattactggttcattagctgctgctaatttcaccggttcttcatcatcgtcgtctataccaaaagtcacttccagcgtcataacatctataaattaccaatcctcaaattctacggtagtcacccagttcacgccattgccttcttcgtcgagaaatgaaacaaaaagctctcaaacaactaatactataagttcaagtacaagcacaggaggtgtaggttcagtcaagccatgtctttacttcgttttaatgttagaaacaatcgcttatttgttttcttaa

SEQ ID NO: 7274 - DNA, 486 bp, Artificial Sequence
  Description of Artificial Sequence: Synthetic polynucleotide
atgaagatcagtcaatttggctctttagctttcgccccaattgtgcttttacaattattcattgttcaagcgcaacttctcacagattctaatgctcaggatttgaatactgcccttggacagaaagtgcaatacacctttcttgacactggaaattctaacgatcaattacttcatcttccaagcaccacctcttccagcattattactggttctttagctgctgctaatttcaccggttcttcttcttcttcttctataccaaaagtcacttccagcgtcataacatctataaattaccaatcctctaattctacggtagtcacccagttcacgccattgccttcttcttctagaaatgaaacaaaaagctctcaaacaactaatactataagtagtagtacaagcacaggaggtgtaggttctgtcaagccatgtctttacttcgttttaatgttagaaacaatcgcttatttgttttcttga

SEQ ID NO: 7275 - DNA, 312 bp, Saccharomyces cerevisiae
atggttactcaattcaaaactgccagcgaattcgactctgcaattgctcaagacaagctagttgtcgtagatttctacgccacttggtgcggtccatgtaaaatgattgctccaatgattgaaaaattctctgaacaatacccacaagctgatttctataaattggatgtcgatgaattgggtgatgttgcacaaaagaatgaagtttccgctatgccaactttgcttctattcaagaacggtaaggaagttgcaaaggttgttggtgccaacccagcggctattaagcaagccattgctgctaatgcttaa

SEQ ID NO: 7276 - DNA, 312 bp, Artificial Sequence
  Description of Artificial Sequence: Synthetic polynucleotide
atggttactcaattcaaaactgccagcgaattcgactctgcaattgctcaagacaagttggttgtcgtagatttctacgccacttggtgcggtccatgtaaaatgattgctccaatgattgaaaaattctctgaacaatacccacaagctgatttctataaattggatgtcgatgaattgggtgatgttgcacaaaagaatgaagtttccgctatgccaactttgcttttattcaagaacggtaaggaagttgcaaaggttgttggtgccaacccagcggctattaagcaagccattgctgctaatgcttga

SEQ ID NO: 7277 - DNA, 1692 bp, Saccharomyces cerevisiae
atgtctgaaattactttgggtaaatatttgttcgaaagattaaagcaagtcaacgttaacaccgttttcggtttgccaggtgacttcaacttgtccttgttggacaagatctacgaagttgaaggtatgagatgggctggtaacgccaacgaattgaacgctgcttacgccgctgatggttacgctcgtatcaagggtatgtcttgtatcatcaccaccttcggtgtcggtgaattgtctgctttgaacggtattgccggttcttacgctgaacacgtcggtgttttgcacgttgttggtgtcccatccatctctgctcaagctaagcaattgttgttgcaccacaccttgggtaacggtgacttcactgttttccacagaatgtctgccaacatttctgaaaccactgctatgatcactgacattgctaccgccccagctgaaattgacagatgtatcagaaccacttacgtcacccaaagaccagtctacttaggtttgccagctaacttggtcgacttgaacgtcccagctaagttgttgcaaactccaattgacatgtctttgaagccaaacgatgctgaatccgaaaaggaagtcattgacaccatcttggctttggtcaaggatgctaagaacccagttatcttggctgatgcttgttgttccagacacgacgtcaaggctgaaactaagaagttgattgacttgactcaattcccagctttcgtcaccccaatgggtaagggttccattgacgaacaacacccaagatacggtggtgtttacgtcggtaccttgtccaagccagaagttaaggaagccgttgaatctgctgacttgattttgtctgtcggtgctttgttgtctgatttcaacaccggttctttctcttactcttacaagaccaagaacattgtcgaattccactccgaccacatgaagatcagaaacgccactttcccaggtgtccaaatgaaattcgttttgcaaaagttgttgaccactattgctgacgccgctaagggttacaagccagttgctgtcccagctagaactccagctaacgctgctgtcccagcttctaccccattgaagcaagaatggatgtggaaccaattgggtaacttcttgcaagaaggtgatgttgtcattgctgaaaccggtacctccgctttcggtatcaaccaaaccactttcccaaacaacacctacggtatctctcaagtcttatggggttccattggtttcaccactggtgctaccttgggtgctgctttcgctgctgaagaaattgatccaaagaagagagttatcttattcattggtgacggttctttgcaattgactgttcaagaaatctccaccatgatcagatggggcttgaagccatacttgttcgtcttgaacaacgatggttacaccattgaaaagttgattcacggtccaaaggctcaatacaacgaaattcaaggttgggaccacctatccttgttgccaactttcggtgctaaggactatgaaacccacagagtcgctaccaccggtgaatgggacaagttgacccaagacaagtctttcaacgacaactctaagatcagaatgattgaaatcatgttgccagtcttcgatgctccacaaaacttggttgaacaagctaagttgactgctgctaccaacgctaagcaataa

SEQ ID NO: 7278 - DNA, 1692 bp, Artificial Sequence
  Description of Artificial Sequence: Synthetic polynucleotide
atgtctgaaattactttgggtaaatatttgttcgaaagattaaagcaagtcaacgttaacaccgttttcggtttgccaggtgacttcaacttgtccttgttggacaagatctacgaagttgaaggtatgagatgggctggtaacgccaacgaattgaacgctgcttacgccgctgatggttacgctcgtatcaagggtatgtcttgtatcatcaccaccttcggtgtcggtgaattgtctgctttgaacggtattgccggttcttacgctgaacacgtcggtgttttgcacgttgttggtgtcccatccatctctgctcaagctaagcaattgttgttgcaccacaccttgggtaacggtgacttcactgttttccacagaatgtctgccaacatttctgaaaccactgctatgatcactgacattgctaccgccccagctgaaattgacagatgtatcagaaccacttacgtcacccaaagaccagtctacttaggtttgccagctaacttggtcgacttgaacgtcccagctaagttgttgcaaactccaattgacatgtctttgaagccaaacgatgctgaatccgaaaaggaagtcattgacaccatcttggctttggtcaaggatgctaagaacccagttatcttggctgatgcttgttgttccagacacgacgtcaaggctgaaactaagaagttgattgacttgactcaattcccagctttcgtcaccccaatgggtaagggttccattgacgaacaacacccaagatacggtggtgtttacgtcggtaccttgtccaagccagaagttaaggaagccgttgaatctgctgacttgattttgtctgtcggtgctttgttgtctgatttcaacaccggttctttctcttactcttacaagaccaagaacattgtcgaattccactccgaccacatgaagatcagaaacgccactttcccaggtgtccaaatgaaattcgttttgcaaaagttgttgaccactattgctgacgccgctaagggttacaagccagttgctgtcccagctagaactccagctaacgctgctgtcccagcttctaccccattgaagcaagaatggatgtggaaccaattgggtaacttcttgcaagaaggtgatgttgtcattgctgaaaccggtacctccgctttcggtatcaaccaaaccactttcccaaacaacacctacggtatctctcaagtcttatggggttccattggtttcaccactggtgctaccttgggtgctgctttcgctgctgaagaaattgatccaaagaagagagttatcttattcattggtgacggttctttgcaattgactgttcaagaaatctccaccatgatcagatggggcttgaagccatacttgttcgtcttgaacaacgatggttacaccattgaaaagttgattcacggtccaaaggctcaatacaacgaaattcaaggttgggaccacttatccttgttgccaactttcggtgctaaggactatgaaacccacagagtcgctaccaccggtgaatgggacaagttgacccaagacaagtctttcaacgacaactctaagatcagaatgattgaaatcatgttgccagtcttcgatgctccacaaaacttggttgaacaagctaagttgactgctgctaccaacgctaagcaatga

SEQ ID NO: 7279 - DNA, 2667 bp, Saccharomyces cerevisiae
atgtcaggagaagaagaagtagattatacaacgttacccctagaagagcgattaacgtacaagttatggaaggcacgtttagaagcttataaggagttaaaccagctttttagaaactccgttggcgacatcagtagggatgacaacatacaaatttactggagggatcctacattatttgcacaatatataactgattctaatgtggtcgctcaagaacaagccattgttgccttgaatagtttaatagatgcctttgcgtcatcgtctttgaaaaatgcacataatattactttaatatcaacatggacaccattgcttgtggaaaagggcttaacgtcctcaagggctacaacgaagacgcagtcgatgagctgtatactctcactatgtggtcttgatacatctattacgcaatcggtggaattggtaataccctttttcgagaaaaaactgccaaaattaattgctgcggcagccaattgtgtttatgagttgatggctgcattcgggctcactaatgtgaacgttcaaacgtttctaccagaattattaaagcacgtacctcaactagccggtcatggtgatagaaacgttcgatcacaaacgatgaatttgattgtcgagatctataaggttacgggcaacaatagcgacttgttagaggagatactgtttaaaaaattaaaaccaattcaagtgaaagatcttcataaattgtttgcaaaagttggtgacgagccatcgtcatcgaaaatgttattcgagtgggagaaaagagaattggaaaagaaaagaagccaagaggaggaagccaggaaaagaaagtccatattatcgaatgatgagggggaatatcagatagataaggatggagatacattgatggggatggaaacggatatgccaccatcaaaacagcaaagtggagttcaaatagacaccttcagtatgctaccggaggagacgatcctcgataaactgcctaaggacttccaggaaaggataacgtcgtccaaatggaaagatagagtggaagcgctggaagaattttgggatagtgttctatcgcagactaagaagttaaaaagcacctcgcaaaattattccaacttattggggatatatggccatattatccagaaagatgcaaacattcaagctgttgcactagccgctcaatcagtagaattaatctgcgacaaactaaaaacaccaggcttttccaaggattatgtttcactagtcttcactcccttgttagacaggacaaaggaaaagaaaccttctgtgatagaggccattaggaaggcattattaaccatctgcaagtattacgatccattagcctccagtggacgcaatgaagatatgttgaaagatattttggagcatatgaagcacaagacacctcaaatcagaatggagtgtacgcaattgtttaatgcaagcatgaaagaagaaaaagatggatactcgaccctgcaaagatacttgaaggatgaagtggtaccaattgtgattcagatcgtcaacgacacccaacctgctataagaactattggatttgagagtttcgccattctaattaaaatatttggcatgaatacctttgtgaaaacattagagcacttggataatttgaaaaggaaaaaaattgaagaaacggtcaaaactctacctaatttcagtattgcaagtggtagtacccatagcactattgaaacgaataaacaaactgggccaatggagaataaatttctcctgaaaaaaagttctgtacttccctccaagagagtggcatcttcaccgctgagaaatgataacaaaagtaaagtgaacccaatagggtcagtagcctccgcatcaaaaccatcaatggtagctgctaacaataaatcgagggtcctgttgacgtctaagtctttggcaacgccaaaaaacgtagtagctaatagcactgacaagaatgaaaagttgattgaagaatacaagtacagactgcaaaaactacaaaatgatgagatgatatggaccaaagaaagacaaagcctattggaaaagatgaataatacagaaaattataagatcgaaatgattaaagaaaacgaaatgctaagagagcaactaaaggaagcgcagtctaaattgaacgaaaagaacattcaattaagatccaaggagattgatgtcaataagctgtctgatagagtactgtcactagaaaacgagcttagaaacatggagatcgaattggatagaaataagaaaagaaatgatacaaacttgcaatcgatgggtacgatttcatcatactccataccttcttccaccgtgtcaagcaactatggggtaaaatctttatcttccgctttgccatttaaggaggaggaagatgtcagaaggaaagaggacgtcaactatgaaagaagatcaagcgagtccatcggcgacctgccgcaccgcgtaaactctcttaacatacggccgtacagaaaaaacggcactggagtgagcagtgtctccgacgatttggatatcgatttcaacgatagttttgcctcagaagaaagttataaacgtgccgctgcagtgacatctaccctaaaggccagaattgaaaaaatgaaggccaaatcaaggcgggaagggacaaccaggacgtaa

SEQ ID NO: 7280 - DNA, 2667 bp, Artificial Sequence
  Description of Artificial Sequence: Synthetic polynucleotide
atgtctggagaagaagaagtagattatacaacgttacccttagaagagagattaacgtacaagttatggaaggcacgtttagaagcttataaggagttaaaccagctttttagaaactccgttggcgacatcagtagggatgacaacatacaaatttactggagggatcctacattatttgcacaatatataactgattctaatgtggtcgctcaagaacaagccattgttgccttgaatagtttaatagatgcctttgcgtcttcttctttgaaaaatgcacataatattactttaatatctacatggacaccattgcttgtggaaaagggcttaacgtccagcagggctacaacgaagacgcagtccatgagctgtatactctccttatgtggtcttgatacatctattacgcaatctgtggaattggtaataccctttttcgagaaaaaattaccaaaattaattgctgcggcagccaattgtgtttatgagttgatggctgcattcgggctcactaatgtgaacgttcaaacgtttttaccagaattattaaagcacgtacctcaattggccggtcatggtgatagaaacgttagatctcaaacgatgaatttgattgtcgagatctataaggttacgggcaacaatagcgacttgttagaggagatattgtttaaaaaattaaaaccaattcaagtgaaagatcttcataaattgtttgcaaaagttggtgacgagccatcttcttctaaaatgttattcgagtgggagaaaagagaattggaaaagaaaagaagccaagaggaggaagccaggaaaagaaagtccatattatccaatgatgagggggaatatcagatagataaggatggagatacattgatggggatggaaacggatatgccaccatctaaacagcaaagtggagttcaaatagacaccttcagtatgttaccggaggagacgatcctcgataaattacctaaggacttccaggaaaggataacgtcttccaaatggaaagatagagtggaagcgttagaagaattttgggatagtgttttatctcagactaagaagttaaaaagcacctctcaaaattattccaacttattggggatatatggccatattatccagaaagatgcaaacattcaagctgttgcattggccgctcaaagtgtagaattaatctgcgacaaattgaaaacaccaggcttttccaaggattatgtttctttggtcttcactcccttgttagacaggacaaaggaaaagaaaccttctgtgatagaggccattaggaaggcattattaaccatctgcaagtattacgatccattagcctccagtggacgcaatgaagatatgttgaaagatattttggagcatatgaagcacaagacacctcaaatcagaatggagtgtacgcaattgtttaatgcaagcatgaaagaagaaaaagatggatactctaccttacaaagatacttgaaggatgaagtggtaccaattgtgattcagatcgtcaacgacacccaacctgctataagaactattggatttgagagtttcgccattttaattaaaatatttggcatgaatacctttgtgaaaacattagagcacttggataatttgaaaaggaaaaaaattgaagaaacggtcaaaactttacctaatttcagtattgcaagtggtagtacccatagcactattgaaacgaataaacaaactgggccaatggagaataaatttctcttgaaaaaaagttctgtacttccctccaagagagtggcatcttctccgttaagaaatgataacaaaagtaaagtgaacccaatagggtctgtagcctccgcatccaaaccaagcatggtagctgctaacaataaatctagggtcttattgacgtctaagtctttggcaacgccaaaaaacgtagtagctaatagcactgacaagaatgaaaagttgattgaagaatacaagtacagattacaaaaattacaaaatgatgagatgatatggaccaaagaaagacaaagccttttggaaaagatgaataatacagaaaattataagatcgaaatgattaaagaaaacgaaatgttgagagagcaattgaaggaagcgcagtctaaattgaacgaaaagaacattcaattaagatccaaggagattgatgtcaataagttatctgatagagtattaagtttagaaaacgagcttagaaacatggagatcgaattggatagaaataagaaaagaaatgatacaaacttgcaatctatgggtacgatttcttcctactccataccttcttccaccgtgagtagcaactatggggtaaaatctttatcttccgctttgccatttaaggaggaggaagatgtcagaaggaaagaggacgtcaactatgaaagaagaagcagcgagtccatcggcgacttgccgcaccgcgtaaactctcttaacataagaccgtacagaaaaaacggcactggagtgagcagtgtctccgacgatttggatatcgatttcaacgatagttttgccagtgaagaaagttataaacgtgccgctgcagtgacatctaccttgaaggccagaattgaaaaaatgaaggccaaatctaggagagaagggacaaccaggacgtga

SEQ ID NO: 7281 - DNA, 813 bp, Saccharomyces cerevisiae
atggcaacacacacgagcaagagacgtattcatcgctgggaaaacaatgagttgtcagaggaaaattccacaataatatactttcctgcccgcggtttgatgtggacacattttcctttcgttttagggatttgtttagagttcgtgggttatgtgttgaaaatagtctttatcaatagcccctcgatttcgactttcattgctcaatcggtgcttctattgatagcaccttcactttacgcccttagtatttttatgttgttcagcaaaatggcacgtctaattcttatggaggcatatatgttaattcctgcgaaatttagtacagtttctttcgtagtggcagatatgattgggcgtgtcctacaggctgtaggaggtgggttgttatcctcatggaacagcaggaatactgggcgtatcctaattattgtgggtcttttcattcagatattttgttatacctttttaacgttcagtcaactttttcttcactataaaatgaaggcaacgcctagtaaaattgtgcgggatagtaatgaatggttccagtacaattttatacttttagctgggatattgctggttaatggtagaaccattgtcagagtagtacaatttctaatgggcttacaaagctatataggtcagcacgaatggtgcctttacgttttcgatacagttctaatgtttttactacctttgattttcctagcaacctttcgcgcaagaaatttgttcaagctgcaggataaatctgtcaatattcaattaaacaaattattagacaaggaatctgtgtctgaagattaa

SEQ ID NO: 7282 - DNA, 813 bp, Artificial Sequence
  Description of Artificial Sequence: Synthetic polynucleotide
atggcaacacacacgagcaagagacgtattcatcgctgggaaaacaatgagttgagtgaggaaaattccacaataatatactttcctgcccgcggtttgatgtggacacattttcctttcgttttagggatttgtttagagttcgtgggttatgtgttgaaaatagtctttatcaatagcccctctatttctactttcattgctcaatctgtgcttttattgatagcaccttctctttacgcccttagtatttttatgttgttcagcaaaatggcacgtttaattcttatggaggcatatatgttaattcctgcgaaatttagtacagtttctttcgtagtggcagatatgattgggcgtgtcttacaggctgtaggaggtgggttgttatcctcttggaacagcaggaatactgggcgtatcttgattattgtgggtcttttcattcagatattttgttatacctttttaacgttcagtcaactttttcttcactataaaatgaaggcaacgcctagtaaaattgtgagagatagtaatgaatggttccagtacaattttatacttttagctgggatattgttggttaatggtagaaccattgtcagagtagtacaatttttgatgggcttacaaagctatataggtcagcacgaatggtgcctttacgttttcgatacagttttgatgtttttattgcctttgattttcttggcaacctttcgcgcaagaaatttgttcaagttacaggataaatctgtcaatattcaattaaacaaattattagacaaggaatctgtgtctgaagattga

SEQ ID NO: 7283 - DNA, 2061 bp, Saccharomyces cerevisiae
atgaatttaaagtccatcgttagctggttcaaggaacatcttcccagttttgatgtcgacgtggacaagcattttagaactttaagagtccgcaaatattctcagatatgtcttttaatttctttcattataatatgtgttattatacccttaatgaattatttgttgctaactgacaaattcttcaaaatatgtcaccatttaaagcatcatgttttcaacagaagatcatgggttcacaaaacacatatgtatcacaaacagtcactacaactatgtttaatatgctttgttttcacctcgttttttgttatacaaggcgctaacggagatctgttagaaattactaagcgaatggggagaatttccgttgctttgatgccacctttactatttctaacgttgaggccatcaccgttacctcacacgttatacttagcattgttacctctccacaaatggatttccagaattgttgtgcttgaatctattctacacacgtggttctatctctattacatgtacattaatgatacgttatacgtgaaaatgagaaaactacccaacatttatggggttattgccctcggccttttcctactgattgccatcacctctgtgagatatgccagacgatggagctacagagttttttactatgttcactatgtaagcacatggcttattttggtgtttctacattatcacgctcgcccaggaatttcatattataccactttaaatgtgctcatattaacgggacaaatcgtctataggctccatatcaccaatgttacgagagttacgatagtacccatttcttcatcattgtctcttttggagttcccattaaccgatttacccaaaaagcccatcctaccaggagggcatctaaggatcaacatttaccatagaaattttttaaggaggtttttctcccatttgatacccttccaacatccttttactattgctagtattccaagtgataatttggtcaggttaattattagaaacgggcattttccattgcgtacaaatgaaaagtattacattacaggggcttttgaacctgagttgagtttcatttctaaacctactgttccttttaatattaccacgaaatcttccaagaatccatttcgaaacaattcttctgcactaataaattcgcctttaaattttctaattaaagcgcaaagagtgtttatgtgtgttggaggttcaggaatttcctttggcttaccactacttcgtattctaaacttcaacggtgtaaacgttaggctcctttgggtttctagagattataaggatctggaagtattgaaccacttcaaaaacaattttgaaggtatggagatatatattagtggcaccgaaggcaacgaacaggacatagaaattgattatattgactatcatgactgcgctgctgatattaatgatgaagtcaggagtatttcttcgagcggccgagtttcagaactgggagataattccatgttatcagatggaaatccccaacctacggagcccaatgagaacacagcccttctaagtaagaaatctaccttgagaaaccatcacccaccaaaaacaagtgatatacctgacatcaatgctgatgacgagatagattttacatatgcttttagcagatccaaatcaaggaaaaatactgcacaaggaactctaactacacattcttcgtttaacggatcgagcgttttcagacaaccaaagatcattgagccacctgcccaagatccttgtttagaggcggcgcctaaaaagatcagaattcccgcaggtgttaaagtgttctttggcaggcctacacttggagataaggattatgaatggtgtctgcaaaccgaatgtgatgcagagacggattctattcaatgttgcaggtgggcgaatcaaggcagagaccatgctgaatatttgtcacaagtatgggttctcgctgcaggccctagaggcttaattgaaagcaccaaaagatgggcgacagatggtggtttacactttcacggagaaagttttgcattataa

SEQ ID NO: 7284 - DNA, 2061 bp, Artificial Sequence
  Description of Artificial Sequence: Synthetic polynucleotide
atgaatttaaagtccatcgttagctggttcaaggaacatcttcccagttttgatgtcgacgtggacaagcattttagaactttaagagtccgcaaatattctcagatatgtcttttaatttctttcattataatatgtgttattatacccttaatgaattatttgttgttgactgacaaattcttcaaaatatgtcaccatttaaagcatcatgttttcaacagaagaagttgggttcacaaaacacatatgtatcacaaacagtccttacaattatgtttaatatgctttgttttcacctctttttttgttatacaaggcgctaacggagatttattagaaattactaagagaatggggagaatttccgttgctttgatgccacctttactttttttaacgttgaggccatctccgttacctcacacgttatacttagcattgttacctctccacaaatggatttccagaattgttgtgcttgaatctattttacacacgtggttctatctctattacatgtacattaatgatacgttatacgtgaaaatgagaaaattgcccaacatttatggggttattgccctcggccttttcttattgattgccatcacctctgtgagatatgccagaagatggagctacagagttttttactatgttcactatgtaagcacatggcttattttggtgtttttacattatcacgctcgcccaggaatttcttattataccactttaaatgtgctcatattaacgggacaaatcgtctataggctccatatcaccaatgttacgagagttacgatagtacccatttcttcttctttgtctcttttggagttcccattaaccgatttacccaaaaagcccatcttgccaggagggcatttaaggatcaacatttaccatagaaattttttaaggaggtttttctcccatttgatacccttccaacatccttttactattgctagtattccaagtgataatttggtcaggttaattattagaaacgggcattttccattgcgtacaaatgaaaagtattacattacaggggcttttgaacctgagttgagtttcatttctaaacctactgttccttttaatattaccacgaaatcttccaagaatccatttagaaacaattcttctgcattaataaattctcctttaaattttttgattaaagcgcaaagagtgtttatgtgtgttggaggttctggaatttcctttggcttaccattacttcgtattttgaacttcaacggtgtaaacgttaggctcctttgggtttctagagattataaggatttggaagtattgaaccacttcaaaaacaattttgaaggtatggagatatatattagtggcaccgaaggcaacgaacaggacatagaaattgattatattgactatcatgactgcgctgctgatattaatgatgaagtcaggagtatttcttctagcggcagagtttctgaattaggagataattccatgttaagtgatggaaatccccaacctacggagcccaatgagaacacagcccttttaagtaagaaatctaccttgagaaaccatcacccaccaaaaacaagtgatatacctgacatcaatgctgatgacgagatagattttacatatgcttttagcagatccaaatctaggaaaaatactgcacaaggaactttaactacacattcttcttttaacggaagcagcgttttcagacaaccaaagatcattgagccacctgcccaagatccttgtttagaggcggcgcctaaaaagatcagaattcccgcaggtgttaaagtgttctttggcaggcctacacttggagataaggattatgaatggtgtttgcaaaccgaatgtgatgcagagacggattctattcaatgttgcaggtgggcgaatcaaggcagagaccatgctgaatatttgtctcaagtatgggttctcgctgcaggccctagaggcttaattgaaagcaccaaaagatgggcgacagatggtggtttacactttcacggagaaagttttgcattatga

SEQ ID NO: 7285 - DNA, 759 bp, Saccharomyces cerevisiae
atgtctttaccagctacttttgatttgactccagaggatgcccaacttttgttggccgctaacacccatttaggtgctagaaacgttcaagtccaccaagaaccatacgttttcaatgctagaccagatggtgttcacgttatcaatgttggtaagacctgggaaaagttggttttggctgctagaattattgctgccattccaaacccagaagatgttgttgccatctcttccagaacctacggtcaaagagctgtcttgaaatttgctgctcacactggtgctactccaatcgccggtagattcactccaggttctttcactaattacatcacccgttctttcaaggaaccaagattggttattgttaccgacccaagattagacgctcaggccattaaggaagcttcttacgttaacattccagtcattgctttgactgatttggactccccatctgaatttgttgatgtcgccatcccatgtaacaacagaggtaagcactccatcggtttaatctggtacttgttggctagagaagttttgagactaagaggtgctttggtcgacagaactcaaccatggtccatcatgccagatttgtacttctacagaaacccagaagaagttgagcaagttgctgaagaagctgctgccgctgaagaaggtgaagaagaagaagttaaggaagaagtcactgaaggtcaagctgaagctactgaatgggctgaagaaaatgcagacaacgttgaatggtaa

SEQ ID NO: 7286 - DNA, 759 bp, Artificial Sequence
  Description of Artificial Sequence: Synthetic polynucleotide
atgtctttaccagctacttttgatttgactccagaggatgcccaacttttgttggccgctaacacccatttaggtgctagaaacgttcaagtccaccaagaaccatacgttttcaatgctagaccagatggtgttcacgttatcaatgttggtaagacctgggaaaagttggttttggctgctagaattattgctgccattccaaacccagaagatgttgttgccatctcttccagaacctacggtcaaagagctgtcttgaaatttgctgctcacactggtgctactccaatcgccggtagattcactccaggttctttcactaattacatcacccgttctttcaaggaaccaagattggttattgttaccgacccaagattagacgctcaggccattaaggaagcttcttacgttaacattccagtcattgctttgactgatttggactccccatctgaatttgttgatgtcgccatcccatgtaacaacagaggtaagcactccatcggtttaatctggtacttgttggctagagaagttttgagattgagaggtgctttggtcgacagaactcaaccatggtccatcatgccagatttgtacttctacagaaacccagaagaagttgagcaagttgctgaagaagctgctgccgctgaagaaggtgaagaagaagaagttaaggaagaagtcactgaaggtcaagctgaagctactgaatgggctgaagaaaatgcagacaacgttgaatggtga

SEQ ID NO: 7287 - DNA, 1287 bp, Saccharomyces cerevisiae
atggttaataatatcatgcacgagtacgtaccacccagtcagcggctattccatagcaggcatagaataacaagaaacgatttgaaagaagaggccctacattccgggaccacagattggacaacaattctggacacaacaatagataaagatactaatctcattagttatgctgtccccataatagacaactttgccattcctcgagcaaactctcaggggagtcctgtggccccttcgccgaatcacagatcaacgatgtactcttcttcatcttcttctgcgtcttctgtgttttctgatggtttgtttactccaaacaacaacaggaactcatcaggatcatcttcattagtcattagaccacaaaaaaatttgagtgtagattctttgattcaggaaaataaaaggaaaatcaatagtgaaaaagaatcgttatcattaattgccaataataacgatgaaaccttgtgcactcatactgatccatccatacaaaacctcattaaatcggaaacaaagaggaacatcttaaatttaaagtttcaaaatagaaacttatttcgaagagaactaaaattggaaaagttttggagcaatttgagaagttgtcatacatctggcgatgagacggacctgctgttggtgataagtaagcataacttatattggtttgggataccgaacgattttcgtcttccaatatacaagagatgtttatatcactatagcgaactagacgaagccggatttttcagtcagtatgcgaacaactcattgtatctagcaataaggaaatgttgtaacaacgaagagcaggaaactctatcccggtctattttcatcaatttgacgaaaaacgttacctggttgaatagtcgtttcgatgacaataaggacaacaagaattcttacacggttactgaggggaagttctatcaggactttcctaacttatactaccatttaaaggacaagttgaaattaaatgtgataatggatttcatcaagcctgtaataagaaattttatgaccaacgcattgaataagcacaaattagatggtattggtctagaacttttagatattctaatagtgactacctattatggtccgaataaaatcaatgctttcttaatggatacatttatcttaaacttgctaaaacagtgccattacaagttttttgtcagtaatatctctgagctggttattcaaatttctaaaatcgattgtgacttagtcattctgctagaagatttaaggtcacggattgatttagattga

SEQ ID NO: 7288 - DNA, 1287 bp, Artificial Sequence
  Description of Artificial Sequence: Synthetic polynucleotide
atggttaataatatcatgcacgagtacgtaccacccagtcagaggttgttccatagcaggcatagaataacaagaaacgatttgaaagaagaggccttgcattccgggaccacagattggacaacaattttggacacaacaatagataaagatactaatctcattagttatgctgtccccataatagacaactttgccattcctagagcaaactctcaggggagtcctgtggccccttctccgaatcacagatctacgatgtactcttcttcttcttcttctgcgtcttctgtgttttctgatggtttgtttactccaaacaacaacaggaactcttctggatcttcttctttagtcattagaccacaaaaaaatttgagtgtagattctttgattcaggaaaataaaaggaaaatcaatagtgaaaaagaatctttatctttaattgccaataataacgatgaaaccttgtgcactcatactgatccatccatacaaaacctcattaaaagtgaaacaaagaggaacatcttaaatttaaagtttcaaaatagaaacttatttagaagagaattgaaattggaaaagttttggagcaatttgagaagttgtcatacatctggcgatgagacggacttattattggtgataagtaagcataacttatattggtttgggataccgaacgattttcgtcttccaatatacaagagatgtttatatcactatagcgaattagacgaagccggatttttcagtcagtatgcgaacaactctttgtatttggcaataaggaaatgttgtaacaacgaagagcaggaaactttatccagatctattttcatcaatttgacgaaaaacgttacctggttgaatagtcgtttcgatgacaataaggacaacaagaattcttacacggttactgaggggaagttctatcaggactttcctaacttatactaccatttaaaggacaagttgaaattaaatgtgataatggatttcatcaagcctgtaataagaaattttatgaccaacgcattgaataagcacaaattagatggtattggtttggaacttttagatattttaatagtgactacctattatggtccgaataaaatcaatgctttcttaatggatacatttatcttaaacttgttgaaacagtgccattacaagttttttgtcagtaatatctctgagttagttattcaaatttctaaaatcgattgtgacttagtcattttattggaagatttaaggtctagaattgatttagattga

SEQ ID NO: 7289 - DNA, 486 bp, Saccharomyces cerevisiae
atgaagctaggacatcgtgagcaacaattctacttgtggtacttcatcgttcacattcccatcaccatattcatcgactcatcagtggttattcccgctaaatggcaactagggattgcgcaaaaggttgttagtgatcacatcgcaaagcaacacgatttcctgctatcagagaaaccagaatggctatactggtttgtagtccttgagctagttctgcaactaccccttttcgtctatttcgtcaataaattctggaattcaagcgaattacaagttaatacaaatagcagattgaaaaagtggttgcgtatctatggctggaatgcctctctaactaccttgatatgtatcgttgttattttcaagcgtggttacattccttacgatgtgctaaaaacaagcttgtccatgacccagaagtgtcagttagcctcggtgtacctacctacattcctaattcctttgcgtttgtgttttgtgtag

SEQ ID NO: 7290 - DNA, 486 bp, Artificial Sequence
  Description of Artificial Sequence: Synthetic polynucleotide
atgaagttgggacatcgtgagcaacaattctacttgtggtacttcatcgttcacattcccatcaccatattcatcgactcttctgtggttattcccgctaaatggcaattagggattgcgcaaaaggttgttagtgatcacatcgcaaagcaacacgatttcttattatctgagaaaccagaatggttatactggtttgtagtccttgagttagttttgcaattgccccttttcgtctatttcgtcaataaattctggaatagtagcgaattacaagttaatacaaatagcagattgaaaaagtggttgcgtatctatggctggaatgcctctttgactaccttgatatgtatcgttgttattttcaagcgtggttacattccttacgatgtgttgaaaacaagcttgtccatgacccagaagtgtcagttagcctctgtgtacttacctacattcttgattcctttgcgtttgtgttttgtgtga

SEQ ID NO: 7291 - DNA, 654 bp, Saccharomyces cerevisiae
atggatcaaagtgtggaagacttatttggagcactaagagatgctagtgccagtctagaagtaaaaaattcagcgaaggaacaagtttctcttcaacaagaggatgttttgcagataggcaataatgatgatgaagtagaaattgaaagtaaatttcaagagatcgaaactaatcttaagaagcttcctaagttagaaaccggatttgatgctttagcaaacaagaagaagaagaagaacgtcttgcctagtgtggagacagaagataaaagaaaacccaacaagagcgacaaaaacgataatgactggtttaccttaccaaagccagatgataacatgcgtcgtgaagttcaacgagatttattgctgattaaacatagagctgctcttgatccaaagagacattataagaagcaacgttgggaggtgccagagaggtttgctattggtaccataattgaagacaagagtgagttttatagtagtcgtatgaacaggaaggaaagaaagtcgactattttggaaacactcatgggtgatgaagcttctaataagtatttcaagcgtaaatacaacgaaattcaggagaaatctacgagcggtaggaaggcacattacaagaaaatgaaagagatgagaaagaagcggaggtga

SEQ ID NO: 7292 - DNA, 654 bp, Artificial Sequence
  Description of Artificial Sequence: Synthetic polynucleotide
atggatcaaagtgtggaagacttatttggagcattgagagatgctagtgccagtttagaagtaaaaaattctgcgaaggaacaagtttctcttcaacaagaggatgttttgcagataggcaataatgatgatgaagtagaaattgaaagtaaatttcaagagatcgaaactaatcttaagaagcttcctaagttagaaaccggatttgatgctttagcaaacaagaagaagaagaagaacgtcttgcctagtgtggagacagaagataaaagaaaacccaacaagagcgacaaaaacgataatgactggtttaccttaccaaagccagatgataacatgcgtcgtgaagttcaaagagatttattgttaattaaacatagagctgctcttgatccaaagagacattataagaagcaacgttgggaggtgccagagaggtttgctattggtaccataattgaagacaagagtgagttttatagtagtcgtatgaacaggaaggaaagaaagtctactattttggaaacactcatgggtgatgaagcttctaataagtatttcaagcgtaaatacaacgaaattcaggagaaatctacgagcggtaggaaggcacattacaagaaaatgaaagagatgagaaagaagagaaggtga

SEQ ID NO: 7293 - DNA, 753 bp, Saccharomyces cerevisiae
atgaagttcgaagacctcttggcaaccaataaacaggtgcagtttgctcatgcagctactcaacattacaaaagtgtcaaaactccagatttcttggagaaagacccacatcacaaaaaatttcataacgcagatggcttgaatcaacaaggttcttcgaccccatctacagctaccgatgcaaatgccgcctcaactgcttccactcacacaaacaccacgacattcaaaagacacattgttgccgtggatgacatatcgaaaatgaactatgaaatgataaagaattctccagggaatgtaataacgaacgctaaccaagatgagatagatataagcaccctcaagacaaggttgtacaaggacaatctttacgctatgaatgacaactttttacaagctgtcaatgaccaaattgtaacattaaatgcagcggagcaggaccaagaaactgaggaccctgacttatcagatgatgaaaaaattgatatactgaccaaaatccaagagaacttgcttgaagagtaccaaaaactttcacagaaagaaagaaagtggtttatattgaaagaactactgttggatgcaaatgtagaactcgatttgttcagtaatcgtggcaggaaggcaagccatccaatcgcattcggagcagtagccataccaacgaacgtcaatgcgaattcactagcatttaacagaaccaagagaagaaaaattaataagaacggccttttggaaaacattctttaa

SEQ ID NO: 7294 - DNA, 753 bp, Artificial Sequence
  Description of Artificial Sequence: Synthetic polynucleotide
atgaagttcgaagacctcttggcaaccaataaacaggtgcagtttgctcatgcagctactcaacattacaaaagtgtcaaaactccagatttcttggagaaagacccacatcacaaaaaatttcataacgcagatggcttgaatcaacaaggttcttccaccccatctacagctaccgatgcaaatgccgcctctactgcttccactcacacaaacaccacgacattcaaaagacacattgttgccgtggatgacatatccaaaatgaactatgaaatgataaagaattctccagggaatgtaataacgaacgctaaccaagatgagatagatataagcaccctcaagacaaggttgtacaaggacaatctttacgctatgaatgacaactttttacaagctgtcaatgaccaaattgtaacattaaatgcagcggagcaggaccaagaaactgaggaccctgacttaagtgatgatgaaaaaattgatatattgaccaaaatccaagagaacttgcttgaagagtaccaaaaactttctcagaaagaaagaaagtggtttatattgaaagaattattattggatgcaaatgtagaactcgatttgttcagtaatcgtggcaggaaggcaagccatccaatcgcattcggagcagtagccataccaacgaacgtcaatgcgaattctttggcatttaacagaaccaagagaagaaaaattaataagaacggccttttggaaaacattctttga

SEQ ID NO: 7295 - DNA, 327 bp, Saccharomyces cerevisiae
atggatatgcttcataataaatgtagtgatgctatcaaaagcacctccaatagcaatttgagtaatgaggtagacaaacaaaaattgcaatacgatgacctcgggaacaccggattttctgaactatttgagatggaatctcaagataataatgatagcatagaggatttcttgttctttaatataaatttaacccaggaggttgagttcgagaaccaaagacaatatgagcacacgaaaaagacaaagaagcataacccattctatgtaccgtcagaggtagtgcgagagatggtcaagaaacacgcattgaatggcagaatatag

SEQ ID NO: 7296 - DNA, 327 bp, Artificial Sequence
  Description of Artificial Sequence: Synthetic polynucleotide
atggatatgcttcataataaatgtagtgatgctatcaaaagcacctccaatagcaatttgagtaatgaggtagacaaacaaaaattgcaatacgatgacctcgggaacaccggattttctgaattatttgagatggaatctcaagataataatgatagcatagaggatttcttgttctttaatataaatttaacccaggaggttgagttcgagaaccaaagacaatatgagcacacgaaaaagacaaagaagcataacccattctatgtaccgagtgaggtagtgagagagatggtcaagaaacacgcattgaatggcagaatatga

SEQ ID NO: 7297 - DNA, 2175 bp, Saccharomyces cerevisiae
atggaagaaaaccaattaacgtgcttaatagttggagaaacaccagcagcacaatttctaggatggagactaagtttgagcaactcttttataatactggtctcgcaatatgtgtctagtgacgagttagttgcctggaaatcgacaaaactaggcgccaatttctacacgccaaacattctcactaaggatattaaagagctgcaccacaaattaaaacataacggtgcaaatacgtattcaattgacattgtgttagtgtctgcaatttccttacagtctttcgaaacaacttgtcgattgttgtcagattacacgaacgacaatacgactgtgcttattagcactgattttggttgcgaactggagcccatagccataagttattttggagggaagtgcaagtgtgttatttccatttcgtgtgaggttgaatgcagacagttatcgcttggatcatatgcattggtcaacgacgatcaatgtgtaataactttgggattaacttattgtgatgctaattttgaagcaagtccaaccattctggaaaacacgaaagcagcttcgttagaattgcaagggattaagggttcaaatgttcgcaggttccttcttggattgaccgttgcgaaatggatgaaatctaaattaattttggacccaaaacaaatggcattgaaaatgtgggaattgcttattcctaaaatctcacttaacatcctttctatcatctatgaacaatttgattatgagaaaatgttagaaaacaaatccacagaaattatttttaaagatctggtgaaagagttacttggaatttgctttgcacaatgtggaagcaaaattgcaaggtttttgctagtaaaatcacaaggtgaagaagagattaattttgggaaaatcgtagaatattgcaaaggtaaaaaactgcaacttatcaactctacggcaaacgaacatccggaatatttatccttaccgtttgagccttattgtttctaccaccgatttgaatatcctgctcaaattcttttgcatcagcccatcattttggccaaaaagtatggtgtttcgtgttcaaatttaaatttcctatatggattctatacgaggttactgacactaagtgggctatcaataaatggtggaaggtgtgagcatgccttgtcgatgttggacagcaggattggtggtggtattaacgttgcttcaggaattaatagcggccaagattttaccgatggtgataacgaggatcaagataaaggcaaaaacagagtggacaaaaatgtaaaggaaggttctttcattagtttaacacaacgattcacgatgacaagtccactgggtgtcaatgatccagctttaccagcggacttagaaaagttgtatttaggtgcagaatacattagcaattgcgacgcaaatacatctggtggtcaaaaacgagtaaaatctccaactaaagcagatacaggctacgatgataaacacttgcctgatgatacgatacatacatttgaagatgaatatttggccgatgaagacgacttttcttgccttggaattgacaaaagaagctcaacaaagcccacaaagcctctagaaaaatttggagtggttgctgtgccacacttcatcaggaggttttctattaaaaggtcgagtaaggataaatcaaatgatatgaaaagaccatatactacaagcagcttggagttgcaattaaggtcaaatcactttatgttcgccaaagaataccaagacttacatagacaattatattacgaagttaaaccaaggacgcaatcagaattggacgcaagacgtcgaaactattctgaattagaatctcagatgtggaaaattaaacatcggttcaatattcatagaggagcactgcctcgtccacgaacgaatccgtatgagctattactggaccacattgatgttttgaaccgtggcaacactggggatattttgagatttaccactagtagatacggtggtgtagatacgtatgattccatcttgagggaccaatccacgatcatggaacttttagataaacggtgtgcctattcacctccagtactgttcgataatgaggctaaagaacgtgatcatgatcgcgattgttatcaagattacaatcacgaccaccggagtcattaa

SEQ ID NO: 7298 - DNA, 2175 bp, Artificial Sequence
  Description of Artificial Sequence: Synthetic polynucleotide
atggaagaaaaccaattaacgtgcttaatagttggagaaacaccagcagcacaatttttgggatggagattaagtttgagcaactcttttataatattggtctctcaatatgtgtctagtgacgagttagttgcctggaaatctacaaaattgggcgccaatttctacacgccaaacattctcactaaggatattaaagagttgcaccacaaattaaaacataacggtgcaaatacgtattctattgacattgtgttagtgtctgcaatttccttacagtctttcgaaacaacttgtagattgttgagtgattacacgaacgacaatacgactgtgcttattagcactgattttggttgcgaattagagcccatagccataagttattttggagggaagtgcaagtgtgttatttccattagttgtgaggttgaatgcagacagttatctcttggatcctatgcattggtcaacgacgatcaatgtgtaataactttgggattaacttattgtgatgctaattttgaagcaagtccaaccattttggaaaacacgaaagcagcttctttagaattgcaagggattaagggtagtaatgttcgcaggttccttcttggattgaccgttgcgaaatggatgaaatctaaattaattttggacccaaaacaaatggcattgaaaatgtgggaattgcttattcctaaaatctctcttaacatcctttctatcatctatgaacaatttgattatgagaaaatgttagaaaacaaatccacagaaattatttttaaagatttggtgaaagagttacttggaatttgctttgcacaatgtggaagcaaaattgcaaggtttttgttagtaaaatctcaaggtgaagaagagattaattttgggaaaatcgtagaatattgcaaaggtaaaaaattacaacttatcaactctacggcaaacgaacatccggaatatttatccttaccgtttgagccttattgtttctaccacagatttgaatatcctgctcaaattcttttgcatcagcccatcattttggccaaaaagtatggtgtttcttgttctaatttaaatttcctctatggattctatacgaggttattaacattgagtgggctttccataaatggtggaaggtgtgagcatgccttgtccatgttggacagcaggattggtggtggtattaacgttgcttctggaattaatagcggccaagattttaccgatggtgataacgaggatcaagataaaggcaaaaacagagtggacaaaaatgtaaaggaaggttctttcattagtttaacacaaagattcacgatgacaagtccattgggtgtcaatgatccagctttaccagcggacttagaaaagttgtatttaggtgcagaatacattagcaattgcgacgcaaatacatctggtggtcaaaaaagagtaaaatctccaactaaagcagatacaggctacgatgataaacacttgcctgatgatacgatacatacatttgaagatgaatatttggccgatgaagacgacttttcttgccttggaattgacaaaagaagctctacaaagcccacaaagcctttggaaaaatttggagtggttgctgtgccacacttcatcaggaggttttctattaaaaggtctagtaaggataaatctaatgatatgaaaagaccatatactacaagcagcttggagttgcaattaaggtctaatcactttatgttcgccaaagaataccaagacttacatagacaattatattacgaagttaaaccaaggacgcaaagtgaattggacgcaagacgtcgtaactattctgaattagaatctcagatgtggaaaattaaacatagattcaatattcatagaggagcattacctcgtccaagaacgaatccgtatgagttattattagaccacattgatgttttgaaccgtggcaacactggggatattttgagatttaccactagtagatacggtggtgtagatacgtatgattccatcttgagggaccaatccacgatcatggaacttttagataaaagatgtgcctattctcctccagtattattcgataatgaggctaaagaacgtgatcatgatcgcgattgttatcaagattacaatcacgaccacagaagtcattga

SEQ ID NO: 7299 - DNA, 1809 bp, Saccharomyces cerevisiae
atggacgaggttgacgatattctaattaacaaccaggtggtggatgacgaggaggatgacgaagagatgctgagtgggctggaaaacgactcaaagcaggacctcgaggggaatgatgacggtggtgaagatgaagaggatgacgatgatgatgatgaggacgatgatgatgacgaggacgaacgagaggacgacgatgaacaggaggacgacgatggtgaggacgacgccgcaagaatggataagactgctacaccgacgaatgagcaccagcatgatgagcaaaaggctgctgctgctggtgctggcggtgcaggcgatagtggcgatgctgttactaagattggatccgaggatgtgaaattgagcgatgttgatggaggagtggggtccagggaagcatcttcctctacacacgaagcctctgctaatggagaggtttatgagtactataagcacatgttgaatgccgcacagattgcggattcgtacaatatctaccccacggcagccatacccatccagacgcacgtcaatgcgttggccgtgtccaggggtctcaagtacctgtttttgggcggtagcgatggatacataaggaagtacgacttgctgaacacgcttgaggggaaactttctctaactatcctgcagaagcattcgttggctgagtctattcagaacgcgggtatcttgcagtcgtactgggaaaatgagatcccgcagaaaaaatcagaaatgaaactctccgctaataagacagattacgagcccaaagttagccccgttcattctttggaagtccaaagcgaatgcctctttatactgagcgggctacagaatggtgggattaccatgcagggcgttcgctacatggaggggagcattgcgcactattttaagggcaggaatggacatacccaaatcgttaacatactgagattaaacggtcaagaggacaggtttttgagtggttcctgggataagcgtcttttggaatgggatttgcagacgggtgacatagttaatgagtttaaaaaatcaaggtctgaattgtcatctttggaaatgcggccgctgtactcgtccgtggatgtgtccggtaacgtcaacagtggtaaagagaatgaaaatgcagatgacgatatggattctctgtttggtgatgaagacgaagacgaaaagcaagatgctggcaacgaacccgtcgagacgggggatggttctaatggtgaagagaacaaagaacagatatctgaagaatctttgaacatagtctatgatgaatccgtttttatgacctcagggttgaacggttccgtgcatatttgggaccgacgcatgacgcagtcgccagcattgtctctggagagaggtgcaggcgtcccaccgtggtgtttgtccgcatgttggggtgtagatggtgatcatgtgtatgcagggagaaggaatgcctgtgtggagcagtttgacttgaagatgccctcgaaacctatccataatttgaaactgccttctatttcagggcctgtctcttgtgttaaagccatgcctaataacaagcatttactatgtgcatcgcgggataatatcagattgtacaacgttgaaattgcagtagatgcttcgaattcgactacaaagagttctaaagtgccgttcctcatcgtgccgggccatcacggtggtattatatcaaacttatacctcgaccccacttcaagatttataataagcacaagtggcaacagaggctggcaggggaattctacggacacgacccttatttacgatatagacttagaatag

SEQ ID NO: 7300 - DNA, 1809 bp, Artificial Sequence
  Description of Artificial Sequence: Synthetic polynucleotide
atggacgaggttgacgatattttaattaacaaccaggtggtggatgacgaggaggatgacgaagagatgttaagtgggttggaaaacgactccaagcaggacctcgaggggaatgatgacggtggtgaagatgaagaggatgacgatgatgatgatgaggacgatgatgatgacgaggacgaaagagaggacgacgatgaacaggaggacgacgatggtgaggacgacgccgcaagaatggataagactgctacaccgacgaatgagcaccagcatgatgagcaaaaggctgctgctgctggtgctggcggtgcaggcgatagtggcgatgctgttactaagattggatccgaggatgtgaaattgagcgatgttgatggaggagtggggtccagggaagcatcttcctctacacacgaagcctctgctaatggagaggtttatgagtactataagcacatgttgaatgccgcacagattgcggattcttacaatatctaccccacggcagccatacccatccagacgcacgtcaatgcgttggccgtgtccaggggtctcaagtacttgtttttgggcggtagcgatggatacataaggaagtacgacttgttgaacacgcttgaggggaaactttctttgactatcttacagaagcattctttggctgagtctattcagaacgcgggtatcttgcagtcttactgggaaaatgagatcccgcagaaaaaaagtgaaatgaaactctccgctaataagacagattacgagcccaaagttagccccgttcattctttggaagtccaaagcgaatgcctctttatattaagcgggttgcagaatggtgggattaccatgcagggcgttcgctacatggaggggagcattgcgcactattttaagggcaggaatggacatacccaaatcgttaacatattaagattaaacggtcaagaggacaggtttttgagtggttcctgggataagcgtcttttggaatgggatttgcagacgggtgacatagttaatgagtttaaaaaatctaggtctgaattgtcttctttggaaatgagaccgttgtactcttccgtggatgtgtccggtaacgtcaacagtggtaaagagaatgaaaatgcagatgacgatatggattctttatttggtgatgaagacgaagacgaaaagcaagatgctggcaacgaacccgtcgagacgggggatggttctaatggtgaagagaacaaagaacagatatctgaagaatctttgaacatagtctatgatgaatccgtttttatgacctctgggttgaacggttccgtgcatatttgggaccgtcgcatgacgcagtctccagcattgtctttggagagaggtgcaggcgtcccaccgtggtgtttgtccgcatgttggggtgtagatggtgatcatgtgtatgcagggagaaggaatgcctgtgtggagcagtttgacttgaagatgccctctaaacctatccataatttgaaattaccttctatttctgggcctgtctcttgtgttaaagccatgcctaataacaagcatttattatgtgcaagcagagataatatcagattgtacaacgttgaaattgcagtagatgcttctaattctactacaaagagttctaaagtgccgttcctcatcgtgccgggccatcacggtggtattataagcaacttatacctcgaccccacttccagatttataataagcacaagtggcaacagaggctggcaggggaattctacggacacgacccttatttacgatatagacttagaatga

SEQ ID NO: 7301 - DNA, 1098 bp, Saccharomyces cerevisiae
atggatttggtcttagaagtcgctgaccattatgtcttagacgacttgtacgctaaagttctgcccgcttcgttggcagctaatattcctgtcaagtggcagaaattgctagggttgaacagtgggttcagcaattctacgattttgcaggagactttgaactccaagaatgccgtcaaagaatgtagaaggttctacgggcaggtgccattcctgtttgatatgtcgacgacgtcttttgcatcgctattgcctcgttccagcatcttgagagaattcctctcactatgggttattgttacgatctttggtttactactttacttattcacggctagtctcagctacgtgtttgtgtttgacaagtcgattttcaaccatcctcgttacttgaaaaaccaaatggcaatggaaatcaagttggcagtcagtgctatcccatggatgtcgatgttgaccgttccatggtttgttatggaattgaacggccattctaaactatacatgaagattgattatgaaaaccacggtgtaaggaagctcattatcgagtacttcactttcatctttttcactgattgcggtgtgtatttagcgcacagatggttgcattggccaagggtctaccgtgctctgcacaagcctcatcacaagtggctggtctgcacacctttcgcatctcattctttccatcctgtagacgggtttttgcaatccatctcgtaccacatctacccattgattctgccattacacaaggtttcttatttgattctgttcacttttgttaacttttggactgttatgattcatgacggtcaatacctatcaaacaatcctgccgtcaacggtactgcctgccacacggttcaccatctatatttcaactacaactacggtcaattcaccactctgtgggacagactagggggttcttaccgtagaccagatgactcattgtttgatcctaagttaagagatgctaaggagacctgggacgctcaagttaaggaagttgaacatttcatcaaggaggtcgaaggtgatgataatgatagaatctatgaaaacgacccaaataccaagaagaacaactga

SEQ ID NO: 7302 - DNA, 1098 bp, Artificial Sequence
  Description of Artificial Sequence: Synthetic polynucleotide
atggatttggtcttagaagtcgctgaccattatgtcttagacgacttgtacgctaaagttttgcccgcttctttggcagctaatattcctgtcaagtggcagaaattgttggggttgaacagtgggttcagcaattctacgattttgcaggagactttgaactccaagaatgccgtcaaagaatgtagaaggttctacgggcaggtgccattcttatttgatatgtctacgacgtcttttgcatctttgttgcctcgttccagcatcttgagagaattcctctccttatgggttattgttacgatctttggtttattactttacttattcacggctagtctcagctacgtgtttgtgtttgacaagtctattttcaaccatcctcgttacttgaaaaaccaaatggcaatggaaatcaagttggcagtcagtgctatcccatggatgtccatgttgaccgttccatggtttgttatggaattgaacggccattctaaactttacatgaagattgattatgaaaaccacggtgtaaggaagctcattatcgagtacttcactttcatctttttcactgattgcggtgtgtatttagcgcacagatggttgcattggccaagggtctaccgtgctttacacaagcctcatcacaagtggttagtctgcacacctttcgcatctcattctttccatcctgtagacgggtttttgcaatccatctcctaccacatctacccattgattttaccattacacaaggtttcttatttgattcttttcacttttgttaacttttggactgttatgattcatgacggtcaatacctttccaacaatcctgccgtcaacggtactgcctgccacacggttcaccatttatatttcaactacaactacggtcaattcaccactttatgggacagattagggggttcttaccgtagaccagatgactctttgtttgatcctaagttaagagatgctaaggagacctgggacgctcaagttaaggaagttgaacatttcatcaaggaggtcgaaggtgatgataatgatagaatctatgaaaacgacccaaataccaagaagaacaactga

SEQ ID NO: 7303 - DNA, 2550 bp, Saccharomyces cerevisiae
atgtccatagcgcgattagtatactctcttttcagaagagtacgatcggttctcttacttttcattaccatatcgctattgttttactatacgttccagaatgaaatcgatatcttgaattcgtacgctttaaacgactcactaccgtccataaacaactatgagcacaatacagaaggttcttcgaaactggatcctccagacctatcgtcaaccggttctgaccgaatagccaccgacaaggaaaatggcaacgttgcagtggatttgtcagatccagctacattgagagaaaaaaacaagtactttcccttgctgttaaagggatcgtctcaccagattggttcgaatttaccaatttcgtctcttttgacatataaggaaaagtatcccgtcttgttcgaatactcatcaccttccttaacttctataagccagaatgacgttcataagatacagccggcaatgcaattgccaccagatgttgatatgataaaacagataaaggacattttcatgaaatcatggaaccaagagcagttgctgctgaaaagtaacctcagaagggaatctacttggcccatagatctaattgattctctagatacattgtatctatgtggcgagacgaaactttttcaagattctgttaatataatagaagattttgactttcgagtacctccgttagcaatggaagttattgatattcctgacatcactacccgtgtcctagaagggttactgtctgcatacgaattatctatggataaacgattacttaacaaagcaaaacatgttgcagatttcatattaagatcatttgatacccctaatagaattcctattttgaaatatttttggaaatctgatctgagaaatcgatttccagaccgtactgttccatcaggtcaattgactactatggcactcgcgtttatcagattgtcacagttaacccgtttgaataagtattttgatgctgttgaaagagttttcaccactatacgtcaatcatataacgaatttgatatggagtttatgctgcctgacgtcgttgatgcctctggttgccagttattaactcaagaggaaattgagaatggtgcacacctaaagggatccagcatcatgaaaagtatcaatgaaaatttcaagttcgtacactgtcagcagttagggaaattcttaaatcctccaatagatgataatagcctccaagaacaatctcaataccaggcttatagaattaatgaaaaaacagtacccattctagaaaatctattcaaaatcaatgacctcttccaatcttcttatgatatcctggacggctcaagtaaaaatgctaatgctgcaacgatggaccccagtattggttcagaggtagaagcagtcgacgaaataattgagaaaagaaactttaaagacggtactaaaaaagattcgacaaaaaacaccgtaggtgataaatcattaatagactcgcaaacgtttttaacaaattccatcagtaacatttttaaattcatgacttttcgacccatgttgcccaagcaaacggaaaacaaaaagtttaattttctgaattccattctaacaaaatctcaattcatgcccacgactaatgagctagatgtcacgataagaaaatcttacgatgtctcgttatactcatgcagacttggcggcattctaggtttaagttcacgtgttccccaccgaggcggtgtcaacacgaaatatattttaccatcgtcactattggaaatgagcgaaataataacagaaagttgttttatgctaatggaggagttcgacgggctgctccctcaaaaattcgagttggacccttgcactgatgagactaatgggaattgcgagtttaacggcgaaactaaatcacgaatgattgccaacggcgaatatgaaacttttgaaaatgacctagatgtcgggatcaaagtttcgaattatgggaaaggtgggaatgaccagaaagctaagagaaatgtactaagcaaagatgggataacagagactcaaaacataaaaggtgatactgttggaagctcgaaatcgattgctgaaatagacggcgacgaagtaacgcaaatacgtagagtttttacgcttggtaaggatatcaaaccgcatattacaacggacgataccatgggttctcagtggaaaaaccatccagactggccattttgggtcaacaaggtagaatccagaagattgttggattcgaatatcattgaatctatattttatatgtacagaatcagtggagaacaaaaatggagaagcatgggtaagcagtcttttggaatcttaatgcaagaattaatggaactaaacagtggtgccaaaggattgtggcaaataaaggaattttatgaaaacggtgaaaaagtgaacaatgatttacctagctattggttctccagaacattaaaatactatttgctactattcagcgatggtgacaaggtttccctggacaaacacatcttaactcaaggagggcacataatcaaaaagaaatga

SEQ ID NO: 7304 - DNA, 2550 bp, Artificial Sequence
  Description of Artificial Sequence: Synthetic polynucleotide
atgtccatagcgagattagtatactctcttttcagaagagtaagatctgttctcttacttttcattaccatatctttgttgttttactatacgttccagaatgaaatcgatatcttgaattcttacgctttaaacgactctttaccgtccataaacaactatgagcacaatacagaaggttcttctaaattggatcctccagacctttcttccaccggttctgacaggatagccaccgacaaggaaaatggcaacgttgcagtggatttgagtgatccagctacattgagagaaaaaaacaagtactttcccttgttattaaagggatcttctcaccagattggtagtaatttaccaatttcttctcttttgacatataaggaaaagtatcccgtcttgttcgaatactcttctccttccttaacttctataagccagaatgacgttcataagatacagccggcaatgcaattgccaccagatgttgatatgataaaacagataaaggacattttcatgaaaagttggaaccaagagcagttgttgttgaaaagtaacctcagaagggaatctacttggcccatagatttgattgattctttagatacattgtatttatgtggcgagacgaaactttttcaagattctgttaatataatagaagattttgactttagagtacctccgttagcaatggaagttattgatattcctgacatcactacccgtgtcttggaagggttattatctgcatacgaattatctatggataaaagattacttaacaaagcaaaacatgttgcagatttcatattaagatcttttgatacccctaatagaattcctattttgaaatatttttggaaatctgatttgagaaatagatttccagaccgtactgttccatctggtcaattgactactatggcactcgcgtttatcagattgtctcagttaacccgtttgaataagtattttgatgctgttgaaagagttttcaccactatacgtcaaagttataacgaatttgatatggagtttatgttgcctgacgtcgttgatgcctctggttgccagttattaactcaagaggaaattgagaatggtgcacacttgaagggatccagcatcatgaaaagtatcaatgaaaatttcaagttcgtacactgtcagcagttagggaaattcttaaatcctccaatagatgataatagcctccaagaacaatctcaataccaggcttatagaattaatgaaaaaacagtacccattttggaaaatttattcaaaatcaatgacctcttccaatcttcttatgatatcttggacggctccagtaaaaatgctaatgctgcaacgatggaccccagtattggttctgaggtagaagcagtcgacgaaataattgagaaaagaaactttaaagacggtactaaaaaagattctacaaaaaacaccgtaggtgataaatctttaatagactctcaaacgtttttaacaaattccatcagtaacatttttaaattcatgacttttagacccatgttgcccaagcaaacggaaaacaaaaagtttaattttttgaattccattttaacaaaatctcaattcatgcccacgactaatgagttagatgtcacgataagaaaatcttacgatgtctctttatactcttgcagacttggcggcattttgggtttaagttctcgtgttccccacaggggcggtgtcaacacgaaatatattttaccatcttctttgttggaaatgagcgaaataataacagaaagttgttttatgttaatggaggagttcgacgggttactccctcaaaaattcgagttggacccttgcactgatgagactaatgggaattgcgagtttaacggcgaaactaaatctagaatgattgccaacggcgaatatgaaacttttgaaaatgacttggatgtcgggatcaaagtttctaattatgggaaaggtgggaatgaccagaaagctaagagaaatgtattgagcaaagatgggataacagagactcaaaacataaaaggtgatactgttggaagcagtaaatccattgctgaaatagacggcgacgaagtaacgcaaatacgtagagtttttacgcttggtaaggatatcaaaccgcatattacaacggacgataccatgggttctcagtggaaaaaccatccagactggccattttgggtcaacaaggtagaatccagaagattgttggattctaatatcattgaatctatattttatatgtacagaatcagtggagaacaaaaatggagaagcatgggtaagcagtcttttggaatcttaatgcaagaattaatggaattgaacagtggtgccaaaggattgtggcaaataaaggaattttatgaaaacggtgaaaaagtgaacaatgatttacctagctattggttctccagaacattaaaatactatttgttattattcagcgatggtgacaaggtttccttggacaaacacatcttaactcaaggagggcacataatcaaaaagaaatga

SEQ ID NO: 7305 - DNA, 1410 bp, Saccharomyces cerevisiae
atgccttacactctatccgacgctcatcataagttgatcacctctcatttggtggacaccgaccctgaagtggactccattatcaaggatgaaattgaaagacaaaagcactccatcgatttgattgcttctgaaaatttcacctcaacctccgttttcgatgcccttggaactccattgtccaacaaatactctgaaggttatccaggtgctcgttactacggtggtaatgaacacattgacagaatggaaattctatgtcaacaaagagctttgaaagctttccatgttactccagacaaatggggtgttaacgtccaaactttatctggttctcctgctaacttgcaggtttatcaagctattatgaagcctcatgaaagattgatgggtctatacctaccagatggtggtcatttgtctcacggttacgctactgaaaacagaaaaatttctgctgtttccacatacttcgaatctttcccatacagagttaacccagaaaccggtattatcgactacgatactttagaaaagaacgccatcctatatagaccaaaggttcttgttgctggtacttcagcatactgtcgtttaattgactacaagagaatgagagaaatcgccgacaaatgtggtgcttacttgatggtagacatggcccacatttctggtttgatcgccgcaggtgtcatcccatctcctttcgaatacgctgatatcgttaccaccaccactcacaagtctttgagaggtccacgtggtgctatgattttcttcagaagaggtgtgagatctatcaaccctaagaccggtaaggaagttctatacgacttggaaaacccaattaacttctctgttttcccaggtcaccaaggtggtccacacaaccataccattgctgctttggccactgctttgaagcaagctgccactccagaattcaaggaataccaaactcaagtcttgaagaatgctaaggctttggaaagtgaatttaagaacttgggctacagattagtttccaacggtaccgattctcacatggttctagtatccttgagagaaaagggtgttgatggtgctcgtgttgaatacatttgtgaaaagattaacattgctttgaacaaaaactctattccaggtgacaaatctgctttggttccaggtggtgtccgtattggggctccagccatgaccactagaggaatgggtgaagaagatttccacagaattgttcaatacattaacaaggctgtagaattcgctcaacaagttcaacaaagcttgccaaaggatgcttgtagattaaaggacttcaaagccaaggtcgacgaaggctctgatgttttgaacacctggaaaaaggaaatttacgactgggctggcgaatacccattggctgtgtaa

SEQ ID NO: 7306 - DNA, 1410 bp, Artificial Sequence
  Description of Artificial Sequence: Synthetic polynucleotide
atgccttacactttatccgacgctcatcataagttgatcacctctcatttggtggacaccgaccctgaagtggactccattatcaaggatgaaattgaaagacaaaagcactccatcgatttgattgcttctgaaaatttcacctccacctccgttttcgatgcccttggaactccattgtccaacaaatactctgaaggttatccaggtgctcgttactacggtggtaatgaacacattgacagaatggaaattctttgtcaacaaagagctttgaaagctttccatgttactccagacaaatggggtgttaacgtccaaactttatctggttctcctgctaacttgcaggtttatcaagctattatgaagcctcatgaaagattgatgggtttatacttgccagatggtggtcatttgtctcacggttacgctactgaaaacagaaaaatttctgctgtttccacatacttcgaatctttcccatacagagttaacccagaaaccggtattatcgactacgatactttagaaaagaacgccatcttatatagaccaaaggttcttgttgctggtacttctgcatactgtcgtttaattgactacaagagaatgagagaaatcgccgacaaatgtggtgcttacttgatggtagacatggcccacatttctggtttgatcgccgcaggtgtcatcccatctcctttcgaatacgctgatatcgttaccaccaccactcacaagtctttgagaggtccacgtggtgctatgattttcttcagaagaggtgtgagatctatcaaccctaagaccggtaaggaagttctttacgacttggaaaacccaattaacttctctgttttcccaggtcaccaaggtggtccacacaaccataccattgctgctttggccactgctttgaagcaagctgccactccagaattcaaggaataccaaactcaagtcttgaagaatgctaaggctttggaaagtgaatttaagaacttgggctacagattagtttccaacggtaccgattctcacatggttttggtatccttgagagaaaagggtgttgatggtgctcgtgttgaatacatttgtgaaaagattaacattgctttgaacaaaaactctattccaggtgacaaatctgctttggttccaggtggtgtccgtattggggctccagccatgaccactagaggaatgggtgaagaagatttccacagaattgttcaatacattaacaaggctgtagaattcgctcaacaagttcaacaaagcttgccaaaggatgcttgtagattaaaggacttcaaagccaaggtcgacgaaggctctgatgttttgaacacctggaaaaaggaaatttacgactgggctggcgaatacccattggctgtgtga

SEQ ID NO: 7307 - DNA, 810 bp, Saccharomyces cerevisiae
atgaagtggttgttgtttccggcaagaatcgtagctcgcactcgcccaaacctcttctcgctgtacagaagatccgtttcacagtacttacgtcctcgaaccatccaaaacctgcaatcaatggcgcaaacacccgaacttaaaaccaagctgttcaaacccttggtctggatcgactgcgagatgaccggtttagaccacgtgaatgacagaattatcgagatttgctgcatcatcaccgatggacacctggcacccgtcaaagcggccgatggccaaggagactcgcattatgagagcgtcatccattatggtcccgaggtgatgaacaaaatgaacgagtggtgtattgagcaccacggtaatagcggtctcaccgccaaagttttggcaagtgagaagactttggcccaggtagaagatgagctgctcgagtacatccagcgctacatcccagacaagaacgttggcgtcttggcaggcaatagtgtacatatggaccgcttgttcatggtccgcgagtttcccaaggtcattgatcatctcttttacagaatagttgacgtcagtagcatcatggaagttgcccgcagacacaatcccgctttacaagcacgtaatccaaaaaaagaagctgcccacactgcttatagtgatatcaaagagagcatagctcaattgcaatggtacatggacaactacttgaagccaccacaggaaacagagtcggtcgagtcaatcggatctgaacagccggagtcaccatcttcatctacctcatctttgaaaagacaacgcaccgatttttaa

SEQ ID NO: 7308 - DNA, 810 bp, Artificial Sequence
  Description of Artificial Sequence: Synthetic polynucleotide
atgaagtggttgttgtttccggcaagaatcgtagctcgcactcgcccaaacctcttctccttgtacagaagatccgtttctcagtacttacgtcctagaaccatccaaaacttacaatctatggcgcaaacacccgaacttaaaaccaagcttttcaaacccttggtctggatcgactgcgagatgaccggtttagaccacgtgaatgacagaattatcgagatttgctgcatcatcaccgatggacacttggcacccgtcaaagcggccgatggccaaggagactctcattatgagagcgtcatccattatggtcccgaggtgatgaacaaaatgaacgagtggtgtattgagcaccacggtaatagcggtctcaccgccaaagttttggcaagtgagaagactttggcccaggtagaagatgagttactcgagtacatccagcgctacatcccagacaagaacgttggcgtcttggcaggcaatagtgtacatatggaccgcttgttcatggtccgcgagtttcccaaggtcattgatcatctcttttacagaatagttgacgtcagtagcatcatggaagttgcccgcagacacaatcccgctttacaagcacgtaatccaaaaaaagaagctgcccacactgcttatagtgatatcaaagagagcatagctcaattgcaatggtacatggacaactacttgaagccaccacaggaaacagagtctgtcgagagtatcggatctgaacagccggagtctccatcttcttctacctcttctttgaaaagacaacgcaccgatttttga

SEQ ID NO: 7309 - DNA, 1788 bp, Saccharomyces cerevisiae
atgcctaccgtctccgtgaacaagcagcaattatttgatcttctaggcaaaaactacacttcccaagagttcgatgaattatgttttgaattcggtatggaaatggacgaagacaccacagaggaggccttgaaaaccggggaggagccggaattgaagcttgatatcagtgccaatcgttacgatttgctttgtatcgaaggtatttcacagtcgctgaacgaatacttggaacgtaaagaaagacctgactataaattaagcaagccaaccactaagttgatcatcgacaaatcaacggagcaaattagaccttttgctaccgctgctgtattgagaaatatcaagcttaacgaaaaatcttacgcttcttttattgccttgcaagataaattacatgccaatctatgtagaaacagaagcttggttgccatgggtactcacgatttagattcaattgaaggtccattccattacagagctctaccaccaaaggacatcaagttcgtaccattgaatcaaacccaagagtttactggtgacaaattgatcgagttttataaatctccagaacagaaaaacaacatagggagatacgttcacattattgaggattctccagtcttcccagttattatggacagcaaagatcgtgtttgctccctgccaccattaatcaatagtgaacattcgaagatctctgtgaacacccgtaacattttgattgatataaccgccaccgataagaccaaagccgagatcgttttgaacatattaactacaatgttctcacgttattgtgacgaaccattcacggttgagcctgtagaaattgtctctgaacacaatggccaatcccgtttggcgccaaacttcaacgatagaattatggatgtctccattaagtacatcaactcctgtcttggcctagatcaatccgctgatgaaattgctcattgtctaaagaagatgtcgttgcatgccgttcaatcaaaggaagacaaggacatcttgcacgttgacattccggtaactagacctgatattttgcacgcttgtgatataatggaagatgccgctgtcggttatggtttcaataatttgccaaagggtgagaaattatccaatgccaacttcattgccaaaccattaccaatcaacaaggtttctgatattttcagagttgcatcctctcaagccacgtgggttgaggttttaccattgaccttatgttcgcacgatgaaaactttaaatttctaagacaatccgacaatggtgatttagctgtcaaattggccaacccaaagactttggaataccaagttgttagaaccactttattgcctggtatcttaaagacagtcaaggaaaacagaaaacattccttgccaatcaaagtctttgaaaccggtgacgttgtatttaaagacgacaaactagaaaggaaggcgtacaatgaacgtcactgggctgccatctacgtgggtaagaattctgggtttgaaatcattcaagggttattgggtaaaatcatgcaaacttttagaacagagtggattgcagactacggtgctgctgcttctggcagaggttactggattgaagaagacgattctgtgaaaacctacttcccaggtagaggtgccaaggtcatgttcagatccaaagaaggcgctgagccaaagcaaatcggccacttgggtgtcttgcatcctgaagtcatgatgaatttcgacgttccattcgctgcatcctttgtagaggttaatgccgaagtcttcctataa

SEQ ID NO: 7310 - DNA, 1788 bp, Artificial Sequence
  Description of Artificial Sequence: Synthetic polynucleotide
atgcctaccgtctccgtgaacaagcagcaattatttgatcttttgggcaaaaactacacttcccaagagttcgatgaattatgttttgaattcggtatggaaatggacgaagacaccacagaggaggccttgaaaaccggggaggagccggaattgaagcttgatatcagtgccaatcgttacgatttgctttgtatcgaaggtatttctcagtctttgaacgaatacttggaacgtaaagaaagacctgactataaattaagcaagccaaccactaagttgatcatcgacaaatctacggagcaaattagaccttttgctaccgctgctgtattgagaaatatcaagcttaacgaaaaatcttacgcttcttttattgccttgcaagataaattacatgccaatttatgtagaaacagaagcttggttgccatgggtactcacgatttagattctattgaaggtccattccattacagagctttgccaccaaaggacatcaagttcgtaccattgaatcaaacccaagagtttactggtgacaaattgatcgagttttataaatctccagaacagaaaaacaacatagggagatacgttcacattattgaggattctccagtcttcccagttattatggacagcaaagatcgtgtttgctccttgccaccattaatcaatagtgaacattctaagatctctgtgaacacccgtaacattttgattgatataaccgccaccgataagaccaaagccgagatcgttttgaacatattaactacaatgttctctcgttattgtgacgaaccattcacggttgagcctgtagaaattgtctctgaacacaatggccaatcccgtttggcgccaaacttcaacgatagaattatggatgtctccattaagtacatcaactcctgtcttggcttggatcaatccgctgatgaaattgctcattgtttgaagaagatgtctttgcatgccgttcaatccaaggaagacaaggacatcttgcacgttgacattccggtaactagacctgatattttgcacgcttgtgatataatggaagatgccgctgtcggttatggtttcaataatttgccaaagggtgagaaattatccaatgccaacttcattgccaaaccattaccaatcaacaaggtttctgatattttcagagttgcatcctctcaagccacgtgggttgaggttttaccattgaccttatgttctcacgatgaaaactttaaatttttaagacaatccgacaatggtgatttagctgtcaaattggccaacccaaagactttggaataccaagttgttagaaccactttattgcctggtatcttaaagacagtcaaggaaaacagaaaacattccttgccaatcaaagtctttgaaaccggtgacgttgtatttaaagacgacaaattagaaaggaaggcgtacaatgaacgtcactgggctgccatctacgtgggtaagaattctgggtttgaaatcattcaagggttattgggtaaaatcatgcaaacttttagaacagagtggattgcagactacggtgctgctgcttctggcagaggttactggattgaagaagacgattctgtgaaaacctacttcccaggtagaggtgccaaggtcatgttcagatccaaagaaggcgctgagccaaagcaaatcggccacttgggtgtcttgcatcctgaagtcatgatgaatttcgacgttccattcgctgcatcctttgtagaggttaatgccgaagtcttcttatga

SEQ ID NO: 7311 - DNA, 366 bp, Saccharomyces cerevisiae
atggccccaaacacttccagaaagcaaaagattgccaagacctttaccgtcgatgtctcttctccaactgaaaacggtgtcttcgacccagcttcctacgctaagtacttgatcgaccacatcaaggtcgaaggtgctgtcggtaacttgggtaacgctgtcactgtcactgaagatggtaccgttgttactgttgtttccactgccaagttctctggtaagtacttgaagtacttgacaaagaagtacttgaagaagaaccaattgagagactggatcagatttgtctctaccaagaccaacgaatacagattggccttctaccaagtcactccagaagaagacgaagaagaagacgaagaataa

SEQ ID NO: 7312 - DNA, 366 bp, Artificial Sequence
  Description of Artificial Sequence: Synthetic polynucleotide
atggccccaaacacttccagaaagcaaaagattgccaagacctttaccgtcgatgtctcttctccaactgaaaacggtgtcttcgacccagcttcctacgctaagtacttgatcgaccacatcaaggtcgaaggtgctgtcggtaacttgggtaacgctgtcactgtcactgaagatggtaccgttgttactgttgtttccactgccaagttctctggtaagtacttgaagtacttgacaaagaagtacttgaagaagaaccaattgagagactggatcagatttgtctctaccaagaccaacgaatacagattggccttctaccaagtcactccagaagaagacgaagaagaagacgaagaatga

SEQ ID NO: 7313 - DNA, 1098 bp, Saccharomyces cerevisiae
atgttgcttatgagacgctttgcctttttaacttcttcagtatattttaaatatataccaatttattcacaatatcattactcttctcagtttccaattaacatgaatcctaaaaaagtggcccaattgcccgttcacaataaatcaacgcttccaccacaggaaataatcgatctttttaaaataacattcttagaagagctatatccaaaagatcaagacaatgaaaagtcaccgttaactgaacaaatacaggcggtaaaatctgacctttataacagagattacaatgctgctttcaataacgactcgaaaagaatagcatattgttgtcgttggtcaccgtccagagcaacaagttacgcatcagtatttgcacatttccctgagcttctaaagattatcagatgcgaaattgatgacaaggactcaaatgtgctctgcataggtggcggcgctggtggtgagctggttgcattagcgagcatattcactttatcgagagatttttcgtctaaatttgcctctgctttgaaaatagacaacgaagtaaacaaaaagcctagaaatttaaacatacaactagtagatatcgccgactggtccacagttgttgaaaagctaacagctacaataaagtcgaaatggctatatggtgattcagaagcagagtcatttaacgtcaactttacccacaaggactgcctacaaatgacagagccacaagatatcaagatatatcaaggcctcgacctaataactctactttttactacaaatgaactatttacacagaaaaaagtggagagtataaaatttctgcaacggttaaacgagaactgtgccccaggctgccatcttctcatactagagagtgcaggaagctattctcacattaccatcaacaacaagaagttcccaatccaatttcttatcgatactatcttagtaggcaatagaaaggacaagggaacgacaggtccatggtcactagtatccgagaacgacagtatttggtatagaatggacccaaaactcgactactcgattccattggaaaacatgcgattcttttaccgtctttatgtcaagaactaa

SEQ ID NO: 7314 - DNA, 1098 bp, Artificial Sequence
  Description of Artificial Sequence: Synthetic polynucleotide
atgttgcttatgagacgctttgcctttttaacttcttctgtatattttaaatatataccaatttattctcaatatcattactcttctcagtttccaattaacatgaatcctaaaaaagtggcccaattgcccgttcacaataaatctacgcttccaccacaggaaataatcgatctttttaaaataacattcttagaagagttgtatccaaaagatcaagacaatgaaaagagcccgttaactgaacaaatacaggcggtaaaatctgacctttataacagagattacaatgctgctttcaataacgactctaaaagaatagcatattgttgtcgttggtctccgtccagagcaacaagttacgcatctgtatttgcacatttccctgagcttttgaagattatcagatgcgaaattgatgacaaggactctaatgtgctctgcataggtggcggcgctggtggtgagttagttgcattagcgagcatattcactttatctagagatttttcttctaaatttgcctctgctttgaaaatagacaacgaagtaaacaaaaagcctagaaatttaaacatacaattggtagatatcgccgactggtccacagttgttgaaaagttaacagctacaataaagagtaaatggttatatggtgattctgaagcagagtcttttaacgtcaactttacccacaaggactgcttacaaatgacagagccacaagatatcaagatatatcaaggcctcgacttgataactttactttttactacaaatgaattatttacacagaaaaaagtggagagtataaaatttttgcaaagattaaacgagaactgtgccccaggctgccatcttctcatattggagagtgcaggaagctattctcacattaccatcaacaacaagaagttcccaatccaatttcttatcgatactatcttagtaggcaatagaaaggacaagggaacgacaggtccatggtctttagtatccgagaacgacagtatttggtatagaatggacccaaaactcgactactctattccattggaaaacatgagattcttttaccgtctttatgtcaagaactga

SEQ ID NO: 7315 - DNA, 822 bp, Saccharomyces cerevisiae
atgaccgttcccaggaatcgtcccatggcaccatttggcaccattatcaaatcaagaataaaacaaccccagttttattggtttataggccattttttaaccatctttaactttatacaatttcatctttcaatcacgtccaaacaaaaccaattgtcatgctatagaagatcattattttacatatccgttacatatgccatcgttctttaccagtttttcaaaagtgaccagttaaagttcaattttacgcttttgcgccaagagatgaagaaattggataatttgcagtattttgccatgctattcatactttttctcttatcacagtttaacatcataatcagcggctcgttatacagtcccgttatcttttcaatctttcacttcctgaactattttaaggaaaaccttttgccatttttgcctttgataccacttaatttgaaaaatttgttgaactccaaaataacggtattcatccaaaactacaatggatttttcttacagatggcgcaagtatttgagattatctgcggcctacgtgtgggcctcttcttagtgcccttcaattttttcttgttgttggtaagaagagcaaacgtgtcgtttgaggtagtgggtacaatgttggcaggactaacctatgtatggtttttcaaattaaggtacctacaaagtgaatctatgaggcagatatttaaacaatatgtccttaggttggatgcatatgtcagccgtactttgcccccatattgttcccgtttatggaacggctataagaatttcgttatgacagtgttttggaagatacctgtgtag

SEQ ID NO: 7316 - DNA, 822 bp, Artificial Sequence
  Description of Artificial Sequence: Synthetic polynucleotide
atgaccgttcccaggaatcgtcccatggcaccatttggcaccattatcaaatctagaataaaacaaccccagttttattggtttataggccattttttaaccatctttaactttatacaatttcatctttctatcacgtccaaacaaaaccaattgtcttgctatagaagatctttattttacatatccgttacatatgccatcgttctttaccagtttttcaaaagtgaccagttaaagttcaattttacgcttttgcgccaagagatgaagaaattggataatttgcagtattttgccatgcttttcatactttttctcttatctcagtttaacatcataatcagcggctctttatacagtcccgttatcttttctatctttcacttcttgaactattttaaggaaaaccttttgccatttttgcctttgataccacttaatttgaaaaatttgttgaactccaaaataacggtattcatccaaaactacaatggatttttcttacagatggcgcaagtatttgagattatctgcggcttgcgtgtgggcctcttcttagtgcccttcaattttttcttgttgttggtaagaagagcaaacgtgtcctttgaggtagtgggtacaatgttggcaggattaacctatgtatggtttttcaaattaaggtacttacaaagtgaatctatgaggcagatatttaaacaatatgtccttaggttggatgcatatgtcagccgtactttgcccccatattgttcccgtttatggaacggctataagaatttcgttatgacagtgttttggaagatacctgtgtga

SEQ ID NO: 7317 - DNA, 546 bp, Saccharomyces cerevisiae
atggctggcaaagcagggaggaaacaggctagttcaaatgcaaaaataattcagggcttatacaagcaagtctctttgtttttaggaatggctatcgtacgtctattcatttcacgtaaggttacaattggccaatggattaagctggtggctttgaacgttcctatgttcgttgctctgtatatcattgtgctatccggtaagcccaaatatgatggcaatcgcgtagtaaaacaaggtatagacttgaacgacaatacaaatttgatatcatatttttttgatttgatatatctatcactttttggtaacattggtattatagctttcaggacattcaaattttggtggtgtctactattgtgccccatctatgctggttacaagttatatggcctcaaaaacatgttcatgcctggcgctcaacaaactcaggcagataatcgctcaaaaaatgctaatgagggacaatccaaatccaaaaggcagatgaaaagggagaggaggggtgaaactgactctaaaattaagtacaagtatcgttaa

SEQ ID NO: 7318 - DNA, 546 bp, Artificial Sequence
  Description of Artificial Sequence: Synthetic polynucleotide
atggctggcaaagcagggaggaaacaggctagtagtaatgcaaaaataattcagggcttatacaagcaagtctctttgtttttaggaatggctatcgtacgtttattcatttctcgtaaggttacaattggccaatggattaagttagtggctttgaacgttcctatgttcgttgctttgtatatcattgtgttatccggtaagcccaaatatgatggcaatcgcgtagtaaaacaaggtatagacttgaacgacaatacaaatttgatatcttatttttttgatttgatatatttatctctttttggtaacattggtattatagctttcaggacattcaaattttggtggtgtttattattgtgccccatctatgctggttacaagttatatggcctcaaaaacatgttcatgcctggcgctcaacaaactcaggcagataatcgctctaaaaatgctaatgagggacaatccaaatccaaaaggcagatgaaaagggagaggaggggtgaaactgactctaaaattaagtacaagtatcgttga

SEQ ID NO: 7319 - DNA, 555 bp, Saccharomyces cerevisiae
atgttctcctttgtccaaagattccagaatgtatcgaaccaggccttttcaatgggaattgtaatggttgtattcatcatggcatcctcatactatcaattaatcaataataacgcgttctcagtacctagtaatatcgataacgtcaaaactttaataaatgttagaacaagtagatattttggctcacagagaggcaaggcaaaggaaaatatgaaaattaaatttgatctaaatacagatctcactcccctattcaattggaatacaaagcaagtttttgtctatctaactgctgagtataacagtactgaaaaaataacaagtgaggtaacattttgggataagatcataaaaagcaaggatgatgctgtgattgatgtgaacgatctaagatccaagtattctatctgggatattgaagatggaaaattcgaaggcaaggatttggttttcaagttacactggaatgttcaaccatgggtaggtttgctaacttacggtgaaactgtaggcaactatacactgaccgtggaaaataaaaacaaagtttag

SEQ ID NO: 7320 - DNA, 555 bp, Artificial Sequence
  Description of Artificial Sequence: Synthetic polynucleotide
atgttctcctttgtccaaagattccagaatgtatccaaccaggccttttccatgggaattgtaatggttgtattcatcatggcatcctcttactatcaattaatcaataataacgcgttcagtgtacctagtaatatcgataacgtcaaaactttaataaatgttagaacaagtagatattttggctctcagagaggcaaggcaaaggaaaatatgaaaattaaatttgatttgaatacagatctcactccccttttcaattggaatacaaagcaagtttttgtctatttgactgctgagtataacagtactgaaaaaataacaagtgaggtaacattttgggataagatcataaaaagcaaggatgatgctgtgattgatgtgaacgatttgagatccaagtattctatctgggatattgaagatggaaaattcgaaggcaaggatttggttttcaagttacactggaatgttcaaccatgggtaggtttgttgacttacggtgaaactgtaggcaactatacattaaccgtggaaaataaaaacaaagtttga

SEQ ID NO: 7321 - DNA, 2898 bp, Saccharomyces cerevisiae
atgaaaaggtgtgctcctgccgtattaagaaattataattataagaagggtatatggagtaccggcgtacctgatcatataaggaagctgcttcgagataaatcgacgtcaccattatgctcacaggatgagagaaacctggtctcatattttatggcgcgcggaagtgttcctctaaagtcggttggcagtggattaacaaagaaagcaacaacatcaataacaagtaattcagctaccacaacatttgaacgacagtaccttataaagtatctttatcggcaccaggcctatgggaacgttataaaaattgcacagaagtttctttataccactattggttcacaaagattgttaaaacaggatgcctcattacctgaattgaaaaagttccttctctctttattgattttacaaagaggtattcaattagatcaggcaatctctgatatcatacaacggtttctattaacacaaaagacaatggtgatagacctcattaactcgattttctctaggatggttataatgaatatgcatgaagaagctgtatataaatgggtcaaatggatgaaactagtgaatggacattgtgaatttacgaattatatggagaacaagatagttttgagaaactttttatcattcatgaggcaatcaaatgttcgccccgattatttatcttatttgaaagcaattcagctaacgcaagggcccgcaatagcgtctcaatttgcaactacgttgttgttcttattaacttatattaggaaattttcttctgcagaagcagtttggaattacaagtgcgaacataacctgccgatagtgagttctgacctgacgtgtattctaaagacgtattgtcacatgcagaagtttaatttggtttcgtcaacatattggaaataccctgatgctcagcacgaccaaaaccaatttgattatcttttggtggctcattctaggctgcataattgggacgccttacaacaacagttcaatgctcttttcggtatcggtaagctaccttccatacaacattatggtattttgatgtatactatggccagaattggtgaattggatagtgtcaataaactatatacacagttattgaggagaggtatgataccgacatacgctgttttacaatctttactatatgcacattataaagtcggagatttcgcagcctgttttagccacttcgaactattcaagaaatacgacataacgccttcaacagcaacgcataccataatgcttaaagtgtatcgtggtttaaatgaccttgatggtgcgtttaggatattaaaaagactaagcgaggatcctagcgtggaaatcacggaggggcactttgctttattgatacaaatgtgttgcaaaactacgaaccatttaatcgctcaagaattattcaaccttatgactgaacattataatatccaacacactggaaaaagtatctctgcattgatggatgtatatattgagagtaacaggccaacagaggcaatagcattatttgaaaaacattcaaagaatttatcttggagagatggtctaatttcagtgtataacaaagccatcaaagcttatattggtttacgaaatgccaacaagtgtgaagaacttttcgacaagatcacaacctcaaaactggctgtaaacagtgaattttacaagatgatgataaaatttttagttacactgaacgaagattgcgaaacggcattgagcatcatagatcaactaataaaacattctgtaatcaaggtggacgctacacattttgaaataataatggaggcatatgacaaagagggttatcgtgacggtataattaacttgtacaagacaatgtcacagaataaggtaccagcgaattccaaaattttatattatatattgaaggccgttgccaaaaaaagcctacaaaataatgaggaaatcaaggaaacgattaatatggtagaagacatcatggaaaatgctgccaatggaactctcgacgttacgtataacaaactgcatccctcggtcatggcatggccaatgagaatgattgtgaaacatgatagcccacagcgggctttagagttatacaaccggtacaatgagcttttcttcaaaaagcatgattggatatcaaataataataaatttgtgatgatgagatcattgttggtattactagctcaaattgaacaatggaaagatttcgaaacacttttcgctaaatacatggatcgtattgaaaacattgaaaacttgccatcatctacaacgccaaatattaaactaagaagcatattcagcggattgttcccttataaagtaagtcagttgattgcaatgaataaaatcgatgagctgccattactgtggaagaaattgcgagaaaaaggttttattttagataatatatcgtggaacagcgctgtagaagcgttatttaaggatccaagaaccctttcgtatggtatgaaaatcgttgatgacacactaattcatgggtataatttgatccataaatttagactattaacgaaactatccgaggataagacgcagtccagtgataaatcttggccaacattaaaaatgaaggaaaaagagcccaataaatttcagcccagactatacttaaaaagcgatacatataacagtataatgaggcagttagacacatatttggacggtattgatgatttaaaaactttagaagatcaggtacgtgacttcatatcaaattacaagtattttatgaaagattacttattaatgccaagaagcaagatcaataaatgggaacagattgaaatgagacatctttcatattttaaagaactgaggaaatctaagagagtattacctgtgagtaaattctag

SEQ ID NO: 7322 - DNA, 2898 bp, Artificial Sequence
  Description of Artificial Sequence: Synthetic polynucleotide
atgaaaaggtgtgctcctgccgtattaagaaattataattataagaagggtatatggagtaccggcgtacctgatcatataaggaagcttcttagagataaatctacgtctccattatgcagccaggatgagagaaacttggtctcttattttatggcgcgcggaagtgttcctttgaagtctgttggcagtggattaacaaagaaagcaacaacatctataacaagtaattctgctaccacaacatttgaaagacagtaccttataaagtatctttatagacaccaggcctatgggaacgttataaaaattgcacagaagtttctttataccactattggttctcaaagattgttaaaacaggatgcctctttacctgaattgaaaaagttccttctctctttattgattttacaaagaggtattcaattagatcaggcaatctctgatatcatacaaagatttttattaacacaaaagacaatggtgatagacctcattaactctattttctctaggatggttataatgaatatgcatgaagaagctgtatataaatgggtcaaatggatgaaattagtgaatggacattgtgaatttacgaattatatggagaacaagatagttttgagaaactttttatctttcatgaggcaaagcaatgttcgccccgattatttatcttatttgaaagcaattcagttaacgcaagggcccgcaatagcgtctcaatttgcaactacgttgttgttcttattaacttatattaggaaattttcttctgcagaagcagtttggaattacaagtgcgaacataacttaccgatagtgagttctgacttaacgtgtattttgaagacgtattgtcacatgcagaagtttaatttggtttcttctacatattggaaataccctgatgctcagcacgaccaaaaccaatttgattatcttttggtggctcattctaggttacataattgggacgccttacaacaacagttcaatgctcttttcggtatcggtaagttaccttccatacaacattatggtattttgatgtatactatggccagaattggtgaattggatagtgtcaataaactttatacacagttattgaggagaggtatgataccgacatacgctgttttacaatctttattatatgcacattataaagtcggagatttcgcagcctgttttagccacttcgaattattcaagaaatacgacataacgccttctacagcaacgcataccataatgcttaaagtgtatcgtggtttaaatgaccttgatggtgcgtttaggatattaaaaagattgagcgaggatcctagcgtggaaatcacggaggggcactttgctttattgatacaaatgtgttgcaaaactacgaaccatttaatcgctcaagaattattcaaccttatgactgaacattataatatccaacacactggaaaaagtatctctgcattgatggatgtatatattgagagtaacaggccaacagaggcaatagcattatttgaaaaacattctaagaatttatcttggagagatggtttgatttctgtgtataacaaagccatcaaagcttatattggtttaagaaatgccaacaagtgtgaagaacttttcgacaagatcacaacctccaaattggctgtaaacagtgaattttacaagatgatgataaaatttttagttacattgaacgaagattgcgaaacggcattgagcatcatagatcaattgataaaacattctgtaatcaaggtggacgctacacattttgaaataataatggaggcatatgacaaagagggttatcgtgacggtataattaacttgtacaagacaatgtctcagaataaggtaccagcgaattccaaaattttatattatatattgaaggccgttgccaaaaaaagcttacaaaataatgaggaaatcaaggaaacgattaatatggtagaagacatcatggaaaatgctgccaatggaactctcgacgttacgtataacaaattgcatccctctgtcatggcatggccaatgagaatgattgtgaaacatgatagcccacagcgtgctttagagttatacaacagatacaatgagcttttcttcaaaaagcatgattggatatccaataataataaatttgtgatgatgagaagtttgttggtattattagctcaaattgaacaatggaaagatttcgaaacacttttcgctaaatacatggatcgtattgaaaacattgaaaacttgccatcttctacaacgccaaatattaaattgagaagcatattcagcggattgttcccttataaagtaagtcagttgattgcaatgaataaaatcgatgagttaccattattatggaagaaattgagagaaaaaggttttattttagataatatatcttggaacagcgctgtagaagcgttatttaaggatccaagaaccctttcctatggtatgaaaatcgttgatgacacattaattcatgggtataatttgatccataaatttagattattaacgaaactttccgaggataagacgcagtccagtgataaatcttggccaacattaaaaatgaaggaaaaagagcccaataaatttcagcccagattatacttaaaaagcgatacatataacagtataatgaggcagttagacacatatttggacggtattgatgatttaaaaactttagaagatcaggtacgtgacttcatatccaattacaagtattttatgaaagattacttattaatgccaagaagcaagatcaataaatgggaacagattgaaatgagacatctttcctattttaaagaattgaggaaatctaagagagtattacctgtgagtaaattctga

SEQ ID NO: 7323 - DNA, 456 bp, Saccharomyces cerevisiae
atgggtacagccaagcaaaatcaaaatagaaagaagtttacgagggagtataaggttaaggagatccaaagaagtattacaaagaaaactagactgagaaaggaataccttaaagctttaaaagatgaagggtatgccgtaccagaaaaggaaccaaaaaccgtggcaaaagaatctgtaaggaagattaaggaagccagggcaatagagggaaagaagaaactagacgagaagaaggagatcaagaaacaaagaaagagaatgcaaaaagatgaattaaacaagcaaagaaacgagcaattggaaagaatcagagtttcgaaggaaaaatttcagaggagagaagatagaaagaagaaattgactcaaagaacaaggacaggccagcccttgatgggccctaagatagaggatcttttggataaaattaagacggatgatacttatacctcctag

SEQ ID NO: 7324 - DNA, 456 bp, Artificial Sequence
  Description of Artificial Sequence: Synthetic polynucleotide
atgggtacagccaagcaaaatcaaaatagaaagaagtttacgagggagtataaggttaaggagatccaaagaagtattacaaagaaaactagattgagaaaggaataccttaaagctttaaaagatgaagggtatgccgtaccagaaaaggaaccaaaaaccgtggcaaaagaatctgtaaggaagattaaggaagccagggcaatagagggaaagaagaaattagacgagaagaaggagatcaagaaacaaagaaagagaatgcaaaaagatgaattaaacaagcaaagaaacgagcaattggaaagaatcagagtttccaaggaaaaatttcagaggagagaagatagaaagaagaaattgactcaaagaacaaggacaggccagcccttgatgggccctaagatagaggatcttttggataaaattaagacggatgatacttatacctcctga

SEQ ID NO: 7325 - DNA, 2286 bp, Saccharomyces cerevisiae
atgagtgtccagaaaatgatgtgggtgcctcgaaaaatggttggaggtagaataccctttttcacatgttcaaaagttttttcaggtttctcgagaaggtcttttcatgagagtccacttgctcgttctacatatgaagaagaaaaagttttggtggatgaaatcaaacaaaaacttactccagacgatattggaagatgtaataaattgcgtaacataggtatatctgctcatattgactccggaaaaactactttcactgaacgtgttctgtactatacaaaaagaatcaaagccattcatgaggttcgtggtagggataatgttggagccaagatggattctatggatcttgaaagggaaaagggtattactattcagtctgccgctacttactgctcttgggataaagagggcaaaaactatcatttcaacttgatcgacactccaggtcatattgatttcactatcgaagtggagcgtgctcttagagtactagacggtgcagttcttgttgtttgtgctgtttcaggtgttcaatcccaaactgtgaccgtggatcgtcaaatgcgtagatataatgttccaagagtaactttcatcaacaaaatggatcgtatgggttcagatcccttccgtgcaatagaacaacttaattcgaaactaaaaatacctgctgctgctgtacaaattcctatcggatcggaatcaagcttatctggtgtcgttgatttgattaatagagttgctatttacaacaagggtgataatggtgaaattatagaaaaagggccagtgcctgaaaatttgaagccattaatggaggaaaaaagacaacttttgatcgaaacacttgctgatgtggatgatgaaatggcagaaatgtttttggaagaaaaggagcctaccacgcaacaaattaaagatgctattcgcagatctacaattgctaggtcttttacaccagttttgatgggatccgcactggcaaatactggtattcagcccgttttggacgctattgtagactacttacctaatccctctgaagtgttgaatacagctctagatgtgagcaacaacgaagccaaggttaacttagttcctgcggtgcaacagccatttgttggattggcattcaaattggaagaaggcaaatatggtcaattgacttatgttcgcgtatatcaggggcgtttaagaaaaggtaattacattacaaatgtaaagactggtaaaaaagtgaaggttgcaagattggtcaggatgcattctagtgagatggaagatgttgatgaagttggctcaggtgaaatttgcgctacttttggtattgactgtgcttctggagatacattcactgatggtagcgttcaatactctatgtcatccatgtatgttccagatgctgttgtctcgttatcgattacgccaaattcaaaggacgcatcgaatttttcgaaggctttgaacagatttcaaaaggaagaccctacattcagagtgaagttcgatcctgaatctaaagaaacaattatttctgggatgggtgaattgcatctggagatttacgttgaaagaatgagacgtgaatataatgtggactgtgtcacgggtaaaccgcaggtttcctatagagaatctatcaccatcccggcagattttgattatacacataaaaaacaatctggtggcgctggtcaatatggtagagttatcggtaccttatctcccgtggatgacattaccaaaggcaacatattcgagaccgctattgttggtggccgtataccggacaagtatttggctgcatgtggtaagggttttgaagaagtatgtgaaaagggaccattgatcggtcatcgtgttttggatgttaaaatgctaatcaatgatggtgctattcatgccgtggattctaatgaattatcattcaaaacagctactatgtcagccttccgtgacgccttcctgagggcacagccggtgatcatggaacctatcatgaatgtttcagtaacatcgccaaacgagtttcaaggtaacgtcatcggtttattgaataaattacaagcagtaatacaggataccgaaaatggtcatgatgaatttacattaaaagcagaatgtgccttgagcacgatgttcggtttcgccacctcattaagagcctcgactcaaggtaaaggtgagttttcattagagtttagtcattacgctccaacagcgccccatgttcaaaaagaattgatatctgagttccaaaagaagcaagcgaagaaatag

SEQ ID NO: 7326 - DNA, 2286 bp, Artificial Sequence
  Description of Artificial Sequence: Synthetic polynucleotide
atgagtgtccagaaaatgatgtgggtgcctagaaaaatggttggaggtagaataccctttttcacatgttctaaagttttttctggtttcagtagaaggtcttttcatgagagtccacttgctcgttctacatatgaagaagaaaaagttttggtggatgaaatcaaacaaaaacttactccagacgatattggaagatgtaataaattgcgtaacataggtatatctgctcatattgactccggaaaaactactttcactgaacgtgttctttactatacaaaaagaatcaaagccattcatgaggttcgtggtagggataatgttggagccaagatggattctatggatcttgaaagggaaaagggtattactattcagtctgccgctacttactgctcttgggataaagagggcaaaaactatcatttcaacttgatcgacactccaggtcatattgatttcactatcgaagtggagcgtgctcttagagtattggacggtgcagttcttgttgtttgtgctgtttctggtgttcaatcccaaactgtgaccgtggatcgtcaaatgcgtagatataatgttccaagagtaactttcatcaacaaaatggatcgtatgggttctgatcccttccgtgcaatagaacaacttaattctaaattgaaaatacctgctgctgctgtacaaattcctatcggatctgaaagtagcttatctggtgtcgttgatttgattaatagagttgctatttacaacaagggtgataatggtgaaattatagaaaaagggccagtgcctgaaaatttgaagccattaatggaggaaaaaagacaacttttgatcgaaacacttgctgatgtggatgatgaaatggcagaaatgtttttggaagaaaaggagcctaccacgcaacaaattaaagatgctattcgcagatctacaattgctaggtcttttacaccagttttgatgggatccgcattggcaaatactggtattcagcccgttttggacgctattgtagactacttacctaatccctctgaagtgttgaatacagctttagatgtgagcaacaacgaagccaaggttaacttagttcctgcggtgcaacagccatttgttggattggcattcaaattggaagaaggcaaatatggtcaattgacttatgttcgcgtatatcaggggcgtttaagaaaaggtaattacattacaaatgtaaagactggtaaaaaagtgaaggttgcaagattggtcaggatgcattctagtgagatggaagatgttgatgaagttggcagtggtgaaatttgcgctacttttggtattgactgtgcttctggagatacattcactgatggtagcgttcaatactctatgtcttccatgtatgttccagatgctgttgtctctttatccattacgccaaattctaaggacgcatctaatttttccaaggctttgaacagatttcaaaaggaagaccctacattcagagtgaagttcgatcctgaatctaaagaaacaattatttctgggatgggtgaattgcatttagagatttacgttgaaagaatgagacgtgaatataatgtggactgtgtcacgggtaaaccgcaggtttcctatagagaatctatcaccatcccggcagattttgattatacacataaaaaacaatctggtggcgctggtcaatatggtagagttatcggtaccttatctcccgtggatgacattaccaaaggcaacatattcgagaccgctattgttggtggccgtataccggacaagtatttggctgcatgtggtaagggttttgaagaagtatgtgaaaagggaccattgatcggtcatcgtgttttggatgttaaaatgttgatcaatgatggtgctattcatgccgtggattctaatgaattatctttcaaaacagctactatgtctgccttccgtgacgccttcttgagggcacagccggtgatcatggaacctatcatgaatgtttctgtaacatctccaaacgagtttcaaggtaacgtcatcggtttattgaataaattacaagcagtaatacaggataccgaaaatggtcatgatgaatttacattaaaagcagaatgtgccttgagcacgatgttcggtttcgccaccagtttaagagcctctactcaaggtaaaggtgagttttctttagagtttagtcattacgctccaacagcgccccatgttcaaaaagaattgatatctgagttccaaaagaagcaagcgaagaaatga

SEQ ID NO: 7327 - DNA, 1071 bp, Saccharomyces cerevisiae
atgactgacttaactacacaagaagctattgttctagagcgacctggtaaaatcaccctaactaatgtcagcatcccaaagatttcagatcctaacgaagtaatcatccagatcaaggcgacaggaatatgcgggtcagatatccattactatacccatggaagaatagccaattacgtggtagaatcaccaatggtgctgggacatgaatcatcaggaatagtggccctcataggtgagaacgtcaagacacttaaagtaggagatagggtggcacttgagcccggaatacctgacaggttttcaccggagatgaaagagggcagatacaacctggaccccaatttaaaatttgctgcgacacctccctttgatgggaccttgacaaagtattataagaccatgaaagatttcgtctataaacttcctgatgatgtgtcattcgaggaaggagcactaatagagccattatcagtggcaatccatgctaataaattagcaaagatcaagtttggagcccgttgcgtcgtctttggagctgggcccataggtttgctagccgggaaagtagccagtgtctttggtgctgcagatgttgtttttgtagatctattagaaaacaagctggaaacggctaggcagtttggtgccacccacatcgtcaactcaggtgatctcccacatggcgttactgtagatagtgttataaaaaaagcaatcggcaagaaaggtgctgacgttgtgtttgaatgttctggtgcagagccttgcgttcgagcaggcatcgaagtctgtaaggcaggtggaacgatcgttcaagttggaatgggacaagaggaaatacaatttcccatctcgatcattccaacaaaagaactgacattccaaggctgtttccgatactgtcaaggtgattatagtgactccatcgagctagtctctagcagaaaactctcgcttaaaccattcattacacatcgctatagctttaaggatgctgtcgaggcattcgaagaaacaagccaccacccgttaaataatatcaagacgatcattgagggcccggaatga

SEQ ID NO: 7328 - DNA, 1071 bp, Artificial Sequence
  Description of Artificial Sequence: Synthetic polynucleotide
atgactgacttaactacacaagaagctattgttttggagagacctggtaaaatcaccttaactaatgtcagcatcccaaagatttctgatcctaacgaagtaatcatccagatcaaggcgacaggaatatgcgggtctgatatccattactatacccatggaagaatagccaattacgtggtagaatctccaatggtgttgggacatgaatcttctggaatagtggccctcataggtgagaacgtcaagacacttaaagtaggagatagggtggcacttgagcccggaatacctgacaggttttctccggagatgaaagagggcagatacaacttggaccccaatttaaaatttgctgcgacacctccctttgatgggaccttgacaaagtattataagaccatgaaagatttcgtctataaacttcctgatgatgtgtctttcgaggaaggagcattaatagagccattatctgtggcaatccatgctaataaattagcaaagatcaagtttggagcccgttgcgtcgtctttggagctgggcccataggtttgttagccgggaaagtagccagtgtctttggtgctgcagatgttgtttttgtagatttattagaaaacaagttggaaacggctaggcagtttggtgccacccacatcgtcaacagtggtgatctcccacatggcgttactgtagatagtgttataaaaaaagcaatcggcaagaaaggtgctgacgttgtgtttgaatgttctggtgcagagccttgcgttagagcaggcatcgaagtctgtaaggcaggtggaacgatcgttcaagttggaatgggacaagaggaaatacaatttcccatctccatcattccaacaaaagaattaacattccaaggctgtttcaggtactgtcaaggtgattatagtgactccatcgagttggtctctagcagaaaactctcccttaaaccattcattacacatcgctatagctttaaggatgctgtcgaggcattcgaagaaacaagccaccacccgttaaataatatcaagacgatcattgagggcccggaatga

SEQ ID NO: 7329 - DNA, 3249 bp, Saccharomyces cerevisiae
atgactaccacgataggatccccacaaatgctggctaatgaggagagactttctaacgagatgcacgcactgaagaaccggtccgagcagaatgggcaagagcaacagggtcccgttaagaacactcaactgcatggcccttctgcaaccgacccggaaactacggccacccaaaaagaatctctagaaatggtaccgaaagatacaagtgcagcgactatgacaagtgcgcctccgccagcgttgccgcatgttgagattaatcaagtcagtctggcattagtaataaggaacttgacggtatttacaatgaaggaacttgctcagtacatgaaaactaatgttcacacccaggcaaatgagcctaactccgcaaagaaaatacgtttcttacagctgattatattcctaaggacacaatttttgaaactttacgtgcttgtgaaatggacccgtactataaaacaaaacaactttcacgtactaatcgatctgttgaactggtttagaacgactaacatgaatgtcaacaattgtatttgggctttgaaaagcagtctaaactctatgaccaatgctaaattgcccaacgtggatttggtcaccgctttggaagttttgagtcttgggaggccaaatctacctacacacaactttaaattaagcggtgtcagtaactctatggatatggtagatggaatggccaaagttcccattggattgattttacagagattaaaagatttgaacttgactgtctcaataaaaattgcattaatgaacattcctaaaccattaaacagctatcatatcaaaaacggtagaatctactttactgtccctaatgaatttgaaatccagttatcgactgttaatagacagtcccctctgttttttgtggatttaaaattgttgtttaacacggaagctgaacaaactgtttcagcagttacagaagctacttcgactaacggcgatagtgagaacaatgaagaaaactcaagttccaacggaaataaccttcctttgaataagccaagattagagaagttgatcaatgaaattcttttgaaaagtaatgatccattattatccctatacaattttctgcacaaatacgtgttgacattacagctatacatggttcatagagagtttttaaagctggccaacggcggtaaattttccaaaagtaatttgatccataactatgactctaaaaaaagtacaattacagttagatattggctgaatgggaaaatggacagtaagggtaagatcactattggcattcaaagaacaacagaaagtcttatcttaaaatgggacaaccagagtgcatcaagggccaaaaatatgcctgtaatttataacaatattgtatctaatatcgaagggattttggatgaaattatgttcaatcatgctagaatcatcagatcggagctgttggcaagggatatattccaagaagacgaagaaaattcggatgttctattatttcaactccctaccacatgtgtttccatggcgcctattcaattaaaaattgatttattgagcgggcagttttattttaggaatcctactccactattatcaaattacgcgtcaaagataaatagagctgaaggtccagaggaattggcaagaatactacagcagctgaaactggacaagattattcatgttttaaccaccatgtttgaaaacacgggatggtcatgcagcaggattattaagattgataaaccaatcaggactcaagtgaatactggcggcgaaagcgttgttaaaaaagaagataataaatatgctattgctggtaacagcactactaatagtgatgtttccttgttattacaaagggacctatttatcagactaccacattggccgctcaactggtatttgattttatcgataatatcctctaaaacatcatgtgtggtggaaaaaagaatcggtaaaattgtctctcaacgtgggaaatggaatctcaaatatttagacaattccaacgtgatgactgtcaaattggagtcaataacatatcaaaaaattatgatattgcaaagaactattttaaacagaattataaaccatatgttgatcgattctttgaaccaactagaaattcgcaataagatttgttcttctgaaatgatcaacgagcaaaaactacctcaatatattatccaaggaagtaatactaatgataacatatcaataataactctagaattggagtcatttttggaaggttcaaaagcgctgaactccatattagaaagttccatgtttctgaggatagattactccaattcccaaatacgattgtatgctaaatttaaaagaaacacaatgatgattcaatgccagattgataaactatacattcattttgtacaagaagaaccgttagccttttatttggaggagagttttacaaatcttggtataatagtgcaatatctaaccaaatttaggcaaaaattgatgcaattggttgtactaacggatgtcgtggaaagattgcacaagaattttgagtccgaaaacttcaagataattgcattacaaccgaatgaaatttccttcaagtatctctccaataatgacgaagatgataaagactgcacaataaagatatcaacgaatgacgactctattaaaaatctgacagttcaactatcaccttcaaacccacaacatataattcaacctttcttagataattcgaaaatggattatcattttatttttagctacctacaattcacgtcatccttgtttaaagctctaaaagtaattctcaatgaaagagggggcaaattccatgagagtggaagtcagtactccactatggtgaacattgggttgcataatctaaacgagtatcagatagtatattataaccctcaggcaggcactaagattacaatatgtatagaattgaaaactgttttgcataacggccgtgataaaattcaatttcacattcattttgcagacgtagcacacataaccacgaaatctcccgcctatccaatgatgcatcaagtgagaaatcaagtatttatgctggatactaagagattaggtaccccagaatctgtcaaacccgcaaacgcatcacatgccattcgtttgggcaatggcgtggcttgcgatcccagtgagatagagcctatcctaatggaaatccataatatcctcaaagtggactcgaactcaagttcatcttag

SEQ ID NO: 7330 - DNA, 3249 bp, Artificial Sequence
  Description of Artificial Sequence: Synthetic polynucleotide
atgactaccacgataggatccccacaaatgttggctaatgaggagagactttctaacgagatgcacgcattgaagaacagatccgagcagaatgggcaagagcaacagggtcccgttaagaacactcaattgcatggcccttctgcaaccgacccggaaactacggccacccaaaaagaatctttggaaatggtaccgaaagatacaagtgcagcgactatgacaagtgcgcctccgccagcgttgccgcatgttgagattaatcaagtcagtttagcattagtaataaggaacttgacggtatttacaatgaaggaacttgctcagtacatgaaaactaatgttcacacccaggcaaatgagcctaactccgcaaagaaaatacgtttcttacagttgattatattcttgaggacacaatttttgaaactttacgtgcttgtgaaatggacccgtactataaaacaaaacaactttcacgtattgatcgatttattgaactggtttagaacgactaacatgaatgtcaacaattgtatttgggctttgaaaagcagtttgaactctatgaccaatgctaaattgcccaacgtggatttggtcaccgctttggaagttttgagtcttgggaggccaaatttacctacacacaactttaaattaagcggtgtcagtaactctatggatatggtagatggaatggccaaagttcccattggattgattttacagagattaaaagatttgaacttgactgtcagtataaaaattgcattaatgaacattcctaaaccattaaacagctatcatatcaaaaacggtagaatctactttactgtccctaatgaatttgaaatccagttatctactgttaatagacagtcccctttattttttgtggatttaaaattgttgtttaacacggaagctgaacaaactgtttctgcagttacagaagctacttctactaacggcgatagtgagaacaatgaagaaaacagtagttccaacggaaataaccttcctttgaataagccaagattagagaagttgatcaatgaaattcttttgaaaagtaatgatccattattatccttgtacaattttttgcacaaatacgtgttgacattacagttatacatggttcatagagagtttttaaagttggccaacggcggtaaattttccaaaagtaatttgatccataactatgactctaaaaaaagtacaattacagttagatattggttaaatgggaaaatggacagtaagggtaagatcactattggcattcaaagaacaacagaaagtcttatcttaaaatgggacaaccagagtgcaagcagggccaaaaatatgcctgtaatttataacaatattgtatctaatatcgaagggattttggatgaaattatgttcaatcatgctagaatcatcagaagtgagttattggcaagggatatattccaagaagacgaagaaaattctgatgttttattatttcaactccctaccacatgtgtttccatggcgcctattcaattaaaaattgatttattgagcgggcagttttattttaggaatcctactccattattatccaattacgcgtctaagataaatagagctgaaggtccagaggaattggcaagaatattacagcagttgaaattagacaagattattcatgttttaaccaccatgtttgaaaacacgggatggtcctgcagcaggattattaagattgataaaccaatcaggactcaagtgaatactggcggcgaaagcgttgttaaaaaagaagataataaatatgctattgctggtaacagcactactaatagtgatgtttccttgttattacaaagggacttatttatcagattaccacattggccgctcaactggtatttgattttatctataatatcctctaaaacatcttgtgtggtggaaaaaagaatcggtaaaattgtctctcaacgtgggaaatggaatctcaaatatttagacaattccaacgtgatgactgtcaaattggagagtataacatatcaaaaaattatgatattgcaaagaactattttaaacagaattataaaccatatgttgatcgattctttgaaccaattggaaattcgcaataagatttgttcttctgaaatgatcaacgagcaaaaattacctcaatatattatccaaggaagtaatactaatgataacatatccataataactttggaattggagtcttttttggaaggttccaaagcgttgaactccatattagaaagttccatgtttttaaggatagattactccaattcccaaataagattgtatgctaaatttaaaagaaacacaatgatgattcaatgccagattgataaactttacattcattttgtacaagaagaaccgttagccttttatttggaggagagttttacaaatcttggtataatagtgcaatatttgaccaaatttaggcaaaaattgatgcaattggttgtattgacggatgtcgtggaaagattgcacaagaattttgagtccgaaaacttcaagataattgcattacaaccgaatgaaatttccttcaagtatctctccaataatgacgaagatgataaagactgcacaataaagatatctacgaatgacgactctattaaaaatttgacagttcaattatctccttccaacccacaacatataattcaacctttcttagataattctaaaatggattatcattttatttttagctacttacaattcacgtcttccttgtttaaagctttgaaagtaattctcaatgaaagagggggcaaattccatgagagtggaagtcagtactccactatggtgaacattgggttgcataatttgaacgagtatcagatagtatattataaccctcaggcaggcactaagattacaatatgtatagaattgaaaactgttttgcataacggccgtgataaaattcaatttcacattcattttgcagacgtagcacacataaccacgaaatctcccgcctatccaatgatgcatcaagtgagaaatcaagtatttatgcttgatactaagagattaggtaccccagaatctgtcaaacccgcaaacgcatctcatgccattcgtttgggcaatggcgtggcttgcgatcccagtgagatagagcctatcttgatggaaatccataatatcctcaaagtggactccaacagtagttcttcttga

SEQ ID NO: 7331 - DNA, 2082 bp, Saccharomyces cerevisiae
atgtggggggatagtatgcgcgagcttggtgacgctatggataatgagttgaatgcagtgaagccggtggtggaagaaggtggcatggatggtgccagaaaatttattaagggtaagagctttcagaagtcttctaccgaacatatgttgatttcgcccggtagggatggttcagtgccattgaatgggttgaaatcgtcgccggcagacccgcacttgtctgatgttaattctatcttggacaatcatcgtggcggtggcgagacagctttgacgtctgtaaataatattatcatggccacttcgacgaatggggacagtgatggggttgatggagatgccaagaggccgtctatttctaactgttcgtcgagatcatcattttttgacaccgtactgagcacgttttccctaaaatcaaattcacaagatacggttactaatgaagtcaaaaatattgaggtccagtttgcatccgaggaggctaataaaaaattccgccaaatgttcaagccattagctcctaatacgagacttattacggactacttctgctacttccacagagaattcccctatcagggcagaatctatctctccaacacacatttatgtttcaactcaaccgtgttgaactggatggcaaagttacagattcccttgaatgaaattaaatatttagataaggtcaccacaaattcaagtgctatttcggtggaaaccgtgactaacaggtacactttttccggattcatagcgagagacgaggttttccaattgattacaagagtttggtcaaaggaaaacttaaccaatatcaatgacgttttggaggttgatgagagggtctccaagaaaaagggaatatcatcgaccccttcttccatattcaacaatgtttctaccaatgcatataacgatttcatatcgacaaccactactgaaccaacaagcagggcttcctacatgagcgagaacgacatgctcatcgaggaggccataaggtccgtggacgattacatgggcacaccaagagcatcgccatcttcttcatcttcgtcgtcatcgtcgtcatcgtctttaggctcttcaacaacttattattgtaggcccgtatataggttaaagccaaacgcaccatttcaatatgaggggccattccatgtacaagaaaccatggactttccttataaacctgaggctaataatgaatacgtgcttctggaacgtcaattcagcgttccacccggcctacttttcattatgatgttcaatgaagataatccagtttttgagttaagctttttgaaaactcaagattcgtccaacatctcacacatagggacttttgaaaaagtcaataaagatggacaacattacagagaattccaatacaccaaacagctgcatttccctgtggggcccaaatccacaaactgtgaggtagcggaaattcttttacactgcgactgggaaaggtacataaatgttttaagtataacaagaacaccaaatgttcctagtggtaccagtttcagcaccagaacgaggtacatgttccgatgggatgaccaggggcaaggttgcatattaaaaataagtttttgggtggactggaacgcatccagttggatcaagccaatggtagagagcaattgtaaaaatggacaaattagcgccactaaggacttggtaaagttagtcgaagaatttgtagagaaatacgtggaattgagcaaagaaaaagcagatacactcaagccgttgcccagtgttacatcttttggatcacctaggaaagtggcagcaccggagctgacgatggtacagccggagtcgaaaccagaagctgaggcggaaatctcagaaataggcagcgacagatggaggtttaactgggtgaacataataatcttggtgctcttggtgttaaatctgctgtatttaatgaagttgaacaagaagatggataagctgacgaacctcatgacccacaaggacgaagttgtagcgcacgcgactctattggacataccagccaaagtacaatggtcaagaccaagaaggggagacgtgttgtaa

SEQ ID NO: 7332 - DNA, 2082 bp, Artificial Sequence
  Description of Artificial Sequence: Synthetic polynucleotide
atgtggggggatagtatgcgcgagcttggtgacgctatggataatgagttgaatgcagtgaagccggtggtggaagaaggtggcatggatggtgccagaaaatttattaagggtaagagctttcagaagtcttctaccgaacatatgttgatttctcccggtagggatggttctgtgccattgaatgggttgaaaagctctccggcagacccgcacttgtctgatgttaattctatcttggacaatcatcgtggcggtggcgagacagctttgacgtctgtaaataatattatcatggccacttccacgaatggggacagtgatggggttgatggagatgccaagaggccgtctatttctaactgttcttctagaagttctttttttgacaccgtattgagcacgttttccttgaaatctaattctcaagatacggttactaatgaagtcaaaaatattgaggtccagtttgcatccgaggaggctaataaaaaattccgccaaatgttcaagccattagctcctaatacgagacttattacggactacttctgctacttccacagagaattcccctatcagggcagaatctatctctccaacacacatttatgtttcaactctaccgtgttgaactggatggcaaagttacagattcccttgaatgaaattaaatatttagataaggtcaccacaaatagtagtgctatttctgtggaaaccgtgactaacaggtacactttttccggattcatagcgagagacgaggttttccaattgattacaagagtttggtccaaggaaaacttaaccaatatcaatgacgttttggaggttgatgagagggtctccaagaaaaagggaatatcttccaccccttcttccatattcaacaatgtttctaccaatgcatataacgatttcatatctacaaccactactgaaccaacaagcagggcttcctacatgagcgagaacgacatgctcatcgaggaggccataaggtccgtggacgattacatgggcacaccaagagcatctccatcttcttcttcttcttcttcttcttcttcttcttctttaggctcttctacaacttattattgtaggcccgtatataggttaaagccaaacgcaccatttcaatatgaggggccattccatgtacaagaaaccatggactttccttataaacctgaggctaataatgaatacgtgcttttagaacgtcaattcagcgttccacccggccttcttttcattatgatgttcaatgaagataatccagtttttgagttaagctttttgaaaactcaagattcttccaacatcagccacatagggacttttgaaaaagtcaataaagatggacaacattacagagaattccaatacaccaaacagttacatttccctgtggggcccaaatccacaaactgtgaggtagcggaaattcttttacactgcgactgggaaaggtacataaatgttttaagtataacaagaacaccaaatgttcctagtggtaccagtttcagcaccagaacgaggtacatgttccgttgggatgaccaggggcaaggttgcatattaaaaataagtttttgggtggactggaacgcatccagttggatcaagccaatggtagagagcaattgtaaaaatggacaaattagcgccactaaggacttggtaaagttagtcgaagaatttgtagagaaatacgtggaattgagcaaagaaaaagcagatacactcaagccgttgcccagtgttacatcttttggatctcctaggaaagtggcagcaccggagcttacgatggtacagccggagagtaaaccagaagctgaggcggaaatcagtgaaataggcagcgacagatggaggtttaactgggtgaacataataatcttggtgctcttggtgttaaatttattatatttaatgaagttgaacaagaagatggataagttgacgaacctcatgacccacaaggacgaagttgtagcgcacgcgactttattggacataccagccaaagtacaatggtccagaccaagaaggggagacgtgttgtga

SEQ ID NO: 7333 - DNA, 603 bp, Saccharomyces cerevisiae
atgaagtctagtaagcaattggttcaggacgctaaggattatcgcttcaatccggcgataccattgagaatttacctgaaaacatgcatcggcatattggaaaaggcacagtgtgcgttccaggccaacgacttgtcgctgtcgtttatttattattttagatatgtggatttattgactaacaaactatctagacaccctgagcttttgcgcatggatgcgtcgtcgtcatcgtcgtcatcgtatattcataaaagagaatacctgcaactcataaagttggaagtgcctgcggtctgcaaaattattgaaagcttacgcacccaaattgattctcaatacagcaaattgcaaacatcactcgctaataatatagccaagccgaacataaacgcaaacacaactcccgtgcaggtggagcaacaaccactgccgaagaaatctttcgacgagtatagcttcaaccaatcaatttcttttttccagaaaatttcaaacgcacaacttaataccggagcaagctctcagagtcaggccactgcccgtgatgaagcctacagactgaattatccggagctaccacgccttacattctccacatag

SEQ ID NO: 7334 - DNA, 603 bp, Artificial Sequence
  Description of Artificial Sequence: Synthetic polynucleotide
atgaagtctagtaagcaattggttcaggacgctaaggattatcgcttcaatccggcgataccattgagaatttacttgaaaacatgcatcggcatattggaaaaggcacagtgtgcgttccaggccaacgacttgtctttatcttttatttattattttagatatgtggatttattgactaacaaattatctagacaccctgagcttttgcgcatggatgcgtcttcttcttcttcttcttcttatattcataaaagagaatacttacaactcataaagttggaagtgcctgcggtctgcaaaattattgaaagcttacgcacccaaattgattctcaatacagcaaattgcaaacatctctcgctaataatatagccaagccgaacataaacgcaaacacaactcccgtgcaggtggagcaacaaccattaccgaagaaatctttcgacgagtatagcttcaaccaatctatttcttttttccagaaaatttccaacgcacaacttaataccggagcaagctctcagagtcaggccactgcccgtgatgaagcctacagattgaattatccggagttaccacgccttacattctccacatga

SEQ ID NO: 7335 - DNA, 501 bp, Saccharomyces cerevisiae
atgggtagatattcggtgaagagatacaagactaaaagaagaacacgagacttggacctgatctataacgatttgtccaccaaggaatcagtacagaagcttctgaaccagccattggatgaaaccaaaccgggccttggtcagcactattgcatacactgtgccaaatacatggagactgctatagcgttaaaaacgcatttaaagggcaaagtgcacaaaagaagagtcaaggagttgaggggtgtcccttacacacaagaagtctctgatgctgctgcgggctacaatttgaacaagttcttgaaccgtgtacaggagatcacgcaatcggtgggtccggagaaggaaagtaatgaggccttgctgaaggagcatttggacagtaccttggcaaacgtcaaaacaacagaacctactctaccgtgggcggctgctgatgccgaggcgaataccgctgccgtaacagaggcagagtctactgcctcagccagtacttaa

SEQ ID NO: 7336 - DNA, 501 bp, Artificial Sequence
  Description of Artificial Sequence: Synthetic polynucleotide
atgggtagatattctgtgaagagatacaagactaaaagaagaacaagagacttggacttgatctataacgatttgtccaccaaggaaagtgtacagaagcttttgaaccagccattggatgaaaccaaaccgggccttggtcagcactattgcatacactgtgccaaatacatggagactgctatagcgttaaaaacgcatttaaagggcaaagtgcacaaaagaagagtcaaggagttgaggggtgtcccttacacacaagaagtctctgatgctgctgcgggctacaatttgaacaagttcttgaaccgtgtacaggagatcacgcaatctgtgggtccggagaaggaaagtaatgaggccttgttgaaggagcatttggacagtaccttggcaaacgtcaaaacaacagaacctactttaccgtgggcggctgctgatgccgaggcgaataccgctgccgtaacagaggcagagtctactgcctctgccagtacttga

SEQ ID NO: 7337 - DNA, 666 bp, Saccharomyces cerevisiae
atggctagaagaccagctagatgttacagataccaaaagaacaagccttacccaaagtctagatacaacagagctgttccagactccaagatcagaatctacgatttgggtaagaagaaggctaccgtcgatgaattcccattgtgtgtccatttggtttccaacgaattggaacaattgtcttctgaagctttggaagctgctcgtatctgtgccaacaagtacatgactactgtctccggtagagatgctttccacttaagagtcagagtccatcctttccatgtcttgagaatcaacaagatgttgtcttgtgccggtgcggatagattgcaacaaggtatgagaggtgcttggggtaagccacacggtttggccgctcgtgtcgacattggtcaaattatcttctctgtcagaaccaaggacagcaacaaggatgttgtcgttgaaggtttgagaagagccagatacaagttcccaggtcaacaaaagattattttgtctaagaagtggggtttcaccaacttggacagaccagaatacttgaagaagagagaagctggtgaagtcaaggacgacggtgctttcgttaagttcttgtccaagaagggttctttggaaaacaacatcagagaattcccagaatactttgctgctcaagcttaa

SEQ ID NO: 7338 - DNA, 666 bp, Artificial Sequence
  Description of Artificial Sequence: Synthetic polynucleotide
atggctagaagaccagctagatgttacagataccaaaagaacaagccttacccaaagtctagatacaacagagctgttccagactccaagatcagaatctacgatttgggtaagaagaaggctaccgtcgatgaattcccattgtgtgtccatttggtttccaacgaattggaacaattgtcttctgaagctttggaagctgctcgtatctgtgccaacaagtacatgactactgtctccggtagagatgctttccacttaagagtcagagtccatcctttccatgtcttgagaatcaacaagatgttgtcttgtgccggtgcggatagattgcaacaaggtatgagaggtgcttggggtaagccacacggtttggccgctcgtgtcgacattggtcaaattatcttctctgtcagaaccaaggacagcaacaaggatgttgtcgttgaaggtttgagaagagccagatacaagttcccaggtcaacaaaagattattttgtctaagaagtggggtttcaccaacttggacagaccagaatacttgaagaagagagaagctggtgaagtcaaggacgacggtgctttcgttaagttcttgtccaagaagggttctttggaaaacaacatcagagaattcccagaatactttgctgctcaagcttga

SEQ ID NO: 7339 - DNA, 1752 bp, Saccharomyces cerevisiae
atgtcattcagattattcacgaggacttctcaacgtctccctcgccttaactgggttagtcccatcaggcgatacgccaaacaacctcaatacgatgaagcagagttgtttgcagagaacattaaccatggcgcatataaagcaaagaaaaggccatcagacgagcatttccaatggcctgagaagtctcctgatcagatcacaaaggaatctgaactccaatgggaaaggatggcgaaattatctgctgttgggcaagggatcctcattctcgtggtagtgggtgggttgggaacggcctacttgcgttggccagaattaaaatcctggtggttaatcaagatgaatggcggtcgcataaatgcaacgcaagagcaaagtggacaggattcgttggaaaaattgatcagacaaaaggccaaaaatctattaagggagattcctcaagtgcctgcctttcaacttggaatagatcatcctggtgtatacatatggggaaggtgtcattctaaggactcattgttccctgttagagtacctaatttggatggtcgtaaattcagagatatcctattagctccctctgacgatttcaacaccaattttgcaattgacgagaaaggcgatttgatatcgtgggatgatttgggacaaacaaaaacgatattgccagatcaagatttgacctcaatgaagtattctagtcactttttgtacgctttgaataaaaagggtgaaatattggtcatacctataagaacgccggatctgatagcttcgcaagtatcatcaagaaggtcgaaattgttgccatggaagacaaaactaagatatgattggaaattacaaacaaatcagattttcaacggtaaggaaggagaaaaacgtgtagtacaatttgacgctggtagccatcatctggtgttgctatctaatttaggtaaggcttattgctgcgcgacgggaaatgatcaaaaacaagctcaagtatccaaaggacaattcggtataccaacattctcacaattcgatgagtttcctcccaataatcaactattcgaaattgaactgctgaacaaatttaagcatgaaggagaagacgttgtccgcaaaagagaaattaaaaagatagcttgcgggtcgtaccatacactggcaatagataagactggtgaaatttatgcctttggctggaataggttcggccaattggcactacctatttcgtacaatctagaatatgtttctttcccaagatcggtaacgcatgcatttaaaccgcatttcccggggatgacgaattggaaatgtgtggatattcattgtgatgatgaaacatcgtttgtgaccattcgtaagcctggctcaacgtcagaccatcattatttcgcgtttggtaatggactttttggtgaattgggcaacaacactttcaagaactcgcaatgtgatcccataaaaatcaagtcggatgacaagaaattgaccaactggagttgcggctctcattgtgtgttcactgaaactgaacaagaaaacgaggtcattgcatggggtaataacgaccatggccaactaggtattggaaagaaaactatgaaatgcgctaagccaatgaacattcccgaagttctcaaaccaggacaagacacgacagatttggactcaatttataacagtaaattacacttaaaaaaggagcaacgtgtagtcaccaatggtaataaaagttgcttatactggcgggtttga

SEQ ID NO: 7340 - DNA, 1752 bp, Artificial Sequence
  Description of Artificial Sequence: Synthetic polynucleotide
atgagtttcagattattcacgaggacttctcaacgtctccctcgccttaactgggttagtcccatcaggcgttacgccaaacaacctcaatacgatgaagcagagttgtttgcagagaacattaaccatggcgcatataaagcaaagaaaaggccatctgacgagcatttccaatggcctgagaagtctcctgatcagatcacaaaggaatctgaactccaatgggaaaggatggcgaaattatctgctgttgggcaagggatcctcattctcgtggtagtgggtgggttgggaacggcctacttgcgttggccagaattaaaatcctggtggttaatcaagatgaatggcggtcgcataaatgcaacgcaagagcaaagtggacaggattctttggaaaaattgatcagacaaaaggccaaaaatttattaagggagattcctcaagtgcctgcctttcaacttggaatagatcatcctggtgtatacatatggggaaggtgtcattctaaggactctttgttccctgttagagtacctaatttggatggtcgtaaattcagagatatcttattagctccctctgacgatttcaacaccaattttgcaattgacgagaaaggcgatttgatatcttgggatgatttgggacaaacaaaaacgatattgccagatcaagatttgacctccatgaagtattctagtcactttttgtacgctttgaataaaaagggtgaaatattggtcatacctataagaacgccggatttgatagcttctcaagtatcttctagaaggtccaaattgttgccatggaagacaaaattgagatatgattggaaattacaaacaaatcagattttcaacggtaaggaaggagaaaaacgtgtagtacaatttgacgctggtagccatcatttggtgttgttatctaatttaggtaaggcttattgctgcgcgacgggaaatgatcaaaaacaagctcaagtatccaaaggacaattcggtataccaacattctctcaattcgatgagtttcctcccaataatcaattattcgaaattgaattattaaacaaatttaagcatgaaggagaagacgttgtccgcaaaagagaaattaaaaagatagcttgcgggtcttaccatacattagcaatagataagactggtgaaatttatgcctttggctggaataggttcggccaattggcattacctatttcttacaatttggaatatgtttctttcccaagatctgtaacgcatgcatttaaaccgcatttcccggggatgacgaattggaaatgtgtggatattcattgtgatgatgaaacatcttttgtgaccattcgtaagcctggctctacgagtgaccatcattatttcgcgtttggtaatggactttttggtgaattgggcaacaacactttcaagaactctcaatgtgatcccataaaaatcaagagtgatgacaagaaattgaccaactggagttgcggctctcattgtgtgttcactgaaactgaacaagaaaacgaggtcattgcatggggtaataacgaccatggccaattgggtattggaaagaaaactatgaaatgcgctaagccaatgaacattcccgaagttctcaaaccaggacaagacacgacagatttggacagtatttataacagtaaattacacttaaaaaaggagcaacgtgtagtcaccaatggtaataaaagttgcttatactggagagtttga

SEQ ID NO: 7341 - DNA, 735 bp, Saccharomyces cerevisiae
atgaacgctctttacaaccatgctgtgaagcaaaaaaatcaactacaacaagagttggccaggtttgaaaagaattctgtgaccgcccctatttctttacaagggtccatctctgcaactctggtctcactggagaaaacagttaagcaatatgcagaacatttaaacagatataaagaagatactaatgcagaggaaattgatcctaagttcgctaatcgactagcaactttaacacaggatctgcacgactttactgccaagtttaaggatttaaaacaatcctacaacgaaaataattccagaactcagttgtttggctcaggagcatcgcatgttatggactccgataacccctttagtacatcagagaccatcatgaataaaaggaacgttggtggtgcgagtgcaaatggtaaagagggctctagcaacggtgggggactaccgttgtaccaagggctacaaaaggaacagtctgttttcgaaaggggtaacgctcaattagattacattctagaaatgggccaacaatcattcgaaaatatagtggaacaaaacaaaattttatccaaggtacaagatagaatgtcaaatggcctaagaacattgggtgtttcggaacaaactatcacctctatcaataaacgggtgttcaaagataaactagtcttttggatcgcgttaattctcttgatcataggtatttattatgtgttgaaatggttaagatag

SEQ ID NO: 7342 - DNA, 735 bp, Artificial Sequence
  Description of Artificial Sequence: Synthetic polynucleotide
atgaacgctctttacaaccatgctgtgaagcaaaaaaatcaattacaacaagagttggccaggtttgaaaagaattctgtgaccgcccctatttctttacaagggtccatctctgcaactttggtctctttggagaaaacagttaagcaatatgcagaacatttaaacagatataaagaagatactaatgcagaggaaattgatcctaagttcgctaatagattagcaactttaacacaggatttacacgactttactgccaagtttaaggatttaaaacaatcctacaacgaaaataattccagaactcagttgtttggcagtggagcatctcatgttatggactccgataacccctttagtacaagtgagaccatcatgaataaaaggaacgttggtggtgcgagtgcaaatggtaaagagggctctagcaacggtgggggattaccgttgtaccaagggttgcaaaaggaacagtctgttttcgaaaggggtaacgctcaattagattacattttggaaatgggccaacaaagtttcgaaaatatagtggaacaaaacaaaattttatccaaggtacaagatagaatgagtaatggcttaagaacattgggtgtttctgaacaaactatcacctctatcaataaaagagtgttcaaagataaattggtcttttggatcgcgttaattctcttgatcataggtatttattatgtgttgaaatggttaagatga

SEQ ID NO: 7343 - DNA, 855 bp, Saccharomyces cerevisiae
atgactccttccaccccaccaaggtccagagggactaggtaccttgcgcagcctagtggcaatactagttctagtgccctaatgcaaggtcaaaagaccccccaaaagccttcacagaacctagtccctgtcactccctcaacaactaagtcttttaaaaatgcgccattattagcacctcccaattcgaacatgggtatgacctctccatttaatgggcttacgtctcctcaacgctcgccgtttccaaaatcttcagtgaagaggacactattccaatttgaaagtcatgataatggaacagtaagggaagagcaggaaccattgggtcgtgtaaataggatattgtttcccacgcagcaaaatgtggatatagatgcagcagaagaagaagaagaaggagaagttcttcttccccccagcagacctacatctgccaggcagttacatttatcacttgaaagagatgagtttgatcagacacatagaaagaagattattaaagatgtacctggtacgcccagcgacaaggtgataacatttgaattggcaaaaaattggaacaacaactctccgaaaaatgacgccaggagtcaagaaagtgaagacgaggaagacatcatcatcaatccagtgcgggtgggtaaaaatccctttgcatcagatgaactggtcactcaggaaattagaaatgaacgtaaaagggcaatgttgagagaaaacccagatatagaagacgtaataacatatgtcaataagaagggagaggtggtagagaaacgaaggttaacggatgaagaaaagagaagattcaagccaaaggcattgtttcaatctagggatcaagagcattga

SEQ ID NO: 7344 - DNA, 855 bp, Artificial Sequence
  Description of Artificial Sequence: Synthetic polynucleotide
atgactccttccaccccaccaaggtccagagggactaggtaccttgcgcagcctagtggcaatactagttctagtgccttgatgcaaggtcaaaagaccccccaaaagccttctcagaacttggtccctgtcactccctccacaactaagtcttttaaaaatgcgccattattagcacctcccaatagcaacatgggtatgacctctccatttaatgggcttacgtctcctcaacgcagtccgtttccaaaatcttctgtgaagaggacattgttccaatttgaaagtcatgataatggaacagtaagggaagagcaggaaccattgggtcgtgtaaataggatattgtttcccacgcagcaaaatgtggatatagatgcagcagaagaagaagaagaaggagaagttcttcttccccccagcagacctacatctgccaggcagttacatttatctcttgaaagagatgagtttgatcagacacatagaaagaagattattaaagatgtacctggtacgcccagcgacaaggtgataacatttgaattggcaaaaaattggaacaacaactctccgaaaaatgacgccaggagtcaagaaagtgaagacgaggaagacatcatcatcaatccagtgagagtgggtaaaaatccctttgcatctgatgaattggtcactcaggaaattagaaatgaacgtaaaagggcaatgttgagagaaaacccagatatagaagacgtaataacatatgtcaataagaagggagaggtggtagagaaaagaaggttaacggatgaagaaaagagaagattcaagccaaaggcattgtttcaatctagggatcaagagcattga

SEQ ID NO: 7345 - DNA, 1335 bp, Saccharomyces cerevisiae
atgactacaagaaagacagcttcctctcttcagcttttagggaaaatcacaggaacaaaagctggaactaagcaaaagaagatgaatttcattaatggactgatatggttatatatgtgtgtgtggatggtacacggaaaagtgacgcagaaggatgaattgaaatggaataaaggatactcgctaccaaatttgctagaagtgacagatcagcaaaaagaactttcacaatggactttgggtgacaaagtaaaacttgaagaagggaggtttgttttaactcctggaaagaacacaaagggttcactttggttgaaacctgaatattcaataaaggatgcaatgacaatagagtggacgtttagaagtttcgggttcagaggcagcacaaaggggggtcttgcattttggctgaagcaaggaaatgagggagatagtaccgagttatttggtggaagttcgaagaagtttaatggtttgatgatattgttacgattagacgataagttgggagagagcgtgacagcgtatttgaatgacggaacaaaagatcttgatattgaatcctcaccgtactttgcgtcatgtctgttccaataccaggattccatggtaccatcaacattaagattgacttacaatccactagataatcacttgttaaagttgcaaatggacaacagagtgtgtttccagacaaggaaagttaaatttatgggcagcagcccatttaggattggaacaagtgctatcaacgatgcatccaaagaatcgtttgaaatcttgaaaatgaagctttatgacggagttatagaggattcgctaattcctaacgtgaatcctatgggacaacccagagtggttactaaagtgatcaattctcaaactggtgaagagagtttcagggaaaagatgccattttctgataaggaagaaagtataacgagtaacgagcttttcgaaaagatgaacaagttggaggggaaaatcatggcaaatgatatcgatccattactccgcaagatgaacaagattgtggagaatgaacgtgaactgattcaacgtttaagaccactgttagatctgaagaaaacagccataagtgacgatagtttccaagattttctttcgatgaacgcaaacctggacagattgataaaagaacaagaaaaaattcgacaagatgccaagctgtatggcaagcagaccaaaggtcatgatgagatattttccaaaataagtgtatggttggcactgctgattttcattatgatcacattggcgtactacatgtttagaattaaccaagacatcaagaaggtcaaacttctgtaa

SEQ ID NO: 7346 - DNA, 1335 bp, Artificial Sequence
  Description of Artificial Sequence: Synthetic polynucleotide
atgactacaagaaagacagcttcctctcttcagcttttagggaaaatcacaggaacaaaagctggaactaagcaaaagaagatgaatttcattaatggattgatatggttatatatgtgtgtgtggatggtacacggaaaagtgacgcagaaggatgaattgaaatggaataaaggatactctttaccaaatttgttggaagtgacagatcagcaaaaagaactttctcaatggactttgggtgacaaagtaaaacttgaagaagggaggtttgttttaactcctggaaagaacacaaagggttctctttggttgaaacctgaatattctataaaggatgcaatgacaatagagtggacgtttagaagtttcgggttcagaggcagcacaaaggggggtcttgcattttggttaaagcaaggaaatgagggagatagtaccgagttatttggtggaagttccaagaagtttaatggtttgatgatattgttaagattagacgataagttgggagagagcgtgacagcgtatttgaatgacggaacaaaagatcttgatattgaatcctctccgtactttgcgtcttgtttgttccaataccaggattccatggtaccatctacattaagattgacttacaatccattagataatcacttgttaaagttgcaaatggacaacagagtgtgtttccagacaaggaaagttaaatttatgggcagcagcccatttaggattggaacaagtgctatcaacgatgcatccaaagaaagttttgaaatcttgaaaatgaagctttatgacggagttatagaggattctttgattcctaacgtgaatcctatgggacaacccagagtggttactaaagtgatcaattctcaaactggtgaagagagtttcagggaaaagatgccattttctgataaggaagaaagtataacgagtaacgagcttttcgaaaagatgaacaagttggaggggaaaatcatggcaaatgatatcgatccattactccgcaagatgaacaagattgtggagaatgaacgtgaattgattcaacgtttaagaccattattagatttgaagaaaacagccataagtgacgatagtttccaagattttctttctatgaacgcaaacttggacagattgataaaagaacaagaaaaaattagacaagatgccaagctttatggcaagcagaccaaaggtcatgatgagatattttccaaaataagtgtatggttggcattattgattttcattatgatcacattggcgtactacatgtttagaattaaccaagacatcaagaaggtcaaacttttgtga

SEQ ID NO: 7347 - DNA, 1725 bp, Saccharomyces cerevisiae
atggcagttgaggagaacaatatgcctgttgtttcacagcaaccccaagctggtgaagacgtgatctcttcactcagtaaagattcccatttaagcgcacaatctcaaaagtattctaatgatgaattgaaagccggtgagtcagggtctgaaggctcccaaagtgttcctatagagatacccaagaagcccatgtctgaatatgttaccgtttccttgctttgtttgtgtgttgccttcggcggcttcatgtttggctgggataccggtactatttctgggtttgttgtccaaacagactttttgagaaggtttggtatgaaacataaggatggtacccactatttgtcaaacgtcagaacaggtttaatcgtcgccattttcaatattggctgtgcctttggtggtattatactttccaaaggtggagatatgtatggccgtaaaaagggtctttcgattgtcgtctcggtttatatagttggtattatcattcaaattgcctctatcaacaagtggtaccaatatttcattggtagaatcatatctggtttgggtgtcggcggcatcgccgtcttatgtcctatgttgatctctgaaattgctccaaagcacttgagaggcacactagtttcttgttatcagctgatgattactgcaggtatctttttgggctactgtactaattacggtacaaagagctattcgaactcagttcaatggagagttccattagggctatgtttcgcttggtcattatttatgattggcgctttgacgttagttcctgaatccccacgttatttatgtgaggtgaataaggtagaagacgccaagcgttccattgctaagtctaacaaggtgtcaccagaggatcctgccgtccaggcagagttagatctgatcatggccggtatagaagctgaaaaactggctggcaatgcgtcctggggggaattattttccaccaagaccaaagtatttcaacgtttgttgatgggtgtgtttgttcaaatgttccaacaattaaccggtaacaattattttttctactacggtaccgttattttcaagtcagttggcctggatgattcctttgaaacatccattgtcattggtgtagtcaactttgcctccactttctttagtttgtggactgtcgaaaacttgggacatcgtaaatgtttacttttgggcgctgccactatgatggcttgtatggtcatctacgcctctgttggtgttactagattatatcctcacggtaaaagccagccatcttctaaaggtgccggtaactgtatgattgtctttacctgtttttatattttctgttatgccacaacctgggcgccagttgcctgggtcatcacagcagaatcattcccactgagagtcaagtcgaaatgtatggcgttggcctctgcttccaattgggtatgggggttcttgattgcatttttcaccccattcatcacatctgccattaacttctactacggttatgtcttcatgggctgtttggttgccatgtttttttatgtctttttctttgttccagaaactaaaggcctatcgttagaagaaattcaagaattatgggaagaaggtgttttaccttggaaatctgaaggctggattccttcatccagaagaggtaataattacgatttagaggatttacaacatgacgacaaaccgtggtacaaggccatgctagaataa

SEQ ID NO: 7348 - DNA, 1725 bp, Artificial Sequence
  Description of Artificial Sequence: Synthetic polynucleotide
atggcagttgaggagaacaatatgcctgttgtttctcagcaaccccaagctggtgaagacgtgatctcttctctcagtaaagattcccatttaagcgcacaatctcaaaagtattctaatgatgaattgaaagccggtgagagtgggtctgaaggctcccaaagtgttcctatagagatacccaagaagcccatgtctgaatatgttaccgtttccttgctttgtttgtgtgttgccttcggcggcttcatgtttggctgggataccggtactatttctgggtttgttgtccaaacagactttttgagaaggtttggtatgaaacataaggatggtacccactatttgtctaacgtcagaacaggtttaatcgtcgccattttcaatattggctgtgcctttggtggtattatactttccaaaggtggagatatgtatggccgtaaaaagggtctttctattgtcgtctctgtttatatagttggtattatcattcaaattgcctctatcaacaagtggtaccaatatttcattggtagaatcatatctggtttgggtgtcggcggcatcgccgtcttatgtcctatgttgatctctgaaattgctccaaagcacttgagaggcacattagtttcttgttatcagttgatgattactgcaggtatctttttgggctactgtactaattacggtacaaagagctattccaactctgttcaatggagagttccattagggctttgtttcgcttggtctttatttatgattggcgctttgacgttagttcctgaatccccacgttatttatgtgaggtgaataaggtagaagacgccaagcgttccattgctaagtctaacaaggtgtctccagaggatcctgccgtccaggcagagttagatttgatcatggccggtatagaagctgaaaaattggctggcaatgcgtcctggggggaattattttccaccaagaccaaagtatttcaacgtttgttgatgggtgtgtttgttcaaatgttccaacaattaaccggtaacaattattttttctactacggtaccgttattttcaagtctgttggcttggatgattcctttgaaacatccattgtcattggtgtagtcaactttgcctccactttctttagtttgtggactgtcgaaaacttgggacatcgtaaatgtttacttttgggcgctgccactatgatggcttgtatggtcatctacgcctctgttggtgttactagattatatcctcacggtaaaagccagccatcttctaaaggtgccggtaactgtatgattgtctttacctgtttttatattttctgttatgccacaacctgggcgccagttgcctgggtcatcacagcagaatctttcccattgagagtcaagagtaaatgtatggcgttggcctctgcttccaattgggtatgggggttcttgattgcatttttcaccccattcatcacatctgccattaacttctactacggttatgtcttcatgggctgtttggttgccatgtttttttatgtctttttctttgttccagaaactaaaggcctttctttagaagaaattcaagaattatgggaagaaggtgttttaccttggaaatctgaaggctggattccttcttccagaagaggtaataattacgatttagaggatttacaacatgacgacaaaccgtggtacaaggccatgttggaatga

SEQ ID NO: 7349 - DNA, 1179 bp, Saccharomyces cerevisiae
atgtccaactttaagaattttactttaaattcctttgaagattattacggaaagccctctgaaacgccaaaaatggaggaagagaaattggaagtaacaaatgtgaatgcgtcctcttcaaaaaaagtacataaaagcaaaaagagcacttcaaaatatgaccaaaagaatgtatttagaaactcaatgacaggaattgcacaaatactgccaacaaaacctgtgaaaattatagagcagaatattgattttgccaatccgaagagcttcgacctcctgcaatctacacatactatttgctttaataaaagaattaacactactaataccaagttgaatgtggaaactcatacttctagtgatattgacaacgacatattgcacgttggagcccccacagacttggggggaaacagtaatgacgaagcggaaacaaggcaactaaggaagtttcgatggtccaataataaagaaaaaagtctttgtgaaaagttaacagtcatatattgggccctcttgctccacacaacaaagagagcaagtaaaaggagacctatattatgtcatcaaatgatagctgagttttttaacagagtttataaggagaaatcaagagtacctataacttcaagatatattagagataacctcgtcgcttgggtcactcaaggaaaggaattgcatgaaaaaggttgggtaggggatgccaaaactggcgatttgcaagaacagttcaatatagccactgtcaaattatatgaaagcgcagaagacgggcgtctttccattggtaaagacaaaccctttcgagaggaaaacaccggcagtgatagtttggttcgagcggaagaggactctaccgctgtcactaatgaaaatggacatatttcttcagaaaaaaacttgaaaaaagatcgtagagagtctataaggaaccaaatcctgactttagacctaaatgacgaagattttttccaaaatgtaatgaaagttttatcagccattgatgaaccagaactgagacaatatgtaatcgtaatctcagaattagttagcatggaaatggatgatggtaaaacggtacgagaaaagctccgagacgttgaattgaatattaataggttgcaggttgatataaaagaaataaaggaaatgcttgttacactgataaacaaatga

SEQ ID NO: 7350 - DNA, 1179 bp, Artificial Sequence
  Description of Artificial Sequence: Synthetic polynucleotide
atgtccaactttaagaattttactttaaattcctttgaagattattacggaaagccctctgaaacgccaaaaatggaggaagagaaattggaagtaacaaatgtgaatgcgtcctcttctaaaaaagtacataaaagcaaaaagagcacttctaaatatgaccaaaagaatgtatttagaaactccatgacaggaattgcacaaatattgccaacaaaacctgtgaaaattatagagcagaatattgattttgccaatccgaagagcttcgacctcttacaatctacacatactatttgctttaataaaagaattaacactactaataccaagttgaatgtggaaactcatacttctagtgatattgacaacgacatattgcacgttggagcccccacagacttggggggaaacagtaatgacgaagcggaaacaaggcaattaaggaagtttagatggtccaataataaagaaaaaagtctttgtgaaaagttaacagtcatatattgggccctcttgctccacacaacaaagagagcaagtaaaaggagacctatattatgtcatcaaatgatagctgagttttttaacagagtttataaggagaaatctagagtacctataacttccagatatattagagataacctcgtcgcttgggtcactcaaggaaaggaattgcatgaaaaaggttgggtaggggatgccaaaactggcgatttgcaagaacagttcaatatagccactgtcaaattatatgaaagcgcagaagacgggcgtctttccattggtaaagacaaaccctttagagaggaaaacaccggcagtgatagtttggttagagcggaagaggactctaccgctgtcactaatgaaaatggacatatttcttctgaaaaaaacttgaaaaaagatcgtagagagtctataaggaaccaaatcttgactttagacttgaatgacgaagattttttccaaaatgtaatgaaagttttatctgccattgatgaaccagaattgagacaatatgtaatcgtaatcagtgaattagttagcatggaaatggatgatggtaaaacggtaagagaaaagctcagagacgttgaattgaatattaataggttgcaggttgatataaaagaaataaaggaaatgcttgttacattaataaacaaatga

SEQ ID NO: 7351 - DNA, 2004 bp, Saccharomyces cerevisiae
atgatttacaaaatggcacacgtacagcttttgttgttgtatttttttgtgtcaacagtcaaagccttctatttaccaggtgtagcgcctaccacttacagggaaaatgacaacatcccattgctcgttaatcatttaactccatcaatgaattatcaacacaaagatgaggacggtaataacgtttctggcgataaagaaaatttcttgtactcatacgactactattacaatagattccatttttgtcagcctgaaaaagtcgaaaagcaacctgaatccttgggatccgttatatttggtgatcgaatttataattcaccattccaattgaatatgttacaagaaaaagagtgtgaatccctgtgtaagaccgtaattccgggagatgatgctaaattcatcaataaattgataaaaaatggcttcttccaaaactggcttattgatggattaccggctgcaagagaggtttatgatggcagaactaagactagtttttatggtgctggcttcaaccttggttttgtacaggtaactcaaggaaccgacattgaggctactccaaaaggggcagaaaccaccgataaggatgtggaattggaaacacgtaatgatcgtaacatggtgaaaacttacgaattgccttactttgccaaccatttcgatattatgattgaatatcacgatcgtggtgaaggtaactatcgtgtagttggtgttatcgtcgaaccggtttccataaaacgttccagtccaggtacatgtgaaacgactggcagcccattgatgctagacgaaggaaatgataatgaagtttattttacttattccgttaaattcaatgaatcagcgacttcttgggccaccaggtgggacaaatatttacacgtatatgatccttctattcaatggttttctttgataaatttctccttagttgttgtcttattgtcatctgttgttatccattcgctattgcgcgcactgaaaagtgatttcgcacgttacaacgagttaaatttggacgatgattttcaagaagattcgggttggaaattgaatcatggtgatgtttttcgttcgccaagtcaatcgctaaccctttcaattttggttggttcaggagttcaattatttttgatggtaacttgcagtatcttcttcgctgcattgggtttcctatcacctagttctagaggttccttagccactgttatgtttatcttatatgcattattcgggtttgtcggctcttatacatctatgggcatctacaaatttttcaatgggccatactggaaggcaaacttgatattgactccacttctagttcctggtgctattctgctaataattattgcgttgaactttttcttaatgtttgttcattcttctggtgtcataccagcaagtactctgttttttatggtttttctatggtttttgttctcaatcccattatcatttgctggttcattgattgccaggaaaagatgtcactgggatgaacatccaaccaagacaaaccaaatcgcaagacaaatacccttccagccttggtatttaaagactataccagctactttgattgctggtatctttccatttggctccatcgccgttgagttgtatttcatatacacaagtttatggtttaataagattttttacatgtttggtttcctctttttctctttcctcctattaactttgacaagttcactcgtcactattttgatcacttatcattccttatgcctggagaactggaagtggcaatggagaggattcataattggaggcgccggttgtgctttgtatgtgtttattcattctattttattcaccaaatttaagttgggtggattcacgactattgtcttatacgtgggatactcctcagtcatttcattactctgctgtttggtaacggggtcaattggctttatcagcagtatgctctttgttagaaaaatctactcatccattaaagttgactag

SEQ ID NO: 7352 - DNA, 2004 bp, Artificial Sequence
  Description of Artificial Sequence: Synthetic polynucleotide
atgatttacaaaatggcacacgtacagcttttgttgttgtatttttttgtgtctacagtcaaagccttctatttaccaggtgtagcgcctaccacttacagggaaaatgacaacatcccattgctcgttaatcatttaactccaagcatgaattatcaacacaaagatgaggacggtaataacgtttctggcgataaagaaaatttcttgtactcctacgactactattacaatagattccatttttgtcagcctgaaaaagtcgaaaagcaacctgaatccttgggatccgttatatttggtgatagaatttataattctccattccaattgaatatgttacaagaaaaagagtgtgaatccttatgtaagaccgtaattccgggagatgatgctaaattcatcaataaattgataaaaaatggcttcttccaaaactggcttattgatggattaccggctgcaagagaggtttatgatggcagaactaagactagtttttatggtgctggcttcaaccttggttttgtacaggtaactcaaggaaccgacattgaggctactccaaaaggggcagaaaccaccgataaggatgtggaattggaaacacgtaatgatcgtaacatggtgaaaacttacgaattgccttactttgccaaccatttcgatattatgattgaatatcacgatcgtggtgaaggtaactatcgtgtagttggtgttatcgtcgaaccggtttccataaaacgttccagtccaggtacatgtgaaacgactggcagcccattgatgttggacgaaggaaatgataatgaagtttattttacttattccgttaaattcaatgaaagtgcgacttcttgggccaccaggtgggacaaatatttacacgtatatgatccttctattcaatggttttctttgataaatttctccttagttgttgtcttattgtcttctgttgttatccattctttgttgcgcgcattgaaaagtgatttcgcacgttacaacgagttaaatttggacgatgattttcaagaagattctggttggaaattgaatcatggtgatgtttttcgttctccaagtcaatctttaaccctttctattttggttggttctggagttcaattatttttgatggtaacttgcagtatcttcttcgctgcattgggtttcttatctcctagttctagaggttccttagccactgttatgtttatcttatatgcattattcgggtttgtcggctcttatacatctatgggcatctacaaatttttcaatgggccatactggaaggcaaacttgatattgactccacttttggttcctggtgctattttattgataattattgcgttgaactttttcttaatgtttgttcattcttctggtgtcataccagcaagtactttattttttatggtttttttatggtttttgttctccatcccattatcttttgctggttctttgattgccaggaaaagatgtcactgggatgaacatccaaccaagacaaaccaaatcgcaagacaaatacccttccagccttggtatttaaagactataccagctactttgattgctggtatctttccatttggctccatcgccgttgagttgtatttcatatacacaagtttatggtttaataagattttttacatgtttggtttcctctttttctctttcctcttgttaactttgacaagtagcctcgtcactattttgatcacttatcattccttatgcttagagaactggaagtggcaatggagaggattcataattggaggcgccggttgtgctttgtatgtgtttattcattctattttattcaccaaatttaagttgggtggattcacgactattgtcttatacgtgggatactcctctgtcatttctttactctgctgtttggtaacggggtctattggctttatcagcagtatgctctttgttagaaaaatctactcttccattaaagttgactga

SEQ ID NO: 7353 - DNA, 3663 bp, Saccharomyces cerevisiae
atgtttgttcatcgtctctggacactcgcatttccttttcttgtggagatatcgaaggcatcacagttggagaatattaaatctcttctggacatcgaagataatgtgctaccgaatttgaatatatcgcaaaataatagcaacgcagtacaaatcctcgggggtgtggacgccttatctttttacgagtacacaggccaacaaaatttcactaaagaaataggtccagaaacaagctcacatggattagtttattactctaacaacacctatatccagttggaagatgcctctgatgatactcgaatagacaaaattacaccatttggcgttgattcgtttattcttagcggatcaggcacgataaacaatatctctgtcggaaaccagatattatacaatttgtcgacactgtctatgacgcctatattcaaccagtctttgggagctgttcaggctgtgctcgcagacaattcttctatctattttggaggaaacttttcatataataatggctccatgacgggctatagtgctctcatttgggactccatatcaaataccacccaacttttaccttttggagggtttggtgaaaactccagtgtgaattccatagtcaagctaaataatgacaacattttatttgcaggccagttttatacactggatgatccttctgcgcttatcagtagttcaaataacggtacgaactcaacttcctctttaaacgctactacattggagctaggccaacgaattccactgaggtacgcttcctgggattcccagggaagtacaacgtttgcatctgattcgttagtttgtcctaacactaatgaggatgcatggctttatccggatacgtctgggtctctagtttgtaatttaccatatgaagtttcaccaacaaaaataaggctttataattcccaacgttccgatagtgaaatctccgtgttccaaattctgactgatccatccagtagcataatgaatttaacgtatctggacccactaagtggggagttgaagaattgcggtgaattttgccctttgtatagccgagccactttattatcagcaagccaaaatgtatcttcatccatggacatgattaccttcatcgataacaacaagacagacgtaaaatggacgtcagatttccaagactttgcgtttgtgaatgaacttcccgtttcatcgttaaaatttgtagcattaaattcatacggtggtagtgttggattatccggtttggagctctatcaggacacattctccacttatgctaatgattctctcaacgaatatggctgcagcgcgcttaccaatgattcgtcgtcatctacattgtcgagcaatgattggtataatggtctaacaggtgaaagttatatagccgcgaaatatgttccagatcaaaatgagccaattccacgcgtaaagttttacccaaacattatccaccccggtcactacactatcaacatgtatacaccagggtgtcttcaggataatacgtgctccgcaagaggtattgtaaacgtgaccatgtggaatcaacaaaataacacaataatgaagacgtacttgatttaccagaataatgataatctaaaatatgatcaaatctactcgggatatctagatttctcaccggagatcgttttggagtatgtctcaggaatttatacaaccaacactgcaacagtggtcgtggcagatcaagttaatgtcattactgtttctttagatgcttttaacacactttcagattctagcaacgctaaaaaagaaactttattgaatggtattctccaataccagaaatcaaactttaccagcacgagattgaacgaaacaaaggtaggtaatactactttgaatcttttcccagtaaaaaattaccctaaaaattcttccctttatgctgacatttacgataacaaattagtaattggtggagtaagcaaccgtatttccattgtcgaccttaatgacgactttgaggttacatcaagtaaaaaccaaaccattcaaggtgatgtacatggtataacgaaaactaaccaaggtttactaatatttggagatattctttcatcaaataatcaatcagctgtttttttgtttaatggatcatttgagaatgtcttcaaccaatcgaggacagtgaatagtgcccttaatataagtcttgcaaataacgactttattgttcttgataacgattatgtggtcaatgcatcttccaatgcgcttatacggaactccagttcctttagtctatcactttgggcggctggtaacaatggcgatggcgatgttttgttttcaggtgcagtatctcatatgcaatatggtaatttgaatgggtctgtacgttttttgaacgaaaatgaaatagagccacttaacctagaagggggtattgtaccttacctgggagcttatttaaatgagtctgccacggcatatgcatatgaggtggattctctaaacaaaatttatttttctaatgaagtttatccttcctggaattggtctagcggtattactcaaatgctatacgctgataatcaaactttactagctgtcagtgcaggatcttcaaccacagcagaactgtcgatttttgatttgagaaatttgaccatgattgctaatgaaacactaggatcaaatgctagaataaatgctttagttaactttgaaaaaaactgtagtatgcttgtcggcggagatttccaaatgactgagccgaattgcaccggattatgtctatacaattatgaaagcaaaacttggtctaccttcctcaataacacgatttttggtgaaatcacacaactttccttcaccaactcatcagaattaattatctcaggcctttttgaaacaaaagaataccaatctatacgtttaggatcctttaacttaaccaattctactatgattccattattgagtggttctgaagggaaactgaattcgtttactgtcactgaagactccatagtggcatggaatgatacttcattatttatctatagaaaccaagaatggaatattacctcgttacctggcaatgctagctctattagctctgtttcagctatatacacagatattgaatccaacactttgaacaagagaggaatcaacaatgttaataatggcagtatcctcttacttaatggtaattttaatatttcgcaatacggatacctacaaagtttgttgtttgatttccaaaaatggaccccatattttatttcagaaacaacaaatacttccaattacaatccaataatttttattaatagagacgtttcaactgaattcaactctcagtcaccacttgccaatgtgaacattactgtgacaagtcctcagtcaacatcatcccagcctccatcttcatcggcaagcagtgaatctaaatcaaaatcgaagaagaagaaaataggtcgtggttttgtcgttttaattggtcttgcactagcattagggacagtttctgtccttggtattgcaggcgtcattcttgcctacgtgtttaaggatccagagggtgattataagcccattaaaccgcgaattgatgagaatgaaatgcttgataccgtcccacccgaaaaacttatgaagtttgtctaa

SEQ ID NO: 7354 - DNA, 3663 bp, Artificial Sequence
  Description of Artificial Sequence: Synthetic polynucleotide
atgtttgttcatcgtctctggacactcgcatttccttttcttgtggagatatccaaggcatcccagttggagaatattaaatctcttttggacatcgaagataatgtgttgccgaatttgaatatatctcaaaataatagcaacgcagtacaaatcctcgggggtgtggacgccttatctttttacgagtacacaggccaacaaaatttcactaaagaaataggtccagaaacaagctctcatggattagtttattactctaacaacacctatatccagttggaagatgcctctgatgatactagaatagacaaaattacaccatttggcgttgattcttttattcttagcggatctggcacgataaacaatatctctgtcggaaaccagatattatacaatttgagtacattatctatgacgcctatattcaaccagtctttgggagctgttcaggctgtgctcgcagacaattcttctatctattttggaggaaacttttcttataataatggctccatgacgggctatagtgctctcatttgggactccatatccaataccacccaacttttaccttttggagggtttggtgaaaactccagtgtgaattccatagtcaagttgaataatgacaacattttatttgcaggccagttttatacattagatgatccttctgcgcttatcagtagtagtaataacggtacgaactctacttcctctttaaacgctactacattggagttgggccaaagaattccattaaggtacgcttcctgggattcccagggaagtacaacgtttgcatctgattctttagtttgtcctaacactaatgaggatgcatggctttatccggatacgtctgggtctttggtttgtaatttaccatatgaagtttctccaacaaaaataaggctttataattcccaacgttccgatagtgaaatctccgtgttccaaattttgactgatccatccagtagcataatgaatttaacgtatttggacccattaagtggggagttgaagaattgcggtgaattttgccctttgtatagccgtgccactttattaagtgcaagccaaaatgtatcttcttccatggacatgattaccttcatcgataacaacaagacagacgtaaaatggacgtctgatttccaagactttgcgtttgtgaatgaacttcccgtttcttctttaaaatttgtagcattaaattcttacggtggtagtgttggattatccggtttggagctctatcaggacacattctccacttatgctaatgattctctcaacgaatatggctgcagcgcgcttaccaatgattcttcttcttctacattgagtagcaatgattggtataatggtttaacaggtgaaagttatatagccgcgaaatatgttccagatcaaaatgagccaattccacgcgtaaagttttacccaaacattatccaccccggtcactacactatcaacatgtatacaccagggtgtcttcaggataatacgtgctccgcaagaggtattgtaaacgtgaccatgtggaatcaacaaaataacacaataatgaagacgtacttgatttaccagaataatgataatttgaaatatgatcaaatctactccggatatttggatttcagtccggagatcgttttggagtatgtcagtggaatttatacaaccaacactgcaacagtggtcgtggcagatcaagttaatgtcattactgtttctttagatgcttttaacacactttctgattctagcaacgctaaaaaagaaactttattgaatggtattctccaataccagaaaagtaactttaccagcacgagattgaacgaaacaaaggtaggtaatactactttgaatcttttcccagtaaaaaattaccctaaaaattcttccctttatgctgacatttacgataacaaattagtaattggtggagtaagcaaccgtatttccattgtcgaccttaatgacgactttgaggttacatctagtaaaaaccaaaccattcaaggtgatgtacatggtataacgaaaactaaccaaggtttattgatatttggagatattctttcttccaataatcaatctgctgtttttttgtttaatggaagttttgagaatgtcttcaaccaatccaggacagtgaatagtgcccttaatataagtcttgcaaataacgactttattgttcttgataacgattatgtggtcaatgcatcttccaatgcgcttataagaaactccagttcctttagtttatctctttgggcggctggtaacaatggcgatggcgatgttttgttttctggtgcagtatctcatatgcaatatggtaatttgaatgggtctgtacgttttttgaacgaaaatgaaatagagccacttaacttggaagggggtattgtaccttacttgggagcttatttaaatgagtctgccacggcatatgcatatgaggtggattctttgaacaaaatttatttttctaatgaagtttatccttcctggaattggtctagcggtattactcaaatgctttacgctgataatcaaactttattagctgtcagtgcaggatcttccaccacagcagaattatccatttttgatttgagaaatttgaccatgattgctaatgaaacattaggaagtaatgctagaataaatgctttagttaactttgaaaaaaactgtagtatgcttgtcggcggagatttccaaatgactgagccgaattgcaccggattatgtctttacaattatgaaagcaaaacttggtctaccttcctcaataacacgatttttggtgaaatcacacaactttccttcaccaactcttctgaattaattatcagtggcctttttgaaacaaaagaataccaatctatacgtttaggatcctttaacttaaccaattctactatgattccattattgagtggttctgaagggaaattgaattcttttactgtcactgaagactccatagtggcatggaatgatacttctttatttatctatagaaaccaagaatggaatattaccagtttacctggcaatgctagctctattagctctgtttctgctatatacacagatattgaatccaacactttgaacaagagaggaatcaacaatgttaataatggcagtatcctcttacttaatggtaattttaatatttctcaatacggatacttacaaagtttgttgtttgatttccaaaaatggaccccatattttatttctgaaacaacaaatacttccaattacaatccaataatttttattaatagagacgtttccactgaattcaactctcagtctccacttgccaatgtgaacattactgtgacaagtcctcagagtacatcttcccagcctccatcttcttctgcaagcagtgaatctaaatctaaatccaagaagaagaaaataggtcgtggttttgtcgttttaattggtcttgcattggcattagggacagtttctgtccttggtattgcaggcgtcattcttgcctacgtgtttaaggatccagagggtgattataagcccattaaaccgagaattgatgagaatgaaatgcttgataccgtcccacccgaaaaacttatgaagtttgtctga

SEQ ID NO: 7355 - DNA, 1317 bp, Saccharomyces cerevisiae
atggaaacaccacccattgtgattgataatggctcatacgaaatcaagtttggtccttccacgaataagaaaccgttccgagctttaaatgcattggccaaagataaatttgggacatcgtatttatcaaatcatatcaaaaacatcaaagatatttcatctatcaccttcaggaggccacatgaactaggacagctcacattatgggaattagagagttgtatatgggattattgccttttcaatccttcagagtttgatgggtttgatctgaaagagggaaagggtcatcatttggttgctagcgagagctgtatgactttaccagaattaagtaagcatgccgaccaggtgatatttgaagaatatgaattcgacagtcttttcaagtctcctgtagcagtctttgtaccatttaccaagtcatataagggtgaaatgagaacaatttcaggtaaggacgaagatatcgatattgtccgtggcaactcagacagtacaaattccacatcaagcgagtccaagaatgcgcaggattcaggtagcgattatcatgatttccaattagttattgattccgggtttaattgtacttggataattcctgtcctgaagggaataccgtactataaagcggtaaaaaaattggacattggaggccgtttcctaactgggctactaaaggaaactctatcattcagacactacaatatgatggatgaaaccatacttgttaacaatatcaaggaacaatgcttgttcgttagcccggtgtcttattttgatagtttcaaaacgaaggataagcatgcactagaatatgtacttcctgacttccaaacaagctttcttggttacgtaagaaaccccagaaaagaaaatgtaccgttacctgaagatgcgcagatcataacactgacagatgagcttttcacaataccagaaacttttttccatccagaaatttcgcaaattactaaaccaggcattgtggaggccatcctagagagcctttccatgttgcccgaaatagtgcgacctcttatggtaggaaacattgtatgtacaggaggaaactttaatctgcccaatttcgcccaacggcttgcggcagaactacaaaggcaattacccacagattggacttgtcatgtttcggtgcccgaaggtgactgtgctctgtttgggtgggaagtgatgtcacagtttgcaaagacagattcctaccgaaaagcgagggtcacaagagaagaatactatgagcatggtcccgattggtgtacgaagcacaggtttggttaccagaattggatataa

SEQ ID NO: 7356 - DNA, 1317 bp, Artificial Sequence
  Description of Artificial Sequence: Synthetic polynucleotide
atggaaacaccacccattgtgattgataatggctcttacgaaatcaagtttggtccttccacgaataagaaaccgttcagagctttaaatgcattggccaaagataaatttgggacatcttatttatccaatcatatcaaaaacatcaaagatatttcttctatcaccttcaggaggccacatgaattaggacagctcacattatgggaattagagagttgtatatgggattattgccttttcaatccttctgagtttgatgggtttgatttgaaagagggaaagggtcatcatttggttgctagcgagagctgtatgactttaccagaattaagtaagcatgccgaccaggtgatatttgaagaatatgaattcgacagtcttttcaagtctcctgtagcagtctttgtaccatttaccaagagttataagggtgaaatgagaacaatttctggtaaggacgaagatatcgatattgtccgtggcaacagcgacagtacaaattccacatctagcgagtccaagaatgcgcaggattctggtagcgattatcatgatttccaattagttattgattccgggtttaattgtacttggataattcctgtcttgaagggaataccgtactataaagcggtaaaaaaattggacattggaggccgtttcttgactgggttgttgaaggaaactttatctttcagacactacaatatgatggatgaaaccatacttgttaacaatatcaaggaacaatgcttgttcgttagcccggtgtcttattttgatagtttcaaaacgaaggataagcatgcattggaatatgtacttcctgacttccaaacaagctttcttggttacgtaagaaaccccagaaaagaaaatgtaccgttacctgaagatgcgcagatcataacattaacagatgagcttttcacaataccagaaacttttttccatccagaaatttctcaaattactaaaccaggcattgtggaggccatcttggagagcctttccatgttgcccgaaatagtgagacctcttatggtaggaaacattgtatgtacaggaggaaactttaatttgcccaatttcgcccaaaggcttgcggcagaattacaaaggcaattacccacagattggacttgtcatgtttctgtgcccgaaggtgactgtgctttgtttgggtgggaagtgatgtctcagtttgcaaagacagattcctacagaaaagcgagggtcacaagagaagaatactatgagcatggtcccgattggtgtacgaagcacaggtttggttaccagaattggatatga

SEQ ID NO: 7357 - DNA, 4257 bp, Saccharomyces cerevisiae
atgtctgatagtccattgagcaaaagacaaaagcggaagtccgcccaagaaccagaattatctcttgatcaaggtgatgccgaagaagattcgcaggtagaaaaccgagttaacctaagcgagaatacaccagagccggatcttcctgcgttggaagcatcttattccaaatcttatactcccagaaagcttgttttaagttctggggaaaatcggtatgccttttctcaacctacaaactcaacaaccacgtcattacatgtaccgaacttgcaaccaccaaaaacctcttctaggggtcgcgaccataagtcctactctcaatcaccaccaaggtctccaggaagatcgccaactagaagattagaattgctccagctttcgccagtgaaaaatagcagggttgaactacaaaaaatttatgataggcaccagtcgtcgagcaagcaacagagcagactatttattaacgaactagtcttagagaacttcaagtcctacgctggtaaacaagtagtaggaccctttcatactagcttctcggccgtggtaggccccaatggttcaggtaaatcaaatgtcatcgattccatgttatttgtatttggatttagagcgaacaagatgagacaggacagattgtcggatttaattcataaatcagaagctttcccaagtttgcaatcatgttccgtagctgtacattttcagtacgttattgatgaatcttcgggtacttcccgaatcgatgaagaaaaacctggattgatcattacaaggaaagcctttaaaaacaactcatcgaaatattacataaacgaaaaagaaagtagctacacagaggtgacaaagcttttaaagaatgagggtattgatttagaccataaacgatttttaattctacaaggtgaagtagagaatattgctcaaatgaagcctaaagcagaaaaagagagtgacgacggactactggaatatctggaggacataattggaactgcaaactataagccgttaattgaagagcgaatgggacagattgagaatctaaatgaagtttgcctggaaaaggaaaatagatttgaaattgttgatagagaaaaaaactctttagagtcagggaaagaaacggcgttagagtttttagagaaggaaaagcagctgacgcttttaagatcaaaattatttcaatttaaattgttgcaaagcaactctaaacttgccagcaccttggaaaagatctcctcttcgaataaagacctcgaagatgagaagatgaaatttcaagaatctttgaaaaaagtggatgagattaaagcacaacgtaaggaaataaaagatcgaatatcatcttgtagctcgaaagaaaagaccctggttttagaaagaagagaattagaaggcaccagggtgtctctagaagagagaacaaaaaatttggtaagtaaaatggaaaaagcagaaaagactttgaaatccaccaaacattcaatatcggaggccgagaatatgcttgaagagcttcgtggacaacaaaccgaacacgagacggagatcaaagacttgactcaattgctggaaaaggaacgaagtatacttgatgatattaaactatctttgaaagataaaacgaagaatatatctgcagagattattcggcatgaaaaggaactggagccttgggacctccaacttcaggaaaaagaatcacagatacaattggctgaatccgaactatctttgttggaggaaactcaagctaaactgaaaaaaaacgttgaaactttagaagaaaaaattcttgccaagaaaacacacaagcaggagctacaagatcttatcctcgatctgaaaaagaagctgaactcacttaaagatgaaaggtcgcaaggtgaaaagaattttacttctgctcatctaaagttaaaagaaatgcaaaaggttttgaacgcgcatcgccagcgtgcaatggaagctagatcctctttatcaaaagctcagaataaaagtaaggttttaacagctttatcgagactgcaaaagtcaggacgtataaatggtttccatggacgtttgggcgatttgggcgttatcgacgatagttttgacgttgctatttctactgcttgtccgagactagatgatgtcgtggttgatactgtagaatgtgcgcaacactgcatcgactacttaagaaaaaacaaacttggttatgcaaggtttattctcttggataggttacgccaattcaatttacaacctatcagtacaccagaaaatgtaccgagactatttgatttagttaaacctaaaaacccaaaattctcaaatgcattttacagtgttcttagagacactttggttgctcagaatttaaaacaagccaataatgtagcatatgggaagaaaagatttagagttgtcactgtggatgggaaattaattgatatttctggtacaatgagtggtggtggcaaccatgtagcaaaaggtctaatgaaattaggtacgaatcagtcagacaaggttgatgattacacccccgaggaagtagataaaattgagcgtgagctatctgaaagagaaaataacttccgcgtggcaagcgatacggtccacgagatggaggaagaactgaaaaaattgagggaccacgaaccagacttggaatcacaaatatcaaaggcagaaatggaagctgattccttggcgagtgaattgacactggcagaacaacaagtgaaagaggcagaaatggcgtacgtcaaggcagttagtgacaaagcgcaactaaacgtggtgatgaagaatttggaacgcttgagaggcgaatacaatgatttgcaatccgaaacaaaaactaaaaaggaaaagatcaaaggcttgcaagacgaaatcatgaaaattggtggtatcaaattgcaaatgcaaaattcaaaagttgaatcagtttgtcagaaattggatattctagtggccaaacttaaaaaagtcaaatctgcctcaaagaagtcaggaggagatgtcgtaaagtttcaaaaactgctccaaaactctgaaagagacgtagaactatcatcagatgagttaaaagtcatcgaagaacaactaaaacatacaaaactggctttggcagaaaatgacacaaatatgaatgagacgctcaacttgaaagttgaattaaaagaacagagcgaacaactgaaggaacaaatggaggacatggaggaaagcatcaatgaatttaaatctatagaaatcgaaatgaagaacaagctggaaaaattgaactcactgttgacgtacatcaaaagtgagataacgcagcaagaaaaaggattaaacgaactatcaattagggatgtaacccacaccctgggaatgttagacgataataaaatggactcagtgaaagaggatgttaaaaacaatcaagaacttgatcaggaataccggtcctgtgaaactcaagatgagagtgaaataaaagacgctgagacttcttgtgacaattatcatcctatgaacattgatgagacttcagatgaggtatccagagggataccaagactttctgaggacgaattaagggagttggacgtagaactgattgaaagtaaaataaatgaattgtcatattatgtcgaagagactaacgtggatattggagttttggaagagtacgctaggcgcttagcagagttcaaaagaaggaagctggatttaaataatgctgttcaaaaaagagatgaagttaaggaacaattaggaatacttaaaaagaaaagatttgatgaatttatggctggctttaatatcatatcaatgaccctaaaagaaatgtaccaaatgattactatgggtggaaatgctgaattagaacttgtggatagtctagatcctttttctgaaggagttacgtttagtgttatgcctcctaaaaagagttggagaaatataacaaacctttcaggtggtgagaaaacactaagctccttggctttggtttttgctttacataagtataaaccaacccccctttatgtcatggatgaaatagatgccgctctggatttcagaaatgtctcaatcgtagctaactatatcaaagaaagaaccaagaatgcacagtttattgttatttcgctgagaaataacatgttcgaattagcacaacagttagttggtgtttataaaagagataatagaaccaaaagtaccacgattaaaaacatagatatcttaaacagaacttag

SEQ ID NO: 7358 - DNA, 4257 bp, Artificial Sequence
  Description of Artificial Sequence: Synthetic polynucleotide
atgtctgatagtccattgagcaaaagacaaaagagaaagtccgcccaagaaccagaattatctcttgatcaaggtgatgccgaagaagattctcaggtagaaaacagagttaacttgagcgagaatacaccagagccggatcttcctgcgttggaagcatcttattccaaatcttatactcccagaaagcttgttttaagttctggggaaaatagatatgccttttctcaacctacaaactccacaaccacgtctttacatgtaccgaacttgcaaccaccaaaaacctcttctaggggtcgcgaccataagtcctactctcaatctccaccaaggtctccaggaagatctccaactagaagattagaattgctccagctttctccagtgaaaaatagcagggttgaattacaaaaaatttatgataggcaccagtcttctagcaagcaacagagcagattatttattaacgaattggtcttagagaacttcaagtcctacgctggtaaacaagtagtaggaccctttcatactagcttctctgccgtggtaggccccaatggttctggtaaatctaatgtcatcgattccatgttatttgtatttggatttagagcgaacaagatgagacaggacagattgagtgatttaattcataaaagtgaagctttcccaagtttgcaaagctgttccgtagctgtacattttcagtacgttattgatgaatcttctggtacttccagaatcgatgaagaaaaacctggattgatcattacaaggaaagcctttaaaaacaactcttctaaatattacataaacgaaaaagaaagtagctacacagaggtgacaaagcttttaaagaatgagggtattgatttagaccataaaagatttttaattttacaaggtgaagtagagaatattgctcaaatgaagcctaaagcagaaaaagagagtgacgacggacttttagaatatttggaggacataattggaactgcaaactataagccgttaattgaagagagaatgggacagattgagaatttgaatgaagtttgcttagaaaaggaaaatagatttgaaattgttgatagagaaaaaaactctttagagagtgggaaagaaacggcgttagagtttttagagaaggaaaagcagttaacgcttttaagaagtaaattatttcaatttaaattgttgcaaagcaactctaaacttgccagcaccttggaaaagatctcctcttccaataaagacctcgaagatgagaagatgaaatttcaagaatctttgaaaaaagtggatgagattaaagcacaacgtaaggaaataaaagatagaatatcttcttgtagcagtaaagaaaagaccttggttttagaaagaagagaattagaaggcaccagggtgtctttggaagagagaacaaaaaatttggtaagtaaaatggaaaaagcagaaaagactttgaaatccaccaaacattccatatctgaggccgagaatatgcttgaagagcttcgtggacaacaaaccgaacacgagacggagatcaaagacttgactcaattgttggaaaaggaaagaagtatacttgatgatattaaattatctttgaaagataaaacgaagaatatatctgcagagattattagacatgaaaaggaattagagccttgggacctccaacttcaggaaaaagaatctcagatacaattggctgaatccgaattatctttgttggaggaaactcaagctaaattgaaaaaaaacgttgaaactttagaagaaaaaattcttgccaagaaaacacacaagcaggagttacaagatcttatcctcgatttgaaaaagaagttgaactctcttaaagatgaaaggtctcaaggtgaaaagaattttacttctgctcatttgaagttaaaagaaatgcaaaaggttttgaacgcgcatcgccagcgtgcaatggaagctagatcctctttatccaaagctcagaataaaagtaaggttttaacagctttatctagattacaaaagagtggacgtataaatggtttccatggacgtttgggcgatttgggcgttatcgacgatagttttgacgttgctatttctactgcttgtccgagattagatgatgtcgtggttgatactgtagaatgtgcgcaacactgcatcgactacttaagaaaaaacaaacttggttatgcaaggtttattctcttggataggttacgccaattcaatttacaacctatcagtacaccagaaaatgtaccgagattatttgatttagttaaacctaaaaacccaaaattcagtaatgcattttacagtgttcttagagacactttggttgctcagaatttaaaacaagccaataatgtagcatatgggaagaaaagatttagagttgtcactgtggatgggaaattaattgatatttctggtacaatgagtggtggtggcaaccatgtagcaaaaggtttgatgaaattaggtacgaatcagagtgacaaggttgatgattacacccccgaggaagtagataaaattgagcgtgagctttctgaaagagaaaataacttccgcgtggcaagcgatacggtccacgagatggaggaagaattgaaaaaattgagggaccacgaaccagacttggaatctcaaatatccaaggcagaaatggaagctgattccttggcgagtgaattgacattagcagaacaacaagtgaaagaggcagaaatggcgtacgtcaaggcagttagtgacaaagcgcaattgaacgtggtgatgaagaatttggaacgcttgagaggcgaatacaatgatttgcaatccgaaacaaaaactaaaaaggaaaagatcaaaggcttgcaagacgaaatcatgaaaattggtggtatcaaattgcaaatgcaaaattctaaagttgaatctgtttgtcagaaattggatattttggtggccaaacttaaaaaagtcaaatctgcctccaagaagagtggaggagatgtcgtaaagtttcaaaaattactccaaaactctgaaagagacgtagaattatcttctgatgagttaaaagtcatcgaagaacaattgaaacatacaaaattggctttggcagaaaatgacacaaatatgaatgagacgctcaacttgaaagttgaattaaaagaacagagcgaacaattgaaggaacaaatggaggacatggaggaaagcatcaatgaatttaaatctatagaaatcgaaatgaagaacaagttggaaaaattgaactctttgttgacgtacatcaaaagtgagataacgcagcaagaaaaaggattaaacgaattatccattagggatgtaacccacaccttaggaatgttagacgataataaaatggactctgtgaaagaggatgttaaaaacaatcaagaacttgatcaggaataccgttcctgtgaaactcaagatgagagtgaaataaaagacgctgagacttcttgtgacaattatcatcctatgaacattgatgagacttctgatgaggtatccagagggataccaagactttctgaggacgaattaagggagttggacgtagaattgattgaaagtaaaataaatgaattgagttattatgtcgaagagactaacgtggatattggagttttggaagagtacgctaggcgcttagcagagttcaaaagaaggaagttggatttaaataatgctgttcaaaaaagagatgaagttaaggaacaattaggaatacttaaaaagaaaagatttgatgaatttatggctggctttaatatcatatccatgaccttgaaagaaatgtaccaaatgattactatgggtggaaatgctgaattagaacttgtggatagtttggatcctttttctgaaggagttacgtttagtgttatgcctcctaaaaagagttggagaaatataacaaacctttctggtggtgagaaaacattgagctccttggctttggtttttgctttacataagtataaaccaacccccctttatgtcatggatgaaatagatgccgctttagatttcagaaatgtctccatcgtagctaactatatcaaagaaagaaccaagaatgcacagtttattgttatttctttgagaaataacatgttcgaattagcacaacagttagttggtgtttataaaagagataatagaaccaaaagtaccacgattaaaaacatagatatcttaaacagaacttga

SEQ ID NO: 7359 - DNA, 8877 bp, Saccharomyces cerevisiae
atggaagctatttcacaattacgtggtgttccattgacacaccaaaaggactttagctgggtctttttagtagattggattctcacggtagtagtatgtttgacaatgatattctacatgggaagaatctatgcataccttgtaagttttatattagaatggctactatggaaacgagcgaaaatcaagataaatgttgagacacttcgtgtctccttactaggtggtcgaatacattttaaaaacctttccgtaatacacaaagattatacaatttcggtattagagggtagtttaacatggaaatactggcttttaaattgcagaaaagcagaattgatagagaataacaagtcttcttctggcaaaaaagcaaagcttccctgtaaaatttccgtagaatgtgaaggtctagaaatttttatttacaacagaacagtggcgtacgataatgttataaacttactatcaaaagatgaacgcgataaatttgaaaaataccttaatgagcattcttttcctgaaccttttagcgatggaagtagtgctgataaattagatgaagatctaagcgaatctgcatacacaacgaactctgatgcatcaattgttaatgacagggactaccaagaaacagatatcggcaaacatccaaagctactgatgtttttaccaattgagcttaaatttagccgcggttccctactgttaggaaacaaattcacgccatctgttatgattctaagttatgaaagtggaaaaggcataatagatgttttacctccaaaagagcgattagatttatacagaaataaaacacagatggaattcaaaaacttcgaaatttctatcaaacaaaatattggttacgatgatgctattggattgaagtttaaaatagatagagggaaagtgtcaaagttatggaaaacgtttgtacgagtctttcagatagtaaccaagcctgttgtaccgaaaaagactaaaaaaagcgcaggcacatcagatgacaatttctatcataaatggaaaggtttatctctttataaggcttctgcgggcgacgctaaagcaagtgatttagatgatgttgagttcgatttgacgaaccatgaatatgctaaatttacatcaattttaaaatgcccaaaggtcacaattgcatatgacgtggatgttccgggcgttgtgccacatggtgcacatccgacaatacctgatattgatggaccagatgtgggcaataacggagcacctccagattttgctttagatgttcaaattcacggaggatccatctgttacggaccttgggctcaaagacaagtcagtcatctacaaagagttctatcaccggtagtttcaaggacagccaaacctataaaaaaactcccgccaggttctagaagaatatatacacttttcaggatgaatatatcaataatggaagatactacttggcgtataccgacgagggaaagtagcaaagaccccgaatttttgaaacactacaaagaaactaatgaagaatataggccatttggatggatggatctccgattttgtaaggacacctatgcaaatttcaatataagtgtttgtcctacagtgcaaggttttcagaataatttccatgttcatttcctggaaaccgaaattaggtcaagtgttaatcacgatattttgttaaaaagcaaggtattcgatattgatggggatattggatatccattgggttggaatagcaaagctatatggataattaacatgaagtcagaacaattagaggcgtttctgctacgtgagcatataactttagttgcagatacgctttcagacttttccgctggtgatcctacgccttacgaactttttagaccattcgtatacaaagtcaattgggaaatggaaggatattccatttacttaaacgtcaatgatcacaatattgttaacaatccgttagattttaacgaaaactgttatttatcccttcatggtgataagctttcaattgatgtcacggtaccccgtgagagtattttggggacatacacagatatgtcctacgagatctcaactccaatgttcagaatgatgttaaatacccccccttggaatacattgaacgaattcatgaaacataaagaagtggggagagcatacgactttacaattaaaggttcttaccttctctattccgagttagatattgataatgtcgatacgctagtcatagagtgtaacagcaagagtacagtacttcactgctatgggtttgtcatgaggtatttaacaaacgtaaagatgaattacttcggtgaattttttaattttgtgacgtcagaagagtacacaggtgtccttggcgctagggaagtcggagatgtcactacgaaaagctcggtggcagatttggcatctactgtagattcagggtaccaaaatagcagtctaaagaacgaatctgaggataaaggtcctatgaaaaggtcagatttgaaaaggactaccaacgaaactgatatttggttcacattttcggtttgggatggtgctctgatattaccagaaacgatttacagttttgatccatgcattgcactacattttgccgaacttgtagtggatttcagaagttgtaattattatatggacataatggcggttctcaacgggacttcaataaagcggcacgtttcaaaacaaataaatgaagtatttgattttatacgtcgtaataacggagctgatgagcaagagcacggattgctttcggacctcaccattcatggacatagaatgtatggattaccacccacagaacctacctacttttgtcaatgggatatcaatctcggagatttatgcattgattcagatattgaatttataaagggattctttaattccttttataagataggttttggctacaatgacttggaaaatatattattatatgacactgagaccattaatgatatgacctcgctaaccgtgcacgttgaaaaaataagaataggccttaaagatccggtgatgaaatctcaatcagttattagtgctgaatcgatattgtttactttgatcgactttgaaaacgaaaaatattcacaaagaatagacgtgaaaattccaaaattgacaatttcgttaaattgcgtgatgggcgatggcgtagacacatcatttctcaaattcgaaacaaaattaagatttacaaactttgagcaatacaaggatatcgataaaaaaagatcagaacaacgcagatatataacaatacacgattcaccctatcataggtgtccttttcttcttccgctgttctatcaggattcggatacataccaaaacctgtacggggctatagcaccatcttcgtctatcccaactttacctcttcccactttgcctgatactatagattatatcattgaagatattgtgggcgagtatgctacccttctggagaccacaaatccattcaagaacatattcgcagaaactccatcaactatggagccttcaagagccagcttcagtgaagatgataatgacgaagaagcggacccttcaagcttcaaacctgtcgcttttacagaagacagaaaccacgaaagggataactatgttgttgatgtttcatatattctgttggatgtcgacccgttgctttttattttcgctaagagtttattagaacagctttactctgaaaacatggtacaagtcttagacgatattgaaattgggattgtgaaacgattaagcaaccttcaagaagggatcacttctatttcaaacattgatatccatattgcttatctaaatttaatctggcaagagacaggtgaggaaggttttgagctctatttagatcgtattgattatcaaatgagtgaaaagtctctagagaagaaccgaacaaataaattattagaagtagcagctttagcaaaggtaaaaactgtcagagtgactgttaaccagaagaaaaatccagacttgtctgaagatcgtccccctgcactgtcgctagggattgagggtttcgaagtatggtcttctacagaagatagacaagttaactcattaaacttaacgtcatcagatattaccatagacgaatctcaaatggaatggctgtttgagtactgtagtgaccagggaaatcttattcaagaggtttgcacttcttttaattctattcagaacaccagaagtaattcaaagacagaactcatttcaaagctcacagccgcaagcgaatattatcaaattagtcatgatccttacgtcataacaaaacctgcttttattatgagactttccaaagggcatgtgcgtgagaatcgtagttggaaaattattacgcgtctgagacacattttaacgtaccttcctgatgattggcaaagcaacatcgacgaagtgctaaaagaaaagaaatatacctctgctaaagatgcaaaaaatatcttcatgtctgtgttttcgacttggagaaattgggagttctcagatgttgcaaggtcgtatatatacggcaaattattcacggcagaaaatgagaaacataaacaaaatttgattaaaaaattgttgaagtgtaccatgggatcattttaccttactgtttatggtgagggatatgaggttgagcataattttgttgttgcggatgccaatctggtagtggatttgacgcctccggtgacaagcttaccttcaaatcgagaagaaactattgaaattacgggaagagtaggctcagtaaaaggaaaattcagtgataggttacttaaattgcaagatcttattccactcattgcagcagtgggcgaagatgacaaaagtgatccaaaaaaggagttatcaaagcaattcaaaatgaacaccgttttattagtggataaaagtgaactgcaactggtcatggaccaaacgaagctgatgagtagaacagttgggggtagagttagtttactatgggaaaatctaaaagattcaactagtcaagcgggttcattggttatattttcccagaaatcggaagtgtggttaaaacacacatctgtcattttgggagaagctcaactgcgcgacttttcagttttagcgactactgaggcatggtcacacaagcctacgattctgataaacaaccagtgcgcagatcttcattttagagcaatgagttcaactgagcaattagtaaccgctattactgaaattagggaaagtctgatgatgattaaagagcgcataaagtttaaacctaaatcaaagaaaaagtcccaatttgtcgaccagaaaattaatacagtcttgtcatgttatttttcaaacgttagttctgaagttatgccgctctcgccattttatattcgtcacgaagccaagcagcttgatatatattttaacaaattcggttcaaatgagattttgttaagcatatgggatactgattttttcatgacatcgcaccagacaaaggagcaatacctaaggttttcatttggcgatattgaaattaaaggaggaatttctagagaaggctattcgttgataaacgttgacatctcaatatctatgattaagttaaccttttcggagccgcgccgtattgtaaacagttttttacaagatgaaaagcttgcttctcagggtatcaatctgttatattccctgaagcctttattctttagttcaaatctaccaaaaaaagagaagcaggcaccctcgataatgataaattggacattagatactagcattacttattttggtgttcttgtgccagtggcttccacgtatttcgtgtttgaattacatatgctgctactttctctgaccaatacgaataacggtatgttaccagaagaaaccaaggtgacgggacagttttccatcgaaaacatcctatttctaataaaggagcggtcactacccattggtctttccaaattactcgacttttccataaaagtatcaaccctacaaagaacggttgatacggagcagtcattccaagtggaaagttctcatttcagggtctgcttatctcctgattctctattaagattaatgtggggcgcgcataaattgctagacttgagccattactattcaagacgccatgcccctaatatttggaacactaagatgttcaccggtaaaagtgataagtcaaaagaaatgcccataaatttccgttcaatacacatcctgtcctataaattttgtattgggtggatattccagtatggagcaggctccaatcctgggttaatgttaggttataacagattgttttcagcatatgaaaaggattttgggaaattcacagttgtggacgcttttttctctgttgcgaatggtaatacctcaagcacttttttctctgaaggaaacgagaaagacaaatataatagaagtttcttgccaaacatgcaaatatcctactggttcaaaagatgtggtgagttgaaagattggttttttagatttcatggtgaagcactggatgtaaactttgtcccgtcattcatggatgtcattgagtctactttacaatccatgcgagcatttcaagagctgaaaaagaacattctggatgtgtccgagagtttgcgtgcggaaaatgataattcttatgctagtaccagtgtcgaaagtgcttcgagtagtttggctccctttctcgataacattagatctgttaactcaaatttcaagtatgacggtggtgtatttagggtttacacgtacgaagatattgaaaccaagagtgagccatcttttgaaataaaaagtccagtagtcactataaactgtacatataaacatgatgaagataaagttaagccacataaattcagaacattaatcactgtcgacccaacgcataatactttgtatgcgggatgtgctcctttattaatggaattttctgaaagtctgcaaaagatgataaagaaacatagcaccgacgaaaaaccaaactttacaaaaccttcttcacagaatgttgattataagcgacttttggatcaatttgatgtggctgtaaaactaacatcagccaagcaacagctaagtttgagctgtgaaccaaaagctaaggttcaggcagatgttggatttgaatcgtttttgttcagtatggctaccaatgagttcgactctgaacagcctttggagttttctttaactctagaacacacaaaagcgtccattaagcacatattttcaagagaagtaagtacgtcctttgaagttggtttcatggacttgacgcttttatttacacatcctgatgtaatcagtatgtatggaacggggttggtttctgatctaagcgtcttcttcaatgtaaagcagctccagaacctgtatttattcttggacatatggaggttcagtagcattttacacacacggccagtgcaaagaactgttaataaggaaattgaaatgagttcattaacatcaaccaactatgccgatgcaggtacggaaataccctggtgctttacattaatttttacaaatgttagcggagacgttgatttgggtccttctctcggtatgatttcattaaggacacaaagaacatggctggccacagatcattataacgagaagcggcagttactgcatgctttcactgacggtattagcttgacatcagaaggtagactgagtggtttatttgaagttgcgaatgcaagttggttatcagaagtaaaatggccacctgaaaaaagcaaaaatactcatccattagtttccacctccctgaatattgatgatatagcggtaaaggctgcttttgattatcatatgttcttaatcggcactataagtaacatacacttccatcttcataatgaaaaggatgccaagggggttctacctgatttgctgcaggtctctttttcatcagatgaaattatcctcagctctactgcattagttgtagcaaatatactggatatctacaacaccattgtacgtatgaggcaggataataaaatatcgtatatggagacgttgagagattccaatcctggtgaatctaggcaaccaatattatacaaagacattttaagatcgctgaaattactcagaactgatctctcggtgaatatctcctcttcaaaggtccagatttcgccaatatctttattcgatgtggaagtgttagtaataagaattgacaaagtctctatacgttccgaaacacattcggggaaaaaattaaagacagatttgcaactacaagttttagatgtttctgcagcgctttctacttccaaagaagaattagatgaggaagttggagcttccattgctattgatgattacatgcattatgcttccaagattgtcggtggtactatcattgatattccaaaacttgctgttcatatgacaactttacaagaagaaaagacaaataatttagaatatctatttgcttgctctttttcagacaaaatatctgtaaggtggaatctagggcctgtagacttcataaaggaaatgtggactacacatgtcaaagcactggcagttcgtcgatcccaggtagcaaatatttcctttggacaaactgaggaagaacttgaagaatcaattaaaaaggaagaagccgcttcaaagtttaattatattgcactagaagaaccgcagatcgaagtgcctcagataagagatctgggagacgccactccacctatggaatggtttggtgtcaatagaaaaaaatttccgaaattcactcaccaaaccgcagttatccccgtccaaaagcttgtttatcttgcagaaaagcagtatgtcaagatactagatgatacgcattaa

SEQ ID NO: 7360 - DNA, 8877 bp, Artificial Sequence
  Description of Artificial Sequence: Synthetic polynucleotide
atggaagctatttctcaattacgtggtgttccattgacacaccaaaaggactttagctgggtctttttagtagattggattctcacggtagtagtatgtttgacaatgatattctacatgggaagaatctatgcataccttgtaagttttatattagaatggttgttatggaaaagagcgaaaatcaagataaatgttgagacacttcgtgtctccttattgggtggtagaatacattttaaaaacctttccgtaatacacaaagattatacaattagtgtattagagggtagtttaacatggaaatactggcttttaaattgcagaaaagcagaattgatagagaataacaagtcttcttctggcaaaaaagcaaagcttccctgtaaaatttccgtagaatgtgaaggtttggaaatttttatttacaacagaacagtggcgtacgataatgttataaacttattatccaaagatgaacgcgataaatttgaaaaataccttaatgagcattcttttcctgaaccttttagcgatggaagtagtgctgataaattagatgaagatttgagcgaatctgcatacacaacgaactctgatgcatctattgttaatgacagggactaccaagaaacagatatcggcaaacatccaaagttattgatgtttttaccaattgagcttaaatttagccgcggttccttattattaggaaacaaattcacgccatctgttatgattttaagttatgaaagtggaaaaggcataatagatgttttacctccaaaagagagattagatttatacagaaataaaacacagatggaattcaaaaacttcgaaatttctatcaaacaaaatattggttacgatgatgctattggattgaagtttaaaatagatagagggaaagtgagcaagttatggaaaacgtttgtaagagtctttcagatagtaaccaagcctgttgtaccgaaaaagactaaaaaaagcgcaggcacatctgatgacaatttctatcataaatggaaaggtttatctctttataaggcttctgcgggcgacgctaaagcaagtgatttagatgatgttgagttcgatttgacgaaccatgaatatgctaaatttacatccattttaaaatgcccaaaggtcacaattgcatatgacgtggatgttccgggcgttgtgccacatggtgcacatccgacaatacctgatattgatggaccagatgtgggcaataacggagcacctccagattttgctttagatgttcaaattcacggaggatccatctgttacggaccttgggctcaaagacaagtcagtcatttacaaagagttttatctccggtagtttccaggacagccaaacctataaaaaaactcccgccaggttctagaagaatatatacacttttcaggatgaatatatccataatggaagatactacttggcgtataccgacgagggaaagtagcaaagaccccgaatttttgaaacactacaaagaaactaatgaagaatataggccatttggatggatggatctcaggttttgtaaggacacctatgcaaatttcaatataagtgtttgtcctacagtgcaaggttttcagaataatttccatgttcatttcttggaaaccgaaattaggtctagtgttaatcacgatattttgttaaaaagcaaggtattcgatattgatggggatattggatatccattgggttggaatagcaaagctatatggataattaacatgaagtctgaacaattagaggcgtttttattacgtgagcatataactttagttgcagatacgctttctgacttttccgctggtgatcctacgccttacgaactttttagaccattcgtatacaaagtcaattgggaaatggaaggatattccatttacttaaacgtcaatgatcacaatattgttaacaatccgttagattttaacgaaaactgttatttatcccttcatggtgataagctttctattgatgtcacggtaccccgtgagagtattttggggacatacacagatatgtcctacgagatctctactccaatgttcagaatgatgttaaatacccccccttggaatacattgaacgaattcatgaaacataaagaagtggggagagcatacgactttacaattaaaggttcttaccttctctattccgagttagatattgataatgtcgatacgttagtcatagagtgtaacagcaagagtacagtacttcactgctatgggtttgtcatgaggtatttaacaaacgtaaagatgaattacttcggtgaattttttaattttgtgacgagtgaagagtacacaggtgtccttggcgctagggaagtcggagatgtcactacgaaaagctctgtggcagatttggcatctactgtagattctgggtaccaaaatagcagtttgaagaacgaatctgaggataaaggtcctatgaaaaggtctgatttgaaaaggactaccaacgaaactgatatttggttcacattttctgtttgggatggtgctttaatattaccagaaacgatttacagttttgatccatgcattgcattgcattttgccgaacttgtagtggatttcagaagttgtaattattatatggacataatggcggttctcaacgggacttccataaagagacacgtttccaaacaaataaatgaagtatttgattttatacgtcgtaataacggagctgatgagcaagagcacggattgctttctgacctcaccattcatggacatagaatgtatggattaccacccacagaacctacctacttttgtcaatgggatatcaatctcggagatttatgcattgattctgatattgaatttataaagggattctttaattccttttataagataggttttggctacaatgacttggaaaatatattattatatgacactgagaccattaatgatatgacctctttaaccgtgcacgttgaaaaaataagaataggccttaaagatccggtgatgaaatctcaatctgttattagtgctgaaagtatattgtttactttgatcgactttgaaaacgaaaaatattctcaaagaatagacgtgaaaattccaaaattgacaatttctttaaattgcgtgatgggcgatggcgtagacacatcttttctcaaattcgaaacaaaattaagatttacaaactttgagcaatacaaggatatcgataaaaaaagaagtgaacaacgcagatatataacaatacacgattctccctatcataggtgtccttttcttcttccgcttttctatcaggattctgatacataccaaaacctttacggggctatagcaccatcttcttctatcccaactttacctcttcccactttgcctgatactatagattatatcattgaagatattgtgggcgagtatgctacccttttggagaccacaaatccattcaagaacatattcgcagaaactccatctactatggagccttccagagccagcttcagtgaagatgataatgacgaagaagcggacccttccagcttcaaacctgtcgcttttacagaagacagaaaccacgaaagggataactatgttgttgatgtttcttatattttattggatgtcgacccgttgctttttattttcgctaagagtttattagaacagctttactctgaaaacatggtacaagtcttagacgatattgaaattgggattgtgaaaagattaagcaaccttcaagaagggatcacttctatttccaacattgatatccatattgcttatttgaatttaatctggcaagagacaggtgaggaaggttttgagctctatttagatcgtattgattatcaaatgagtgaaaagtctttggagaagaacagaacaaataaattattagaagtagcagctttagcaaaggtaaaaactgtcagagtgactgttaaccagaagaaaaatccagacttgtctgaagatcgtccccctgcattaagtttagggattgagggtttcgaagtatggtcttctacagaagatagacaagttaactctttaaacttaacgtcttctgatattaccatagacgaatctcaaatggaatggttatttgagtactgtagtgaccagggaaatcttattcaagaggtttgcacttcttttaattctattcagaacaccagaagtaattctaagacagaactcatttccaagctcacagccgcaagcgaatattatcaaattagtcatgatccttacgtcataacaaaacctgcttttattatgagactttccaaagggcatgtgcgtgagaatcgtagttggaaaattattacgcgtttaagacacattttaacgtaccttcctgatgattggcaaagcaacatcgacgaagtgttgaaagaaaagaaatatacctctgctaaagatgcaaaaaatatcttcatgtctgtgttttccacttggagaaattgggagttcagtgatgttgcaaggagttatatatacggcaaattattcacggcagaaaatgagaaacataaacaaaatttgattaaaaaattgttgaagtgtaccatgggaagtttttaccttactgtttatggtgagggatatgaggttgagcataattttgttgttgcggatgccaatttggtagtggatttgacgcctccggtgacaagcttaccttccaatagagaagaaactattgaaattacgggaagagtaggctctgtaaaaggaaaattcagtgataggttacttaaattgcaagatcttattccactcattgcagcagtgggcgaagatgacaaaagtgatccaaaaaaggagttatccaagcaattcaaaatgaacaccgttttattagtggataaaagtgaattacaattggtcatggaccaaacgaagttgatgagtagaacagttgggggtagagttagtttattatgggaaaatttgaaagattctactagtcaagcgggttctttggttatattttcccagaaaagtgaagtgtggttaaaacacacatctgtcattttgggagaagctcaattgcgcgacttttctgttttagcgactactgaggcatggtctcacaagcctacgattttaataaacaaccagtgcgcagatcttcattttagagcaatgagttctactgagcaattagtaaccgctattactgaaattagggaaagtttaatgatgattaaagagcgcataaagtttaaacctaaatccaagaaaaagtcccaatttgtcgaccagaaaattaatacagtcttgagttgttatttttccaacgttagttctgaagttatgccgctctctccattttatattcgtcacgaagccaagcagcttgatatatattttaacaaattcggtagtaatgagattttgttaagcatatgggatactgattttttcatgacaagtcaccagacaaaggagcaatacttgaggttttcttttggcgatattgaaattaaaggaggaatttctagagaaggctattctttgataaacgttgacatctccatatctatgattaagttaaccttttctgagccgcgccgtattgtaaacagttttttacaagatgaaaagcttgcttctcagggtatcaatttattatattccttgaagcctttattctttagtagtaatttaccaaaaaaagagaagcaggcaccctccataatgataaattggacattagatactagcattacttattttggtgttcttgtgccagtggcttccacgtatttcgtgtttgaattacatatgttattactttctttaaccaatacgaataacggtatgttaccagaagaaaccaaggtgacgggacagttttccatcgaaaacatcttatttttaataaaggagagatccttgcccattggtctttccaaattactcgacttttccataaaagtatctaccttacaaagaacggttgatacggagcagtctttccaagtggaaagttctcatttcagggtctgcttatctcctgattctttattaagattaatgtggggcgcgcataaattgttggacttgagccattactattctagacgccatgcccctaatatttggaacactaagatgttcaccggtaaaagtgataagagtaaagaaatgcccataaatttccgttctatacacatcttgtcctataaattttgtattgggtggatattccagtatggagcaggctccaatcctgggttaatgttaggttataacagattgttttctgcatatgaaaaggattttgggaaattcacagttgtggacgcttttttctctgttgcgaatggtaataccagtagcacttttttctctgaaggaaacgagaaagacaaatataatagaagtttcttgccaaacatgcaaatatcctactggttcaaaagatgtggtgagttgaaagattggttttttagatttcatggtgaagcattggatgtaaactttgtcccgtccttcatggatgtcattgagtctactttacaatccatgagagcatttcaagagttgaaaaagaacattttagatgtgtccgagagtttgcgtgcggaaaatgataattcttatgctagtaccagtgtcgaaagtgcttccagtagtttggctccctttctcgataacattagatctgttaacagtaatttcaagtatgacggtggtgtatttagggtttacacgtacgaagatattgaaaccaagagtgagccatcttttgaaataaaaagtccagtagtcactataaactgtacatataaacatgatgaagataaagttaagccacataaattcagaacattaatcactgtcgacccaacgcataatactttgtatgcgggatgtgctcctttattaatggaattttctgaaagtttacaaaagatgataaagaaacatagcaccgacgaaaaaccaaactttacaaaaccttcttctcagaatgttgattataagagacttttggatcaatttgatgtggctgtaaaattaacatctgccaagcaacagttgagtttgagctgtgaaccaaaagctaaggttcaggcagatgttggatttgaaagttttttgttcagtatggctaccaatgagttcgactctgaacagcctttggagttttctttaactttggaacacacaaaagcgtccattaagcacatattttccagagaagtaagtacgtcctttgaagttggtttcatggacttgacgcttttatttacacatcctgatgtaatcagtatgtatggaacggggttggtttctgatttgagcgtcttcttcaatgtaaagcagctccagaacttatatttattcttggacatatggaggttcagtagcattttacacacaagaccagtgcaaagaactgttaataaggaaattgaaatgagttctttaacatctaccaactatgccgatgcaggtacggaaataccctggtgctttacattaatttttacaaatgttagcggagacgttgatttgggtccttctctcggtatgatttctttaaggacacaaagaacatggttggccacagatcattataacgagaagagacagttattacatgctttcactgacggtattagcttgacaagtgaaggtagattaagtggtttatttgaagttgcgaatgcaagttggttatctgaagtaaaatggccacctgaaaaaagcaaaaatactcatccattagtttccacctccttgaatattgatgatatagcggtaaaggctgcttttgattatcatatgttcttaatcggcactataagtaacatacacttccatcttcataatgaaaaggatgccaagggggttttacctgatttgttacaggtctctttttcttctgatgaaattatcctcagctctactgcattagttgtagcaaatatattggatatctacaacaccattgtacgtatgaggcaggataataaaatatcttatatggagacgttgagagattccaatcctggtgaatctaggcaaccaatattatacaaagacattttaagatctttgaaattactcagaactgatctctctgtgaatatctcctcttccaaggtccagatttctccaatatctttattcgatgtggaagtgttagtaataagaattgacaaagtctctatacgttccgaaacacattctgggaaaaaattaaagacagatttgcaattacaagttttagatgtttctgcagcgctttctacttccaaagaagaattagatgaggaagttggagcttccattgctattgatgattacatgcattatgcttccaagattgtcggtggtactatcattgatattccaaaacttgctgttcatatgacaactttacaagaagaaaagacaaataatttagaatatttatttgcttgctctttttctgacaaaatatctgtaaggtggaatttggggcctgtagacttcataaaggaaatgtggactacacatgtcaaagcattggcagttcgtcgttcccaggtagcaaatatttcctttggacaaactgaggaagaacttgaagaaagtattaaaaaggaagaagccgcttccaagtttaattatattgcattggaagaaccgcagatcgaagtgcctcagataagagatttgggagacgccactccacctatggaatggtttggtgtcaatagaaaaaaatttccgaaattcactcaccaaaccgcagttatccccgtccaaaagcttgtttatcttgcagaaaagcagtatgtcaagatattggatgatacgcattga

SEQ ID NO: 7361 - DNA, 1845 bp, Saccharomyces cerevisiae
atggccttattggagaagttgcatcgaaggattgttgatatggggcttgtcccgcgtataatcgccttattaccagttatttccatgctatgcgctctatttgggtttatttctatagctattctgcctatggatggacagtacagaagaacatacatttctgagaatgcattgatgccttcacaagcgtatagttactttagagaatctgaatggaacattttgaggggctatcgatctcaaattaaagaaatggtaaacatgacttctatggaaagaaacaatttgatgggttcttggttacaagaatttggtactaagactgctatttacgaaaatgaacaatatggagaaacattgtacggtgtaatgcacgctcctaggggtgatggaacagaagcgatggtgcttgccgttccatggtttaattcagatgatgaattcaatattggcggcgcagctttgggtgtatctttagcaagatttttctcacgttggccagtatggtccaagaatataattgttgtcttcagcgaaaatcctcgtgcagcattaagatcatgggttgaggcataccatacttccttagatttgactggtggttccattgaagctgctgttgtgttggattattcgagtacggaagatttcttcgagtatgtagaaatctcatacgacggtctgaatggtgagctgcccaatttggatcttgtcaacatcgctatatccattacggaacatgaaggtatgaaagtttctttgcacggtctacccagtgatcagttaactaataataatttctggtcaagattaaaaatattatgcctgggaataagggattgggcgttgtccggtgttaaaaagccccatggtaacgaggcatttagcggctggaggattcaatctgtaacattgaaagcacatggaaacagtggtcatgatattactacatttggacgtatacccgaagcaatgtttcgctctattaataaccttttggaaaaatttcaccaatcgttcttcttttatttgttattagcaccacgtcagttcgtatccattagtagttatttgccaagcgctgtggctttatctatagcattcgccataagttcattaaatgcatttataaacaatgcttatgcaaatatatccttattttccgagtataatttggtagcgttgttggtttggttcgtgtcattggtgatatcatttgttgtttcacaagcgtttcttctaataccttcatcgggattattgatgacaattagcatggcatcttgttttttacctttgatactttccagaaaaattcacatctcagaaccactatcatacaggttgaaaaatgttgcttttttatatttcagtttggtttcaacatctttgctaatgataaactttgcaatggctttactgatcggcacattggcatttcctatgacatttgtgaagaccattgttgaaagttctagcgaacatgaggtgacaactcaatcctctaacccaataaaaactgagccgaaagatgagatagagctcgtcgagaatcacatggatacaacgccagcaaccccccaacaacagaaacaaaaactaaaaaatttagtactattaattttgacaaatccatttatttcaataaccttattcggactattttttgatgatgaatttcatggatttgatataataaacaaactggtttcagcatggttggatttgaaatgttggagttggtttgtactttgtataggttggcttccatgttggctattgatattagcgtcatcgtttgaatctaaatctgtcgtagtaaggtcgaaagaaaagcaaagttag

SEQ ID NO: 7362 - DNA, 1845 bp, Artificial Sequence
  Description of Artificial Sequence: Synthetic polynucleotide
atggccttattggagaagttgcatagaaggattgttgatatggggcttgtcccgcgtataatcgccttattaccagttatttccatgttgtgcgctttgtttgggtttatttctatagctattttacctatggatggacagtacagaagaacatacatttctgagaatgcattgatgccttctcaagcgtatagttactttagagaatctgaatggaacattttgaggggctatagatctcaaattaaagaaatggtaaacatgacttctatggaaagaaacaatttgatgggttcttggttacaagaatttggtactaagactgctatttacgaaaatgaacaatatggagaaacattgtacggtgtaatgcacgctcctaggggtgatggaacagaagcgatggtgcttgccgttccatggtttaattctgatgatgaattcaatattggcggcgcagctttgggtgtatctttagcaagatttttctctcgttggccagtatggtccaagaatataattgttgtcttcagcgaaaatcctcgtgcagcattaagaagttgggttgaggcataccatacttccttagatttgactggtggttccattgaagctgctgttgtgttggattattctagtacggaagatttcttcgagtatgtagaaatctcctacgacggtttgaatggtgagttgcccaatttggatcttgtcaacatcgctatatccattacggaacatgaaggtatgaaagtttctttgcacggtttgcccagtgatcagttaactaataataatttctggtccagattaaaaatattatgcttaggaataagggattgggcgttgtccggtgttaaaaagccccatggtaacgaggcatttagcggctggaggattcaatctgtaacattgaaagcacatggaaacagtggtcatgatattactacatttggacgtatacccgaagcaatgtttcgctctattaataaccttttggaaaaatttcaccaaagtttcttcttttatttgttattagcaccacgtcagttcgtatccattagtagttatttgccaagcgctgtggctttatctatagcattcgccataagttctttaaatgcatttataaacaatgcttatgcaaatatatccttattttccgagtataatttggtagcgttgttggtttggttcgtgtctttggtgatatcctttgttgtttctcaagcgtttcttttgataccttcttctggattattgatgacaattagcatggcatcttgttttttacctttgatactttccagaaaaattcacatcagtgaaccattatcttacaggttgaaaaatgttgcttttttatatttcagtttggtttctacatctttgttgatgataaactttgcaatggctttattgatcggcacattggcatttcctatgacatttgtgaagaccattgttgaaagttctagcgaacatgaggtgacaactcaatcctctaacccaataaaaactgagccgaaagatgagatagagctcgtcgagaatcacatggatacaacgccagcaaccccccaacaacagaaacaaaaattgaaaaatttagtattgttaattttgacaaatccatttatttctataaccttattcggattattttttgatgatgaatttcatggatttgatataataaacaaattggtttctgcatggttggatttgaaatgttggagttggtttgtactttgtataggttggcttccatgttggttattgatattagcgtcttcttttgaatctaaatctgtcgtagtaaggtccaaagaaaagcaaagttga

SEQ ID NO: 7363 - DNA, 1779 bp, Saccharomyces cerevisiae
atgttatcactgtctgccaaaaatcacttcacagtgagtaattctataactcacgttattaagtcatatcatataaggactctcacttcaagcgcagaaaaaatgccacatatcactactcctttttctacctcagccagtagtacaaagttaaaagctttcaggaaagttagacccgtcctacagagacatagctcttcctggattgttgctcaaaatcatagacgttcattatctggtcaatcttcgctaaacgacctgcgtcatttgaatcgctttccacaccacacgttgaaaacttcgaataacgagttttatcccgccgaacaattgactttggaagacgtaaatgaaaatgtcttgaaggctaagtacgccgttagaggtgccatcccaatgagagctgaagaattgaaagctcaactggagaaggatcctcaatctctgccatttgacaggattatcaacgccaatattggtaatcctcagcaactacaacagaaacctctgacttactacagacaggtcttgtctctcttacaatacccagaactattaaaccaaaacgaacagcagctagttgattcgaaattgtttaaactagatgccattaaacgtgcaaagagtttaatggaagatatcggtggttctgttggtgcttactcttcttctcaaggtgtagaaggtataaggaaaagtgtcgctgaatttataacgaagagggacgaaggcgagatatcatacccagaggatattttcctaactgctggtgcatccgcagctgtcaattacttgttatcaattttctgtagagggccagaaacgggtgtcttgattccaattcctcaatatccattatataccgctactctagctttgaacaattctcaagctttaccatactatttagatgagaattcaggttggtcaactaatccagaagaaattgaaactgtcgtcaaagaggctatacagaacgaaatcaaacctacagttctagtggttatcaatccaggtaatcctacaggagctgtcctatcacctgagtctatagctcagatttttgaagtcgcagccaagtacggtacagtagtgatagctgacgaagtttatcaagaaaatatcttcccgggcaccaagttccattctatgaagaaaattttgagacatttacagagggaacatccaggtaaattcgataatgttcagctagcttctttgcattcgacttctaagggtgtttctggtgaatgtggtcaaaggggtggctacatggaactcactggattcagccatgagatgagacaagttatcttgaaactagcctcgatttcattgtgtcccgttgtcacaggtcaagctttggttgatttgatggttcgtccaccagtggaaggggaggaatcattcgagtcggaccaagcagaacgtaactccatccatgaaaagttaattacaagagcaatgacactgtatgagacatttaactctttagaaggcattgaatgtcaaaagcctcaaggtgccatgtatttattccctaagatagacttacctttcaaggcagttcaagaagctcgccacttagagttaactccggatgaattttattgtaagaagttgttagaatctactggcatttgcactgttcccggttctgggtttggtcaagaacctggtacttaccatttaagaacaacatttttggcacctggtctggaatggattaagaaatgggaaagtttccataaagaattttttgaccaataccgtgactga

SEQ ID NO: 7364 - DNA, 1779 bp, Artificial Sequence
  Description of Artificial Sequence: Synthetic polynucleotide
atgttatctttatctgccaaaaatcacttcacagtgagtaattctataactcacgttattaagagttatcatataaggactctcacttccagcgcagaaaaaatgccacatatcactactcctttttctacctctgccagtagtacaaagttaaaagctttcaggaaagttagacccgtcttacagagacatagctcttcctggattgttgctcaaaatcatagacgttccttatctggtcaatcttctttgaacgacttgcgtcatttgaatcgctttccacaccacacgttgaaaacttccaataacgagttttatcccgccgaacaattgactttggaagacgtaaatgaaaatgtcttgaaggctaagtacgccgttagaggtgccatcccaatgagagctgaagaattgaaagctcaattggagaaggatcctcaatctttaccatttgacaggattatcaacgccaatattggtaatcctcagcaattacaacagaaacctttaacttactacagacaggtcttgtctctcttacaatacccagaattattaaaccaaaacgaacagcagttggttgattctaaattgtttaaattggatgccattaaacgtgcaaagagtttaatggaagatatcggtggttctgttggtgcttactcttcttctcaaggtgtagaaggtataaggaaaagtgtcgctgaatttataacgaagagggacgaaggcgagatatcttacccagaggatattttcttgactgctggtgcatccgcagctgtcaattacttgttatccattttctgtagagggccagaaacgggtgtcttgattccaattcctcaatatccattatataccgctactttggctttgaacaattctcaagctttaccatactatttagatgagaattctggttggtctactaatccagaagaaattgaaactgtcgtcaaagaggctatacagaacgaaatcaaacctacagttttggtggttatcaatccaggtaatcctacaggagctgtcctttctcctgagtctatagctcagatttttgaagtcgcagccaagtacggtacagtagtgatagctgacgaagtttatcaagaaaatatcttcccgggcaccaagttccattctatgaagaaaattttgagacatttacagagggaacatccaggtaaattcgataatgttcagttagcttctttgcattctacttctaagggtgtttctggtgaatgtggtcaaaggggtggctacatggaactcactggattcagccatgagatgagacaagttatcttgaaattggcctctatttctttgtgtcccgttgtcacaggtcaagctttggttgatttgatggttcgtccaccagtggaaggggaggaatctttcgagagtgaccaagcagaacgtaactccatccatgaaaagttaattacaagagcaatgacattatatgagacatttaactctttagaaggcattgaatgtcaaaagcctcaaggtgccatgtatttattccctaagatagacttacctttcaaggcagttcaagaagctcgccacttagagttaactccggatgaattttattgtaagaagttgttagaatctactggcatttgcactgttcccggttctgggtttggtcaagaacctggtacttaccatttaagaacaacatttttggcacctggtttggaatggattaagaaatgggaaagtttccataaagaattttttgaccaataccgtgactga

SEQ ID NO: 7365 - DNA, 1380 bp, Saccharomyces cerevisiae
atgagtggcagtgatagaggagaccggttatacgatgtgttgggggtgacgagagatgcgaccgtgcaagagattaaaactgcttacagaaagcttgccctgaaacatcatccggacaagtatgtggatcaagactcaaaggaggtaaatgaaatcaaattcaaagagatcactgccgcttacgagatcttgagcgatccggagaagaaatcacattacgacttgtatggtgatgataatggtgccgctagcagcggtggcgctaatggctttggagatgaagattttatgaacttctttaacaatttcttcaataatggaagtcacgatggaaataatttccctggcgagtatgatgcgtacgaagagggcaactctacaagctctaaggatatcgatatcgatatatctcttactttgaaggatttgtacatgggcaagaagctgaagtttgatttaaagagacaggtcatctgtataaagtgccacggttctggctggaaaccaaagaggaaaattcacgttacacacgatgtggaatgtgaatcatgcgctggaaagggttcaaaggaacgtctgaagaggtttggtcccggtttggtagcttcgcaatgggtggtctgtgagaaatgtaatggtaaggggaagtacactaaaagacccaagaatccaaagaacttttgccccgattgcgcaggcttggggctcctgtcaaagaaggaaatcatcacagtgaacgtggctccgggacaccactttaacgacgtaattacagtcaaggggatggcggacgaggaaatcgataagaccacatgtggtgatttaaagttccatctcactgaaaaacaagaaaacttggagcagaagcaaatctttttgaagaactttgacgacggcgccggggaagatttgtatacaagcattaccatatcgttaagcgaggccttgacgggatttgagaaatttttgacaaaaaccttcgacgacaggttactaacattgagcgttaaacctggcagagtagtaagacctggtgacaccatcaaaatcgccaatgaaggttggcccattttagataaccctcatggccggtgcggcgatctgtatgttttcgttcatattgaatttccaccagataactggttcaatgaaaaatcagaactactagcaataaaaacgaatctgccgtcatcttcatcttgtgcctcacatgcgactgtaaatactgaagatgacagcaacctgactaacaacgaaactatatcaaatttccggatcattcacacggacgatcttccagaagggataaggccgttcaagccagaagcacaggattcagcgcatcagaaagcaagaagttcgtactgctgtatccaatga

SEQ ID NO: 7366 - DNA, 1380 bp, Artificial Sequence
  Description of Artificial Sequence: Synthetic polynucleotide
atgagtggcagtgatagaggagacagattatacgatgtgttgggggtgacgagagatgcgaccgtgcaagagattaaaactgcttacagaaagcttgccttgaaacatcatccggacaagtatgtggatcaagactccaaggaggtaaatgaaatcaaattcaaagagatcactgccgcttacgagatcttgagcgatccggagaagaaatctcattacgacttgtatggtgatgataatggtgccgctagcagcggtggcgctaatggctttggagatgaagattttatgaacttctttaacaatttcttcaataatggaagtcacgatggaaataatttccctggcgagtatgatgcgtacgaagagggcaactctacaagctctaaggatatcgatatcgatatatctcttactttgaaggatttgtacatgggcaagaagttgaagtttgatttaaagagacaggtcatctgtataaagtgccacggttctggctggaaaccaaagaggaaaattcacgttacacacgatgtggaatgtgaaagttgcgctggaaagggttccaaggaacgtttgaagaggtttggtcccggtttggtagcttctcaatgggtggtctgtgagaaatgtaatggtaaggggaagtacactaaaagacccaagaatccaaagaacttttgccccgattgcgcaggcttggggctcttgtccaagaaggaaatcatcacagtgaacgtggctccgggacaccactttaacgacgtaattacagtcaaggggatggcggacgaggaaatcgataagaccacatgtggtgatttaaagttccatctcactgaaaaacaagaaaacttggagcagaagcaaatctttttgaagaactttgacgacggcgccggggaagatttgtatacaagcattaccatatctttaagcgaggccttgacgggatttgagaaatttttgacaaaaaccttcgacgacaggttattaacattgagcgttaaacctggcagagtagtaagacctggtgacaccatcaaaatcgccaatgaaggttggcccattttagataaccctcatggccgttgcggcgatttatatgttttcgttcatattgaatttccaccagataactggttcaatgaaaaaagtgaattattggcaataaaaacgaatttaccgtcttcttcttcttgtgcctctcatgcgactgtaaatactgaagatgacagcaacttgactaacaacgaaactatatccaatttcagaatcattcacacggacgatcttccagaagggataaggccgttcaagccagaagcacaggattctgcgcatcagaaagcaagaagtagttactgctgtatccaatga

SEQ ID NO: 7367 - DNA, 882 bp, Saccharomyces cerevisiae
atggcgtcccaggttaacgccttattactgccggtcatagagtctacgccgcttcatcaaataaccaaggtagcattgacgaccacactcacaagtaaacaaagcgattacaagttcaaagaaatagccgtgccgttaacaaaatcactacaactgtacgagaaggcgcaaagaagacaagatttaagggcaagcttaaaagcactggagagtatcatttaccaaacgcacttccaatggaataacccgctcccacgacatgcgcatctcttccaaaaacactaccactttctactgactcactggccatttgagaaccacagagacttggtagattccatcgctgtaaacaatgggaaactaaattcaacgtcttcaaggagcgtctggctgaaggcggattggataacactgtttaacgttaaaaacccttgggtccaaacgccgccatcgttaatgcgtctgagtgggacagatcttgataccttcacaccagagaggatattcctgataaattctcttggaaaccactacaaatttttaatagcgaacagtcatctaagctacaatcacaaaaaatacccctcccctggcgtgcaaattcctgtcaggaacgctcttggcgaagtttctccggccaaacaaattgcccaacttttcgcaagacagctgtctcatatttacaagagcctcttcatagaaaaccccccgctctctcctgagaacgagctggcattgactgccgtcttctatgacgagactgtagagcgacgccttagaaggctctatatgcgagcttgtgcaagggcatatacgactactaatgccgactccaccacggagcctttgatgtttcattgcacccggtgggaagttgattag

SEQ ID NO: 7368 - DNA, 882 bp, Artificial Sequence
  Description of Artificial Sequence: Synthetic polynucleotide
atggcgtcccaggttaacgccttattattaccggtcatagagtctacgccgcttcatcaaataaccaaggtagcattgacgaccacactcacaagtaaacaaagcgattacaagttcaaagaaatagccgtgccgttaacaaaatctttacaattgtacgagaaggcgcaaagaagacaagatttaagggcaagcttaaaagcattagagagtatcatttaccaaacgcacttccaatggaataacccgctcccaagacatgcgcatctcttccaaaaacactaccactttttattaactcactggccatttgagaaccacagagacttggtagattccatcgctgtaaacaatgggaaattgaattctacgtcttccaggagcgtctggttaaaggcggattggataacattatttaacgttaaaaacccttgggtccaaacgccgccatctttaatgcgtttgagtgggacagatcttgataccttcacaccagagaggatattcttgataaattctcttggaaaccactacaaatttttaatagcgaacagtcatttgagctacaatcacaaaaaatacccctcccctggcgtgcaaattcctgtcaggaacgctcttggcgaagtttctccggccaaacaaattgcccaacttttcgcaagacagctttctcatatttacaagagcctcttcatagaaaaccccccgctctctcctgagaacgagttggcattgactgccgtcttctatgacgagactgtagagcgccgccttagaaggctctatatgagagcttgtgcaagggcatatacgactactaatgccgactccaccacggagcctttgatgtttcattgcaccagatgggaagttgattga

SEQ ID NO: 7369 - DNA, 2682 bp, Saccharomyces cerevisiae
atgtccagggaaggttatccaaactttgaagaggtagaaattcctgactttcaggaaactaacaacaccgttccagatcttgatgatttagaattagagtatgaccaatataaaaataatgaaaataatgacacgtttaatgataaggacttagagagcaattctgtagcaaagcacaacgcagtgaacagctcaaagggcgtaaaaggctcgaagattgactactttaatccttcagatgtctcgttgtatgacaattccgtttcccaatttgaagaaacaacggtatcgctaaaagagtactatgaccacagtatacgatctcatctcacggtgaaaggagcatgtagttatcttaagagtgtttttcccatcatcaactggctaccacattacaattttagctggtttactgcggatcttattgcaggaattaccattggctgtgttctcgtgccgcaatccatgtcatatgcacaagtcgccacgctaccagcgcagtatgggttgtactcctcgtttattggtgcttactcctactcttttttcgctacatcaaaagatgtttgtattgggcccgtggctgtcatgtctttgcagaccgccaaagtcattgcggatgtcacggcaaaatatcctgatggagattctgccataactggtcccgttattgcaacgactctagcgttactatgtggtatcatttcggcagcagttggcttcttgcgtctagggtttcttgtcgaactgatttccttaaatgcagtcgctggatttatgactggatccgcgtttaatatcttatggggtcaagttccagcactaatgggttacaatagtttggttaacacgagagctgccacctataaagtggtcatagagaccttgaaacatttaccagataccaaactggacgcagtttttgggctaatcccgcttttccttctttatgtttggaaatggtggtgcggaacatatggaccaaggttgaacgatagatacaactccaaaaacccaaggttacacaaaattatcaaatggacatatttttacgctcaggcttccagaaatggtatcattattattgtattcacttgtattggttgggcaatcacaagaggcaaatctaaatcggagaggcccatcagcatcctaggctcagttccatccggtttgaaagaagtcggggttttccatgttccaccaggattaatgtctaagcttggtccaaatttgcctgcatccattattgtgttattgttggagcatatcgctatttcgaagtcttttggtagaatcaacgactataaagtcgtccccgaccaagaattgattgctattggtgtctcgaaccttttaggtactttcttcaatgcttacccagcgactggttccttttcaaggtctgctttgaaggctaaatgtaatgtccgtacgccgttatctggtttgttttcgggttcatgtgttcttttagcattatattgtttgaccggcgcattcttttacattccaaaggctaccttatctgcagttatcattcacgctgtatctgatcttttggcctcttatcaaactacctggaatttctggaagatgaatccattggacttcatctgtttcattgtcaccgtcctaataacggtatttgcctctattgaagatggtatttattttgccatgtgctggtcatgtgcaatgctcattttaaaagtggctttcccagcgggaaaattcttgggtcgtgtggaagtcgctgaagttactgatgcttacgtcagaccggactccgatgtggttagctacgtgtctgaaaataacaatggtatttccactttagaagatggtggtgaggatgacaaggaaagttccaccaaatacgtcacaaattcctccaagaaaatagaaacaaacgttcaaacaaagggctttgattctccatcttcttcgattagccagccaaggataaaataccatactaaatggataccgtttgatcataaatacacaagagaattgaacccggacgttcagattctccccccaccagacggtgttcttgtttataggctatcagagagctacacctatctcaactgttccagacactacaacatcataaccgaagaagttaaaaaagttaccagacgtggtcaattaattcgccacagaaaaaaatctgaccgtccatggaatgatcctggtccatgggaagcacctgctttcttaaagaatttgaaattctggaagaaaagggagaacgaccctgaatccatggaaaacgcgcccagcacctcagtcgatgttgaaagagatgacaggccattgctgaaaatactatgcttagacttctcacaagtggcacagacagacgctacggctcttcaatcattggttgatttgagaaaggccataaatcaatatgcagataggcaagttgaattccactttgtgggtatcatttcaccatgggtgaagagaggtttaattagcagaggatttggtactctgaacgaagaatacagtgatgaatccattgttgccggtcatacaagttatcacgtcgccagagtacctcaaggcgaagaaaatcctgaaaaatatagcgtttataccgcttcaggaacaaatctacctttcttccatatcgatatcccagattttgctaaatgggatatctag

SEQ ID NO: 7370 - DNA, 2682 bp, Artificial Sequence
  Description of Artificial Sequence: Synthetic polynucleotide
atgtccagggaaggttatccaaactttgaagaggtagaaattcctgactttcaggaaactaacaacaccgttccagatcttgatgatttagaattagagtatgaccaatataaaaataatgaaaataatgacacgtttaatgataaggacttagagagcaattctgtagcaaagcacaacgcagtgaacagctctaagggcgtaaaaggctccaagattgactactttaatccttctgatgtctctttgtatgacaattccgtttcccaatttgaagaaacaacggtatctttgaaagagtactatgaccacagtataagatctcatctcacggtgaaaggagcatgtagttatcttaagagtgtttttcccatcatcaactggttaccacattacaattttagctggtttactgcggatcttattgcaggaattaccattggctgtgttctcgtgccgcaatccatgtcttatgcacaagtcgccacgttaccagcgcagtatgggttgtactcctcttttattggtgcttactcctactcttttttcgctacaagtaaagatgtttgtattgggcccgtggctgtcatgtctttgcagaccgccaaagtcattgcggatgtcacggcaaaatatcctgatggagattctgccataactggtcccgttattgcaacgactttggcgttattatgtggtatcatttctgcagcagttggcttcttgcgtcttgggtttcttgtcgaattgatttccttaaatgcagtcgctggatttatgactggatccgcgtttaatatcttatggggtcaagttccagcattaatgggttacaatagtttggttaacacgagagctgccacctataaagtggtcatagagaccttgaaacatttaccagataccaaattagacgcagtttttgggttgatcccgcttttccttctttatgtttggaaatggtggtgcggaacatatggaccaaggttgaacgatagatacaactccaaaaacccaaggttacacaaaattatcaaatggacatatttttacgctcaggcttccagaaatggtatcattattattgtattcacttgtattggttgggcaatcacaagaggcaaatctaaaagtgagaggcccatcagcatcttgggctctgttccatccggtttgaaagaagtcggggttttccatgttccaccaggattaatgtctaagcttggtccaaatttgcctgcatccattattgtgttattgttggagcatatcgctatttccaagtcttttggtagaatcaacgactataaagtcgtccccgaccaagaattgattgctattggtgtctccaaccttttaggtactttcttcaatgcttacccagcgactggttcctttagcaggtctgctttgaaggctaaatgtaatgtccgtacgccgttatctggtttgttttctggttcttgtgttcttttagcattatattgtttgaccggcgcattcttttacattccaaaggctaccttatctgcagttatcattcacgctgtatctgatcttttggcctcttatcaaactacctggaatttctggaagatgaatccattggacttcatctgtttcattgtcaccgtcttgataacggtatttgcctctattgaagatggtatttattttgccatgtgctggtcttgtgcaatgctcattttaaaagtggctttcccagcgggaaaattcttgggtcgtgtggaagtcgctgaagttactgatgcttacgtcagaccggactccgatgtggttagctacgtgtctgaaaataacaatggtatttccactttagaagatggtggtgaggatgacaaggaaagttccaccaaatacgtcacaaattcctccaagaaaatagaaacaaacgttcaaacaaagggctttgattctccatcttcttccattagccagccaaggataaaataccatactaaatggataccgtttgatcataaatacacaagagaattgaacccggacgttcagattctccccccaccagacggtgttcttgtttataggttatctgagagctacacctatctcaactgttccagacactacaacatcataaccgaagaagttaaaaaagttaccagacgtggtcaattaattcgccacagaaaaaaatctgaccgtccatggaatgatcctggtccatgggaagcacctgctttcttaaagaatttgaaattctggaagaaaagggagaacgaccctgaatccatggaaaacgcgcccagcacctctgtcgatgttgaaagagatgacaggccattgttgaaaatattgtgcttagacttctctcaagtggcacagacagacgctacggctcttcaatctttggttgatttgagaaaggccataaatcaatatgcagataggcaagttgaattccactttgtgggtatcatttctccatgggtgaagagaggtttaattagcagaggatttggtactttgaacgaagaatacagtgatgaatccattgttgccggtcatacaagttatcacgtcgccagagtacctcaaggcgaagaaaatcctgaaaaatatagcgtttataccgcttctggaacaaatttacctttcttccatatcgatatcccagattttgctaaatgggatatctga

SEQ ID NO: 7371 - DNA, 762 bp, Saccharomyces cerevisiae
atgaaacgctttaatgtaagttatgtggaagttataaaaaatggtgaaacaatatctagttgtttccagccgttccagaaaaacgaaaactatggtacaataacttcagcaaacgagcagataacgccggtcattttccataatttgatcatggatatggtattacccaaagtagttccgatcaaggggaacaaagttaccaagatgtcaatgaatctcatcgacggattcgattgtttctactccacggatgaccatgaccccaaaactgtgtacgtttgcttcacattagtagatatgcccaagattttgcccatcaggatactaagtgggctgcaggaatacgagtccaacgctacaaacgaacttttaagttcgcatgtaggtcaaatactagactctttccatgaagagctggtcgaataccgtaaccaaactttaaatagttctggaaatggccaatctagtaatgggaatggtcagaacactataagtgacatcggggatgccaccgaagaccaaataaaggacgtcatccagataatgaacgataacatcgacaagttcttggagagacaagaaagagtttctttattggtggataaaacttcccaactaaatagcagcagtaataaatttaggcgcaaagcggtcaatataaaagaaataatgtggtggcagaaggtcaaaaatattacgttattaactttcactattatactatttgtaagtgctgctttcatgtttttctatctgtggtaa

SEQ ID NO: 7372 - DNA, 762 bp, Artificial Sequence
  Description of Artificial Sequence: Synthetic polynucleotide
atgaaacgctttaatgtaagttatgtggaagttataaaaaatggtgaaacaatatctagttgtttccagccgttccagaaaaacgaaaactatggtacaataacttctgcaaacgagcagataacgccggtcattttccataatttgatcatggatatggtattacccaaagtagttccgatcaaggggaacaaagttaccaagatgtccatgaatctcatcgacggattcgattgtttctactccacggatgaccatgaccccaaaactgtgtacgtttgcttcacattagtagatatgcccaagattttgcccatcaggatattgagtgggttgcaggaatacgagtccaacgctacaaacgaacttttaagttctcatgtaggtcaaatattggactctttccatgaagagttggtcgaataccgtaaccaaactttaaatagttctggaaatggccaatctagtaatgggaatggtcagaacactataagtgacatcggggatgccaccgaagaccaaataaaggacgtcatccagataatgaacgataacatcgacaagttcttggagagacaagaaagagtttctttattggtggataaaacttcccaattgaatagcagcagtaataaatttaggcgcaaagcggtcaatataaaagaaataatgtggtggcagaaggtcaaaaatattacgttattaactttcactattatattgtttgtaagtgctgctttcatgtttttctatttatggtga

SEQ ID NO: 7373 - DNA, 1509 bp, Saccharomyces cerevisiae
atgctgctggacgtgaacacaaatcacacactaatgcacgatgctcatgtgcatgaacattgcctcatcaaaagcatacgtgatgatggcgcattgcactcatggagcgactcatcaaaggtattttatcccaagtcattttacgctaccgctactaataagaagaataacaagttagccagcgccagcatgaacaagaccgccacaagtaataggacggtgagcgatgagatttatttccactccactaagccgcagttcgatggtcaaggaagcgctgaacgtactagaacactaaccaagaggaatagcttcaagaggactagaatactgaaggctcgagacgattccgaactgctgaacgaaaatcgctcatctttgatgaccccgtccttaagctcggtcatgtcgcaagttaggaaaacaaattccgccaagacgttatcgggcgaatgccccatacatgagggccacttaacacagagcataaagaggaagttctccgaggaagctcaaagcgactgttcttcattgagctcctctaaacttcatcccttgacagatgatattgctgacgctgtcgatttgcagacccccgcgattggcgatgaggtactggctgagccggtcgtgcccaaaatgaaaataataaacataaatgatctcgatttgttcgacgactgggaggttaaggatttagtcgatatctttcctcccgtatacgaacggcgtccgcgatcgtcctctgccctttcactggtttctgcgtcgtccgatgccaaacttcgtccgacctctgtggacttccaaatcatcgacaagaaaggcggcaagacttcaagaaggaagagtaggagcaaatcgactacagaaaacatgatttacgaaaatgacctggtagaattagaacaatggccatctgcatcaccatcgcccgagaccgacggttcgattgcatctagcgagctcttgcccaataaaagaataagacaaaaaagtttgaataccaatttcctaaagttatactctattgaaacatcatgtaaaaggaagagtattttacccgaagtcgaagtagatgaccatctgttgaagcagctaacgtattccgaaattcggtctttggaaatcaaaaaggagccaaatgtctctacgaacgatattaagcttgccctaattactaggaaaaaattatggtctgacatggtccatgaaacaagaaatgatctttttggcgattctaccccctggaatttgcactttgttgcaacgacaagcaatacggaaccttcgcaaggccgtgaatccgcaagcgaacatgcaacggcggatttgaaaagttctttggtccgcgtacactcagacgtcaagccatggttcaacaatggcggcacaatgctcaaaccatgcggaaaactaaatttaggcaaagtcaccaataagacttccgcacctacgagagagattcaatatgtcgtaaagggctggtgtgacagcaggtttctctga

SEQ ID NO: 7374 - DNA, 1509 bp, Artificial Sequence
  Description of Artificial Sequence: Synthetic polynucleotide
atgttattagacgtgaacacaaatcacacattgatgcacgatgctcatgtgcatgaacattgcctcatcaaaagcatacgtgatgatggcgcattgcactcttggagcgactcttccaaggtattttatcccaagagcttttacgctaccgctactaataagaagaataacaagttagccagcgccagcatgaacaagaccgccacaagtaataggacggtgagcgatgagatttatttccactccactaagccgcagttcgatggtcaaggaagcgctgaacgtactagaacattaaccaagaggaatagcttcaagaggactagaatattgaaggctagagacgattccgaattattaaacgaaaatcgctcttctttgatgaccccgtccttaagctctgtcatgtctcaagttaggaaaacaaattccgccaagacgttaagtggcgaatgccccatacatgagggccacttaacacagagcataaagaggaagttctccgaggaagctcaaagcgactgttcttctttgagctcctctaaacttcatcccttgacagatgatattgctgacgctgtcgatttgcagacccccgcgattggcgatgaggtattggctgagccggtcgtgcccaaaatgaaaataataaacataaatgatctcgatttgttcgacgactgggaggttaaggatttagtcgatatctttcctcccgtatacgaaagacgtccgagaagttcctctgccctttctttggtttctgcgtcttccgatgccaaacttcgtccgacctctgtggacttccaaatcatcgacaagaaaggcggcaagacttccagaaggaagagtaggagcaaatctactacagaaaacatgatttacgaaaatgacttggtagaattagaacaatggccatctgcatctccatctcccgagaccgacggttccattgcatctagcgagctcttgcccaataaaagaataagacaaaaaagtttgaataccaatttcttgaagttatactctattgaaacatcttgtaaaaggaagagtattttacccgaagtcgaagtagatgaccatcttttgaagcagttaacgtattccgaaattagatctttggaaatcaaaaaggagccaaatgtctctacgaacgatattaagcttgccttaattactaggaaaaaattatggtctgacatggtccatgaaacaagaaatgatctttttggcgattctaccccctggaatttgcactttgttgcaacgacaagcaatacggaaccttctcaaggccgtgaatccgcaagcgaacatgcaacggcggatttgaaaagttctttggtccgcgtacactctgacgtcaagccatggttcaacaatggcggcacaatgctcaaaccatgcggaaaattgaatttaggcaaagtcaccaataagacttccgcacctacgagagagattcaatatgtcgtaaagggctggtgtgacagcaggtttctctga

SEQ ID NO: 7375 - DNA, 2439 bp, Saccharomyces cerevisiae
atgagaacgaagagaactaggggtacaagaaatgtaggagcgagcatgcctgccggcgctgcgaatgcggatagtgaagactggaaagaatatgtctccgaagacataatagcccaattgaacaagcaccagctgccgtattctgaaatattagatgagaagatcgcggacttggccaatcactggcacttccagtatgtgatggcttggctttccaatgtctgcgaatcatatactacaacgacatttaatactgaccagtatggcggtagctctaccaaatgcttgtggaagaatatcaaattcgatgaaggtgtatttgtaactgacgtattttcgaagatagacgggaaggactcgaactattacaatgatgaagtcgacgtagatgaaggatcgcaaaatttgtacgacagaattagattgcaattattgcatcaattagcgggaaataaaagcgggcaattgaaagattggaatgttatagttaaccatcacttgcaaaactcgagcgcgtattcagatttggttacggacttaccttttttggagcttgaaattgcacgccaattcgacatcatttacagtatcataaaattaattgaaatgaaaaatatgatcttcaaaaactacttagcgaataacttgcatctgtttacgtttagtgaagttatactggatgatgataatagtggaggggaggaaatgaagagcttgtttgccttacccaatgttggtgtactcgtaaagaaaaccattcacagagtaaaagaaggctcttcctcccaagtctctcaaactctgaatatcccaataaaactacagaactgtactataaaagaaagcgacccagacattcctgattcagtggagcttattcatctcgagtactctcacgatatcgatgcatatcttcaatcgattacaattgattatgatgtgattacaactaattgggggtccatgctagaatactggtcagagaataaaagttcgaaagccatagatgagttcataactaacttaataccggtgtatgccgaacatagactatattcggcaaaacttttggccaacagagaaaaggagagagcaattgcggagctaatgacaaggaggaaaagatcttcgagactggtagcgaaagaggaagaaaacaagaaaaaagacttggaaagtgagtggtttgaaaaactagatgaaagagaacaatttataaggcacagaaacaagctagtgtcgaaggaaatcaaaaagataaaagatcttctttggaaccaattgtggcaattgtacgatcaagattatagagatgaaaaattgaccaggcgtaacgagctcaaagatagaagtggttctggtacaccgttttttgaaacgtctttgggcagggaggaggacaatcccttaaatgaaatcgatatcggagttcttgatcacggccctaactttcaatctagtataatcccggtggaaccaccaattcctggaactgttgggccactacagacgggagacgtccctgaattgcctagtgacttctgcataacaaaggaagagctagatgagcttgccaactacgggatctttactccgcagcaagagcccgacaaccaagattctgttttccaatgtccgggcgaaccagagctggcgcccatgattatcaccgaagacacggagactgacctcttcaataaccgcccattgatatgctgtgatcattgttacaggtggcagcattgggaatgccaacctccaaaaattatagagcttatatcttcaaccacaaaatccccacagcacacgctgtcgcaacgtgattttggcgtcatcataatgggaaattcgcacggcaatagaaggtcttctcgcagaccccaatccacacttgaacccagcaccaagtcttcaagacctactgataaacgcaaaccgctgtctgaatgctccacttttatctgcgcttggtgcatcagggacttggaacttgagctgcgcaacatttttgtgcctgaattgaaaataataagggccaaacaaagaaaacaacaggaagaccgtgaaagaagaaaaaaaatgaaggaagaaaagaaaaggctcgaagagcttgcaaagaaaagggaactaaccgagtctgtctcacctccagtgtttaataatgcatttgcaaacatgtcaagtagcacaacgcctagtatcgccgcttacgaaaaaacaaatccagccatcaatccagcacctaatgtaaatgccgctcaccccataattacatactcgcagcaaactggcagcaaaactgtaccacaagcaccacaggcaccacaaacatcacaagcatcaatccaaccacagcagcaacagcaacagcaacagcaacagcaaccgctgcaccctaaagaacagaactttcacttccagttcccaccaaccaactag

SEQ ID NO: 7376 - DNA, 2439 bp, Artificial Sequence
  Description of Artificial Sequence: Synthetic polynucleotide
atgagaacgaagagaactaggggtacaagaaatgtaggagcgagcatgcctgccggcgctgcgaatgcggatagtgaagactggaaagaatatgtctccgaagacataatagcccaattgaacaagcaccagttaccgtattctgaaatattagatgagaagatcgcggacttggccaatcactggcacttccagtatgtgatggcttggctttccaatgtctgcgaaagttatactacaacgacatttaatactgaccagtatggcggtagctctaccaaatgcttgtggaagaatatcaaattcgatgaaggtgtatttgtaactgacgtattttccaagatagacgggaaggactccaactattacaatgatgaagtcgacgtagatgaaggatctcaaaatttgtacgacagaattagattgcaattattgcatcaattagcgggaaataaaagcgggcaattgaaagattggaatgttatagttaaccatcacttgcaaaactccagcgcgtattctgatttggttacggacttaccttttttggagcttgaaattgcacgccaattcgacatcatttacagtatcataaaattaattgaaatgaaaaatatgatcttcaaaaactacttagcgaataacttgcatttatttacgtttagtgaagttatattggatgatgataatagtggaggggaggaaatgaagagcttgtttgccttacccaatgttggtgtactcgtaaagaaaaccattcacagagtaaaagaaggctcttcctcccaagtctctcaaactttgaatatcccaataaaattacagaactgtactataaaagaaagcgacccagacattcctgattctgtggagcttattcatctcgagtactctcacgatatcgatgcatatcttcaatctattacaattgattatgatgtgattacaactaattgggggtccatgttggaatactggtctgagaataaaagttctaaagccatagatgagttcataactaacttaataccggtgtatgccgaacatagattatattctgcaaaacttttggccaacagagaaaaggagagagcaattgcggagttgatgacaaggaggaaaagatcttctagattggtagcgaaagaggaagaaaacaagaaaaaagacttggaaagtgagtggtttgaaaaattggatgaaagagaacaatttataaggcacagaaacaagttagtgagcaaggaaatcaaaaagataaaagatcttctttggaaccaattgtggcaattgtacgatcaagattatagagatgaaaaattgaccaggcgtaacgagctcaaagatagaagtggttctggtacaccgttttttgaaacgtctttgggcagggaggaggacaatcccttaaatgaaatcgatatcggagttcttgatcacggccctaactttcaatctagtataatcccggtggaaccaccaattcctggaactgttgggccattacagacgggagacgtccctgaattgcctagtgacttctgcataacaaaggaagagttagatgagcttgccaactacgggatctttactccgcagcaagagcccgacaaccaagattctgttttccaatgtccgggcgaaccagagttagcgcccatgattatcaccgaagacacggagactgacctcttcaataaccgcccattgatatgctgtgatcattgttacaggtggcagcattgggaatgccaacctccaaaaattatagagcttatatcttccaccacaaaatccccacagcacacgttatctcaacgtgattttggcgtcatcataatgggaaattctcacggcaatagaaggtcttctcgcagaccccaatccacacttgaacccagcaccaagtcttctagacctactgataaacgcaaaccgttatctgaatgctccacttttatctgcgcttggtgcatcagggacttggaacttgagttacgcaacatttttgtgcctgaattgaaaataataagggccaaacaaagaaaacaacaggaagaccgtgaaagaagaaaaaaaatgaaggaagaaaagaaaaggctcgaagagcttgcaaagaaaagggaattgaccgagtctgtctctcctccagtgtttaataatgcatttgcaaacatgagcagtagcacaacgcctagtatcgccgcttacgaaaaaacaaatccagccatcaatccagcacctaatgtaaatgccgctcaccccataattacatactctcagcaaactggcagcaaaactgtaccacaagcaccacaggcaccacaaacatctcaagcatctatccaaccacagcagcaacagcaacagcaacagcaacagcaaccgttgcaccctaaagaacagaactttcacttccagttcccaccaaccaactga

SEQ ID NO: 7377 - DNA, 3444 bp, Saccharomyces cerevisiae
atgcctaatccgaatacagcagattacttggtgaatccaaatttcaggaccagtaagggcggatctttatcgccgacgccagaagctttcaacgacacgcgagttgctgcaccagccactcttcgcatgatgggcaagcaatctggaccaagaaatgaccagcaacaagcaccactgatgcctcctgcagatatcaaacagggcaaggaacaggcagctcagagacaaaatgatgcatcgaggcctaatggcgccgtggaattaaggcaatttcatagaagatctttgggagattgggagttccttgaaacggttggcgcaggctctatgggtaaagttaaattggtcaagcatcgtcaaacaaaggaaatttgtgtaataaagattgttaatagggcttccaaggcttatctccataaacagcactctttaccttccccaaagaatgagagtgagatattagaaagacaaaagcggttagaaaaagaaattgcgagggataaaaggactgttagggaagcctctttgggccaaatcctttaccatcctcatatctgtcgtttatttgaaatgtgcactatgtcaaaccatttttatatgctttttgaatacgtttccggtggacagctgttagattatattattcagcatggctcattaaaggaacaccatgcgaggaaatttgccagaggtatagctagtgcgctgcaatacttacatgccaataatattgttcatcgagatctgaaaattgagaatataatgatatctagttcaggtgaaattaagatcattgattttggtctttccaacatttttgattataggaaacaattacatacgttttgtggttccttgtactttgcagcaccagaactattaaaagcgcagccatacacaggacctgaggtagatatttggtcgtttggtattgttctttatgtcttggtctgcggtaaagtaccatttgatgatgagaactcaagcattttacatgaaaaaataaaaaaaggtaaagtagactatccttcacacttatccattgaagttatatctttattaaccaggatgattgttgtcgacccattaagaagagcaacattaaagaatgtcgttgagcatccatggatgaacagaggatacgattttaaggctccatcatatgttcctaatcgtgttccattaacccctgaaatgatagatagccaagttctgaaggaaatgtatcgcctagaatttattgacgatattgaagatacaagaagatcattgatccgattagtaactgaaaaggaatacatccaactttcccaagaatactgggacaaattatccaacgccaaggggttgagttcaagtttaaataataactacctaaattcaacggcacaacaaaccttaatacaaaatcatattacaagtaatccatcgcaaagtggttataatgaaccagatagtaattttgaagatcctactttagcatatcatccattactatcaatatatcacttggtttcagaaatggttgcacggaaattagcgaagttgcaaagaaggcaagcattggccctgcaagcgcaagctcagcaaaggcaacaacagcaacaagtagcacttggcactaaggtcgccttaaataataactccccggatattatgaccaaaatgaggagccctcagaaagaagtagtacctaatcctggtatttttcaagtgccggcaattggaacatcgggaacctcaaacaacactaatacctcaaacaaacctccactgcatgtaatggttcctcctaaactaacaataccggaacaagcgcatacttctccaacatctaggaagagttccgacattcatacggaattaaatggtgttttgaaatcaacaccagtccccgtgtctggcgaatatcagcaacgttctgcttcacccgtagtaggtgaacatcaggaaaagaatacaataggcggcatattcagaagaatatcacaaagtggacaatctcagcatcccacacggcaacaggaacctcttccagaaagagaacctccaacatatatgtcaaaatcaaatgaaatttccatcaaagtaccgaaaagccatagtcgtactatatcagattatattcctagcgctagaagatatccatcttacgtgccaaattctgttgatgtaaaacagaaacccgctaaaaacactaccatagcacctcctataaggtcagtatcacaaaagcaaaacagtgatcttccagctttacctcagaacgccgaactaattgttcaaaaacaacggcaaaaactattacaggaaaatctcgacaaattacaaattaatgataatgataacaacaatgtgaacgctgtagtcgatggtatcaataatgataatagtgaccattatctctccgttccgaagggtcgtaagttacatcctagtgcaagggctaaatcggtggggcatgctcgtcgtgaatctttgaaatttactaggccgcctataccagcagcccttccgccatcagatatgacaaacgataacggctttttgggagaggcaaacaaggagagatacaatcctgttagcagtaacttttcgaccgttcctgaagattctaccacatacagtaacgatactaacaatagactgacttcggtgtattctcaggagcttactgagaagcaaattttggaggaagcttcaaaggcaccccccgggtctatgccatcaattgattatccaaagtcaatgtttttgaagggttttttctctgtacaaacaacctcctctaaaccattgcctattgttcgtcacaatatcatatctgttttaacaagaatgaatattgatttcaaagaagtgaaaggcgggttcatatgtgtccaacaaaggccatctattgagactgcagctgtccctgttataaccactactggcgtgggtttggattccggaaaggcgatggatctgcaaaatagtttagacagtcaattatcatccagttaccatagtacagcgtcctcagcatcaagaaatagttcgataaaacgccaaggttcttataagaggggccagaataatataccactaacacctttagcgaccaatacacatcaaagaaattcatctatcccaatgtctccaaactacggaaaccaaagtaatggtacatcaggggaactatcttccatgtcattagattatgttcaacaacaggatgatattttaacaacatcaagagcccaaaatataaataacgtaaatggtcaaacagagcaaaccaatacttctggtataaaagaaaggcctcctattaaatttgagattcacattgtaaaggttcgtatcgtcggcctagcaggtgtacatttcaaaaaggtttctggtaatacgtggctatataaagaattggcatcgtatattttaaaagaattaaacctatag

SEQ ID NO: 7378 - DNA, 3444 bp, Artificial Sequence
  Description of Artificial Sequence: Synthetic polynucleotide
atgcctaatccgaatacagcagattacttggtgaatccaaatttcaggaccagtaagggcggatctttatctccgacgccagaagctttcaacgacacgagagttgctgcaccagccactcttcgcatgatgggcaagcaatctggaccaagaaatgaccagcaacaagcaccattaatgcctcctgcagatatcaaacagggcaaggaacaggcagctcagagacaaaatgatgcaagcaggcctaatggcgccgtggaattaaggcaatttcatagaagatctttgggagattgggagttccttgaaacggttggcgcaggctctatgggtaaagttaaattggtcaagcatcgtcaaacaaaggaaatttgtgtaataaagattgttaatagggcttccaaggcttatctccataaacagcactctttaccttccccaaagaatgagagtgagatattagaaagacaaaagagattagaaaaagaaattgcgagggataaaaggactgttagggaagcctctttgggccaaatcctttaccatcctcatatctgtcgtttatttgaaatgtgcactatgtccaaccatttttatatgctttttgaatacgtttccggtggacagcttttagattatattattcagcatggctctttaaaggaacaccatgcgaggaaatttgccagaggtatagctagtgcgttgcaatacttacatgccaataatattgttcatagagatttgaaaattgagaatataatgatatctagttctggtgaaattaagatcattgattttggtctttccaacatttttgattataggaaacaattacatacgttttgtggttccttgtactttgcagcaccagaattattaaaagcgcagccatacacaggacctgaggtagatatttggtcttttggtattgttctttatgtcttggtctgcggtaaagtaccatttgatgatgagaactccagcattttacatgaaaaaataaaaaaaggtaaagtagactatccttctcacttatccattgaagttatatctttattaaccaggatgattgttgtcgacccattaagaagagcaacattaaagaatgtcgttgagcatccatggatgaacagaggatacgattttaaggctccatcttatgttcctaatcgtgttccattaacccctgaaatgatagatagccaagttttgaaggaaatgtatcgcttagaatttattgacgatattgaagatacaagaagaagtttgatcagattagtaactgaaaaggaatacatccaactttcccaagaatactgggacaaattatccaacgccaaggggttgagtagtagtttaaataataactacttgaattctacggcacaacaaaccttaatacaaaatcatattacaagtaatccatctcaaagtggttataatgaaccagatagtaattttgaagatcctactttagcatatcatccattattatctatatatcacttggtttctgaaatggttgcaagaaaattagcgaagttgcaaagaaggcaagcattggccttgcaagcgcaagctcagcaaaggcaacaacagcaacaagtagcacttggcactaaggtcgccttaaataataactccccggatattatgaccaaaatgaggagccctcagaaagaagtagtacctaatcctggtatttttcaagtgccggcaattggaacatctggaaccagtaacaacactaataccagtaacaaacctccattgcatgtaatggttcctcctaaattaacaataccggaacaagcgcatacttctccaacatctaggaagagttccgacattcatacggaattaaatggtgttttgaaatctacaccagtccccgtgtctggcgaatatcagcaacgttctgcttctcccgtagtaggtgaacatcaggaaaagaatacaataggcggcatattcagaagaatatctcaaagtggacaatctcagcatcccacaagacaacaggaacctcttccagaaagagaacctccaacatatatgtccaaatctaatgaaatttccatcaaagtaccgaaaagccatagtcgtactatatctgattatattcctagcgctagaagatatccatcttacgtgccaaattctgttgatgtaaaacagaaacccgctaaaaacactaccatagcacctcctataaggtctgtatctcaaaagcaaaacagtgatcttccagctttacctcagaacgccgaattgattgttcaaaaacaaagacaaaaattattacaggaaaatctcgacaaattacaaattaatgataatgataacaacaatgtgaacgctgtagtcgatggtatcaataatgataatagtgaccattatctctccgttccgaagggtcgtaagttacatcctagtgcaagggctaaatctgtggggcatgctcgtcgtgaatctttgaaatttactaggccgcctataccagcagcccttccgccaagtgatatgacaaacgataacggctttttgggagaggcaaacaaggagagatacaatcctgttagcagtaacttttccaccgttcctgaagattctaccacatacagtaacgatactaacaatagattaacttctgtgtattctcaggagcttactgagaagcaaattttggaggaagcttccaaggcaccccccgggtctatgccatctattgattatccaaagtctatgtttttgaagggttttttctctgtacaaacaacctcctctaaaccattgcctattgttcgtcacaatatcatatctgttttaacaagaatgaatattgatttcaaagaagtgaaaggcgggttcatatgtgtccaacaaaggccatctattgagactgcagctgtccctgttataaccactactggcgtgggtttggattccggaaaggcgatggatttgcaaaatagtttagacagtcaattatcttccagttaccatagtacagcgtcctctgcatctagaaatagtagtataaaacgccaaggttcttataagaggggccagaataatataccattaacacctttagcgaccaatacacatcaaagaaattcttctatcccaatgtctccaaactacggaaaccaaagtaatggtacatctggggaattatcttccatgtctttagattatgttcaacaacaggatgatattttaacaacatctagagcccaaaatataaataacgtaaatggtcaaacagagcaaaccaatacttctggtataaaagaaaggcctcctattaaatttgagattcacattgtaaaggttcgtatcgtcggcttggcaggtgtacatttcaaaaaggtttctggtaatacgtggttatataaagaattggcaagttatattttaaaagaattaaacctttga

SEQ ID NO: 7379 - DNA, 1035 bp, Saccharomyces cerevisiae
atgatagtagattatgaaaaggaccctagggctaaagaggctattgctatttgggaaaaaggtgtactgaaagagaaggatgggtcaatgtcagatgctataaacttctatcgaagtgcattgaaaatccatgataatgtggaatcactgtacagaaaaaaaatacttgatgagtggatgctgcacaaaaaactatcgggattatcaatgactactgatgctccagatgaacaaaatgaaaccggtaaagatgacttatctgttgaagaaaatgctgaacttcaaccctgctggattctggaaatcttgcctgacgacattttactgagaattattaaaaaagttatattaatgtctggtgaatcttgggtgaatttgtcgatgacttgttccacctttagcaagctttgcttccacgattctgtgccatttaaaactttcgcgaagtacatatattctaagcaaatatacgacaaaatggcaatggatcttaacggaatcaccgatataaatacctttgaaaaggaaatatggcggggtgatgattatcgtatgttaagggaaaggccatatattaaattcgaaggtgtttacatcagtgtagtaaattatgtaagatacggttccaatgcagaaagttcgttatctcttttaaagccagttcacatgatcacctattacaggtatttcagattttatgagaacggccaatgtttgagattactttctacagatgaacctagcgctgtcgtgaagcacttctccaaagagaacaaacccaggcatagtcatatgtgttattggagcctcggatttgattatgattttggtcatttaaagataacaaggtcagatgaaaagtatacgtttatcgaagaattccaaatcaagaatcaaggcaataagagatatcaacggttgaaatggctaagttcaattgtagtggataaggaagggaatgcatctaactgttcgttgagaaatgagaaatcttttttcttctccagagtgaaatctttcaaggatcctggatga

SEQ ID NO: 7380 - DNA, 1035 bp, Artificial Sequence
  Description of Artificial Sequence: Synthetic polynucleotide
atgatagtagattatgaaaaggaccctagggctaaagaggctattgctatttgggaaaaaggtgtattgaaagagaaggatgggtccatgagtgatgctataaacttctatagaagtgcattgaaaatccatgataatgtggaatctttgtacagaaaaaaaatacttgatgagtggatgttgcacaaaaaattatctggattatctatgactactgatgctccagatgaacaaaatgaaaccggtaaagatgacttatctgttgaagaaaatgctgaacttcaaccctgctggattttggaaatcttgcctgacgacattttattaagaattattaaaaaagttatattaatgtctggtgaatcttgggtgaatttgtccatgacttgttccacctttagcaagctttgcttccacgattctgtgccatttaaaactttcgcgaagtacatatattctaagcaaatatacgacaaaatggcaatggatcttaacggaatcaccgatataaatacctttgaaaaggaaatatggagaggtgatgattatcgtatgttaagggaaaggccatatattaaattcgaaggtgtttacatcagtgtagtaaattatgtaagatacggttccaatgcagaaagttctttatctcttttaaagccagttcacatgatcacctattacaggtatttcagattttatgagaacggccaatgtttgagattactttctacagatgaacctagcgctgtcgtgaagcacttctccaaagagaacaaacccaggcatagtcatatgtgttattggagcctcggatttgattatgattttggtcatttaaagataacaaggtctgatgaaaagtatacgtttatcgaagaattccaaatcaagaatcaaggcaataagagatatcaaagattgaaatggttgagttctattgtagtggataaggaagggaatgcatctaactgttctttgagaaatgagaaatcttttttcttctccagagtgaaatctttcaaggatcctggatga

SEQ ID NO: 7381 - DNA, 1947 bp, Saccharomyces cerevisiae
atgatgttggagccttcacctccacctttaacaacaacggtaacaccctcccttccgtccagtttaaagaaatctgtgacagataatgaccagaataataacaacgtgcccaggaagagaaaactagcatgccagaattgccgtagaagaagaaggaaatgtaacatggaaaagccttgttcaaactgtatcaagtttcgtaccgaatgtgtattcactcaacaagacttaaggaacaaaagatattctacgacttacgtagaagctttacagagccagattcggtctttgaaagaacagttgcaaatattaagttcctcgtcttccacaattgctagcaatgctctctcctcgttaaaaaacaacagtgatcatggtgatgctcctaatgaaaaaatcttaaagtatggcgaaacagcacaatcagcactaccatcatctgaaagcaacgatgagaatgagtctgatgcgttcaccaagaaaatgccttccgagagccctccaccagttggcacaaatagtatatatccatcaaattccttgtctataataaaaaagaagacggatggaagcacaagatatcagcaacagcaggtcagcctaaaaaatttatcaagaagtccccttatcttaagatcgttgtcactctttttcaaatggctatacccgggacattaccttttcattcatagagaaactttcttaagtgctttcttcggtgatactaacactaaaagttactattgttccgaagaattggtatttgcaatcgctgcattgggatctttgatttcatacaaatcagaaactgagctttttcaacaatctgaagtgttttatcaaagagccaagacgatagtactcaaaaaaatttttcaactggaagattcttcgttagctgaatcgtcgtcctcttcgaaattagcaatcatccagactctattgtgtttggcattttatgacattggaagcggagaaaaccccatggcttggtatctttctgggctggcatttaggattgcccacgaaatcggcctacatttgaatccagaagcatggagtaatgtttatgaagacgagctgtcaataatggattttgaagtgagaagtagaatttattggggctgctacattgctgatcatttaatagcgatcctctttggaagatcaacttccttgcgtttgtccaattccactgttccagaaacagacgagctacctgaaattgagactggtatagaggagtacatatatgacccaaaagtaatattgtccactgcaaaccccttgaagaaactgattgtgttatcgagaataacggagatttttgcatccaagattttcagcccaaacgaaactctacttcaaaggagtgaatacttggccaaatttaatctggaggtatacaattggagaagggatttgccccctgaactacaatggaccaagaggtcattgatggaaatgacagattttaacccaaccatagcttacgtatggtttcattactatatcgtgctaatttcctataataaacctttcatatacgaaatcaaacaaagccgggaattggttgaaggttatgttgatgaactgtattatcttttaaaagtttggaaaaataaatttaagacgtttgagaaggccacaatttacatgatttattctgcgattttagccatccaatgcatgaagtccaacttgattaaaaaggatagaaaacaagacttcttaaattttttaagtgcgcctaccctgaattacgaacttgctagaaaattcatagaaaactctgaagatgctttgcataattcagaaactatggatttattagggactctatctcacggtaacgattttgccttagagtacaattttgactttactttattgaatgagattgatatgctgattggtggaaacaccaatgatggtttgtcgaagtaa

SEQ ID NO: 7382 - DNA, 1947 bp, Artificial Sequence
  Description of Artificial Sequence: Synthetic polynucleotide
atgatgttggagccttctcctccacctttaacaacaacggtaacaccctcccttccgtccagtttaaagaaatctgtgacagataatgaccagaataataacaacgtgcccaggaagagaaaattggcatgccagaattgccgtagaagaagaaggaaatgtaacatggaaaagccttgttctaactgtatcaagtttcgtaccgaatgtgtattcactcaacaagacttaaggaacaaaagatattctacgacttacgtagaagctttacagagccagattagatctttgaaagaacagttgcaaatattaagttcctcttcttccacaattgctagcaatgctctctcctctttaaaaaacaacagtgatcatggtgatgctcctaatgaaaaaatcttaaagtatggcgaaacagcacaaagtgcattgccatcttctgaaagcaacgatgagaatgagtctgatgcgttcaccaagaaaatgccttccgagagccctccaccagttggcacaaatagtatatatccatccaattccttgtctataataaaaaagaagacggatggaagcacaagatatcagcaacagcaggtcagcttgaaaaatttatctagaagtccccttatcttaagaagtttgtctctctttttcaaatggttatacccgggacattaccttttcattcatagagaaactttcttaagtgctttcttcggtgatactaacactaaaagttactattgttccgaagaattggtatttgcaatcgctgcattgggatctttgatttcttacaaaagtgaaactgagctttttcaacaatctgaagtgttttatcaaagagccaagacgatagtactcaaaaaaatttttcaattggaagattcttctttagctgaaagttcttcctcttctaaattagcaatcatccagactttattgtgtttggcattttatgacattggaagcggagaaaaccccatggcttggtatctttctgggttagcatttaggattgcccacgaaatcggcttgcatttgaatccagaagcatggagtaatgtttatgaagacgagttatctataatggattttgaagtgagaagtagaatttattggggctgctacattgctgatcatttaatagcgatcctctttggaagatctacttccttgcgtttgtccaattccactgttccagaaacagacgagcttcctgaaattgagactggtatagaggagtacatatatgacccaaaagtaatattgtccactgcaaaccccttgaagaaattgattgtgttatctagaataacggagatttttgcatccaagattttcagcccaaacgaaactttacttcaaaggagtgaatacttggccaaatttaatttggaggtatacaattggagaagggatttgccccctgaattacaatggaccaagaggtctttgatggaaatgacagattttaacccaaccatagcttacgtatggtttcattactatatcgtgttgatttcctataataaacctttcatatacgaaatcaaacaaagcagagaattggttgaaggttatgttgatgaattgtattatcttttaaaagtttggaaaaataaatttaagacgtttgagaaggccacaatttacatgatttattctgcgattttagccatccaatgcatgaagtccaacttgattaaaaaggatagaaaacaagacttcttaaattttttaagtgcgcctaccttgaattacgaacttgctagaaaattcatagaaaactctgaagatgctttgcataattctgaaactatggatttattagggactttatctcacggtaacgattttgccttagagtacaattttgactttactttattgaatgagattgatatgttgattggtggaaacaccaatgatggtttgtccaagtga

SEQ ID NO: 7383 - DNA, 1185 bp, Saccharomyces cerevisiae
atgtggacaaacactttcaaatggtgcagcaaaactgagaaggagaccactactgcagacgccaaggtgtgtgctagcgtgcagggcctgaaggccctgcagcagcaaattatggatagcaccactgtgcgtgggtccgttaataacacgatgactccaggcgggattaaccagtggcatttccacaataagcgtgcgaacaaagtgtgcacgcctacagtactaatccatggatacgctgcctcgtcgatggcgttctacaggacgtttgagaacctgtcagacaacattaaagatctatatgccatcgacttgccagccaatggtgcctcagaggcgccagcattgcaagtgaacaaaaccaagaagatcaagtctctcaggtttaagcatatagaagatgacgtagtaatccctgtgatagagaagcgccccccagcagaggacatcaagtcacacctggagcagtacgaaagctacttcgtagacaggatagagcaatggcggaaggataacaagcttcgcaaaataaacgtggtgggccattcattcggaggatatatttcattcaaatacgccctcaagtaccctgattccattgagaaactgtgtctcatatctcctcttggtgtggaaaacagtatacatgctatcacccacaaatgggagcccaacaccacctatccacttacgtttaccgacccatcgtcccgatattatacaagaaagctgaacgtaccgcggtttatctttgaaaaccagctaaacgttttgaagtggatgggacccataggctccaaattgtgctcgaactacatctccaccgcatacgtaaaagttccggatcagatatataaggactatcttttgcactcatttgtcgggaagaaccagacggtgcaaccacagacaatcaaggtgttcacccatttgtttgaaaggaatctgatcgctagagatccgataataaacaacgttcgttttttgaacccagcaacgcctgtcatgttcatgtatggcgagcacgattggatggataaatatgcgggctacttgactactgaatcaatgctaaaaaacaaggcaaaggctagctacgttgaagtccctgatgctggccataatcttttcctggacaacccgcagcactttgcctcttctttagtctcgttcctgtcaaagtaa

SEQ ID NO: 7384 - DNA, 1185 bp, Artificial Sequence
  Description of Artificial Sequence: Synthetic polynucleotide
atgtggacaaacactttcaaatggtgcagcaaaactgagaaggagaccactactgcagacgccaaggtgtgtgctagcgtgcagggcttgaaggccttgcagcagcaaattatggatagcaccactgtgcgtgggtccgttaataacacgatgactccaggcgggattaaccagtggcatttccacaataagcgtgcgaacaaagtgtgcacgcctacagtattgatccatggatacgctgcctcttctatggcgttctacaggacgtttgagaacttaagtgacaacattaaagatttatatgccatcgacttgccagccaatggtgcctctgaggcgccagcattgcaagtgaacaaaaccaagaagatcaagtctctcaggtttaagcatatagaagatgacgtagtaatccctgtgatagagaagcgccccccagcagaggacatcaagtctcacttagagcagtacgaaagctacttcgtagacaggatagagcaatggagaaaggataacaagcttcgcaaaataaacgtggtgggccattctttcggaggatatatttctttcaaatacgccctcaagtaccctgattccattgagaaattatgtctcatatctcctcttggtgtggaaaacagtatacatgctatcacccacaaatgggagcccaacaccacctatccacttacgtttaccgacccatcttccagatattatacaagaaagttgaacgtaccgagatttatctttgaaaaccagttgaacgttttgaagtggatgggacccataggctccaaattgtgcagcaactacatctccaccgcatacgtaaaagttccggatcagatatataaggactatcttttgcacagttttgtcgggaagaaccagacggtgcaaccacagacaatcaaggtgttcacccatttgtttgaaaggaatttgatcgctagagatccgataataaacaacgttcgttttttgaacccagcaacgcctgtcatgttcatgtatggcgagcacgattggatggataaatatgcgggctacttgactactgaaagtatgttgaaaaacaaggcaaaggctagctacgttgaagtccctgatgctggccataatcttttcttggacaacccgcagcactttgcctcttctttagtctctttcttatccaagtga

SEQ ID NO: 7385 - DNA, 264 bp, Saccharomyces cerevisiae
atggcagatagcgaggatacctctgtgatcctgcagggcatcgacacaatcaacagcgtggagggcctggaagaagatggttacctcagcgacgaggacacgtcactcagcaacgagctcgcagatgcacagcgtcaatgggaagagtcgctgcaacagttgaacaagctgctcaactgggtcctgctgcccctgctgggcaagtatataggtaggagaatggccaagactctatggagtaggttcattgaacactttgtataa

SEQ ID NO: 7386 - DNA, 264 bp, Artificial Sequence
  Description of Artificial Sequence: Synthetic polynucleotide
atggcagatagcgaggatacctctgtgatcttacagggcatcgacacaatcaacagcgtggagggccttgaagaagatggttacctcagcgacgaggacacgtctctcagcaacgagctcgcagatgcacagcgtcaatgggaagagtctttacaacagttgaacaagttactcaactgggtcttattgcccttattaggcaagtatataggtaggagaatggccaagactttatggagtaggttcattgaacactttgtatga

SEQ ID NO: 7387 - DNA, 1044 bp, Saccharomyces cerevisiae
atgaacaggaaagtagctatcgtaacgggtactaatagtaatcttggtctgaacattgtgttccgtctgattgaaactgaggacaccaatgtcagattgaccattgtggtgacttctagaacgcttcctcgagtgcaggaggtgattaaccagattaaagatttttacaacaaatcaggccgtgtagaggatttggaaatagactttgattatctgttggtggacttcaccaacatggtgagtgtcttgaacgcatattacgacatcaacaaaaagtacagggcgataaactaccttttcgtgaatgctgcgcaaggtatctttgacggtatagattggatcggagcggtcaaggaggttttcaccaatccattggaggcagtgacaaatccgacatacaagatacaactggtgggcgtcaagtctaaagatgacatggggcttattttccaggccaatgtgtttggtccgtactactttatcagtaaaattctgcctcaattgaccaggggaaaggcttatattgtttggatttcgagtattatgtccgatcctaagtatctttcgttgaacgatattgaactactaaagacaaatgcctcttatgagggctccaagcgtttagttgatttactgcatttggccacctacaaagacttgaaaaagctgggcataaatcagtatgtagttcaaccgggcatatttacaagccattccttctccgaatatttgaattttttcacctatttcggcatgctatgcttgttctatttggccaggctgttggggtctccatggcacaatattgatggttataaagctgccaatgccccagtatacgtaactagattggccaatccaaactttgagaaacaagacgtaaaatacggttctgctacctctagggatggtatgccatatatcaagacgcaggaaatagaccctactggaatgtctgatgtcttcgcttatatacagaagaagaaactggaatgggacgagaaactgaaagatcaaattgttgaaactagaacccccatttaa

SEQ ID NO: 7388 - DNA, 1044 bp, Artificial Sequence
  Description of Artificial Sequence: Synthetic polynucleotide
atgaacaggaaagtagctatcgtaacgggtactaatagtaatcttggtttgaacattgtgttccgtttaattgaaactgaggacaccaatgtcagattgaccattgtggtgacttctagaacgcttcctagagtgcaggaggtgattaaccagattaaagatttttacaacaaatctggccgtgtagaggatttggaaatagactttgattatcttttggtggacttcaccaacatggtgagtgtcttgaacgcatattacgacatcaacaaaaagtacagggcgataaactaccttttcgtgaatgctgcgcaaggtatctttgacggtatagattggatcggagcggtcaaggaggttttcaccaatccattggaggcagtgacaaatccgacatacaagatacaattagtgggcgtcaagtctaaagatgacatggggcttattttccaggccaatgtgtttggtccgtactactttatcagtaaaattttacctcaattgaccaggggaaaggcttatattgtttggatttccagtattatgtccgatcctaagtatctttctttgaacgatattgaattattgaagacaaatgcctcttatgagggctccaagcgtttagttgatttattacatttggccacctacaaagacttgaaaaagttgggcataaatcagtatgtagttcaaccgggcatatttacaagccattccttctccgaatatttgaattttttcacctatttcggcatgttgtgcttgttctatttggccaggttattggggtctccatggcacaatattgatggttataaagctgccaatgccccagtatacgtaactagattggccaatccaaactttgagaaacaagacgtaaaatacggttctgctacctctagggatggtatgccatatatcaagacgcaggaaatagaccctactggaatgtctgatgtcttcgcttatatacagaagaagaaattagaatgggacgagaaattgaaagatcaaattgttgaaactagaacccccatttga

SEQ ID NO: 7389 - DNA, 798 bp, Saccharomyces cerevisiae
atgaaccaaaatggtgataagaacgaaggcaagttgtttcaactaccgtcattgccgccctggaaaacaccaaggttcaacaaagccaactttaacaattttaccacaccgctacggaaaaggtcgacaagggtaataaatgatgattcgatgcccataacaggcgaagtactagaggagaggactgcagatgatctctatgggataaatatggacgtagacgaagtcgactatctgaatactttgagccacatcgaggaagaaaagcaatacgattattcaccgttttgtgagcgcaatacgctaagggaaagtagaattgacagttttttgaaagccgaaagggcagcacattgtcttgtgtttcataaggtgggccatctagacggcatagacagctatcgacccgatattgacatcatgtgcggcgaagaggctaataaatatgacagtgcgaatccggagggcaatggttcaatgttgttagagagtgtacctggatgcaacaaagaagacctggagaggttatcaaggcgagaatttgtaacaaattcgaaacctaatatgagacggttggatgacataataaatcatgaaacgaacgccttaaaaagtttctggaacgactcaggattagtcaattcactccaaagtcatcatttgcatgaagagtaccttcttttgcaagaagaattaaagaatgtgtacaagattaaatgccatgacagagtgccaatagaaagtctacgcgataagtgcagaagacactatagcaacgaggatagttcgtttctctga

SEQ ID NO: 7390 - DNA, 798 bp, Artificial Sequence
  Description of Artificial Sequence: Synthetic polynucleotide
atgaaccaaaatggtgataagaacgaaggcaagttgtttcaattgccgtctttgccgccctggaaaacaccaaggttcaacaaagccaactttaacaattttaccacaccgttgagaaaaaggtctacaagggtaataaatgatgattctatgcccataacaggcgaagtattggaggagaggactgcagatgatctctatgggataaatatggacgtagacgaagtcgactatttgaatactttgagccacatcgaggaagaaaagcaatacgattattctccgttttgtgagcgcaatacgttgagggaaagtagaattgacagttttttgaaagccgaaagggcagcacattgtcttgtgtttcataaggtgggccatttggacggcatagacagctatagacccgatattgacatcatgtgcggcgaagaggctaataaatatgacagtgcgaatccggagggcaatggttctatgttgttagagagtgtacctggatgcaacaaagaagacttggagaggttatctaggagagaatttgtaacaaattctaaacctaatatgagaagattggatgacataataaatcatgaaacgaacgccttaaaaagtttctggaacgactctggattagtcaatagtctccaaagtcatcatttgcatgaagagtaccttcttttgcaagaagaattaaagaatgtgtacaagattaaatgccatgacagagtgccaatagaaagtttacgcgataagtgcagaagacactatagcaacgaggatagttcttttctctga

SEQ ID NO: 7391 - DNA, 1953 bp, Saccharomyces cerevisiae
atgtattatggaatcagccagtttagcgaagcctacaacaaaatcttaaggaattcatcgtctcattcatcatgtcaattggtcattttcgtttcttgtcttaacatcgatgcgctgtgtgcgacgaagatgttgtcactattattcaaaaaacaattggtacaatctcaaatagtaccgatatttgggtactctgaattacgacgccactattctcaattggatgacaatataaatagtctgctattagtagggtttggaggcgttattgatctggaggctttcttagaaatcgatccccaagagtatgttatcgatacagatgaaaagtcgggggaacaaagtttcaggagagacatctacgtgttggatgctcatagaccgtggaatctcgacaatatatttggatcacaaatcatccaatgttttgacgacggtacggtggatgacacattaggcgaacaaaaagaagcatactataaattgcttgaactggacgaggagagtggtgacgatgagctctcaggtgacgagaacgataataatgggggtgacgatgaggcaactgatgccgatgaagtcacagacgaggacgaagaagacgaagatgagacaatatctaataaaagaggtaattcttcaataggaccgaatgatctctcaaaaagaaagcaacgaaagaagcaaatccatgaatatgaaggtgttttggaggaatactattctcaaggcacaacagtggttaactcgatatctgcacaaatctattcattattgtctgctatcggagaaacaaatctttcaaacctgtggttgaatatacttggtacgacctcgttagatatagcatatgctcaagtttacaatcgattataccccttattgcaagatgaagtgaagcgtctcacaccaagcagtagaaactcagtaaagacccctgatacattgacgttaaacatccaaccggattactaccttttcttactgaggcattcttcattgtacgacagtttttattattctaactatgtcaatgccaaactatccctatggaatgaaaatgggaaaaagagattgcataagatgtttgctagaatgggtataccattaagtactgcacaagaaacatggttatacatggatcattctattaagagagaacttgggataatatttgacaaaaatttggatcgttatgggttgcaagatataattagagatgggtttgttagaactcttggatatcgtgggtccataagtgccagtgaatttgtcgaagcactaacagctcttttggaagtaggtaattcaactgataaggatagtgtgaaaataaataatgacaataatgacgatacagatggagaggaagaagaagataacagcgctcaaaaattgacgaatttgagaaaaagatgggtttcgaatttttggctcagttgggatgctctagatgacagaaaggtggaactattaaaccgtggcattcaactagcacaagacttacagagagcaatttttaataccggggttgctatattggagaagaaattaatcaagcatttaagaatttatagattatgcgtcttacaagacggacccgatttagacttgtacagaaacccattgacgttattaagattaggaaattggctcatagaatgctgtgcggaatctgaagacaagcaattgttgcccatggtgcttgccagcatagatgaaaatacggacacttacttggttgctgggttaacacctaggtatcctcgcggactagacacgatacacacaaaaaaacctattttgaataatttcagcatggcgtttcaacaaataactgcagaaacggatgctaaagtgagaatagataattttgaaagttccataattgaaatacgtcgtgaagatctttcaccattcctggagaagctgaccttgagtggattgttataa

SEQ ID NO: 7392 - DNA, 1953 bp, Artificial Sequence
  Description of Artificial Sequence: Synthetic polynucleotide
atgtattatggaatcagccagtttagcgaagcctacaacaaaatcttaaggaattcttcttctcattcttcttgtcaattggtcattttcgtttcttgtcttaacatcgatgcgttatgtgcgacgaagatgttgtccttattattcaaaaaacaattggtacaatctcaaatagtaccgatatttgggtactctgaattaaggcgccactattctcaattggatgacaatataaatagtttattattagtagggtttggaggcgttattgatttagaggctttcttagaaatcgatccccaagagtatgttatcgatacagatgaaaagagtggggaacaaagtttcaggagagacatctacgtgttggatgctcatagaccgtggaatctcgacaatatatttggatctcaaatcatccaatgttttgacgacggtacggtggatgacacattaggcgaacaaaaagaagcatactataaattgcttgaattagacgaggagagtggtgacgatgagctctctggtgacgagaacgataataatgggggtgacgatgaggcaactgatgccgatgaagtcacagacgaggacgaagaagacgaagatgagacaatatctaataaaagaggtaattcttctataggaccgaatgatctctctaaaagaaagcaaagaaagaagcaaatccatgaatatgaaggtgttttggaggaatactattctcaaggcacaacagtggttaacagcatatctgcacaaatctattctttattgtctgctatcggagaaacaaatctttccaacctttggttgaatatacttggtacgaccagtttagatatagcatatgctcaagtttacaatagattataccccttattgcaagatgaagtgaagcgtctcacaccaagcagtagaaactctgtaaagacccctgatacattgacgttaaacatccaaccggattactaccttttcttattgaggcattcttctttgtacgacagtttttattattctaactatgtcaatgccaaactttccttatggaatgaaaatgggaaaaagagattgcataagatgtttgctagaatgggtataccattaagtactgcacaagaaacatggttatacatggatcattctattaagagagaacttgggataatatttgacaaaaatttggatcgttatgggttgcaagatataattagagatgggtttgttagaactcttggatatcgtgggtccataagtgccagtgaatttgtcgaagcattaacagctcttttggaagtaggtaattctactgataaggatagtgtgaaaataaataatgacaataatgacgatacagatggagaggaagaagaagataacagcgctcaaaaattgacgaatttgagaaaaagatgggtttctaatttttggctcagttgggatgctttagatgacagaaaggtggaattattaaaccgtggcattcaattggcacaagacttacagagagcaatttttaataccggggttgctatattggagaagaaattaatcaagcatttaagaatttatagattatgcgtcttacaagacggacccgatttagacttgtacagaaacccattgacgttattaagattaggaaattggctcatagaatgctgtgcggaatctgaagacaagcaattgttgcccatggtgcttgccagcatagatgaaaatacggacacttacttggttgctgggttaacacctaggtatcctcgcggattggacacgatacacacaaaaaaacctattttgaataatttcagcatggcgtttcaacaaataactgcagaaacggatgctaaagtgagaatagataattttgaaagttccataattgaaatacgtcgtgaagatctttctccattcttggagaagttgaccttgagtggattgttatga

SEQ ID NO: 7393 - DNA, 396 bp, Saccharomyces cerevisiae
atgagtcaaagtcgctggagtatcgttctcatctttgcattgtttatttttggcagcactggagtgaatgccttcttcaatttcggtcatcatcagcaacagcaacagcaacagcaacaatcatatgaagatcaagttttaaataacccttgtgatgggtatttgtgtccggacaccctaacgtgcgttgcacagcagaaagactgtccttgtcccttccctaaatctcagttgaaatgtgtccttcctgataataaatttgtttgcatatccaaaccagccacacacaatgaaaagtttagagcaatatatgatgaccctgtcaagggccccaaagcaaagaacaaggggtttagggattgtggatgggtatcagatgcttacaaaaaccattga

SEQ ID NO: 7394 - DNA, 396 bp, Artificial Sequence
  Description of Artificial Sequence: Synthetic polynucleotide
atgagtcaaagtcgctggagtatcgttctcatctttgcattgtttatttttggcagcactggagtgaatgccttcttcaatttcggtcatcatcagcaacagcaacagcaacagcaacaaagttatgaagatcaagttttaaataacccttgtgatgggtatttgtgtccggacaccttgacgtgcgttgcacagcagaaagactgtccttgtcccttccctaaatctcagttgaaatgtgtccttcctgataataaatttgtttgcatatccaaaccagccacacacaatgaaaagtttagagcaatatatgatgaccctgtcaagggccccaaagcaaagaacaaggggtttagggattgtggatgggtatctgatgcttacaaaaaccattga

SEQ ID NO: 7395 - DNA, 1134 bp, Saccharomyces cerevisiae
atgtctaaagggagggtcaatcagaagcgttacaagtatcctcttccaattcaccccgtagatgaccttccagagttaatccttcataatccgttatcttggctatattgggcataccgctattacaagagtacgaacgcactgaacgataaagtacatgtagattttataggagataccactcttcacatcacggttcaagatgacaagcaaatgctatatctttggaataatggattttttggcactggtcaatttagcaggagtgagcctacatggaaagctagaacagaggccagactgggtctcaatgatactcccctccacaatcggggaggaacaaagagtaatactgaaacggagatgactttagagaaggtcacacaacagaggagattacaaagattagagttcaagaaagaacgtgcgaagttagaaagagaattactagaattaagaaaaaaaggtggtcatatcgatgaggaaaacatcctccttgagaaacaacgagaatcattaagaaaatttaaactaaaacaaacagaagacgtgggcatcgttgcacaacagcaagacatttccgaatcaaatttaagagatgaagacaacaatcttcttgatgagaacggtgatcttttgccactagagtcactagaactaatgccagtggaagctatgtttttaacttttgcacttcctgttcttgacatatctcccgcgtgcctggcagggaaactgtttcaattcgatgccaaatataaagatattcactcctttgtcagatcatacgttatataccatcactacagatcacacggttggtgcgtaagatctggtataaaattcggctgcgattatttattatataagagagggccaccatttcaacacgctgaattttgtgttatgggtcttgaccacgacgtctctaaagattatacgtggtattctagcatagcccgtgttgtgggcggcgcaaagaagacgtttgtgttatgctacgtggagagactaatctcggaacaggaggcgatagcactatggaaatcaaacaactttactaaattgttcaatagttttcaagttggtgaagtattgtataagagatgggttcccggaagaaatagagactag

SEQ ID NO: 7396 - DNA, 1134 bp, Artificial Sequence
  Description of Artificial Sequence: Synthetic polynucleotide
atgtctaaagggagggtcaatcagaagcgttacaagtatcctcttccaattcaccccgtagatgaccttccagagttaatccttcataatccgttatcttggttatattgggcataccgctattacaagagtacgaacgcattgaacgataaagtacatgtagattttataggagataccactcttcacatcacggttcaagatgacaagcaaatgctttatctttggaataatggattttttggcactggtcaatttagcaggagtgagcctacatggaaagctagaacagaggccagattaggtctcaatgatactcccctccacaatagaggaggaacaaagagtaatactgaaacggagatgactttagagaaggtcacacaacagaggagattacaaagattagagttcaagaaagaacgtgcgaagttagaaagagaattattggaattaagaaaaaaaggtggtcatatcgatgaggaaaacatcctccttgagaaacaaagagaatctttaagaaaatttaaattgaaacaaacagaagacgtgggcatcgttgcacaacagcaagacatttccgaaagtaatttaagagatgaagacaacaatcttcttgatgagaacggtgatcttttgccattggagtctttggaattgatgccagtggaagctatgtttttaacttttgcacttcctgttcttgacatatctcccgcgtgcttggcagggaaattatttcaattcgatgccaaatataaagatattcactcctttgtcagatcttacgttatataccatcactacagaagtcacggttggtgcgtaagatctggtataaaattcggctgcgattatttattatataagagagggccaccatttcaacacgctgaattttgtgttatgggtcttgaccacgacgtctctaaagattatacgtggtattctagcatagcccgtgttgtgggcggcgcaaagaagacgtttgtgttatgctacgtggagagattgatcagtgaacaggaggcgatagcattatggaaaagtaacaactttactaaattgttcaatagttttcaagttggtgaagtattgtataagagatgggttcccggaagaaatagagactga

SEQ ID NO: 7397 - DNA, 14733 bp, Saccharomyces cerevisiae
atgtcccaggatagaattttgttagatttagacgtagttaaccaaaggttaattctcttcaattctgcttttccctctgatgctattgaagcgcccttccactttagcaacaaggaatcaacttctgagaatttagacaatttagcaggaactatactacatagccgttccatcactggtcatgttttcctttacaaacatatttttttagagatagtggcacgttggataaaggactccaaaaaaaaagattacgttcttgtaattgaaaagttggcaagtataattacaatatttcccgttgcaatgccattaattgaagactatttagataaagagaatgatcatttcatcactattcttcaaaatccatccacacaaaaggattccgacatgtttaaaatactattagcatactataggttactatatcacaataaagaagtatttgcacgcttcattcaacccgacattttataccaacttgtggatttactcaccaaagaacaagaaaatcaggttgttatatttctagcattaaaggttttatctttatacttagacatgggagaaaaaacattaaacgatatgctcgacacttatataaaatcacgcgattcattgttgggccattttgagggcgattctggaattgattacagcttcctcgaactgaacgaagctaagagatgtgcaaatttctctaaactacccagtgttccagaatgtttcactatagaaaaaaaatctagctacttcattattgagcctcaggatttgagtactaaggtcgcgtcaatctgtggcgttatcgtccctaaggtccacactatccacgacaaagtattctacccattaacctttgtccctactcataaaacggtttcctctcttcgtcaactcgggagaaagattcaaaattcaactccaataatgctcattggaaaagcgggatccggtaaaacctttttaatcaatgagctaagtaaatatatgggttgccatgactccattgtgaaaattcatttaggtgaacaaactgatgccaagttactgattggtacttatacctctggtgacaagccaggcacgtttgaatggagagctggtgttctcgctaccgcggtcaaagaagggagatgggtacttatagaagacatagataaagctcctacagatgttttatcaatacttttatcgcttttagaaaagcgcgaactaaccattccatccagaggagagactgtaaaggctgcaaatggtttccagttaatatcaactgttagaataaacgaagatcatcagaaggatagttccaataagatctataacttgaatatgattggtatgagaatctggaatgttattgaattagaggaacctagcgaagaggatttgacacacattttagcccaaaagtttcccattttgaccaaccttatccccaaactaatcgattcatacaaaaacgtcaaaagtatttatatgaacaccaagttcatttcattgaacaagggggcacacacaagagttgtatctgtaagagatttaattaagctgtgcgaaaggttagacatcctattcaaaaacaatggcatcaacaaacctgaccaactaatccagtcttctgtctacgacagtattttctccgaagccgccgactgtttcgctggcgctattggagaattcaaagctttggaacctattatacaagcaatcggcgagtcattagacattgcttcctcaaggatttcgttatttttgacccaacatgtgcccactttggaaaaccttgatgatagcattaaaattggaagagccgtattacttaaggaaaagctaaatatacaaaaaaaatcaatgaacagcacattgttcgcatttacgaatcattctttaagactaatggaacagatttctgtttgtatacagatgactgaacctgttttactagtcggtgaaacgggtaccgggaaaactacagtcgttcaacaacttgctaagatgttagcaaaaaaattaacggtaatcaatgtttcacaacaaacagaaactggtgatcttcttggtgggtacaaacccgtaaattctaaaacagttgcagttcctatacaagaaaattttgaaactctttttaatgctacattttccttaaagaagaacgagaagtttcacaagatgctacataggtgcttcaacaagaatcaatggaagaacgttgttaaactttggaacgaagcgtacaaaatggctcaaagcatattaaaaattacaaacactgaaaatgaaaacgaaaatgcaaagaagaagaaaagaagactcaatactcatgaaaaaaaattgttacttgacaaatgggctgacttcaatgactcagtgaagaagtttgaggcccagtctagctctattgaaaactcgtttgtcttcaattttgtcgagggttctttggtaaagactatcagggctggggagtggctattgctcgatgaagtgaatttagcaaccgcagataccttagaaagtatttctgaccttctcaccgagcctgattctcgtagtattcttctttcagaaaagggtgacgctgagcctataaaagctcaccccgattttagaatatttgcttgtatgaaccccgctactgatgttggtaaaagagacttacctatgggtatcagatcaagatttaccgaaatatatgtacattctccggaacgtgatattactgatttgctttccataattgataaatatattggaaagtacagcgtcagcgatgaatgggtaggaaatgacatcgctgaactttaccttgaagccaaaaaactctccgataacaatactatagttgatggctcaaaccaaaaaccacactttagtatccgtaccctgacgcgtacattgctttatgttactgatattattcatatctacggtctacgccgttccctgtatgatggattctgtatgagttttttgactttactggaccaaaaatctgaggccattctgaagccagtaatagaaaaattcacattggggaggctaaaaaatgtcaagtcaatcatgtcacagacacctccctctccaggaccagattatgttcagtttaagcattattggatgaaaaagggccctaatacaattcaagaacaagctcactatatcattacgccttttgttgaaaagaatatgatgaatttggtaagagctacatcaggcaaaagatttcctgtgcttattcaaggtccaacttcatcgggaaaaaccagtatgatcaaatatcttgcggatataacgggccataagtttgtccgtataaataaccatgagcatacagatttacaggaatatttaggtacatatgttaccgatgataccggaaagctgtcgtttaaggaaggtgttttagtcgaggcactacgaaaaggatattggattgttttggatgaattaaatcttgccccaaccgatgttttagaagccttaaataggttacttgacgataacagagaactttttattccagaaacacaagaagttgtacatcctcatcctgatttccttctttttgctacccagaatccacctgggatatacggtggccgtaaaattctttcaagagcttttaggaatcgttttctggagttgcacttcgacgatattccgcaagatgaattagaaattatcctacgtgagcgctgccaaattgccccatcatatgcaaagaaaatcgttgaagtataccgccaattatccatcgaacgttccgcttcaaggttgttcgaacagaaaaatagttttgcaactctacgtgatcttttccgctgggctttaagggacgcagtgggatatgagcagcttgctgccagtggctatatgcttcttgcagaaaggtgcagaactccacaagaaaaagttacagtcaaaaagactttagaaaaagtaatgaaagttaaattagatatggaccaatattatgcaagtctggaagataaatccttagaagccattggctctgttacttggacaaaaggaatgcgccgactatccgtcttagtttctagttgtttaaagaataaggagccagtactactggtaggtgaaactgggtgcggcaaaacaacaatttgccaattattggcgcaattcatgggtcgagaactgatcacactaaatgcccatcaaaacacagaaactggagacatattaggtgctcaaagacctgttcgtaacaggtctgaaattcaatataagctaataaaatccttaaaaacagcattgaatattgctaatgaccaagatgtagacttgaaagagttattacagctatattctaagtcagataataaaaatatagccgaagatgttcaactggaaatacaaaagctgagggatagtttgaatgttttatttgaatggagtgacgggcctctgattcaagctatgaggacgggaaatttttttctacttgatgaaatatcgctagcagatgattccgttcttgaaagactaaatagtgttttggagccagaaaggagtttgttgttagcagaacagggttcatccgatagccttgtaacggcttcagaaaactttcaattcttcgcaaccatgaaccctggtggagattacggtaaaaaagaattatctccagcgttaagaaatagatttactgaaatatgggtaccatccatggaagatttcaacgatgtaaacatgatcgtatcctcaaggcttttagaggacttgaaagatcttgctaatccaattgtgaaattctctgaatggtttggcaagaagctgggaggcggaaatgcaacaagtggtgtcatttctttacgtgacatacttgcatgggttgaatttattaataaagtgtttccgaaaatacagaacaagtcaactgccttaattcaaggtgcctcaatggtttttattgacgcccttggtacaaataacactgcttacttagctgaaaacgaaaatgatttaaagtcacttagaacagaatgtattatacaactattgaaactatgtggtgacgatttggaactacaacaaattgaaacgaacgaaattattgtgactcaggatgaattacaagtcggaatgttcaaaataccaagatttccagatgctcagtcttcatcctttaacttaaccgcccccactactgcctcaaacttagtaagggttgtacgggctatgcaagtacacaagccaattttacttgaaggtagtccaggtgttggtaaaacaagtttaatcaccgctcttgccaatattacaggaaataagcttacaagaatcaatttgtctgaacaaacggatctagtagatcttttcggtgcagacgctcctggtgagcgaagtggtgaatttttatggcacgatgctccgtttttaagagcaatgaagaaaggtgagtgggttttattagatgaaatgaatttagcctcccaatccgtcctagaagggttgaatgcctgtttagatcatcgaggcgaagcgtatatccccgagttggacatatcgttttcctgccaccccaattttctggtctttgctgctcaaaatcctcagtatcaaggtggtggtaggaaaggtcttcctaaatctttcgttaatcgatttagcgtggtatttattgacatgcttacatctgatgatctccttttgattgcaaaacacttatatccaagtattgagccagatatcatcgcgaaaatgattaagttaatgtctactttagaggatcaagtctgtaaaagaaaactttggggtaattctggttcaccatgggagttcaatttgagagatacattgcgttggctaaagttactcaaccaatattcgatttgcgaagatgtggacgtgtttgactttgttgatataatcgttaagcagaggttccgtactatcagcgataagaataaagcacagcttctcattgaagatatttttggtaaattctcaactaaagagaactttttcaaacttacagaagactatgttcaaattaacaacgaggtagctctaagaaatccccattaccgctatccaattacccagaatcttttcccattagagtgcaatgtcgccgtttatgaatctgttttgaaagcaatcaacaataattggccgttggtacttgttgggccctcaaactccggtaaaacggaaacgataagatttttagcttcaatcttgggtcccagagtagacgtgttttccatgaatagtgatatagatagtatggatatccttggtggttatgaacaagttgatttgactagacaaatatcatatatcactgaggagttaacaaatatcgtaagagaaataatctcgatgaatatgaagctctcaccaaatgctaccgcaatcatggaaggtttgaacttattgaaatatttgctcaataatatcgtcacacctgagaaattccaagatttcagaaatcgttttaataggttcttttcgcacttagaagggcatcccctattaaaaactatgagtatgaatattgaaaaaatgactgaaatcatcactaaggaagcttcggttaaatttgaatggtttgatggcatgttggtcaaagcagttgaaaagggccattggctaatcttagataatgctaatctttgttctccttctgttcttgatagactgaactctctattggagatagacgggtcgctgctcatcaatgaatgtagccaagaagatggccaaccaagggttctcaaaccccaccctaacttcagattatttttgaccatggatccaaaatatggtgaattatcccgagctatgagaaacagaggtgtggagatttatatcgacgaattgcacagtcgttctacagccttcgatcgcctcaccctaggctttgaacttggagagaatatagactttgtttctattgatgatggcatcaaaaaaataaaactaaatgaacctgatatgtcgataccattaaaacactatgttccatcctatttaagcagaccatgcatatttgcacaagtacatgatattttattattatctgacgaagaaccaattgaagaatctcttgctgctgttattccgatttcccatttaggggaagttggtaaatgggccaataatgtattgaattgcacggagtactcagaaaaaaagatcgcagaaaggctttatgtttttataacatttttgactgatatgggtgtcttagaaaagattaataacctatacaaacctgcaaacctaaaattccagaaggctttggggctgcatgataagcaattgacagaggaaactgtctcgcttaccttgaacgaatatgttcttccaacagtcagcaagtattcagataagatcaaatctccagagtcgttatacttattatcaagtttacgtctgctactcaactctttgaacgctctcaaattaatcaatgaaaaatcaactcatggtaaaattgacgaactgacgtatattgaattatctgcggctgcctttaacggtcgccatttgaagaatattcctcgcattccaatattctgtattctctacaatattttaacagtaatgtctgaaaaccttaagacggaaagtttattttgcggctccaaccaatatcaatattattgggatttactggtaattgtaattgcagcattagaaaccgccgttacaaaggatgaagcacgtctaagagtatataaggagttgatagatagctggattgcgtccgtaaaatccaaatcagacattgagataactcccttccttaacatcaatttggaatttaccgatgttttacagttgtcgaggggccactccataactttactatgggatatattcagaaaaaattatccgacaacctccaacagctggctagctttcgaaaagctcattaatttatctgaaaaatttgacaaagtacgtctgctccaattttctgaatcatacaattccattaaggatttgatggacgttttccggttgctaaatgatgatgtgttgaataataaattaagtgagtttaatctcttgctatcaaagttagaagatggtataaatgaattggaactaatttcaaataagtttttaaacaaaagaaaacattattttgctgacgaatttgacaatttgatcagatataccttctcagttgacacagccgagctaataaaagaacttgctcccgcttcttctttagccacgcaaaaacttacaaaacttattaccaacaaatacaattatccgcctatctttgatgttctttggacagaaaaaaatgctaaattgacttcctttacttctaccatattttcatcccagtttctcgaagatgtcgttcgtaaatctaataatttgaaatcattttcgggaaatcagatcaaacaatctattagtgacgcagaattgctactttcctccactatcaagtgttcacctaacctacttaagagccaaatggagtactataaaaatatgttactgtcatggctcagaaaagttattgatattcacgtcggcggggactgcttgaaattgactttgaaagaactttgctctctcatagaagaaaaaactgcttcagagacacgcgtgacttttgcagaatacatctttcccgctctagatttggctgaaagttcgaaatcattagaagaactgggagaagcttggatcacatttggtacaggtttgcttctgctattcgtcccagattctccctatgatccggcaatacacgattacgttttatatgatttatttttgaagacaaagacattttctcaaaacctaatgaaaagttggagaaatgttcgtaaagtaatcagtggcgatgaggagattttcacagaaaaacttatcaataccataagcgatgacgacgcacctcaatcccctagggtatatcgtacaggcatgtctattgactctttatttgatgaatggatggcatttttgtcgtcaactatgagttctcgtcaaataaaagagctagtgagttcctacaagtgcaattcagatcaatcggatcgtagattagaaatgctccaacaaaatagtgcacattttttgaatcgtctcgaaagcggttattcaaaatttgctgatttaaatgatatcctcgcgggatatatttacagtatcaactttggctttgatttattgaagcttcaaaaatctaaggatagagcatcattccaaatttctcctttatggagtatggaccctatcaatatttcatgcgcagagaatgttttaagcgcttatcatgagctgtcaaggttcttcaaaaagggtgatatggaagatacttcgattgaaaaggttttgatgtacttcttgacgctgtttaagttccataagagggatacaaatttactggaaatttttgaggctgctttgtatactctgtattcaagatggtctgtgagacgtttcagacaggagcaggaggaaaacgaaaagtcaaatatgttcaaattcaatgataattcagatgattacgaggcagactttagaaagctgtttccagattatgaggacacagctttggtaactaatgaaaaagatatttcgagtcctgaaaatcttgatgacatctatttcaagcttgccgacacatatatctcggtatttgacaaagatcatgacgccaacttttcttctgagttgaagagcggtgcgataataacaacaattttgagtgaagatttaaaaaacaccaggatagaagagttgaaaagcggatcgttgtctgctgtgattaatacacttgatgcagaaacacaatctttcaaaaacacggaagtttttggtaatatcgatttttaccacgatttctctattccggagtttcaaaaagcaggtgatatcattgaaactgtgcttaagtcagtcttgaaattgttgaagcagtggccagaacatgccaccctcaaagaattatatcgagtttcccaagaatttttaaactaccccattaaaacacccttagcaagacagcttcaaaagatcgaacaaatatatacatacctagctgaatgggaaaaatacgcttcctcggaagtatccctgaataacaccgttaaactgattacagatttgatagtttcatggagaaaactagaattacgcacctggaaaggtcttttcaactcggaagacgcaaaaaccagaaaatctattggaaaatggtggttttatttgtacgagtcaattgtcatttcaaattttgttagtgaaaagaaggaaacggcccctaacgctacacttttggtaagctcacttaacttattttttagtaagagtacattgggcgaattcaacgccaggctagatcttgtaaaagcattctacaagcacattcaactaattggattgaggagctcgaagatagcgggcttgctccataatactataaaattctattatcagttcaaaccattaattgatgagcggattacgaatggaaaaaagagtctggaaaaagaaattgacgatataattcttttagccagttggaaagatgttaacgttgatgccctgaaacaaagttctcgtaagtctcataacaacctttacaaaattgtcagaaaataccgtgatttgctaaatggggatgcgaaaaccattattgaggccggtcttttgtattccaacgaaaataaactaaaactccctactttaaaacaacatttttacgaagaccccaacttagaggcttcgaaaaatttggtgaaagaaatttctacttggagtatgagagctgcgccattaaggaatattgacacggtagcaagtaacatggactcctacttggaaaagatatcatcacaggaattccctaacttcgcagatttagcatcggacttttatgctgaagctgaaaggttacgtaaggaaacccctaatgtatatacaaaggagaacaaaaagaggttggcatacttgaagactcaaaaaagtaaacttttaggtgatgcattgaaagaattgagaagaatcggtttaaaagtcaattttagggaagacattcaaaaagttcaatcttctacaacaactattttggcaaacattgcccctttcaataatgaatatttaaattcgtcagacgcattctttttcaaaatccttgaccttttacccaagctgagaagcgctgcatcgaatccaagtgatgatatccctgttgctgctatagaaagaggtatggcactcgcacagagtttgatgttttccctgattacagttcgtcaccctctatcagagttcacgaatgattactgtaagattaatggtatgatgttagacctagaacactttacttgcttaaagggcgatattgttcattcttcattaaaagcgaatgtagataatgtcagattgtttgaaaagtggctgccttctttgttagactatgccgcacagaccttgtctgttatttcgaaatactcagcaacttcagaacaacaaaagatcttgttagatgcaaaatcgaccttatcttcgtttttcgtacacttcaattccagtcgaatttttgattcttcatttatcgagtcatattctagatttgagttattcattaatgaattattgaagaagcttgaaaatgcaaaggagacagggaacgctttcgtttttgatatcattatagagtggatcaaagcaaataaagggggtcctattaaaaaggaacagaagagaggcccttcggtggaagatgttgaacaggctttccgccgtactttcacatctattatattatctttccagaaggtaattggagatggaattgaatctatatccgaaactgatgataactggttatcagctagcttcaagaaagttatggtaaacgttaaactattacgatccagtgttgtttctaaaaatatagagacagcattatccttgttgaaggactttgattttaccactactgaatcaatttacgttaaatcagttatatcctttacactaccggtaatcacacgttattacaacgcaatgaccgtggttcttgaaagatctagaatctactacacgaacacaagtcgtggtatgtacattctatcgacgatattgcatagcttagccaaaaatgggttctgttctccgcagccaccatctgaagaagttgacgacaaaaacttgcaagagggtacaggcttgggagacggtgaaggtgctcaaaataacaataaagacgtcgaacaagacgaagatttgactgaggatgcacaaaacgaaaacaaagaacaacaagataaagatgagagggatgacgagaatgaagatgatgcagttgagatggagggcgatatggctggtgaattggaagatttgtctaatggtgaagaaaatgatgatgaagatactgatagcgaagaagaagaattagatgaagaaattgatgacctgaatgaagatgaccccaacgctattgatgataaaatgtgggatgataaggcaagtgataattcaaaagaaaaagatacagaccagaatttagatggaaaaaatcaagaggaagatgtacaagctgctgaaaatgacgaacaacagcgggataacaaggaaggaggggatgaggacccaaatgcacctgaagatggcgatgaggaaattgaaaacgatgaaaatgcagaagaggaaaacgacgttggtgaacaggaggacgaagttaaagatgaagaaggcgaggatttggaggctaatgttcctgaaatcgaaaccctagaccttcctgaagatatgaatttagattcagagcatgaagaatcagacgaagatgttgatatgtcagatggaatgcctgatgacctaaacaaggaagaggttggaaacgaagacgaagaagtcaaacaagaatccggtatcgaaagtgataatgaaaacgacgaacctggtcctgaggaagatgccggcgagacagaaacagctcttgacgaagaagaaggtgctgaagaggatgtggatatgactaatgatgagggaaaggaagacgaagaaaatggcccagaagagcaagccatgtctgatgaagaagagttaaagcaagatgctgctatggaagaaaacaaagagaaaggaggtgagcagaatacagaaggtcttgatggcgttgaggaaaaggctgatactgaagacatcgatcaagaagctgccgttcaacaagattctggatccaaaggtgctggtgctgatgctacggacacacaagaacaggacgatgttggaggttcaggaacgactcagaatacctatgaagaagatcaagaagatgtgacaaagaataatgaagaatcacgcgaagaggctacggctgctttaaagcaactaggtgatagcatgaaagaatatcatagacgtcgtcaagatataaaagaagcacaaactaatggcgaagaggacgaaaatttggaaaaaaacaatgaacgtcccgatgaatttgaacatgttgagggtgcaaatactgaaacagatacgcaagctttaggttctgcaacacaggatcaattacaaaccattgatgaagacatggccattgatgatgatagggaggagcaagaagtggaccagaaagagttagtagaagacgccgatgatgaaaaaatggatattgatgaagaagagatgctatctgatatcgacgcgcatgacgctaacaatgacgttgacagcaaaaagtcaggattcatcggtaaaagaaagagtgaggaagattttgagaacgaactttcaaatgaacacttctcggctgatcaagaggatgacagtgaaatacaatctttaattgaaaacattgaggataatccacctgatgcaagtgctagtttgacaccggaaagatcgttagaagaatcccgtgaattgtggcataaaagtgaaatttcgaccgccgatttagtatcacgtcttggagaacaattaagactaatcttggaacctaccttggctacaaagctgaagggtgattacaaaacaggtaagagactgaatatgaaacggatcattccatatattgcctcacaattccgtaaagataaaatctggttgagaagaactaaaccaagcaaacgtcagtatcaaataatgattgcgcttgatgattctaagtctatgagcgaatctaaatgcgttaaactcgcttttgatagtttatgcttggtctccaagacgttaactcagctagaggctggagggttatctattgtcaaattcggtgaaaatattaaagaagttcactcatttgaccaacaatttagtaacgaatctggcgcaagagcttttcaatggtttggtttccaagaaactaaaacagacgttaagaaacttgtggctgaatctactaaaatttttgaacgtgctcgcgctatggtacataatgaccaatggcaactagaaattgtaatctctgatggtatttgcgaagaccatgaaacaatacaaaaactggtccgccgtgctagagaaaacaaaattatgctggtttttgtcatcatagatggtattacttctaatgaatccatcttagacatgagccaagtgaactacattccagatcagtatggcaatccgcaattaaagattaccaaatacttggacacatttccttttgaattttatgttgttgtacacgatataagcgaactacccgaaatgctttcactgattttgcgtcaatactttacagacctggcatccagctaa

SEQ ID NO: 7398 - DNA, 14733 bp, Artificial Sequence
  Description of Artificial Sequence: Synthetic polynucleotide
atgtcccaggatagaattttgttagatttagacgtagttaaccaaaggttaattctcttcaattctgcttttccctctgatgctattgaagcgcccttccactttagcaacaaggaatctacttctgagaatttagacaatttagcaggaactatattacatagccgttccatcactggtcatgttttcctttacaaacatatttttttagagatagtggcacgttggataaaggactccaaaaaaaaagattacgttcttgtaattgaaaagttggcaagtataattacaatatttcccgttgcaatgccattaattgaagactatttagataaagagaatgatcatttcatcactattcttcaaaatccatccacacaaaaggattccgacatgtttaaaatattattagcatactataggttattatatcacaataaagaagtatttgcacgcttcattcaacccgacattttataccaacttgtggatttactcaccaaagaacaagaaaatcaggttgttatatttttggcattaaaggttttatctttatacttagacatgggagaaaaaacattaaacgatatgctcgacacttatataaaaagccgcgattctttgttgggccattttgagggcgattctggaattgattacagcttcctcgaattgaacgaagctaagagatgtgcaaatttctctaaattgcccagtgttccagaatgtttcactatagaaaaaaaatctagctacttcattattgagcctcaggatttgagtactaaggtcgcgtctatctgtggcgttatcgtccctaaggtccacactatccacgacaaagtattctacccattaacctttgtccctactcataaaacggtttcctctcttcgtcaactcgggagaaagattcaaaattctactccaataatgctcattggaaaagcgggatccggtaaaacctttttaatcaatgagttgagtaaatatatgggttgccatgactccattgtgaaaattcatttaggtgaacaaactgatgccaagttattgattggtacttatacctctggtgacaagccaggcacgtttgaatggagagctggtgttctcgctaccgcggtcaaagaagggagatgggtacttatagaagacatagataaagctcctacagatgttttatctatacttttatctcttttagaaaagcgcgaattgaccattccatccagaggagagactgtaaaggctgcaaatggtttccagttaatatctactgttagaataaacgaagatcatcagaaggatagttccaataagatctataacttgaatatgattggtatgagaatctggaatgttattgaattagaggaacctagcgaagaggatttgacacacattttagcccaaaagtttcccattttgaccaaccttatccccaaattaatcgattcttacaaaaacgtcaaaagtatttatatgaacaccaagttcatttctttgaacaagggggcacacacaagagttgtatctgtaagagatttaattaagttgtgcgaaaggttagacatcttattcaaaaacaatggcatcaacaaacctgaccaattgatccagtcttctgtctacgacagtattttctccgaagccgccgactgtttcgctggcgctattggagaattcaaagctttggaacctattatacaagcaatcggcgagtctttagacattgcttccagcaggatttctttatttttgacccaacatgtgcccactttggaaaaccttgatgatagcattaaaattggaagagccgtattacttaaggaaaagttgaatatacaaaaaaaatctatgaacagcacattgttcgcatttacgaatcattctttaagattaatggaacagatttctgtttgtatacagatgactgaacctgttttattggtcggtgaaacgggtaccgggaaaactacagtcgttcaacaacttgctaagatgttagcaaaaaaattaacggtaatcaatgtttctcaacaaacagaaactggtgatcttcttggtgggtacaaacccgtaaattctaaaacagttgcagttcctatacaagaaaattttgaaactctttttaatgctacattttccttaaagaagaacgagaagtttcacaagatgttgcataggtgcttcaacaagaatcaatggaagaacgttgttaaactttggaacgaagcgtacaaaatggctcaaagcatattaaaaattacaaacactgaaaatgaaaacgaaaatgcaaagaagaagaaaagaagactcaatactcatgaaaaaaaattgttacttgacaaatgggctgacttcaatgactctgtgaagaagtttgaggcccagtctagctctattgaaaactcttttgtcttcaattttgtcgagggttctttggtaaagactatcagggctggggagtggttattgctcgatgaagtgaatttagcaaccgcagataccttagaaagtatttctgaccttctcaccgagcctgattctcgtagtattcttctttctgaaaagggtgacgctgagcctataaaagctcaccccgattttagaatatttgcttgtatgaaccccgctactgatgttggtaaaagagacttacctatgggtatcagatctagatttaccgaaatatatgtacattctccggaacgtgatattactgatttgctttccataattgataaatatattggaaagtacagcgtcagcgatgaatgggtaggaaatgacatcgctgaactttaccttgaagccaaaaaactctccgataacaatactatagttgatggctctaaccaaaaaccacactttagtatccgtaccttgacgcgtacattgctttatgttactgatattattcatatctacggtttacgccgttccttatatgatggattctgtatgagttttttgactttattagaccaaaaatctgaggccattttgaagccagtaatagaaaaattcacattggggaggttgaaaaatgtcaagtctatcatgtctcagacacctccctctccaggaccagattatgttcagtttaagcattattggatgaaaaagggccctaatacaattcaagaacaagctcactatatcattacgccttttgttgaaaagaatatgatgaatttggtaagagctacaagtggcaaaagatttcctgtgcttattcaaggtccaacttcttctggaaaaaccagtatgatcaaatatcttgcggatataacgggccataagtttgtccgtataaataaccatgagcatacagatttacaggaatatttaggtacatatgttaccgatgataccggaaagctttcttttaaggaaggtgttttagtcgaggcattaagaaaaggatattggattgttttggatgaattaaatcttgccccaaccgatgttttagaagccttaaataggttacttgacgataacagagaactttttattccagaaacacaagaagttgtacatcctcatcctgatttccttctttttgctacccagaatccacctgggatatacggtggccgtaaaattctttctagagcttttaggaatcgttttttggagttgcacttcgacgatattccgcaagatgaattagaaattatcttacgtgagcgctgccaaattgccccatcttatgcaaagaaaatcgttgaagtataccgccaattatccatcgaacgttccgcttccaggttgttcgaacagaaaaatagttttgcaactttacgtgatcttttccgctgggctttaagggacgcagtgggatatgagcagcttgctgccagtggctatatgcttcttgcagaaaggtgcagaactccacaagaaaaagttacagtcaaaaagactttagaaaaagtaatgaaagttaaattagatatggaccaatattatgcaagtttagaagataaatccttagaagccattggctctgttacttggacaaaaggaatgcgccgtctttccgtcttagtttctagttgtttaaagaataaggagccagtattgttagtaggtgaaactgggtgcggcaaaacaacaatttgccaattattggcgcaattcatgggtagagaattgatcacattaaatgcccatcaaaacacagaaactggagacatattaggtgctcaaagacctgttcgtaacaggtctgaaattcaatataagttaataaaatccttaaaaacagcattgaatattgctaatgaccaagatgtagacttgaaagagttattacagttatattctaagagtgataataaaaatatagccgaagatgttcaattggaaatacaaaagttaagggatagtttgaatgttttatttgaatggagtgacgggcctttgattcaagctatgaggacgggaaatttttttttacttgatgaaatatctttggcagatgattccgttcttgaaagattgaatagtgttttggagccagaaaggagtttgttgttagcagaacagggttcttccgatagccttgtaacggcttctgaaaactttcaattcttcgcaaccatgaaccctggtggagattacggtaaaaaagaattatctccagcgttaagaaatagatttactgaaatatgggtaccatccatggaagatttcaacgatgtaaacatgatcgtatccagcaggcttttagaggacttgaaagatcttgctaatccaattgtgaaattctctgaatggtttggcaagaagttgggaggcggaaatgcaacaagtggtgtcatttctttacgtgacatacttgcatgggttgaatttattaataaagtgtttccgaaaatacagaacaagtctactgccttaattcaaggtgcctctatggtttttattgacgcccttggtacaaataacactgcttacttagctgaaaacgaaaatgatttaaagtctcttagaacagaatgtattatacaattattgaaattatgtggtgacgatttggaattacaacaaattgaaacgaacgaaattattgtgactcaggatgaattacaagtcggaatgttcaaaataccaagatttccagatgctcagtcttcttcctttaacttaaccgcccccactactgcctccaacttagtaagggttgtaagagctatgcaagtacacaagccaattttacttgaaggtagtccaggtgttggtaaaacaagtttaatcaccgctcttgccaatattacaggaaataagcttacaagaatcaatttgtctgaacaaacggatttagtagatcttttcggtgcagacgctcctggtgagagaagtggtgaatttttatggcacgatgctccgtttttaagagcaatgaagaaaggtgagtgggttttattagatgaaatgaatttagcctcccaatccgtcttggaagggttgaatgcctgtttagatcatcgtggcgaagcgtatatccccgagttggacatatccttttcctgccaccccaattttttagtctttgctgctcaaaatcctcagtatcaaggtggtggtaggaaaggtcttcctaaatctttcgttaatagatttagcgtggtatttattgacatgcttacatctgatgatctccttttgattgcaaaacacttatatccaagtattgagccagatatcatcgcgaaaatgattaagttaatgtctactttagaggatcaagtctgtaaaagaaaactttggggtaattctggttctccatgggagttcaatttgagagatacattgcgttggttaaagttactcaaccaatattctatttgcgaagatgtggacgtgtttgactttgttgatataatcgttaagcagaggttccgtactatcagcgataagaataaagcacagcttctcattgaagatatttttggtaaattctctactaaagagaactttttcaaacttacagaagactatgttcaaattaacaacgaggtagctttgagaaatccccattaccgctatccaattacccagaatcttttcccattagagtgcaatgtcgccgtttatgaatctgttttgaaagcaatcaacaataattggccgttggtacttgttgggccctctaactccggtaaaacggaaacgataagatttttagcttctatcttgggtcccagagtagacgtgttttccatgaatagtgatatagatagtatggatatccttggtggttatgaacaagttgatttgactagacaaatatcttatatcactgaggagttaacaaatatcgtaagagaaataatctctatgaatatgaagctctctccaaatgctaccgcaatcatggaaggtttgaacttattgaaatatttgctcaataatatcgtcacacctgagaaattccaagatttcagaaatcgttttaataggttcttttctcacttagaagggcatcccttattaaaaactatgagtatgaatattgaaaaaatgactgaaatcatcactaaggaagcttctgttaaatttgaatggtttgatggcatgttggtcaaagcagttgaaaagggccattggttgatcttagataatgctaatctttgttctccttctgttcttgatagattgaactctttgttggagatagacgggtctttactcatcaatgaatgtagccaagaagatggccaaccaagggttctcaaaccccaccctaacttcagattatttttgaccatggatccaaaatatggtgaattatccagagctatgagaaacagaggtgtggagatttatatcgacgaattgcacagtcgttctacagccttcgatcgcctcaccttaggctttgaacttggagagaatatagactttgtttctattgatgatggcatcaaaaaaataaaattgaatgaacctgatatgagtataccattaaaacactatgttccatcctatttaagcagaccatgcatatttgcacaagtacatgatattttattattatctgacgaagaaccaattgaagaatctcttgctgctgttattccgatttcccatttaggggaagttggtaaatgggccaataatgtattgaattgcacggagtactctgaaaaaaagatcgcagaaaggctttatgtttttataacatttttgactgatatgggtgtcttagaaaagattaataacctttacaaacctgcaaacttgaaattccagaaggctttggggttgcatgataagcaattgacagaggaaactgtctcccttaccttgaacgaatatgttcttccaacagtcagcaagtattctgataagatcaaatctccagagtctttatacttattatccagtttacgtttgttgctcaactctttgaacgctctcaaattaatcaatgaaaaatctactcatggtaaaattgacgaattgacgtatattgaattatctgcggctgcctttaacggtcgccatttgaagaatattcctcgcattccaatattctgtattctctacaatattttaacagtaatgtctgaaaaccttaagacggaaagtttattttgcggctccaaccaatatcaatattattgggatttattggtaattgtaattgcagcattagaaaccgccgttacaaaggatgaagcacgtttaagagtatataaggagttgatagatagctggattgcgtccgtaaaatccaaaagtgacattgagataactcccttccttaacatcaatttggaatttaccgatgttttacagttgagtaggggccactccataactttattatgggatatattcagaaaaaattatccgacaacctccaacagctggttggctttcgaaaagctcattaatttatctgaaaaatttgacaaagtacgtttgctccaattttctgaatcttacaattccattaaggatttgatggacgttttcagattgttgaatgatgatgtgttgaataataaattaagtgagtttaatctcttgttatccaagttagaagatggtataaatgaattggaattgatttctaataagtttttaaacaaaagaaaacattattttgctgacgaatttgacaatttgatcagatataccttctctgttgacacagccgagttgataaaagaacttgctcccgcttcttctttagccacgcaaaaacttacaaaacttattaccaacaaatacaattatccgcctatctttgatgttctttggacagaaaaaaatgctaaattgacttcctttacttctaccatattttcttcccagtttctcgaagatgtcgttcgtaaatctaataatttgaaaagtttttctggaaatcagatcaaacaatctattagtgacgcagaattgttactttcctccactatcaagtgttctcctaacttacttaagagccaaatggagtactataaaaatatgttattatcttggctcagaaaagttattgatattcacgtcggcggggactgcttgaaattgactttgaaagaactttgctctctcatagaagaaaaaactgcttctgagacacgcgtgacttttgcagaatacatctttcccgctttagatttggctgaaagttctaaatctttagaagaattaggagaagcttggatcacatttggtacaggtttgcttttattattcgtcccagattctccctatgatccggcaatacacgattacgttttatatgatttatttttgaagacaaagacattttctcaaaacttgatgaaaagttggagaaatgttcgtaaagtaatcagtggcgatgaggagattttcacagaaaaacttatcaataccataagcgatgacgacgcacctcaatcccctagggtatatcgtacaggcatgtctattgactctttatttgatgaatggatggcatttttgagttctactatgagttctcgtcaaataaaagagttggtgagttcctacaagtgcaattctgatcaatctgatcgtagattagaaatgctccaacaaaatagtgcacattttttgaatcgtctcgaaagcggttattctaaatttgctgatttaaatgatatcctcgcgggatatatttacagtatcaactttggctttgatttattgaagcttcaaaaatctaaggatagagcatctttccaaatttctcctttatggagtatggaccctatcaatatttcttgcgcagagaatgttttaagcgcttatcatgagttatctaggttcttcaaaaagggtgatatggaagatacttctattgaaaaggttttgatgtacttcttgacgttgtttaagttccataagagggatacaaatttattggaaatttttgaggctgctttgtatactttatattctagatggtctgtgagacgtttcagacaggagcaggaggaaaacgaaaagagcaatatgttcaaattcaatgataattctgatgattacgaggcagactttagaaagttatttccagattatgaggacacagctttggtaactaatgaaaaagatatttccagtcctgaaaatcttgatgacatctatttcaagcttgccgacacatatatctctgtatttgacaaagatcatgacgccaacttttcttctgagttgaagagcggtgcgataataacaacaattttgagtgaagatttaaaaaacaccaggatagaagagttgaaaagcggatctttgtctgctgtgattaatacacttgatgcagaaacacaatctttcaaaaacacggaagtttttggtaatatcgatttttaccacgatttctctattccggagtttcaaaaagcaggtgatatcattgaaactgtgcttaagtctgtcttgaaattgttgaagcagtggccagaacatgccaccctcaaagaattatatagagtttcccaagaatttttaaactaccccattaaaacacccttagcaagacagcttcaaaagatcgaacaaatatatacatacttggctgaatgggaaaaatacgcttccagtgaagtatccttgaataacaccgttaaattgattacagatttgatagtttcctggagaaaattagaattacgcacctggaaaggtcttttcaactctgaagacgcaaaaaccagaaaatctattggaaaatggtggttttatttgtacgagtctattgtcatttctaattttgttagtgaaaagaaggaaacggcccctaacgctacacttttggtaagctctcttaacttattttttagtaagagtacattgggcgaattcaacgccaggttagatcttgtaaaagcattctacaagcacattcaattgattggattgaggagctctaagatagcgggcttgctccataatactataaaattctattatcagttcaaaccattaattgatgagagaattacgaatggaaaaaagagtttagaaaaagaaattgacgatataattcttttagccagttggaaagatgttaacgttgatgccttgaaacaaagttctcgtaagtctcataacaacctttacaaaattgtcagaaaataccgtgatttgttgaatggggatgcgaaaaccattattgaggccggtcttttgtattccaacgaaaataaattgaaactccctactttaaaacaacatttttacgaagaccccaacttagaggcttccaaaaatttggtgaaagaaatttctacttggagtatgagagctgcgccattaaggaatattgacacggtagcaagtaacatggactcctacttggaaaagatatcttctcaggaattccctaacttcgcagatttagcaagtgacttttatgctgaagctgaaaggttacgtaaggaaacccctaatgtatatacaaaggagaacaaaaagaggttggcatacttgaagactcaaaaaagtaaacttttaggtgatgcattgaaagaattgagaagaatcggtttaaaagtcaattttagggaagacattcaaaaagttcaatcttctacaacaactattttggcaaacattgcccctttcaataatgaatatttaaattcttctgacgcattctttttcaaaatccttgaccttttacccaagttgagaagcgctgcatctaatccaagtgatgatatccctgttgctgctatagaaagaggtatggcactcgcacagagtttgatgttttccttgattacagttcgtcaccctttatctgagttcacgaatgattactgtaagattaatggtatgatgttagacttggaacactttacttgcttaaagggcgatattgttcattcttctttaaaagcgaatgtagataatgtcagattgtttgaaaagtggttaccttctttgttagactatgccgcacagaccttgtctgttatttccaaatacagtgcaacttctgaacaacaaaagatcttgttagatgcaaaatctaccttatcttcttttttcgtacacttcaattccagtagaatttttgattcttcttttatcgagtcttattctagatttgagttattcattaatgaattattgaagaagcttgaaaatgcaaaggagacagggaacgctttcgtttttgatatcattatagagtggatcaaagcaaataaagggggtcctattaaaaaggaacagaagagaggcccttctgtggaagatgttgaacaggctttccgccgtactttcacatctattatattatctttccagaaggtaattggagatggaattgaatctatatccgaaactgatgataactggttatctgctagcttcaagaaagttatggtaaacgttaaattattaagatccagtgttgtttctaaaaatatagagacagcattatccttgttgaaggactttgattttaccactactgaaagtatttacgttaaatctgttatatcctttacattgccggtaatcacacgttattacaacgcaatgaccgtggttcttgaaagatctagaatctactacacgaacacaagtcgtggtatgtacattttatctacgatattgcatagcttagccaaaaatgggttctgttctccgcagccaccatctgaagaagttgacgacaaaaacttgcaagagggtacaggcttgggagacggtgaaggtgctcaaaataacaataaagacgtcgaacaagacgaagatttgactgaggatgcacaaaacgaaaacaaagaacaacaagataaagatgagagggatgacgagaatgaagatgatgcagttgagatggagggcgatatggctggtgaattggaagatttgtctaatggtgaagaaaatgatgatgaagatactgatagcgaagaagaagaattagatgaagaaattgatgacttgaatgaagatgaccccaacgctattgatgataaaatgtgggatgataaggcaagtgataattctaaagaaaaagatacagaccagaatttagatggaaaaaatcaagaggaagatgtacaagctgctgaaaatgacgaacaacagagagataacaaggaaggaggggatgaggacccaaatgcacctgaagatggcgatgaggaaattgaaaacgatgaaaatgcagaagaggaaaacgacgttggtgaacaggaggacgaagttaaagatgaagaaggcgaggatttggaggctaatgttcctgaaatcgaaaccttagaccttcctgaagatatgaatttagattctgagcatgaagaaagtgacgaagatgttgatatgagtgatggaatgcctgatgacttgaacaaggaagaggttggaaacgaagacgaagaagtcaaacaagaatccggtatcgaaagtgataatgaaaacgacgaacctggtcctgaggaagatgccggcgagacagaaacagctcttgacgaagaagaaggtgctgaagaggatgtggatatgactaatgatgagggaaaggaagacgaagaaaatggcccagaagagcaagccatgtctgatgaagaagagttaaagcaagatgctgctatggaagaaaacaaagagaaaggaggtgagcagaatacagaaggtcttgatggcgttgaggaaaaggctgatactgaagacatcgatcaagaagctgccgttcaacaagattctggatccaaaggtgctggtgctgatgctacggacacacaagaacaggacgatgttggaggttctggaacgactcagaatacctatgaagaagatcaagaagatgtgacaaagaataatgaagaatctcgcgaagaggctacggctgctttaaagcaattgggtgatagcatgaaagaatatcatagacgtcgtcaagatataaaagaagcacaaactaatggcgaagaggacgaaaatttggaaaaaaacaatgaacgtcccgatgaatttgaacatgttgagggtgcaaatactgaaacagatacgcaagctttaggttctgcaacacaggatcaattacaaaccattgatgaagacatggccattgatgatgatagggaggagcaagaagtggaccagaaagagttagtagaagacgccgatgatgaaaaaatggatattgatgaagaagagatgctttctgatatcgacgcgcatgacgctaacaatgacgttgacagcaaaaagagtggattcatcggtaaaagaaagagtgaggaagattttgagaacgaactttctaatgaacacttcagtgctgatcaagaggatgacagtgaaatacaatctttaattgaaaacattgaggataatccacctgatgcaagtgctagtttgacaccggaaagatctttagaagaatcccgtgaattgtggcataaaagtgaaatttctaccgccgatttagtatcccgtcttggagaacaattaagattgatcttggaacctaccttggctacaaagttgaagggtgattacaaaacaggtaagagattgaatatgaaaagaatcattccatatattgcctctcaattccgtaaagataaaatctggttgagaagaactaaaccaagcaaacgtcagtatcaaataatgattgcgcttgatgattctaagtctatgagcgaatctaaatgcgttaaactcgcttttgatagtttatgcttggtctccaagacgttaactcagttggaggctggagggttatctattgtcaaattcggtgaaaatattaaagaagttcacagttttgaccaacaatttagtaacgaatctggcgcaagagcttttcaatggtttggtttccaagaaactaaaacagacgttaagaaacttgtggctgaatctactaaaatttttgaacgtgctcgcgctatggtacataatgaccaatggcaattggaaattgtaatctctgatggtatttgcgaagaccatgaaacaatacaaaaattggtccgccgtgctagagaaaacaaaattatgcttgtttttgtcatcatagatggtattacttctaatgaatccatcttagacatgagccaagtgaactacattccagatcagtatggcaatccgcaattaaagattaccaaatacttggacacatttccttttgaattttatgttgttgtacacgatataagcgaattgcccgaaatgctttctttgattttgcgtcaatactttacagacttggcatccagctga

SEQ ID NO: 7399 - DNA, 1215 bp, Saccharomyces cerevisiae
atgggaagtttgttgagaccggttgatctggtaaatcaaccgcttggattccaagaaagatataaaattttgcagaaattattcaagcagctacaaaaggcatatgcacacacaaaaggaactaatattgaccttgaaagacttgccactcgcttagaagtccatgttgctaaaaacagcttgtctggtcagagttacaagtttaacatgagcattttactgcgggatgtgcttaaatataaaggagatctctcgaagatcaaaattaatgggcgcccccttaaaggagctaagcctcatttatcctcaattggtaatgcaaactctatcactacaaaatcaaaagcgatggaagctttaaaggctctgattttggattcgaaggtcttagagaaaaatgggtatattgttaaggaaatgcaaaataaaactaatgatgacaatagtacgcaactgtatgcaccttgtttgcgttgcagctcaaatttcaaaaaaacagacatcatggaaaagactctatgtaggtatcaccctttgaaaagaatatacaacagagataccaagaaccatcagtatccatgctgtggtgaaactactgattccgtttcttttctaaggctaggatgcaagacgttttttcaccatgtgtttagaggagaatcatatgacgagttatgcaaaatttcgaagttttctagtacagatgacattgatggtgttgagaatgttctttctcttgactgtgaaatggcttttacatcattgggctatgagatgatacgtttaacaattgtggattttttcaccggcaagacactatttgatcatgtaattcagccaataggggatattgtcgatctgaattcagacttcagtggtgtccatgagattgaccgaaccaattgcccgacgtacaaggaggcacttgatgtttttttatccgaaaacttaataaataaaaatagtattcttatagggcacggactagagaacgatctgaacgtcatgaggctatttcataataaggttatagatactgcaatactttattcaagaacaaagtttaaggtttctttgaagaacttagcgtttgaagttttgagtagaaaaatccaaaatggcgagcatgatagttctcaagatgcaatagcaacgatggacgttgttaaagtcaaaataggtatttctccaagtcaaaacaagtgggaaaaataa

SEQ ID NO: 7400 - DNA, 1215 bp, Artificial Sequence
  Description of Artificial Sequence: Synthetic polynucleotide
atgggaagtttgttgagaccggttgatttagtaaatcaaccgcttggattccaagaaagatataaaattttgcagaaattattcaagcagttacaaaaggcatatgcacacacaaaaggaactaatattgaccttgaaagacttgccactcgcttagaagtccatgttgctaaaaacagcttgtctggtcagagttacaagtttaacatgagcattttattaagagatgtgcttaaatataaaggagatctctctaagatcaaaattaatgggcgcccccttaaaggagctaagcctcatttatccagtattggtaatgcaaactctatcactacaaaatctaaagcgatggaagctttaaaggctttgattttggattctaaggtcttagagaaaaatgggtatattgttaaggaaatgcaaaataaaactaatgatgacaatagtacgcaattatatgcaccttgtttgcgttgcagcagtaatttcaaaaaaacagacatcatggaaaagactttgtgtaggtatcaccctttgaaaagaatatacaacagagataccaagaaccatcagtatccatgctgtggtgaaactactgattccgtttcttttttaaggttaggatgcaagacgttttttcaccatgtgtttagaggagaaagttatgacgagttatgcaaaatttccaagttttctagtacagatgacattgatggtgttgagaatgttctttctcttgactgtgaaatggcttttacatctttgggctatgagatgatacgtttaacaattgtggattttttcaccggcaagacattatttgatcatgtaattcagccaataggggatattgtcgatttgaatagtgacttcagtggtgtccatgagattgacagaaccaattgcccgacgtacaaggaggcacttgatgtttttttatccgaaaacttaataaataaaaatagtattcttatagggcacggattggagaacgatttgaacgtcatgaggttatttcataataaggttatagatactgcaatactttattctagaacaaagtttaaggtttctttgaagaacttagcgtttgaagttttgagtagaaaaatccaaaatggcgagcatgatagttctcaagatgcaatagcaacgatggacgttgttaaagtcaaaataggtatttctccaagtcaaaacaagtgggaaaaatga

SEQ ID NO: 7401 - DNA, 1458 bp, Saccharomyces cerevisiae
atgtctggccaaaagggcgagatcgtggtttatacaaaagagttagaaactacccccgagcttttaccaaaccatgaagttttcaagattaggattggccaaaagctatttgagatctcaggtgctacattgaattcggatgcgcccaattttttcacccaattcttcaatacgcacgataaaaatacgattctatttgttgatagatcggaagacgtgttcatcataatatacagacatttacaaggttattttcccgatattaagaacgaagtacaatttacctgtcttttcgcggacgcattatattttcagttacccaagttagttaaactcataaaagaatacgactaccacttcactaatattggaggtgttccctttaaggtaccaaaatcattattccatgaagaagggaaccggttgaactattttgaaacgatttctcgcatatcttatgaggaaattgagaagtgggagtcaaataagaagccgggctttccacctttattaccaccctcatatattgcaaggtccccagaatttttccgagatatattatctttactgggcggttccaaattagaactgtctgaggaaagaaccgcatctctgataaaagagtgtcgttattaccgtctcaacaggttggagcaggaattagtgcgggcaaaaattatatataatcccttaactaattgtcaagaagtttgcatagctcttgatagcgtctccaagaagggtgtaaccattgaaaggttaacatcacttcataccggaaaccaatctttagcggtaagcagttgtctcaatggaactgagggtgaaaaagccgctactggatttcataaaaccgagactgattcaggcaacaatgatgaatatgaacctccaacaaaaaaggtaaaacattgtattgaaagacactggagcatgttaaaataccaaaggccttatatcgatacagtttcgcacgatcttattttccaattacactctaaccagtgcaaaataatattcaacaaaaagaataagactgttcatgtagacctatccagagaggctgcagtgttgtttgaaaacaagttctcggatgttttattggaaaacccagattttaaaattgatctgtccgaatataaggtcaaacttcgtgacagtcaaatgcaagttgaatcccacttaattattcctgcatgtgtctccatttgtgacttgacggtaaatggcgcaaaatgctgtaatattttctcattagttaacgactccaaatgtaaagggagggtcttggattgcaccaatttgaaagttttgaattgcgttcatggtttgaaactacacttatcgaaatccatgtggaagctaggtacaaataatggaagaatcattctcgttgctgtaaaagccgaaaccttctctgggacgaaggaatattgcaaaatgattgattttctgtga

SEQ ID NO: 7402 - DNA, 1458 bp, Artificial Sequence
  Description of Artificial Sequence: Synthetic polynucleotide
atgtctggccaaaagggcgagatcgtggtttatacaaaagagttagaaactacccccgagcttttaccaaaccatgaagttttcaagattaggattggccaaaagttatttgagatcagtggtgctacattgaattctgatgcgcccaattttttcacccaattcttcaatacgcacgataaaaatacgattttatttgttgatagaagtgaagacgtgttcatcataatatacagacatttacaaggttattttcccgatattaagaacgaagtacaatttacctgtcttttcgcggacgcattatattttcagttacccaagttagttaaactcataaaagaatacgactaccacttcactaatattggaggtgttccctttaaggtaccaaaatctttattccatgaagaagggaacagattgaactattttgaaacgatttctcgcatatcttatgaggaaattgagaagtgggagagcaataagaagccgggctttccacctttattaccaccctcttatattgcaaggtccccagaatttttcagagatatattatctttattaggcggttccaaattagaattatctgaggaaagaaccgcatctttgataaaagagtgtcgttattaccgtctcaacaggttggagcaggaattagtgagggcaaaaattatatataatcccttaactaattgtcaagaagtttgcatagctcttgatagcgtctccaagaagggtgtaaccattgaaaggttaacatctcttcataccggaaaccaatctttagcggtaagcagttgtctcaatggaactgagggtgaaaaagccgctactggatttcataaaaccgagactgattctggcaacaatgatgaatatgaacctccaacaaaaaaggtaaaacattgtattgaaagacactggagcatgttaaaataccaaaggccttatatcgatacagtttctcacgatcttattttccaattacactctaaccagtgcaaaataatattcaacaaaaagaataagactgttcatgtagacttatccagagaggctgcagtgttgtttgaaaacaagttcagtgatgttttattggaaaacccagattttaaaattgatttatccgaatataaggtcaaacttcgtgacagtcaaatgcaagttgaatcccacttaattattcctgcatgtgtctccatttgtgacttgacggtaaatggcgcaaaatgctgtaatattttctctttagttaacgactccaaatgtaaagggagggtcttggattgcaccaatttgaaagttttgaattgcgttcatggtttgaaattacacttatccaaatccatgtggaagttgggtacaaataatggaagaatcattctcgttgctgtaaaagccgaaaccttctctgggacgaaggaatattgcaaaatgattgattttctctga

SEQ ID NO: 7403 - DNA, 531 bp, Saccharomyces cerevisiae
atgtctgacttagttaacaagaaattcccagctggcgactacaaattccaatacattgctatcagccaaagtgatgctgacagtgaatcttgtaagatgccacaaacagttgaatggtccaaattaatttctgaaaacaagaaggttatcattaccggtgctccagctgctttctccccaacctgtactgtcagccatattccaggttacatcaactacttggatgaattagttaaggaaaaggaagttgaccaagtgatcgttgttactgttgacaacccgttcgctaaccaagcgtgggctaagagtttaggtgttaaggacaccacacacatcaagtttgcctccgacccaggctgtgctttcaccaaatccattggtttcgaattagccgtcggtgacggtgtttactggagtggtagatgggccatggttgttgaaaacggtatcgttacttacgctgccaaggaaaccaacccaggtaccgatgtgaccgtttcctcagtcgaaagtgtcttggctcatttgtag

SEQ ID NO: 7404 - DNA, 531 bp, Artificial Sequence
  Description of Artificial Sequence: Synthetic polynucleotide
atgtctgacttagttaacaagaaattcccagctggcgactacaaattccaatacattgctatcagccaaagtgatgctgacagtgaatcttgtaagatgccacaaacagttgaatggtccaaattaatttctgaaaacaagaaggttatcattaccggtgctccagctgctttctccccaacctgtactgtcagccatattccaggttacatcaactacttggatgaattagttaaggaaaaggaagttgaccaagtgatcgttgttactgttgacaacccgttcgctaaccaagcgtgggctaagagtttaggtgttaaggacaccacacacatcaagtttgcctccgacccaggctgtgctttcaccaaatccattggtttcgaattagccgtcggtgacggtgtttactggagtggtagatgggccatggttgttgaaaacggtatcgttacttacgctgccaaggaaaccaacccaggtaccgatgtgaccgtttcctctgtcgaaagtgtcttggctcatttgtga

SEQ ID NO: 7405 - DNA, 402 bp, Saccharomyces cerevisiae
atgcaattttctactgtcgcttctatcgccgctgtcgccgctgtcgcttctgccgctgctaacgttaccactgctactgtcagccaagaatctaccactttggtcaccatcacttcttgtgaagaccacgtctgttctgaaactgtctccccagctttggtttccaccgctaccgtcaccgtcgatgacgttatcactcaatacaccacctggtgcccattgaccactgaagccccaaagaacggtacttctactgctgctccagttacctctactgaagctccaaagaacaccacctctgctgctccaactcactctgtcacctcttacactggtgctgctgctaaggctttgccagctgctggtgctttgttggctggtgccgctgctttgttgttgtaa

SEQ ID NO: 7406 - DNA, 402 bp, Artificial Sequence
  Description of Artificial Sequence: Synthetic polynucleotide
atgcaattttctactgtcgcttctatcgccgctgtcgccgctgtcgcttctgccgctgctaacgttaccactgctactgtcagccaagaatctaccactttggtcaccatcacttcttgtgaagaccacgtctgttctgaaactgtctccccagctttggtttccaccgctaccgtcaccgtcgatgacgttatcactcaatacaccacctggtgcccattgaccactgaagccccaaagaacggtacttctactgctgctccagttacctctactgaagctccaaagaacaccacctctgctgctccaactcactctgtcacctcttacactggtgctgctgctaaggctttgccagctgctggtgctttgttggctggtgccgctgctttgttgttgtga

SEQ ID NO: 7407 - DNA, 333 bp, Saccharomyces cerevisiae
atggggaattccaaaacaaacggtttttttactcctgagaaatacttgtacgggataatccagggcctaccacccacgcttcgaggattggcttttatttttttttttttggtggcgttttatttctttcccgctttctgggacttgtgcggagttttgagaggggcgcgcggcaaaggattcccaaaacggaaatcagacgccaatagccagcactcaaagcagttctggacccattccgattttcccatttggttcttgcgcgtgctgattccgacacgcgcgtctataaatagcatgaagtatccgcacaccgcagcgttagtgaggtga

SEQ ID NO: 7408 - DNA, 333 bp, Artificial Sequence
  Description of Artificial Sequence: Synthetic polynucleotide
atggggaattccaaaacaaacggtttttttactcctgagaaatacttgtacgggataatccagggcttaccacccacgcttagaggattggcttttatttttttttttttggtggcgttttatttctttcccgctttctgggacttgtgcggagttttgagaggggcgcgcggcaaaggattcccaaaaagaaaaagtgacgccaatagccagcactccaagcagttctggacccattccgattttcccatttggttcttgcgcgtgttgattccgacacgcgcgtctataaatagcatgaagtatccgcacaccgcagcgttagtgaggtga

SEQ ID NO: 7409 - DNA, 420 bp, Saccharomyces cerevisiae
atgggtgggcgaagtgcgcaacctcgaaggttttcttttgcgtgtcggattttacatccggcggtagcgcatgatgccatggctggctccagatacatcctcagggcaccagcatctataattagattggcgcaacatggctggctgcactgctgtcttcacttctttctttttccggcaatgaatgatgtatgttttgtggcaaaagggtccgcattgtacctgtttacagttgagattatcgtttttggtagcccttcattacggcataacgtattaagtttcttttattttgctttgccctggtttaaaagacaatgtcgattaaaagttaattttaatcgattgaaggaaataagaggaatagcgcaagttgttaggaaagcgttctttatctccaagactttgccctgtatataa

SEQ ID NO: 7410 - DNA, 420 bp, Artificial Sequence
  Description of Artificial Sequence: Synthetic polynucleotide
atgggtgggagaagtgcgcaacctagaaggttttcttttgcgtgtagaattttacatccggcggtagcgcatgatgccatggctggctccagatacatcctcagggcaccagcatctataattagattggcgcaacatggctggttgcactgctgtcttcacttctttctttttccggcaatgaatgatgtatgttttgtggcaaaagggtccgcattgtacttgtttacagttgagattatcgtttttggtagcccttctttaagacataacgtattaagtttcttttattttgctttgccctggtttaaaagacaatgtagattaaaagttaattttaatagattgaaggaaataagaggaatagcgcaagttgttaggaaagcgttctttatctccaagactttgccctgtatatga

SEQ ID NO: 7411 - DNA, 1308 bp, Saccharomyces cerevisiae
atgaccactaacgaggaattcattaggacacagatattcggtacagttttcgagatcacaaatagatacaatgatttaaaccccgttgggatgggggcatttgggttggtttgctcagccacggacactttgacatctcagccagttgccattaagaaaatcatgaaacctttttccactgcagtgctggccaaaaggacatatcgtgaactaaaactactaaaacatctaagacacgagaacttgatttgccttcaggacatatttctttctccattggaagatatatattttgtcacggaattacaaggaacagatttacatagactcttgcaaacaagacccttggaaaagcaatttgttcagtatttcctataccaaattctaaggggtttaaaatacgttcactccgcgggcgtcattcatagagatttgaaaccgagcaacattctgattaatgaaaactgtgatttgaagatttgcgatttcggtctagcaagaattcaagaccctcaaatgacaggctatgtttccactagatactacagggcacctgaaatcatgctaacgtggcaaaaatatgacgtcgaggtcgacatttggtccgctggttgtatttttgccgaaatgattgaaggtaagcctttgttccctgggaaagatcatgttcaccaattttcgatcatcactgacttgttgggatctccgccaaaggatgtgataaatactatttgttccgaaaatactctaaaatttgttacttcgttaccacacagagatccaattccattttctgaaagatttaaaacagtcgaacctgatgccgtagaccttttggaaaaaatgctggtttttgatcctaagaagagaatcactgcggcggatgccttggctcatccttattcggctccttaccacgatccaacggatgaaccagtagccgatgccaagttcgattggcactttaatgacgctgatctgcctgtcgatacctggcgtgttatgatgtactcagaaatcctagacttccataagattggtggcagtgatggacagattgatatatctgccacgtttgatgaccaagttgctgcagccaccgctgccgcggcgcaggcacaggctcaggctcaggctcaagttcagttaaacatggctgcgcattcgcataatggcgctggcactactggaaatgatcactcagatatagctggtggaaacaaagtcagcgatcatgtagctgcaaatgacaccattacggactacggtaaccaggccatacagtacgctaatgagttccaacagtaa

SEQ ID NO: 7412 - DNA, 1308 bp, Artificial Sequence
  Description of Artificial Sequence: Synthetic polynucleotide
atgaccactaacgaggaattcattaggacacagatattcggtacagttttcgagatcacaaatagatacaatgatttaaaccccgttgggatgggggcatttgggttggtttgctctgccacggacactttgacatctcagccagttgccattaagaaaatcatgaaacctttttccactgcagtgcttgccaaaaggacatatcgtgaattgaaattattgaaacatttaagacacgagaacttgatttgccttcaggacatatttctttctccattggaagatatatattttgtcacggaattacaaggaacagatttacatagactcttgcaaacaagacccttggaaaagcaatttgttcagtatttcttgtaccaaattttaaggggtttaaaatacgttcactccgcgggcgtcattcatagagatttgaaaccgagcaacattttaattaatgaaaactgtgatttgaagatttgcgatttcggtttggcaagaattcaagaccctcaaatgacaggctatgtttccactagatactacagggcacctgaaatcatgcttacgtggcaaaaatatgacgtcgaggtcgacatttggtccgctggttgtatttttgccgaaatgattgaaggtaagcctttgttccctgggaaagatcatgttcaccaattttctatcatcactgacttgttgggatctccgccaaaggatgtgataaatactatttgttccgaaaatactttgaaatttgttacttctttaccacacagagatccaattccattttctgaaagatttaaaacagtcgaacctgatgccgtagaccttttggaaaaaatgcttgtttttgatcctaagaagagaatcactgcggcggatgccttggctcatccttattctgctccttaccacgatccaacggatgaaccagtagccgatgccaagttcgattggcactttaatgacgctgatttacctgtcgatacctggcgtgttatgatgtactctgaaatcttggacttccataagattggtggcagtgatggacagattgatatatctgccacgtttgatgaccaagttgctgcagccaccgctgccgcggcgcaggcacaggctcaggctcaggctcaagttcagttaaacatggctgcgcattctcataatggcgctggcactactggaaatgatcacagtgatatagctggtggaaacaaagtcagcgatcatgtagctgcaaatgacaccattacggactacggtaaccaggccatacagtacgctaatgagttccaacagtga

SEQ ID NO: 7413 - DNA, 2295 bp, Saccharomyces cerevisiae
atggatgaacacgaggaagcagtcatcttcggtatctgccttgtggactttcatcacaaaagaggccctgaaatagaatactggtatggcttacctgagggcacccaaagtgcagaactatggccaaatttacccttccaggcccttcctgatggttctcactcgtttgaagaaacatttacttatttcacattactatatgatgaaagaagacaaaggagccctcccaacggggcaactgatctgagtgatgatagcatcaatgacaacacgactttgtttgccatatcttgctcgagacagataaagagtgatgaattggtcactaaagataaggatgtaacacgatctactgtacagaaggcaattgtagtcatctcaaggcaaccaatcttcggtcaaatcaaggacaaacttagtattgtgactaatgcttttttcttgcagcatgattttggggacaggaagataatccagtctttatacgaaaacctgaagtcgatttacacgcctgcatcattggtcagaaatgccgaaaatcgtctttatattgggttatgtctgagaaagatactacatgattttaagagaaacgctttagtcttattgaaagcaattatgcttgaaaaaaaaattatagtttacggcaacgacgtggaagctttgtgtaatttacagttcggtctgatcagcttaattccggacttgatgtcaaatttgcaggattctggcagtcctcagttgtttcaggatatttcgaaattaaatgttgtggactcgtttaaatcaagcaatcgagaatcagtgttgagattcttaggttttccattaccgattttcgaaaaaggtggactattttcaccctatactccactgcagcaaatgaatgacatacggtcagaacgtactttgttttttatgattggaagttccaacacattgcttgctgaacaaaaggaggaactgtgccacatatttgtcaatacagacaattccactgtagatattctggacaagactttgaaccccgtcctccaattgtcaagtcatgataaaaaatggattgaatctatatctggaattgtatcagacacatggaacgaaaatgatgatgaaactccaaaaaactctcaatttgaaggcagtgaggatttcattaggtggcaattcgaggactatttaacggggttactttccagtgttaaattaagtgattatttggacctgcataaagagaatgatcaagctttgaagactatacctgaggatatgctaaattccaatcccgttcatttattcaatttgaattgggttcagagttggaaagagactcaaaattttctgatattcaactcaagaacagatgatagattgttcgacttgtttcctccgaagcatatatataacggtgccgacactctgtctctattacagcaacgatttttggccacatttcataatttaaaaagaagctctagcaactcttcaagcaataaaaatggtcatcaaagcgaggaggatatcaaagaccaggaaagcatcgagtcaaaaaagtctgtttcccaaatttctgtaaatcctggaaagaatacagacaagccagcagccaacttatggaattcatggaaggaatatttcaataaaccaaagaatactgctaatgaagatgttactgaatccacagaagatctcaaaaacagaagtaaaacatcgaacgcgatacagaaagctatgatgggcttgggtttacattataaacctgatgcggagacagatcaacaaagtgaagaggtgggaaatagtgaggacaatgaagatgatgatactgatgaggactctgaggatgatgatgatgatggtggtgatgacgatgatagtgaggacgatgacgatgacgatgacggtgagggcgatgaaaatggcgatgacggtgagggcgatgaaaatggcgatgacggtgagggcgatgaaaatggcgataaggaagacagtcaagattttagcaatggttttacagacgttacgaacattaacactgatcatgataaagaaaatgaacagaattttgagggtaatgcagaaaattttaatgaggacgaaaccgttgcagataaagatattgaaggtggtcctgagagcaataaaaattccgacagtaaaactgatatttatgaaaacgatagaaatgttgaagactcatctaaaacgagaaatacagttaaaaaatccaatgaggagggcggtgcgaatgacgctgctataggtaattgtgtgcaggatgaggaaaaattatga

SEQ ID NO: 7414 - DNA, 2295 bp, Artificial Sequence
  Description of Artificial Sequence: Synthetic polynucleotide
atggatgaacacgaggaagcagtcatcttcggtatctgccttgtggactttcatcacaaaagaggccctgaaatagaatactggtatggcttacctgagggcacccaaagtgcagaattatggccaaatttacccttccaggcccttcctgatggttctcacagttttgaagaaacatttacttatttcacattattatatgatgaaagaagacaaaggagccctcccaacggggcaactgatttgagtgatgatagcatcaatgacaacacgactttgtttgccatatcttgctctagacagataaagagtgatgaattggtcactaaagataaggatgtaacaagatctactgtacagaaggcaattgtagtcatctccaggcaaccaatcttcggtcaaatcaaggacaaacttagtattgtgactaatgcttttttcttgcagcatgattttggggacaggaagataatccagtctttatacgaaaacttgaagtctatttacacgcctgcaagtttggtcagaaatgccgaaaatcgtctttatattgggttatgtttgagaaagatattacatgattttaagagaaacgctttagtcttattgaaagcaattatgcttgaaaaaaaaattatagtttacggcaacgacgtggaagctttgtgtaatttacagttcggtttgatcagcttaattccggacttgatgagtaatttgcaggattctggcagtcctcagttgtttcaggatatttccaaattaaatgttgtggactcttttaaaagtagcaatagagaatctgtgttgagattcttaggttttccattaccgattttcgaaaaaggtggattattttctccctatactccattacagcaaatgaatgacataagaagtgaacgtactttgttttttatgattggaagttccaacacattgcttgctgaacaaaaggaggaattgtgccacatatttgtcaatacagacaattccactgtagatattttggacaagactttgaaccccgtcctccaattgagcagtcatgataaaaaatggattgaatctatatctggaattgtaagtgacacatggaacgaaaatgatgatgaaactccaaaaaactctcaatttgaaggcagtgaggatttcattaggtggcaattcgaggactatttaacggggttactttccagtgttaaattaagtgattatttggacttgcataaagagaatgatcaagctttgaagactatacctgaggatatgttgaattccaatcccgttcatttattcaatttgaattgggttcagagttggaaagagactcaaaattttttaatattcaactctagaacagatgatagattgttcgacttgtttcctccgaagcatatatataacggtgccgacactttatctttattacagcaaagatttttggccacatttcataatttaaaaagaagctctagcaactcttctagcaataaaaatggtcatcaaagcgaggaggatatcaaagaccaggaaagcatcgagagtaaaaagtctgtttcccaaatttctgtaaatcctggaaagaatacagacaagccagcagccaacttatggaattcttggaaggaatatttcaataaaccaaagaatactgctaatgaagatgttactgaatccacagaagatctcaaaaacagaagtaaaacaagtaacgcgatacagaaagctatgatgggcttgggtttacattataaacctgatgcggagacagatcaacaaagtgaagaggtgggaaatagtgaggacaatgaagatgatgatactgatgaggactctgaggatgatgatgatgatggtggtgatgacgatgatagtgaggacgatgacgatgacgatgacggtgagggcgatgaaaatggcgatgacggtgagggcgatgaaaatggcgatgacggtgagggcgatgaaaatggcgataaggaagacagtcaagattttagcaatggttttacagacgttacgaacattaacactgatcatgataaagaaaatgaacagaattttgagggtaatgcagaaaattttaatgaggacgaaaccgttgcagataaagatattgaaggtggtcctgagagcaataaaaattccgacagtaaaactgatatttatgaaaacgatagaaatgttgaagactcttctaaaacgagaaatacagttaaaaaatccaatgaggagggcggtgcgaatgacgctgctataggtaattgtgtgcaggatgaggaaaaattatga

SEQ ID NO: 7415 - DNA, 2580 bp, Saccharomyces cerevisiae
atgacttataaatacaattgctgtgatgatggatcaggaaccaccgttggttcagtggtacgatttgataacgtcaccttgttaatcgatcccggttggaatccatctaaagtatcgtatgagcaatgcatcaagtactgggaaaaagtgataccggaaattgatgtaataatactatcacaaccaacaattgaatgtttaggtgctcattcccttctgtactataattttacctcgcatttcatatccagaattcaagtttacgcaactcttcctgttatcaacttagggagagtttccaccatagattcatatgcatctgcaggtgttataggtccatatgacacaaataaactcgatcttgaagatattgagatatcttttgatcatattgtacctttgaagtactcgcaattggtagatctacgatcaagatacgatggattgactttactggcgtacaatgctggtgtgtgtccaggtggttctatttggtgcattagcacatactcagagaaattggtttatgcaaagcgatggaaccacactagagataacatactaaatgctgcttctatattggacgccactggtaagcccttatcaactttgatgaggccctctgcaataattactactttggacaggtttggctcctctcaaccgtttaaaaaacgttcaaaaatctttaaagatacattaaagaaaggtttgagttcggatgggtccgttataataccggtagatatgagtggcaaatttctggacctgttcacacaagttcatgagttattatttgaaagcacaaagatcaatgcgcacacacaagtacctgtacttattctgtcttacgcgagaggaagaactctaacatatgccaaatcaatgctcgagtggctgtccccttcactacttaagacatgggaaaacagaaataatacttctccatttgaaattggatcacggatcaaaatcatcgcaccaaacgaattgagtaaatatcctggttcaaagatttgcttcgtatctgaggtaggagctttgattaatgaagtgataattaaagttggtaattctgagaagacaaccttgattttgaccaagccgagctttgaatgtgcgtcgtctttagacaagatactagaaattgttgaacaagatgaaagaaattggaaaacatttcctgaagatggtaaatcattcctctgcgataattacatttcaatagacaccataaaagaagaacccttgagtaaagaggaaacagaggcgtttaaagtacagcttaaagaaaagaaaagggacagaaataagaaaattctactggtgaaaagagagtctaagaaactggctaacggcaacgcaatcatagatgataccaacggagagagggcaatgagaaatcaagacattttagtggaaaacgtcaatggagtaccaccgattgatcatattatggggggtgacgaagatgatgatgaagaggaagaaaacgacaatttgttgaatttactcaaggataactctgagaaatcagcagcgaaaaaaaatacggaagttcctgtagacattataattcaaccaagtgccgcttcaaaacataaaatgttcccatttaaccccgctaaaatcaagaaagatgattatggtactgttgtagattttacgatgtttttacctgatgattctgacaatgttaatcaaaatagcaggaaaagacctctcaaagacggtgctaaaaccacgagccctgtaaacgaagaagataacaaaaatgaagaagaagatggttataatatgagtgatccaattagcaaaaggagcaaacaccgtgcttctcgttactcgggattttctggaaccggagaagcagaaaattttgataaccttgactatttaaagatagacaaaacgctctccaaaagaacaatctcaactgtaaatgtccaattgaaatgctccgtagtaatcctaaatttacagagtttagttgatcaaaggtctgcatctattatatggccatcgctaaaatctagaaaaatagttctttccgcccccaaacagattcaaaatgaagaaattacggcaaaacttatcaagaaaaatattgaagtggtcaacatgccattaaataagatagtggaattcagtacaacaataaagaccctggatatctccattgactccaacctcgataaccttttgaaatggcaacgtatcagtgatagttatacagttgccactgtcgttggcaggctggttaaggagagcctaccgcaagtgaacaatcatcaaaaaacagcgtcaaggagtaaactagtcttgaaaccattacacggttcatctaggagccataaaacaggtgcgttgtcaatcggtgacgttaggttagcacaattaaagaaacttctcacagagaaaaactacattgcagaatttaaaggggaaggtacacttgtcataaatgaaaaagtagcagtccgcaaaatcaatgatgcagaaactattatcgatggtacgccttccgaactttttgatactgtcaaaaaattggttacggatatgttagcaaaaatctag

SEQ ID NO: 7416 - DNA, 2580 bp, Artificial Sequence
  Description of Artificial Sequence: Synthetic polynucleotide
atgacttataaatacaattgctgtgatgatggatctggaaccaccgttggttctgtggtaagatttgataacgtcaccttgttaatcgatcccggttggaatccatctaaagtatcttatgagcaatgcatcaagtactgggaaaaagtgataccggaaattgatgtaataatattatctcaaccaacaattgaatgtttaggtgctcattcccttttatactataattttaccagtcatttcatatccagaattcaagtttacgcaactcttcctgttatcaacttagggagagtttccaccatagattcttatgcatctgcaggtgttataggtccatatgacacaaataaactcgatcttgaagatattgagatatcttttgatcatattgtacctttgaagtactctcaattggtagatttaagatctagatacgatggattgactttattggcgtacaatgctggtgtgtgtccaggtggttctatttggtgcattagcacatactctgagaaattggtttatgcaaagagatggaaccacactagagataacatattgaatgctgcttctatattggacgccactggtaagcccttatctactttgatgaggccctctgcaataattactactttggacaggtttggctcctctcaaccgtttaaaaaacgttctaaaatctttaaagatacattaaagaaaggtttgagttctgatgggtccgttataataccggtagatatgagtggcaaatttttggaccttttcacacaagttcatgagttattatttgaaagcacaaagatcaatgcgcacacacaagtacctgtacttattttatcttacgcgagaggaagaactttgacatatgccaaatctatgctcgagtggttatccccttctttacttaagacatgggaaaacagaaataatacttctccatttgaaattggaagtagaatcaaaatcatcgcaccaaacgaattgagtaaatatcctggttccaagatttgcttcgtatctgaggtaggagctttgattaatgaagtgataattaaagttggtaattctgagaagacaaccttgattttgaccaagccgagctttgaatgtgcgtcttctttagacaagatattggaaattgttgaacaagatgaaagaaattggaaaacatttcctgaagatggtaaatctttcctctgcgataattacatttctatagacaccataaaagaagaacccttgagtaaagaggaaacagaggcgtttaaagtacagcttaaagaaaagaaaagggacagaaataagaaaattttattggtgaaaagagagtctaagaaattggctaacggcaacgcaatcatagatgataccaacggagagagggcaatgagaaatcaagacattttagtggaaaacgtcaatggagtaccaccgattgatcatattatggggggtgacgaagatgatgatgaagaggaagaaaacgacaatttgttgaatttactcaaggataactctgagaaatctgcagcgaaaaaaaatacggaagttcctgtagacattataattcaaccaagtgccgcttccaaacataaaatgttcccatttaaccccgctaaaatcaagaaagatgattatggtactgttgtagattttacgatgtttttacctgatgattctgacaatgttaatcaaaatagcaggaaaagacctctcaaagacggtgctaaaaccacgagccctgtaaacgaagaagataacaaaaatgaagaagaagatggttataatatgagtgatccaattagcaaaaggagcaaacaccgtgcttctcgttactccggattttctggaaccggagaagcagaaaattttgataaccttgactatttaaagatagacaaaacgctctccaaaagaacaatctctactgtaaatgtccaattgaaatgctccgtagtaatcttgaatttacagagtttagttgatcaaaggtctgcatctattatatggccatctttgaaatctagaaaaatagttctttccgcccccaaacagattcaaaatgaagaaattacggcaaaacttatcaagaaaaatattgaagtggtcaacatgccattaaataagatagtggaattcagtacaacaataaagaccttggatatctccattgactccaacctcgataaccttttgaaatggcaacgtatcagtgatagttatacagttgccactgtcgttggcaggttggttaaggagagcttaccgcaagtgaacaatcatcaaaaaacagcgtccaggagtaaattggtcttgaaaccattacacggttcttctaggagccataaaacaggtgcgttgtccatcggtgacgttaggttagcacaattaaagaaacttctcacagagaaaaactacattgcagaatttaaaggggaaggtacacttgtcataaatgaaaaagtagcagtccgcaaaatcaatgatgcagaaactattatcgatggtacgccttccgaactttttgatactgtcaaaaaattggttacggatatgttagcaaaaatctga

SEQ ID NO: 7417 - DNA, 1431 bp, Saccharomyces cerevisiae
atgagttttagaaggattaactctagatactttgaaaatagaaaaggaagcagtatggaagaaaaaaaagcaaaggttcctccaaacgtcaacctttcgttatggagaaagaacacggtagaaagcgatgtccatcgattcaattctcttccatcaaaaattagtggggccctaactagggaacaaatatactcctatcaagtcatgtttaggattcaagaaattaccatcaaactgcgtacgaacgattttgtgcccccctccaggaaaaataggtcaccttctccgccaccagtttatgatgcccaaggtaaaagaacgaatacccgtgagcagaggtatagaaagaaactagaggatgaacgtattaaacttgttgagatagccctaaagaccatcccttacttcgttcctccggatgattacaagagacctaccaaatttcaggacaagtattatatcccggtggatcagtatcctgatgtcaattttgttggtttattattaggtcctcgtggacgtacgttaagaaagctgcaagaagattcgaattgtaagattgcaattagaggaagaggttcagtcaaagaaggtaagaatgcaagtgacttacctccaggcgccatgaactttgaggaccccttgcactgtttaattatcgcagactcggaagacaagatccaaaaaggtataaaagtttgtcaaaacattgttatcaaagcggtgacatctccggaaggccagaatgacttgaaacgaggacaactgagagaattggcggaacttaatggtactttaagagaagataacaggccctgtccaatctgtggtttaaaagatcataaaaggtacgattgtccaaacagaaaaatcccaaatatacagggcattgtttgcaaaatatgtggacaaactggacatttcagtagagactgtaactcatcgtctcaaagaatgagccgttttgacagaaacgccacggtaaataattctgcgccaatacagagcaatgacgtacactataatagcaatactcatccaattcaagcaccaaaaagatctcgttatgacaataactcgacggaacctcctttaaaatttccggcttcttcacgttatgcaccatcaccttcacctcctgcgtcacatatttcgaggcaagctcaaaacgtgacgcctacaccccctcccggcctaacatcaagtagctttagttccggagttccaggaatcgcccctcccccattacaaagccctccagagtcggaacaaccgaaattttcgctacctccacctcccggtatgactacggtacaatcctcaattgcacctcctcctggcctaagcggtcctccagggttttctaataacatgggcaatgacattaacaaacctacacctccgggactgcaagggcctcccggattataa

SEQ ID NO: 7418 - DNA, 1431 bp, Artificial Sequence
  Description of Artificial Sequence: Synthetic polynucleotide
atgagttttagaaggattaactctagatactttgaaaatagaaaaggaagcagtatggaagaaaaaaaagcaaaggttcctccaaacgtcaacctttctttatggagaaagaacacggtagaaagcgatgtccatagattcaattctcttccatctaaaattagtggggccttaactagggaacaaatatactcctatcaagtcatgtttaggattcaagaaattaccatcaaattacgtacgaacgattttgtgcccccctccaggaaaaataggtctccttctccgccaccagtttatgatgcccaaggtaaaagaacgaatacccgtgagcagaggtatagaaagaaattagaggatgaacgtattaaacttgttgagatagccttgaagaccatcccttacttcgttcctccggatgattacaagagacctaccaaatttcaggacaagtattatatcccggtggatcagtatcctgatgtcaattttgttggtttattattaggtcctcgtggacgtacgttaagaaagttacaagaagattctaattgtaagattgcaattagaggaagaggttctgtcaaagaaggtaagaatgcaagtgacttacctccaggcgccatgaactttgaggaccccttgcactgtttaattatcgcagactctgaagacaagatccaaaaaggtataaaagtttgtcaaaacattgttatcaaagcggtgacatctccggaaggccagaatgacttgaaaagaggacaattgagagaattggcggaacttaatggtactttaagagaagataacaggccctgtccaatctgtggtttaaaagatcataaaaggtacgattgtccaaacagaaaaatcccaaatatacagggcattgtttgcaaaatatgtggacaaactggacatttcagtagagactgtaactcttcttctcaaagaatgagccgttttgacagaaacgccacggtaaataattctgcgccaatacagagcaatgacgtacactataatagcaatactcatccaattcaagcaccaaaaagatctcgttatgacaataactccacggaacctcctttaaaatttccggcttcttctcgttatgcaccatctccttctcctcctgcgtctcatatttctaggcaagctcaaaacgtgacgcctacaccccctcccggcttaacatctagtagctttagttccggagttccaggaatcgcccctcccccattacaaagccctccagagagtgaacaaccgaaattttctttgcctccacctcccggtatgactacggtacaatccagtattgcacctcctcctggcttaagcggtcctccagggttttctaataacatgggcaatgacattaacaaacctacacctccgggattacaagggcctcccggattatga

SEQ ID NO: 7419 - DNA, 2064 bp, Saccharomyces cerevisiae
atggacactttagagccaacagccgttgatacgcatgtttctgcggagcagattctgcgggatgtgtacaagaaggggcaaaaagcaagaggatcgactaatattgatatattagacttggaggaacttcgagagtatcaacgaaggaagagaacagaatatgagggttatttgaagagaaaccgactggatatgggacaatggattcgttatgcgcaattcgaaatcgaacaacacgacatgaggcgcgccagatctatctttgaaagagcattattagtagatagttcattcatccccctttggatacgatacattgatgctgagctgaaagtcaaatgtattaaccatgctaggaatcttatgaacagagctattagtacgttgcccagagtagacaagttatggtacaagtatctcattgtcgaagagtcgttaaacaacgttgaaattgtacgatcactgtacaccaaatggtgctccttggagccaggggttaatgcatggaattctttcgtggattttgaaataagacagaaaaactggaacggtgtaagagagatttactcaaaatacgtcatggctcacccgcaaatgcagacatggctaaagtgggtgaggtttgaaaatagacatggtaatactgaatttacgagaagtgtgtattctttagcgatagacacagtagctaacctccaaaatttacagatttggtctgatatggaggttgcaaaattagtaaattcatttgctcattgggaagctgcgcagcaagaatacgaaagatctagtgctctttatcaaattgctatagaaaaatggccctccaatcaattgctcaaggcaggactgttggattttgaaaagcagtttggtgacataaactcaatagaagaaactattagctataaaaggaaaatggagtatgaaacaatattgagtaataacgcctatgattatgacacctggtggctgtacttggatctcatttcagaaagtttccccaaacaaataatgcaaactttcgagaaagctattgtggacagccgaccaaaagaactatcaaaaaatgttcagtggaaaaggtatatttatctgtggatgagatatatatgctatgttgagttagaattggaaaattcgcttttagaagaagaactttttcagaggttaattgacgacatcatccctcataaacatttcactttttccaaaatatggctaatgtatgctaaatttctgatacgacatgatgatgtaccgaaggcgagaaaaattttgggtaaagcaatcggtttatgtcctaaggctaaaactttcaaaggatatatcgagttggaagtgaagttgaaggaatttgatcgtgtgagaaaaatatatgagaaatttattgaatttcagccctctgatctacaaatttggtcacaatatggagaactagaagaaaatttaggagattgggatagagtaagaggtatatatacaattgcactagatgaaaattctgatttcttaacaaaggaggctaaaattgtattacttcaaaaatacataacatttgagacagaatcacaagaatttgaaaaggcaaggaagctttatagaagatatttggagctcaaccaatattccccccaaagctggatcgaattcgccatgtatcaaacttcaaccccgacggagcaacaactattagatttagcaaaactgcaaagcgaaaatgtggatgaagacatagagtttgaaattaccgatgagaataaattggaggcaagaaaagtttttgaagaggcgatagtttttttcaaggagaaggatgataaacaagggagactgtctattttggaagcgctaaaagactatgaagaaacttacggtactgaactcgatcaagaaaccgtcaagaaaagattccctaaagtaatcaaaaaagtgaggttacagaacggtgtggaagaagaattcgtggattacatttttcctgatgatatcgatgatgacaagccaaaaccatcaaagttcttggaactagccaaaaaatggaaacaggaacaggcactttga

SEQ ID NO: 7420 - DNA, 2064 bp, Artificial Sequence
  Description of Artificial Sequence: Synthetic polynucleotide
atggacactttagagccaacagccgttgatacgcatgtttctgcggagcagattttaagagatgtgtacaagaaggggcaaaaagcaagaggatctactaatattgatatattagacttggaggaacttcgtgagtatcaaagaaggaagagaacagaatatgagggttatttgaagagaaacagattagatatgggacaatggattcgttatgcgcaattcgaaatcgaacaacacgacatgaggcgcgccagatctatctttgaaagagcattattagtagatagttctttcatccccctttggataagatacattgatgctgagttgaaagtcaaatgtattaaccatgctaggaatcttatgaacagagctattagtacgttgcccagagtagacaagttatggtacaagtatctcattgtcgaagagtctttaaacaacgttgaaattgtaagatctttgtacaccaaatggtgctccttggagccaggggttaatgcatggaattctttcgtggattttgaaataagacagaaaaactggaacggtgtaagagagatttactctaaatacgtcatggctcacccgcaaatgcagacatggttaaagtgggtgaggtttgaaaatagacatggtaatactgaatttacgagaagtgtgtattctttagcgatagacacagtagctaacctccaaaatttacagatttggtctgatatggaggttgcaaaattagtaaattcttttgctcattgggaagctgcgcagcaagaatacgaaagatctagtgctctttatcaaattgctatagaaaaatggccctccaatcaattgctcaaggcaggattattggattttgaaaagcagtttggtgacataaacagcatagaagaaactattagctataaaaggaaaatggagtatgaaacaatattgagtaataacgcctatgattatgacacctggtggttatacttggatctcatttctgaaagtttccccaaacaaataatgcaaactttcgagaaagctattgtggacagcagaccaaaagaattatccaaaaatgttcagtggaaaaggtatatttatttatggatgagatatatatgctatgttgagttagaattggaaaattctcttttagaagaagaactttttcagaggttaattgacgacatcatccctcataaacatttcactttttccaaaatatggttaatgtatgctaaatttttaataagacatgatgatgtaccgaaggcgagaaaaattttgggtaaagcaatcggtttatgtcctaaggctaaaactttcaaaggatatatcgagttggaagtgaagttgaaggaatttgatcgtgtgagaaaaatatatgagaaatttattgaatttcagccctctgatttgcaaatttggtctcaatatggagaattggaagaaaatttaggagattgggatagagtaagaggtatatatacaattgcattggatgaaaattctgatttcttaacaaaggaggctaaaattgtattacttcaaaaatacataacatttgagacagaatctcaagaatttgaaaaggcaaggaagctttatagaagatatttggagctcaaccaatattccccccaaagctggatcgaattcgccatgtatcaaacttctaccccgacggagcaacaattattagatttagcaaaattacaaagcgaaaatgtggatgaagacatagagtttgaaattaccgatgagaataaattggaggcaagaaaagtttttgaagaggcgatagtttttttcaaggagaaggatgataaacaagggagattatctattttggaagcgttgaaagactatgaagaaacttacggtactgaactcgatcaagaaaccgtcaagaaaagattccctaaagtaatcaaaaaagtgaggttacagaacggtgtggaagaagaattcgtggattacatttttcctgatgatatcgatgatgacaagccaaaaccatctaagttcttggaattggccaaaaaatggaaacaggaacaggcactttga

SEQ ID NO: 7421 - DNA, 684 bp, Saccharomyces cerevisiae
atgaatggacttagagttgcagcaaaaattcagccagcacgccaaactatcatattcttgcatggattaggtgatacaggttcgggatggggatttttagctcagtatttacaacagagagaccctgccgctttccagcatactaattttgtttttcctaatgctccagagcttcatgtgacagcaaacggcggtgcattgatgcctgcttggtttgacatcttggaatgggatcctagtttttccaaagttgacagtgacggttttatgaattctttgaattccatagaaaagacggttaagcaagaaattgataaaggaattaaaccggagcagattattatcggaggtttctctcagggtgccgcattagctctcgcaacatcagttactttaccatggaaaatcggtggtatagtagctctgtcgggattttgttccatcccaggaattctgaaacaacataagaatggcattaatgtaaagacaccaatttttcatgggcatggtgacatggatccagtagttcctattggactaggtataaaggcaaaacagttctatcaagatagctgtgagatacaaaattatgaatttaaagtatacaaaggtatggcccattctacagttccagatgaattagaagacttggcttcatttatcaagaagagcttatcatcatag

SEQ ID NO: 7422 - DNA, 684 bp, Artificial Sequence
  Description of Artificial Sequence: Synthetic polynucleotide
atgaatggacttagagttgcagcaaaaattcagccagcacgccaaactatcatattcttgcatggattaggtgatacaggttctggatggggatttttagctcagtatttacaacagagagaccctgccgctttccagcatactaattttgtttttcctaatgctccagagcttcatgtgacagcaaacggcggtgcattgatgcctgcttggtttgacatcttggaatgggatcctagtttttccaaagttgacagtgacggttttatgaattctttgaattccatagaaaagacggttaagcaagaaattgataaaggaattaaaccggagcagattattatcggaggtttctctcagggtgccgcattagctctcgcaacatctgttactttaccatggaaaatcggtggtatagtagctttatctggattttgttccatcccaggaattttgaaacaacataagaatggcattaatgtaaagacaccaatttttcatgggcatggtgacatggatccagtagttcctattggattaggtataaaggcaaaacagttctatcaagatagctgtgagatacaaaattatgaatttaaagtatacaaaggtatggcccattctacagttccagatgaattagaagacttggcttcttttatcaagaagagcttatcttcttga

SEQ ID NO: 7423 - DNA, 642 bp, Saccharomyces cerevisiae
atgaaagtaaaggctacaaaactaaggataaaacaacgaaggaaaaataaggggctcaatataagcagattagatattatcagagcagaaatggatgtggtaccatctccgggtttaccagaaaaagtaaacgaaaaaagcaaaaatattcccttacctgaaggaattaaccttttatcatcaaaggagataatcgatctaattcaaacccacagacaccaattagagttatacgtcacaaaattcaatcccttaacggactttgctggaaagattcatgcattcagagatcaatttaaacaattggaagaaaattttgaagatttacatgagcaaaaagataaggtccaagccttattagaaaactgtaggattttagaatccaaatatgtagctagctggcaagattaccattccgaattttcaaaaaaatatggtgacatagcattaaaaaagaaattagaacaaaacacaaagaaacttgatgaggagagttcacagctagaaactaccacaaggtccattgactcagccgatgacctggatcagttcatcaaaaattatctggacatacgaacacaatatcacttgaggagagagaaactggcgacctgggataaacaaggtaatttgaaatactag

SEQ ID NO: 7424 - DNA, 642 bp, Artificial Sequence
  Description of Artificial Sequence: Synthetic polynucleotide
atgaaagtaaaggctacaaaattgaggataaaacaaagaaggaaaaataaggggctcaatataagcagattagatattatcagagcagaaatggatgtggtaccatctccgggtttaccagaaaaagtaaacgaaaaaagcaaaaatattcccttacctgaaggaattaaccttttatcttccaaggagataatcgatttgattcaaacccacagacaccaattagagttatacgtcacaaaattcaatcccttaacggactttgctggaaagattcatgcattcagagatcaatttaaacaattggaagaaaattttgaagatttacatgagcaaaaagataaggtccaagccttattagaaaactgtaggattttagaatccaaatatgtagctagctggcaagattaccattccgaattttccaaaaaatatggtgacatagcattaaaaaagaaattagaacaaaacacaaagaaacttgatgaggagagttctcagttagaaactaccacaaggtccattgactctgccgatgacttggatcagttcatcaaaaattatttggacataagaacacaatatcacttgaggagagagaaattagcgacctgggataaacaaggtaatttgaaatactga

SEQ ID NO: 7425 - DNA, 1710 bp, Saccharomyces cerevisiae
atgaaactgaaaactgtaagatctgcggtcctttcgtcactctttgcatcgcaggttctcggtaagataataccagcagcaaacaagcgcgacgacgactcgaattccaagttcgtcaagttgccctttcataagctttacggggactcgctagaaaatgtgggaagcgacaaaaaaccggaagtacgcctattgaagagggctgacggttatgaagaaattataattaccaaccagcaaagtttctattcggtggacttggaagtgggcacgccaccacagaacgtaacggtcctggtggacacaggctcctctgatctatggattatgggctcggataatccatactgttcttcgaacagtatgggtagtagccggagacgtgttattgacaaacgtgatgattcgtcaagcggcggatctttgattaatgatataaacccatttggctggttgacgggaacgggcagtgccattggccccactgctacgggcttaggaggcggttcaggtacggcaactcaatccgtgcctgcttcggaagccaccatggactgtcaacaatacgggacattttccacttcgggctcttctacatttagatcaaacaacacctatttcagtattagctacggtgatgggacttttgcctccggtacttttggtacggatgttttggatttaagcgacttgaacgttaccgggttgtcttttgccgttgccaatgaaacgaattctactatgggtgtgttaggtattggtttgcccgaattagaagtcacttattctggctctactgcgtctcatagtggaaaagcttataaatacgacaacttccccattgtattgaaaaattctggtgctatcaaaagcaacacatattctttgtatttgaacgactcggacgctatgcatggcaccattttgttcggagccgtggaccacagtaaatataccggcaccttatacacaatccccatcgtaaacactctgagtgctagtggatttagctctcccattcaatttgatgtcactattaatggtatcggtattagtgattctgggagtagtaacaagaccttgactaccactaaaatacctgctttgttggattccggtactactttgacttatttacctcaaacagtggtaagtatgatcgctactgaactaggtgcgcaatactcttccaggatagggtattacgtattggactgtccatctgatgatagtatggaaatagtgttcgattttggtggttttcacatcaatgcaccactttcgagttttatcttgagtactggcactacatgtcttttaggtattatcccaacgagtgatgacacaggtaccattttgggtgattcatttttgactaacgcgtacgtggtttatgatttggagaatcttgaaatatccatggcacaagctcgctataataccacaagcgaaaatatcgaaattattacatcctctgttccaagcgccgtaaaggcaccaggctatacaaacacttggtccacaagtgcatctattgttaccggtggtaacatatttactgtaaattcctcacaaactgcttcctttagcggtaacctgacgaccagtactgcatccgccacttctacatcaagtaaaagaaatgttggtgatcatatagttccatctttacccctcacattaatttctcttctttttgcattcatctga

SEQ ID NO: 7426 - DNA, 1710 bp, Artificial Sequence
  Description of Artificial Sequence: Synthetic polynucleotide
atgaaattgaaaactgtaagatctgcggtcctttcttctctctttgcatcccaggttctcggtaagataataccagcagcaaacaagcgcgacgacgactctaattccaagttcgtcaagttgccctttcataagctttacggggactctttggaaaatgtgggaagcgacaaaaaaccggaagtacgcttgttgaagagggctgacggttatgaagaaattataattaccaaccagcaaagtttctattctgtggacttggaagtgggcacgccaccacagaacgtaacggtcttggtggacacaggctcctctgatttatggattatgggcagtgataatccatactgttcttccaacagtatgggtagtagcagaagacgtgttattgacaaacgtgatgattcttctagcggcggatctttgattaatgatataaacccatttggctggttgacgggaacgggcagtgccattggccccactgctacgggcttaggaggcggttctggtacggcaactcaatccgtgcctgcttctgaagccaccatggactgtcaacaatacgggacattttccacttctggctcttctacatttagatctaacaacacctatttcagtattagctacggtgatgggacttttgcctccggtacttttggtacggatgttttggatttaagcgacttgaacgttaccgggttgtcttttgccgttgccaatgaaacgaattctactatgggtgtgttaggtattggtttgcccgaattagaagtcacttattctggctctactgcgtctcatagtggaaaagcttataaatacgacaacttccccattgtattgaaaaattctggtgctatcaaaagcaacacatattctttgtatttgaacgacagtgacgctatgcatggcaccattttgttcggagccgtggaccacagtaaatataccggcaccttatacacaatccccatcgtaaacactttaagtgctagtggatttagctctcccattcaatttgatgtcactattaatggtatcggtattagtgattctgggagtagtaacaagaccttgactaccactaaaatacctgctttgttggattccggtactactttgacttatttacctcaaacagtggtaagtatgatcgctactgaattgggtgcgcaatactcttccaggatagggtattacgtattggactgtccatctgatgatagtatggaaatagtgttcgattttggtggttttcacatcaatgcaccactttccagttttatcttgagtactggcactacatgtcttttaggtattatcccaacgagtgatgacacaggtaccattttgggtgattcttttttgactaacgcgtacgtggtttatgatttggagaatcttgaaatatccatggcacaagctcgctataataccacaagcgaaaatatcgaaattattacatcctctgttccaagcgccgtaaaggcaccaggctatacaaacacttggtccacaagtgcatctattgttaccggtggtaacatatttactgtaaattcctctcaaactgcttcctttagcggtaacttgacgaccagtactgcatccgccacttctacatctagtaaaagaaatgttggtgatcatatagttccatctttacccctcacattaatttctcttctttttgcattcatctga

SEQ ID NO: 7427 - DNA, 1527 bp, Saccharomyces cerevisiae
atgaaacttcaattggcggcagtggctacattagcagtcttaactagtccggcattcggtagagtacttcccgatgggaaatacgtcaagattcccttcacaaaaaaaaagaacggcgacaatggtgaactcagcaagagatcgaacggccatgaaaaatttgtactagctaacgagcaaagcttttattctgttgagctagccattggtacaccttcacaaaacctcactgtgctgttagacacaggctcagctgacttatgggttcctggcaagggaaacccctactgcggttctgtgatggactgtgaccagtatggcgtgttcgacaagaccaagtcgtccacgttcaaagccaacaagtcctcgcctttttatgccgcttacggtgacggaacctatgcagaaggtgcatttggtcaagataaattaaagtacaacgaattagacctcagtggtctatcgtttgccgtggccaacgaatctaactcaacctttggtgtgctcgggatcggcctttccacgcttgaagtcacctattctggaaaagtcgctattatggacaagagaagctacgagtatgataactttcccctgttcctaaaacattctggagccatcgatgcaaccgcatactctcttttcctaaatgacgagtcacagtcctccggcagcatcctcttcggcgctgtagatcacagcaagtacgagggccaactgtacactatcccgttggttaatctttataagtcgcagggttatcagcacccggtggcgttcgatgtcactttacagggcttaggactgcaaaccgacaagcgcaacatcacattgaccaccaccaagctcccagccctactcgattcaggcacaacgctaacatatctgccctcccaggcagtggctttgctagcaaagagcttgaatgcctcgtattccaagacattgggttattatgagtacacgtgtccctcgagcgacaacaaaaccagcgtggccttcgacttcggtggcttccgtatcaacgctcctctatccgactttactatgcagaccagtgtggggacctgtgtcttggcaataattccacaagcgggcaacgccaccgctatccttggtgattccttcttgagaaacgcctacgtggtctacgatttggataactacgagatttccctagctcaagccaagtatggcacggggaaagagaacgtcgaagtcatcaaatctaccgttcccagtgcaataagggcccccagttacaacaacacttggtctaactacgcctccgccacgtccggtggtaatatttttaccaccgtgcgcactttcaatggcaccagtactgccaccactacgaggtcaaccaccaccaagaagacaaactctaccactactgcaaagtcgactcataaaagcaagagggcactccagagggctgctaccaactccgcttccagtatacgctctaccttgggtttactgctagtcccctccttactcatcctttccgttttcttttcgtaa

SEQ ID NO: 7428 - DNA, 1527 bp, Artificial Sequence
  Description of Artificial Sequence: Synthetic polynucleotide
atgaaacttcaattggcggcagtggctacattagcagtcttaactagtccggcattcggtagagtacttcccgatgggaaatacgtcaagattcccttcacaaaaaaaaagaacggcgacaatggtgaactcagcaagagatctaacggccatgaaaaatttgtattggctaacgagcaaagcttttattctgttgagttggccattggtacaccttctcaaaacctcactgtgttattagacacaggctctgctgacttatgggttcctggcaagggaaacccctactgcggttctgtgatggactgtgaccagtatggcgtgttcgacaagaccaagtcttccacgttcaaagccaacaagtcctcccctttttatgccgcttacggtgacggaacctatgcagaaggtgcatttggtcaagataaattaaagtacaacgaattagacctcagtggtttatcttttgccgtggccaacgaatctaactctacctttggtgtgctcgggatcggcctttccacgcttgaagtcacctattctggaaaagtcgctattatggacaagagaagctacgagtatgataactttccccttttcttgaaacattctggagccatcgatgcaaccgcatactctcttttcttgaatgacgagagccagtcctccggcagcatcctcttcggcgctgtagatcacagcaagtacgagggccaattgtacactatcccgttggttaatctttataagtctcagggttatcagcacccggtggcgttcgatgtcactttacagggcttaggattacaaaccgacaagcgcaacatcacattgaccaccaccaagctcccagccttactcgattctggcacaacgttgacatatttaccctcccaggcagtggctttgttggcaaagagcttgaatgcctcttattccaagacattgggttattatgagtacacgtgtccctctagcgacaacaaaaccagcgtggccttcgacttcggtggcttccgtatcaacgctcctttatccgactttactatgcagaccagtgtggggacctgtgtcttggcaataattccacaagcgggcaacgccaccgctatccttggtgattccttcttgagaaacgcctacgtggtctacgatttggataactacgagatttccttggctcaagccaagtatggcacggggaaagagaacgtcgaagtcatcaaatctaccgttcccagtgcaataagggcccccagttacaacaacacttggtctaactacgcctccgccacgtccggtggtaatatttttaccaccgtgcgcactttcaatggcaccagtactgccaccactacgaggtctaccaccaccaagaagacaaactctaccactactgcaaagtctactcataaaagcaagagggcactccagagggctgctaccaactccgcttccagtatacgctctaccttgggtttattattggtcccctccttactcatcctttccgttttctttagttga

SEQ ID NO: 7429 - DNA, 378 bp, Saccharomyces cerevisiae
atgaatcgtctatatcaaaactgcatgtttctctacgtctacacagatgtttgcgtccgattgtgcgcttcgattttttacataatgctggaagcaaagtttgctctcagaattcctgcccttcgccccagttacacgtggggacaatggcgctctttcatacagtcttcattctatggccgcacttttgtggcattctctggaccgtccatgaaaaattatataactatttgctttctattgaagtctattgaagttagcgtggatagaacggcgttacatggcacatcagctgaagctagcgcaagtaattttcaacgcattcaaacgaaaaacttatctaaatacaattgtaacataccggcttgctgtgtgtga

SEQ ID NO: 7430 - DNA, 378 bp, Artificial Sequence
  Description of Artificial Sequence: Synthetic polynucleotide
atgaatcgtttatatcaaaactgcatgtttctctacgtctacacagatgtttgcgtcagattgtgcgcttccattttttacataatgttggaagcaaagtttgctctcagaattcctgcccttcgccccagttacacgtggggacaatggcgctctttcatacagtcttctttctatggccgcacttttgtggcattctctggaccgtccatgaaaaattatataactatttgctttttattgaagtctattgaagttagcgtggatagaacggcgttacatggcacatctgctgaagctagcgcaagtaattttcaacgcattcaaacgaaaaacttatctaaatacaattgtaacataccggcttgctgtgtgtga

SEQ ID NO: 7431 - DNA, 411 bp, Saccharomyces cerevisiae
atgggagaaattttagaactaactaataagaatttcatgagccacttgaaaaaggacataacttcgcaagaatccttgaaaagtagaattgaggataaaaatggtgatgtcgctagcccgaaagaggataactatcctctattgaatgaaacagcggcatggccagatggggtgattacctctgaagaaggatgttcatcttcaggtgagaaagagaattcaggcttatgttcagaagaaagttcagaagaagatccagaagaagctgaagaggaatctgcaagggcttttggagagttagttgcagtcttgcgggacaaagacataccactgaatgtattggacgaacctcagatgaaagattggcttgaaaaatacaccggtgtttatagaagctcttggcatggttga

SEQ ID NO: 7432 - DNA, 411 bp, Artificial Sequence
  Description of Artificial Sequence: Synthetic polynucleotide
atgggagaaattttagaattgactaataagaatttcatgagccacttgaaaaaggacataacttctcaagaatccttgaaaagtagaattgaggataaaaatggtgatgtcgctagcccgaaagaggataactatcctttattgaatgaaacagcggcatggccagatggggtgattacctctgaagaaggatgttcttcttctggtgagaaagagaatagtggcttatgttctgaagaaagttctgaagaagatccagaagaagctgaagaggaatctgcaagggcttttggagagttagttgcagtcttgagagacaaagacataccattgaatgtattggacgaacctcagatgaaagattggcttgaaaaatacaccggtgtttatagaagctcttggcatggttga

SEQ ID NO: 7433 - DNA, 756 bp, Saccharomyces cerevisiae
atgacagtaaaaaaaatagctattctttatacagatgaagataacgaatggagtaaaccatggggcaattttgttgatatggctatcaagctattagaacagaccaggaaattggaatgtatcgcagaagatgtcgaatatgaagtgttccacgtacaaaaaaacgtgttccctcaattgtcagatcttcagaaagatgagtatttaggcatatacatcactggttcaaaatatgattcatttgataatgaaattgaatggattatgaaattaagaagtttcttaaatgagatgctaactagcaagactgaatatccgcccgtagctggaatatgttttggtcatcaagttatcgcggctgctctaggaagttcagttggacggaatccgaaagggtttgaaggtggggttgtgtcactaaaactgaactctgtgggtcaaaagttatttggtgctcaagaattaaatctttctgaagtgcacagtgactgcgtgttcgatgtcccagagggataccaaaattgggcgtcaagtgaaaaatgtcaaaaccaaggattttacaggcaaaacagagtgctgacgtttcaaggacaccctgaattcaatagtgatgtcgctcagaaggggcttttgaagtctcaagacaagcttacccttgaagagtttaatagatacgaaagacagtgccaggagctggataacaatggcatacaagctgccaggaatatttggaggttattcttgcaaaaaatatga

SEQ ID NO: 7434 - DNA, 756 bp, Artificial Sequence
  Description of Artificial Sequence: Synthetic polynucleotide
atgacagtaaaaaaaatagctattctttatacagatgaagataacgaatggagtaaaccatggggcaattttgttgatatggctatcaagcttttagaacagaccaggaaattggaatgtatcgcagaagatgtcgaatatgaagtgttccacgtacaaaaaaacgtgttccctcaattgagtgatcttcagaaagatgagtatttaggcatatacatcactggttccaaatatgattcttttgataatgaaattgaatggattatgaaattaagaagtttcttaaatgagatgttgactagcaagactgaatatccgcccgtagctggaatatgttttggtcatcaagttatcgcggctgctttaggaagttctgttggaagaaatccgaaagggtttgaaggtggggttgtgtctttgaaattgaactctgtgggtcaaaagttatttggtgctcaagaattaaatctttctgaagtgcacagtgactgcgtgttcgatgtcccagagggataccaaaattgggcgtccagtgaaaaatgtcaaaaccaaggattttacaggcaaaacagagtgttaacgtttcaaggacaccctgaattcaatagtgatgtcgctcagaaggggcttttgaagtctcaagacaagcttacccttgaagagtttaatagatacgaaagacagtgccaggagttagataacaatggcatacaagctgccaggaatatttggaggttattcttgcaaaaaatatga

SEQ ID NO: 7435 - DNA, 2562 bp, Saccharomyces cerevisiae
atgtcatttcagattaccccaactcgagatttgaaagttattacagatgagttacaaacactttcctcatacatctttcacacaaacatagtcgatgatttgaactctttacttacatggatgagccctaatgatgccaagagtaaccatcaactacgtcctccaagccttcgtattaagaatatcattaaggttctcttccctaataacgcaaccacatcgccatatagcatgataaacactagtcaggcaaacaattcaatagttaatgagggaaatacaaacaaagagttacaactacaacttttttccacgctcaaagagttttatattttccaggttcgttatcattttttcttacattttaacaacattaattatctaaaagatatccaacgatgggaaaattattacgagtttcctttacgttacgttcctatttttgacgtaaatgtaaacgactgggcacttgaacttaattctttaagacattatctgttgaatagaaatataaagttcaaaaataatttaagaacaagattagacaaattaataatggatgatgatttcgacctggcagacaatttaatccaatggctcaaatctgctaatggttccttatcctctacggaattgatagtcaatgctctttacagcaaaatcaataaattttgtgaagataacatgagtagagtatggaataaaaggtttatgattatggaaacattcaacaaatttattaatcaatattggtctcagttctctaaattagtcggttgtccagaggatgatcacgaactgaccactacagttttcaactgttttgagtccaattttcttaggataagaacgaatgaaatctttgatatatgcgttttggcttatcctgattcaaaggttactttattggaattgaggaaaattatgaaagattttaaagactacacaaatattgtaacaacttttttgtctgatttcaagaaatacattctaaaccccagcgtaactacggtggacgctttgttgagatatgttaaaactatcaaagcatttttggtcctggatccaacagggagatgcctacattcaataaccacgtttgttaaaccttactttcaggagcggaagcacttagtaaatgtattgttatacgcaatgttggacttacctgaagaagaactaaaggagaaaattaatttcaatgtagatatgaaggcactgctctcacttgtagacactttgcacgattctgatatcaatcaagatacgaacatcaccaaaagggacaagaataaaaaaagcccctttctatggaacctcaaggtgaaaggaaagagggaattgaacaaggacctaccaataagacacgccatgctatacgaacatatactcaattattatatagcttgggtaccagagcctaatgacatgattcccggtaacatcaaatcaagttatattaagacaaatttgtttgaggtgcttttggatctatttgaatcaagagaatttttcatatcagaatttcgaaatctcttaaccgacagattattcactttgaaattttatacgttggatgaaaaatggacccgatgtttgaaattaataagagaaaaaatagtcaaattcacagaaacaagtcattccaattatataacaaacggtatattaggactcctagaaacaacagcccctgcagcagatgcagaccagtcgaatttgaatagcattgatgttatgctttgggatataaaatgtagcgaggagctctgccgtaaaatgcatgaagtagccggactggatcccataatatttccaaaatttatctcactcctctactggaagtacaactgcgatacacaaggttctaatgatcttgcatttcatttaccaatagatttagaaagggagctacagaagtattctgatatatactcacagctgaaacctgggcgcaagttacaactatgcaaagataaaggaaaagtagaaatacaattagctttcaaagatggtaggaaattagtgttagacgtttctttagaacaatgcagcgtaataaatcagtttgattctccaaatgatgagccaatttgtttatcactagagcagctttctgagtcactaaatattgctcctcccaggctaactcatttgttagatttctggattcaaaaaggtgtgcttttaaaagaaaatggaacctattccgttattgaacatagcgagatggattttgatcaagcacaaaagaccgccccaatggagattgagaacagtaactatgaactacataacgattctgagatagaaagaaaatatgaattgacacttcaaagaagtctgccattcatcgaaggaatgctgactaatttaggcgcaatgaaacttcataagatccattcttttttgaaaattaccgtgccaaaagattggggatataaccgaattactcttcaacaattagagggatatttaaacactctggccgatgagggtaggctgaagtacattgccaatggttcatatgaaatagtgaaaaatgggcataaaaactcatga

SEQ ID NO: 7436 - DNA, 2562 bp, Artificial Sequence
  Description of Artificial Sequence: Synthetic polynucleotide
atgagttttcagattaccccaactagagatttgaaagttattacagatgagttacaaacactttcctcttacatctttcacacaaacatagtcgatgatttgaactctttacttacatggatgagccctaatgatgccaagagtaaccatcaattgcgtcctccaagccttcgtattaagaatatcattaaggttctcttccctaataacgcaaccacatctccatatagcatgataaacactagtcaggcaaacaattctatagttaatgagggaaatacaaacaaagagttacaattacaacttttttccacgctcaaagagttttatattttccaggttcgttatcattttttcttacattttaacaacattaattatttgaaagatatccaaagatgggaaaattattacgagtttcctttacgttacgttcctatttttgacgtaaatgtaaacgactgggcacttgaacttaattctttaagacattatcttttgaatagaaatataaagttcaaaaataatttaagaacaagattagacaaattaataatggatgatgatttcgacttggcagacaatttaatccaatggctcaaatctgctaatggttccttatcctctacggaattgatagtcaatgctctttacagcaaaatcaataaattttgtgaagataacatgagtagagtatggaataaaaggtttatgattatggaaacattcaacaaatttattaatcaatattggtctcagttctctaaattagtcggttgtccagaggatgatcacgaattgaccactacagttttcaactgttttgagtccaattttcttaggataagaacgaatgaaatctttgatatatgcgttttggcttatcctgattctaaggttactttattggaattgaggaaaattatgaaagattttaaagactacacaaatattgtaacaacttttttgtctgatttcaagaaatacattttgaaccccagcgtaactacggtggacgctttgttgagatatgttaaaactatcaaagcatttttggtcttggatccaacagggagatgcttgcattccataaccacgtttgttaaaccttactttcaggagagaaagcacttagtaaatgtattgttatacgcaatgttggacttacctgaagaagaattgaaggagaaaattaatttcaatgtagatatgaaggcattgctctcccttgtagacactttgcacgattctgatatcaatcaagatacgaacatcaccaaaagggacaagaataaaaaaagcccctttttatggaacctcaaggtgaaaggaaagagggaattgaacaaggacttaccaataagacacgccatgctttacgaacatatactcaattattatatagcttgggtaccagagcctaatgacatgattcccggtaacatcaaatctagttatattaagacaaatttgtttgaggtgcttttggatttatttgaatctagagaatttttcatatctgaatttagaaatctcttaaccgacagattattcactttgaaattttatacgttggatgaaaaatggaccagatgtttgaaattaataagagaaaaaatagtcaaattcacagaaacaagtcattccaattatataacaaacggtatattaggactcttggaaacaacagcccctgcagcagatgcagaccagtctaatttgaatagcattgatgttatgctttgggatataaaatgtagcgaggagctctgccgtaaaatgcatgaagtagccggattagatcccataatatttccaaaatttatctctctcctctactggaagtacaactgcgatacacaaggttctaatgatcttgcatttcatttaccaatagatttagaaagggagttacagaagtattctgatatatactctcagttgaaacctgggcgcaagttacaattatgcaaagataaaggaaaagtagaaatacaattagctttcaaagatggtaggaaattagtgttagacgtttctttagaacaatgcagcgtaataaatcagtttgattctccaaatgatgagccaatttgtttaagtttggagcagctttctgagtctttgaatattgctcctcccaggttaactcatttgttagatttctggattcaaaaaggtgtgcttttaaaagaaaatggaacctattccgttattgaacatagcgagatggattttgatcaagcacaaaagaccgccccaatggagattgagaacagtaactatgaattacataacgattctgagatagaaagaaaatatgaattgacacttcaaagaagtttaccattcatcgaaggaatgttgactaatttaggcgcaatgaaacttcataagatccattcttttttgaaaattaccgtgccaaaagattggggatataacagaattactcttcaacaattagagggatatttaaacactttggccgatgagggtaggttaaagtacattgccaatggttcttatgaaatagtgaaaaatgggcataaaaacagttga

SEQ ID NO: 7437 - DNA, 810 bp, Saccharomyces cerevisiae
atgagtaataataaaataaaaagaaaggatgcaagcccggaacaagaggcaattgaatcattcacctcattaaccaaatgtgaccccaaggtatccaggaagtacctgcagcgtaatcactggaacatcaattacgctctcaatgattattatgacaaggaaatagggacgtttactgacgaggtttcaactgtggctcatccacccgtatacccgaaggagctaacacaggtatttgaacactatatcaataacaacttgtttgatatagactcactggtcaagttcattgaggagctaggctacaatcttgaagatttagcgacattatgcttagcccatttactggggtacaagaaactagaagaacccttaaaacgagaggacttcctgtcaacatggtttatgcaaggctgttccaccatttcagacatgcaagagtgcatcaagacgttagatgttaaattacatgaagacttacaatatttcacacagatttataactatgctttcaatttgattctggacccaaatcgaaaggatatagatacagacgaaggcatccagtattggaagctatttttccaaccagagtacccagtgcgtatggaaccagatttgcttgaggcatggttccgtttccttcgcgatgaggggaaaaccactataagtaaagacacctggcgtatgctgctcctctttttcaaacgataccccactattcagaaaataataagcgattacgacgaaactgcagcctggccatttattatcgatgagttctatgagtgcttacaggatcagcaataa

SEQ ID NO: 7438 - DNA, 810 bp, Artificial Sequence
  Description of Artificial Sequence: Synthetic polynucleotide
atgagtaataataaaataaaaagaaaggatgcaagcccggaacaagaggcaattgaatctttcaccagtttaaccaaatgtgaccccaaggtatccaggaagtacttacagcgtaatcactggaacatcaattacgctctcaatgattattatgacaaggaaatagggacgtttactgacgaggtttccactgtggctcatccacccgtatacccgaaggagttgacacaggtatttgaacactatatcaataacaacttgtttgatatagactctttggtcaagttcattgaggagttgggctacaatcttgaagatttagcgacattatgcttagcccatttattagggtacaagaaattagaagaacccttaaaaagagaggacttcttatctacatggtttatgcaaggctgttccaccatttctgacatgcaagagtgcatcaagacgttagatgttaaattacatgaagacttacaatatttcacacagatttataactatgctttcaatttgattttggacccaaatagaaaggatatagatacagacgaaggcatccagtattggaagttatttttccaaccagagtacccagtgcgtatggaaccagatttgcttgaggcatggttccgtttccttcgcgatgaggggaaaaccactataagtaaagacacctggcgtatgttgctcctctttttcaaaagataccccactattcagaaaataataagcgattacgacgaaactgcagcctggccatttattatcgatgagttctatgagtgcttacaggatcagcaatga

SEQ ID NO: 7439 - DNA, 2832 bp, Saccharomyces cerevisiae
atggtcaaatcataccaacgttttgagcaagcagctgcttttggtgtaatagcctccaatgccaattgtgtttggatacctgcgtcatccggaaatagtaatggtagtggaccaggacaattgattacgagtgctctcgaggacgttaatatatgggatattaagaccggggatttggtcagtaaattatccgatggcttacctccaggcgcatctgatgctagaggcgccaagccagccgagtgtacatatttggaggctcataaagatacggatttattagctgtcggttacgcagatggtgtcattaaagtttgggatttgatgtctaagactgtgcttttgaattttaacggtcacaaagcagctataacattattacaatttgatgggactggcacaagattaatttctggttccaaggactccaatatcattgtatgggatcttgttggagaagttggtctttataaacttagatcacacaaggattccattactggcttttggtgtcaaggagaagattggctgatcagcacctccaaagatggaatgatcaagctatgggacctaaaaacacatcaatgtatagagacacatattgcgcatactggagagtgttggggccttgcagtgaaggatgatttactgatcacaactggtactgatagtcaagtaaaaatttggaaactggatatagaaaatgacaaaatgggggggaaactaacagagatgggtattttcgaaaagcaaagtaagcaacgtgggttaaagattgagttcataacaaattcgtctgacaaaacctcttttttttacatccaaaatgctgataaaaccatcgagactttcagaattagaaaagaagaagaaatagcaagaggtttaaagaaaagagagaagaggctaaaagaaaaggggttgacagaagaagaaattgcaaaatctattaaagaatcctactcctcctttatattgcatccttttcaaaccataagatcattgtataaaataaaatctgcatcatggacaacggtctcaagttccaaacttgagttggtattaactacatcgagtaataccatagagtattattccattccatatgaaaaaagagacccaacaagccctgctcctctcaagacacatactattgaattgcaagggcaaagaacggatgtgcgtagtattgacatcagtgatgataacaaattacttgccacagcatccaatggttcattgaaaatatggaatatcaaaacacataaatgtatcagaactttcgaatgtgggtatgcattaacttgtaagtttttgccaggtgggctactagtcatactgggtacaagaaacggggagttacagctctttgatctagcatcatcaagtcttttggataccattgaagatgcacatgatgcggcaatttggtcgctagatctgacctcagatggtaaacgattagtgaccggatctgccgataaaactgtcaagttttgggatttcaaagttgaaaatagcctagtgccaggtaccaagaacaaattcctgcctgttttaaaactgcaccatgatacaactttggaattaactgacgacattttatgtgtacgggtttctcctgacgatagatatctagccatctcgttgctggataatactgttaaggtattctttttggactcaatgaagttttacctaagtttatatgggcacaaattacctgtactatctatcgatatttcatttgattctaagatgattattacgtcttccgcagacaaaaatatcaagatttggggtttagattttggtgactgtcacaagtctttatttgcccatcaggattcgattatgaacgttaaattcttaccacagtctcacaacttctttagttgttctaaagacgcagtggtgaaatattgggatggcgagaaatttgaatgcattcaaaaactatacgctcatcagagcgaagtttgggctttggcggttgctactgatggcggctttgttgtttcttcatcccatgatcacagtataagaatctgggaagaaaccgaggaccaggtatttttagaagaggaaaaggagaaagaacttgaagaacagtacgaggatacattgctaacttctttggaagaaggaaacggtgatgatgcatttaaagctgatgcatcgggtgaaggcgttgaagatgaagcatccggtgttcataaacagactttagaatcgttaaaggctggtgaaagacttatggaggcgctagatttaggaattgctgagattgaaggtttagaggcatataacagagatatgaagctatggcaaagaaagaagttgggtgaagcgccaataaaaccacagggtaacgctgttctaattgctgtgaataaaactcctgagcaatatattatggataccctgttaagaataagaatgtctcagttagaagatgcactgatggttatgccattctcatatgtcctcaaatttttaaaatttattgataccgttatgcaaaacaaaactttgctgcactctcacttaccattaatttgcaagaatttatttttcattatcaaatttaatcataaagaattggtttctcagaaaaatgaagaattgaaattgcaaataaatagagtaaagactgaattaagaagtgcattaaaatctaccgaggatgatctaggctttaatgttcaagggttgaaattcgtcaagcaacaatggaatctaaggcataactacgaattcgttgacgaatatgaccaacaggagaaagagagtaatagtgcaaggaagagagttttcgggaccgttatataa

SEQ ID NO: 7440 - DNA, 2832 bp, Artificial Sequence
  Description of Artificial Sequence: Synthetic polynucleotide
atggtcaaatcttaccaacgttttgagcaagcagctgcttttggtgtaatagcctccaatgccaattgtgtttggatacctgcgtcttccggaaatagtaatggtagtggaccaggacaattgattacgagtgctctcgaggacgttaatatatgggatattaagaccggggatttggtcagtaaattatccgatggcttacctccaggcgcatctgatgctagaggcgccaagccagccgagtgtacatatttggaggctcataaagatacggatttattagctgtcggttacgcagatggtgtcattaaagtttgggatttgatgtctaagactgtgcttttgaattttaacggtcacaaagcagctataacattattacaatttgatgggactggcacaagattaatttctggttccaaggactccaatatcattgtatgggatcttgttggagaagttggtctttataaacttagaagtcacaaggattccattactggcttttggtgtcaaggagaagattggttgatcagcacctccaaagatggaatgatcaagttatgggacttgaaaacacatcaatgtatagagacacatattgcgcatactggagagtgttggggccttgcagtgaaggatgatttattgatcacaactggtactgatagtcaagtaaaaatttggaaattggatatagaaaatgacaaaatgggggggaaattaacagagatgggtattttcgaaaagcaaagtaagcaacgtgggttaaagattgagttcataacaaattcttctgacaaaacctcttttttttacatccaaaatgctgataaaaccatcgagactttcagaattagaaaagaagaagaaatagcaagaggtttaaagaaaagagagaagaggttgaaagaaaaggggttgacagaagaagaaattgcaaaatctattaaagaatcctactcctcctttatattgcatccttttcaaaccataagaagtttgtataaaataaaatctgcatcttggacaacggtctctagttccaaacttgagttggtattaactacatctagtaataccatagagtattattccattccatatgaaaaaagagacccaacaagccctgctcctctcaagacacatactattgaattgcaagggcaaagaacggatgtgcgtagtattgacatcagtgatgataacaaattacttgccacagcatccaatggttctttgaaaatatggaatatcaaaacacataaatgtatcagaactttcgaatgtgggtatgcattaacttgtaagtttttgccaggtgggttgttggtcatattaggtacaagaaacggggagttacagctctttgatttggcatcttccagtcttttggataccattgaagatgcacatgatgcggcaatttggtctttagatttgacctctgatggtaaaagattagtgaccggatctgccgataaaactgtcaagttttgggatttcaaagttgaaaatagcttggtgccaggtaccaagaacaaattcttacctgttttaaaattacaccatgatacaactttggaattaactgacgacattttatgtgtaagagtttctcctgacgatagatatttggccatctctttgttggataatactgttaaggtattctttttggactccatgaagttttacttgagtttatatgggcacaaattacctgtattatctatcgatatttcctttgattctaagatgattattacgtcttccgcagacaaaaatatcaagatttggggtttagattttggtgactgtcacaagtctttatttgcccatcaggattctattatgaacgttaaattcttaccacagtctcacaacttctttagttgttctaaagacgcagtggtgaaatattgggatggcgagaaatttgaatgcattcaaaaactttacgctcatcagagcgaagtttgggctttggcggttgctactgatggcggctttgttgtttcttcttcccatgatcacagtataagaatctgggaagaaaccgaggaccaggtatttttagaagaggaaaaggagaaagaacttgaagaacagtacgaggatacattgttgacttctttggaagaaggaaacggtgatgatgcatttaaagctgatgcatctggtgaaggcgttgaagatgaagcatccggtgttcataaacagactttagaatctttaaaggctggtgaaagacttatggaggcgttggatttaggaattgctgagattgaaggtttagaggcatataacagagatatgaagttatggcaaagaaagaagttgggtgaagcgccaataaaaccacagggtaacgctgttttgattgctgtgaataaaactcctgagcaatatattatggataccttattaagaataagaatgtctcagttagaagatgcattaatggttatgccattctcttatgtcctcaaatttttaaaatttattgataccgttatgcaaaacaaaactttgttgcactctcacttaccattaatttgcaagaatttatttttcattatcaaatttaatcataaagaattggtttctcagaaaaatgaagaattgaaattgcaaataaatagagtaaagactgaattaagaagtgcattaaaatctaccgaggatgatttgggctttaatgttcaagggttgaaattcgtcaagcaacaatggaatttaaggcataactacgaattcgttgacgaatatgaccaacaggagaaagagagtaatagtgcaaggaagagagttttcgggaccgttatatga

SEQ ID NO: 7441 - DNA, 1269 bp, Saccharomyces cerevisiae
atggttgatcttatagcgagggatgactccgtagatacttgccaagcttctaacggctacaatgggcacgcaggtcttagaattctggcagtattcattatactgatatcgtcaggattgggagtttatttcccaattttgtcatcacggtattcgtttataaggctaccaaattggtgctttttcatagcgaagttcttcggttctggtgtcattgttgccacagcgttcgttcatcttctacagcccgcagccgaagctctgggagatgaatgtcttggtggcacatttgccgaatatccatgggcttttgggatctgtttaatgtcgcttttcttacttttcttcactgaaatcatcacgcattattttgtagcgaaaacgctgggacacgatcatggggaccatggggaagttaccagtattgatgttgatgctcccagttcgggatttgtcatcagaaatatggactcggatcctgtatctttcaataacgaagctgcctactccatccataatgacaaaactccgtacactactagaaatgaagagattgtcgctactcctataaaggaaaaagaacccggctcaaatgttactaattatgatctggaaccgggaaaaacagagtcactagctaatgaactagttccaaccagttcccatgcgacaaatctcgcttctgtacctggaaaagatcattattctcacgaaaatgaccatcaagatgtctcccagttggccacacgtatcgaggaggaagataaagagcagtatctcaatcagatactagctgtttttattctagaatttggcatcatctttcactctgtatttgtgggtctttcgctatctgtcgcgggtgaagaattcgaaaccttatttatcgttttaactttccaccaaatgttcgaaggtttgggtctaggcacaagagttgccgaaacgaattggccagaaagtaagaagtacatgccttggttaatgggattagccttcactttaacgtcacccatagcagtcgcggtaggtattggtgtcagacactcttggatacctggctctagaagagcattaattgctaatggtgtttttgactcgatatcatcaggaattcttatttatactggactagtcgaattaatggctcatgaattcttatactctaatcaattcaaaggacctgatggcctcaaaaaaatgcttagtgcatatctcatcatgtgttgtggagctgctttaatggctcttctagggaaatgggcatag

SEQ ID NO: 7442 - DNA, 1269 bp, Artificial Sequence
  Description of Artificial Sequence: Synthetic polynucleotide
atggttgatcttatagcgagggatgactccgtagatacttgccaagcttctaacggctacaatgggcacgcaggtcttagaattttggcagtattcattatattaatatcttctggattgggagtttatttcccaattttgagttctagatattcttttataaggttaccaaattggtgctttttcatagcgaagttcttcggttctggtgtcattgttgccacagcgttcgttcatcttttacagcccgcagccgaagctttaggagatgaatgtcttggtggcacatttgccgaatatccatgggcttttgggatctgtttaatgtctcttttcttacttttcttcactgaaatcatcacgcattattttgtagcgaaaacgttgggacacgatcatggggaccatggggaagttaccagtattgatgttgatgctcccagtagtggatttgtcatcagaaatatggacagtgatcctgtatctttcaataacgaagctgcctactccatccataatgacaaaactccgtacactactagaaatgaagagattgtcgctactcctataaaggaaaaagaacccggcagtaatgttactaattatgatttggaaccgggaaaaacagagtctttggctaatgaattggttccaaccagttcccatgcgacaaatctcgcttctgtacctggaaaagatcattattctcacgaaaatgaccatcaagatgtctcccagttggccacacgtatcgaggaggaagataaagagcagtatctcaatcagatattggctgtttttattttggaatttggcatcatctttcactctgtatttgtgggtctttctttatctgtcgcgggtgaagaattcgaaaccttatttatcgttttaactttccaccaaatgttcgaaggtttgggtcttggcacaagagttgccgaaacgaattggccagaaagtaagaagtacatgccttggttaatgggattagccttcactttaacgtctcccatagcagtcgcggtaggtattggtgtcagacactcttggatacctggctctagaagagcattaattgctaatggtgtttttgacagtatatcttctggaattcttatttatactggattagtcgaattaatggctcatgaattcttatactctaatcaattcaaaggacctgatggcctcaaaaaaatgcttagtgcatatctcatcatgtgttgtggagctgctttaatggctcttttggggaaatgggcatga

SEQ ID NO: 7443 - DNA, 2313 bp, Saccharomyces cerevisiae
atggataacgttgtagatccgtggtatataaatccctcaggcttcgcgaaagacactcaagatgaggagtatgttcaacatcatgataatgtcaatcctaccatacccccacccgacaattatattttgaataatgaaaacgatgatggcctcgataacttgttaggtatggactactataacatcgatgacctgttgactcaagagttaagagatctggatattcctttagtgccttctcctaagacgggcgatggttcttctgataaaaagaatattgatagaacttggaaccttggtgatgaaaacaacaaagtctcccactatagcaaaaaatcaatgtcctcacacaagagaggtctaagtggcacagcgatatttggatttctcggccataataagacattgagtatttccagtttacagcaatccattctaaatatgtctaaagatccgcaacccatggaactcataaatgaattgggtaatcataatacggtaaaaaataacaatgatgactttgaccatataagggaaaatgatggtgaaaatagctatttgagccaagttttgttgaaacagcaggaggagttaagaattgctcttgaaaaacaaaaggaagtgaacgaaaaattggagaagcagttgagagacaatcaaatacagcaagaaaagttgcgtaaagtattagaagagcaagaagaggtggcgcagaagttggtttctggggctacaaattctaattccaaacctggatctccagtaatactaaagacacctgccatgcaaaacggtagaatgaaagataatgctataatcgtcacaacgaactctgcaaatggcggatatcaatttcctcctccgacgttaatatcgcctcggatgtcaaatacttcaataaatggttcaccatccaggaaataccataggcaacgatatccaaataaaagcccagaaagtaatggattgaaccttttttcctctaacagtggttatttgagagattctgaactgctttcattttctccacaaaattataatttaaacttggacggcttgacttataatgaccataataacaccagtgataaaaacaataatgataaaaaaaatagtactggtgataacatattccgtctgttcgaaaagacttccccgggtgggctaagtatctctccaaggataaatggaaatagtttgagatcgcccttcctcgtcggcacagataaaagcagggatgatcgatatgctgctggcacgttcacgcctagaacacagttgtcacctatccacaagaaaagggaatccgtagtttccacggtctcgacaatatcacaactgcaggatgacactgaacccatccacatgcgaaatacccagaacccaacattaagaaatgcaaacgctttagcgtcatcaagtgtactacctcctattcctggttccagcaataacactccaattaagaattctttgccacaaaaacatgtatttcaacatactcccgtcaaagctccaccaaagaacggaagtaacctagctccgcttctaaatgcaccggatttaacagatcatcagttagaaattaagacacccatacgaaataacagtcactgtgaagtggaaagctatccgcaagtaccacctgtcacacatgatattcacaaaagccccactttgcatagtacgtctcctttaccagatgaaataatacctaggactacgccaatgaaaataaccaagaaaccaactactctgcctccgggtaccattgaccagtacgtcaaggaactacccgacaaactattcgagtgcttataccctaactgtaacaaagtattcaagcgtagatacaacataaggtcgcatattcagacacatttgcaagatagaccgtattcatgcgactttcccggttgcaccaaggcgtttgttcgcaatcatgatttaataagacacaaaatctcccataatgccaagaaatacatctgcccatgcggaaagagatttaatagggaggatgctctaatggtgcatagaagtcggatgatttgcaccggcggtaagaaattagaacattcgatcaacaagaaacttacatctcccaaaaaaagcctgcttgacagcccgcatgacacaagtcccgtaaaagaaactatcgcccgggataaagatgggagcgtcctaatgaaaatggaggaacagctgcgagatgatatgcgcaaacatggattactggatccacccccatccacagcagcgcacgagcaaaactcgaaccgcaccctttcaaacgaaactgatgctctctga

SEQ ID NO: 7444 - DNA, 2313 bp, Artificial Sequence
  Description of Artificial Sequence: Synthetic polynucleotide
atggataacgttgtagatccgtggtatataaatccctctggcttcgcgaaagacactcaagatgaggagtatgttcaacatcatgataatgtcaatcctaccatacccccacccgacaattatattttgaataatgaaaacgatgatggcctcgataacttgttaggtatggactactataacatcgatgacttgttgactcaagagttaagagatttggatattcctttagtgccttctcctaagacgggcgatggttcttctgataaaaagaatattgatagaacttggaaccttggtgatgaaaacaacaaagtctcccactatagcaaaaaatctatgtcctcccacaagagaggtttgagtggcacagcgatatttggatttctcggccataataagacattgagtatttccagtttacagcaatccattttgaatatgtctaaagatccgcaacccatggaactcataaatgaattgggtaatcataatacggtaaaaaataacaatgatgactttgaccatataagggaaaatgatggtgaaaatagctatttgagccaagttttgttgaaacagcaggaggagttaagaattgctcttgaaaaacaaaaggaagtgaacgaaaaattggagaagcagttgagagacaatcaaatacagcaagaaaagttgcgtaaagtattagaagagcaagaagaggtggcgcagaagttggtttctggggctacaaattctaattccaaacctggatctccagtaatattgaagacacctgccatgcaaaacggtagaatgaaagataatgctataatcgtcacaacgaactctgcaaatggcggatatcaatttcctcctccgacgttaatatctcctagaatgagtaatacttccataaatggttctccatccaggaaataccataggcaaagatatccaaataaaagcccagaaagtaatggattgaaccttttttcctctaacagtggttatttgagagattctgaattgctttctttttctccacaaaattataatttaaacttggacggcttgacttataatgaccataataacaccagtgataaaaacaataatgataaaaaaaatagtactggtgataacatattccgtttattcgaaaagacttccccgggtgggttgagtatctctccaaggataaatggaaatagtttgagatctcccttcctcgtcggcacagataaaagcagggatgatagatatgctgctggcacgttcacgcctagaacacagttgtctcctatccacaagaaaagggaatccgtagtttccacggtctctacaatatctcaattgcaggatgacactgaacccatccacatgagaaatacccagaacccaacattaagaaatgcaaacgctttagcgagtagtagtgtattacctcctattcctggttccagcaataacactccaattaagaattctttgccacaaaaacatgtatttcaacatactcccgtcaaagctccaccaaagaacggaagtaacttggctccgcttttgaatgcaccggatttaacagatcatcagttagaaattaagacacccataagaaataacagtcactgtgaagtggaaagctatccgcaagtaccacctgtcacacatgatattcacaaaagccccactttgcatagtacgtctcctttaccagatgaaataatacctaggactacgccaatgaaaataaccaagaaaccaactactttacctccgggtaccattgaccagtacgtcaaggaattgcccgacaaattattcgagtgcttataccctaactgtaacaaagtattcaagcgtagatacaacataaggagccatattcagacacatttgcaagatagaccgtattcttgcgactttcccggttgcaccaaggcgtttgttcgcaatcatgatttaataagacacaaaatctcccataatgccaagaaatacatctgcccatgcggaaagagatttaatagggaggatgctttgatggtgcatagaagtagaatgatttgcaccggcggtaagaaattagaacattctatcaacaagaaacttacatctcccaaaaaaagcttgcttgacagcccgcatgacacaagtcccgtaaaagaaactatcgccagagataaagatgggagcgtcttgatgaaaatggaggaacagttaagagatgatatgcgcaaacatggattattagatccacccccatccacagcagcgcacgagcaaaactccaaccgcaccctttccaacgaaactgatgctctctga

SEQ ID NO: 7445 - DNA, 873 bp, Saccharomyces cerevisiae
atggaattcatatctgcagactattctagcagtgacggtagtgataccgagagcgaaagtagtaacaaaagtgaggtccaaatcgaatacacggagaaaacttgcatacagaaagccgattccactgatttacctgcaataccggattcaattatattgaagtaccacatccctccgaatttacaaaagtacgagcaccaggatatgaatatgagtcgattttggcgttcgttcacatattttgagtggcgtccgactccagcgattcaccgacaacttcagaaaatcatatgtaaatataaagaaacatttatgaaacaggaatacactaatccgtatcaactggtggattttgacccgttgttcatctcacacttgggagcccccaaacctttacacgtttccttaactcgatcgttgttgtttgaaactgaagaacaaagacatgttttcattcaagaaatgcgtaatggtttacgaaataatgaaataaccccttttaaacttcaaatctgctcatatccgaagttatatatatcagaacgagccaacaccttgtacctcggtctccctgtctcagaatgtcccaataaggcacaaatttctcctttcaaaacgataatagctgaggcacttcagaaatcaggcatttcaaactatcaggatttaattgtaagtaggcaaaatttacatgtttcaattgccatcgctagcaacccttcaaaagccacattaaaacgttatcaacaattaaacgagacgatgggggcgcttttactactcaataatgactttgcatacaaactagagttcttagttaactctatctattgtgatgaaaaccgtcactccattagaatcccttttaactaa

SEQ ID NO: 7446 - DNA, 873 bp, Artificial Sequence
  Description of Artificial Sequence: Synthetic polynucleotide
atggaattcatatctgcagactattctagcagtgacggtagtgataccgagagcgaaagtagtaacaaaagtgaggtccaaatcgaatacacggagaaaacttgcatacagaaagccgattccactgatttacctgcaataccggattctattatattgaagtaccacatccctccgaatttacaaaagtacgagcaccaggatatgaatatgagtagattttggcgttctttcacatattttgagtggcgtccgactccagcgattcaccgtcaacttcagaaaatcatatgtaaatataaagaaacatttatgaaacaggaatacactaatccgtatcaattagtggattttgacccgttgttcatcagccacttgggagcccccaaacctttacacgtttccttaactaggtctttgttgtttgaaactgaagaacaaagacatgttttcattcaagaaatgcgtaatggtttaagaaataatgaaataaccccttttaaacttcaaatctgctcttatccgaagttatatatatctgaaagagccaacaccttgtacctcggtctccctgtcagtgaatgtcccaataaggcacaaatttctcctttcaaaacgataatagctgaggcacttcagaaatctggcatttccaactatcaggatttaattgtaagtaggcaaaatttacatgtttctattgccatcgctagcaacccttccaaagccacattaaaacgttatcaacaattaaacgagacgatgggggcgcttttacttctcaataatgactttgcatacaaattagagttcttagttaactctatctattgtgatgaaaaccgtcactccattagaatcccttttaactga

SEQ ID NO: 7447 - DNA, 1749 bp, Saccharomyces cerevisiae
atggtacaagaatcacgtccagggagtgtaagaagttactcggtcggttaccaagcaaggtccagatcgagttctcaaagaagacattcgttaacacgccaacgttcctcgcaaagactgattagaaccatcagtatcgagtctgatgtgtctaatattactgacgatgacgatttgagagctgtcaatgagggagtagcgggtgtgcaactggacgtctctgaaaccgcaaataagggaccaagaagagcatcagcaactgatgtcacagatagtttgggttcgacttcgtcggaatatattgagattccctttgttaaggaaacattggatgcaagtttaccttcggattatctgaagcaggacatattaaatctcattcagagtttgaagatatccaaatggtataacaacaagaaaatccaaccggtagcacaagatatgaacttagtcaagatctctggtgcgatgacaaacgcaattttcaaagttgaataccctaagttaccatcgttgctattgagaatatacggaccgaatattgataatatcattgacagggaatatgaattgcagattttggctaggctttcattgaaaaatataggtccttccctttacggctgttttgtaaacggtagatttgagcagtttctggagaattctaagactttaacaaaagacgacattagaaactggaagaactctcaaaggattgcaaggagaatgaaggagttacatgtaggtgttcctctcttgagttcagaaaggaagaacgggtcggcttgttggcaaaagattaaccagtggttgcgcacgattgagaaagtcgaccaatgggtgggggatcctaaaaacattgaaaactctttattatgtgagaattggtccaagtttatggatattgtcgatagatatcacaagtggcttatttctcaagaacagggtatagagcaagtcaacaaaaatcttatattctgccataatgatgcccaatacggcaatttacttttcactgctcctgtgatgaacacaccgagcctatacactgcaccttcgtctacatcattgacttcccaatcaagttccttatttccttcgagctccaatgtcattgtagatgatataatcaacccgccaaagcaggagcaaagccaagattccaaattggtcgtcattgattttgaatatgcaggtgccaatcccgccgcatatgatttagcgaatcatctttccgagtggatgtatgattacaacaatgctaaggccccacatcagtgccacgctgatagatatcccgataaagaacaggttttgaatttcttatactcttatgtttcgcatctaaggggtggtgctaaggaacccatagatgaagaggttcaaagactctataagtcaatcattcaatggagacccactgtacaactattttggtcgctctgggccatcctacaaagtggtaaattagagaaaaaagaagcctccactgccatcactagagaagaaattggacccaatggaaaaaaatatatcatcaagactgaacccgaatcccctgaagaagactttgttgaaaatgacgacgagcctgaagctggcgtcagcattgacacgttcgattatatggcttatggtcgtgacaagattgcggtcttttggggcgacctcattggcttaggcataatcaccgaagaagaatgcaaaaatttcagctctttcaagttcctcgatactagttatttgtaa

SEQ ID NO: 7448 - DNA, 1749 bp, Artificial Sequence
  Description of Artificial Sequence: Synthetic polynucleotide
atggtacaagaatcccgtccagggagtgtaagaagttactctgtcggttaccaagcaaggtccagaagtagttctcaaagaagacattctttaacacgccaacgttcctctcaaagattgattagaaccatcagtatcgagtctgatgtgtctaatattactgacgatgacgatttgagagctgtcaatgagggagtagcgggtgtgcaattggacgtctctgaaaccgcaaataagggaccaagaagagcatctgcaactgatgtcacagatagtttgggttctacttcttctgaatatattgagattccctttgttaaggaaacattggatgcaagtttaccttctgattatttgaagcaggacatattaaatctcattcagagtttgaagatatccaaatggtataacaacaagaaaatccaaccggtagcacaagatatgaacttagtcaagatctctggtgcgatgacaaacgcaattttcaaagttgaataccctaagttaccatctttgttgttgagaatatacggaccgaatattgataatatcattgacagggaatatgaattgcagattttggctaggctttctttgaaaaatataggtccttccctttacggctgttttgtaaacggtagatttgagcagtttttggagaattctaagactttaacaaaagacgacattagaaactggaagaactctcaaaggattgcaaggagaatgaaggagttacatgtaggtgttcctctcttgagttctgaaaggaagaacgggtctgcttgttggcaaaagattaaccagtggttgcgcacgattgagaaagtcgaccaatgggtgggggatcctaaaaacattgaaaactctttattatgtgagaattggtccaagtttatggatattgtcgatagatatcacaagtggcttatttctcaagaacagggtatagagcaagtcaacaaaaatcttatattctgccataatgatgcccaatacggcaatttacttttcactgctcctgtgatgaacacaccgagcttgtacactgcaccttcttctacatctttgacttcccaaagtagttccttatttccttccagctccaatgtcattgtagatgatataatcaacccgccaaagcaggagcaaagccaagattccaaattggtcgtcattgattttgaatatgcaggtgccaatcccgccgcatatgatttagcgaatcatctttccgagtggatgtatgattacaacaatgctaaggccccacatcagtgccacgctgatagatatcccgataaagaacaggttttgaatttcttatactcttatgtttctcatttaaggggtggtgctaaggaacccatagatgaagaggttcaaagactctataagtctatcattcaatggagacccactgtacaattattttggtctctctgggccatcttgcaaagtggtaaattagagaaaaaagaagcctccactgccatcactagagaagaaattggacccaatggaaaaaaatatatcatcaagactgaacccgaatcccctgaagaagactttgttgaaaatgacgacgagcctgaagctggcgtcagcattgacacgttcgattatatggcttatggtcgtgacaagattgcggtcttttggggcgacctcattggcttaggcataatcaccgaagaagaatgcaaaaatttcagctctttcaagttcctcgatactagttatttgtga

SEQ ID NO: 7449 - DNA, 1692 bp, Saccharomyces cerevisiae
atgtctgaaataaccttaggtaaatatttatttgaaagattgagccaagtcaactgtaacaccgtcttcggtttgccaggtgactttaacttgtctcttttggataagctttatgaagtcaaaggtatgagatgggctggtaacgctaacgaattgaacgctgcctatgctgctgatggttacgctcgtatcaagggtatgtcctgtattattaccaccttcggtgttggtgaattgtctgctttgaatggtattgccggttcttacgctgaacatgtcggtgttttgcacgttgttggtgttccatccatctcttctcaagctaagcaattgttgttgcatcataccttgggtaacggtgacttcactgttttccacagaatgtctgccaacatttctgaaaccactgccatgatcactgatattgctaacgctccagctgaaattgacagatgtatcagaaccacctacactacccaaagaccagtctacttgggtttgccagctaacttggttgacttgaacgtcccagccaagttattggaaactccaattgacttgtctttgaagccaaacgacgctgaagctgaagctgaagttgttagaactgttgttgaattgatcaaggatgctaagaacccagttatcttggctgatgcttgtgcttctagacatgatgtcaaggctgaaactaagaagttgatggacttgactcaattcccagtttacgtcaccccaatgggtaagggtgctattgacgaacaacacccaagatacggtggtgtttacgttggtaccttgtctagaccagaagttaagaaggctgtagaatctgctgatttgatattgtctatcggtgctttgttgtctgatttcaataccggttctttctcttactcctacaagaccaaaaatatcgttgaattccactctgaccacatcaagatcagaaacgccaccttcccaggtgttcaaatgaaatttgccttgcaaaaattgttggatgctattccagaagtcgtcaaggactacaaacctgttgctgtcccagctagagttccaattaccaagtctactccagctaacactccaatgaagcaagaatggatgtggaaccatttgggtaacttcttgagagaaggtgatattgttattgctgaaaccggtacttccgccttcggtattaaccaaactactttcccaacagatgtatacgctatcgtccaagtcttgtggggttccattggtttcacagtcggcgctctattgggtgctactatggccgctgaagaacttgatccaaagaagagagttattttattcattggtgacggttctctacaattgactgttcaagaaatctctaccatgattagatggggtttgaagccatacatttttgtcttgaataacaacggttacaccattgaaaaattgattcacggtcctcatgccgaatataatgaaattcaaggttgggaccacttggccttattgccaacttttggtgctagaaactacgaaacccacagagttgctaccactggtgaatgggaaaagttgactcaagacaaggacttccaagacaactctaagattagaatgattgaagttatgttgccagtctttgatgctccacaaaacttggttaaacaagctcaattgactgccgctactaacgctaaacaataa

SEQ ID NO: 7450 - DNA, 1692 bp, Artificial Sequence
  Description of Artificial Sequence: Synthetic polynucleotide
atgtctgaaataaccttaggtaaatatttatttgaaagattgagccaagtcaactgtaacaccgtcttcggtttgccaggtgactttaacttgtctcttttggataagctttatgaagtcaaaggtatgagatgggctggtaacgctaacgaattgaacgctgcctatgctgctgatggttacgctcgtatcaagggtatgtcctgtattattaccaccttcggtgttggtgaattgtctgctttgaatggtattgccggttcttacgctgaacatgtcggtgttttgcacgttgttggtgttccatccatctcttctcaagctaagcaattgttgttgcatcataccttgggtaacggtgacttcactgttttccacagaatgtctgccaacatttctgaaaccactgccatgatcactgatattgctaacgctccagctgaaattgacagatgtatcagaaccacctacactacccaaagaccagtctacttgggtttgccagctaacttggttgacttgaacgtcccagccaagttattggaaactccaattgacttgtctttgaagccaaacgacgctgaagctgaagctgaagttgttagaactgttgttgaattgatcaaggatgctaagaacccagttatcttggctgatgcttgtgcttctagacatgatgtcaaggctgaaactaagaagttgatggacttgactcaattcccagtttacgtcaccccaatgggtaagggtgctattgacgaacaacacccaagatacggtggtgtttacgttggtaccttgtctagaccagaagttaagaaggctgtagaatctgctgatttgatattgtctatcggtgctttgttgtctgatttcaataccggttctttctcttactcctacaagaccaaaaatatcgttgaattccactctgaccacatcaagatcagaaacgccaccttcccaggtgttcaaatgaaatttgccttgcaaaaattgttggatgctattccagaagtcgtcaaggactacaaacctgttgctgtcccagctagagttccaattaccaagtctactccagctaacactccaatgaagcaagaatggatgtggaaccatttgggtaacttcttgagagaaggtgatattgttattgctgaaaccggtacttccgccttcggtattaaccaaactactttcccaacagatgtatacgctatcgtccaagtcttgtggggttccattggtttcacagtcggcgctttattgggtgctactatggccgctgaagaacttgatccaaagaagagagttattttattcattggtgacggttctttacaattgactgttcaagaaatctctaccatgattagatggggtttgaagccatacatttttgtcttgaataacaacggttacaccattgaaaaattgattcacggtcctcatgccgaatataatgaaattcaaggttgggaccacttggccttattgccaacttttggtgctagaaactacgaaacccacagagttgctaccactggtgaatgggaaaagttgactcaagacaaggacttccaagacaactctaagattagaatgattgaagttatgttgccagtctttgatgctccacaaaacttggttaaacaagctcaattgactgccgctactaacgctaaacaatga

SEQ ID NO: 7451 - DNA, 2247 bp, Saccharomyces cerevisiae
atggaacttcagagggcacaacggaatttgaagtttttacaaaacgaggattatgtgaacgttaccgatcaaactaacctgaatggagagagccagaatgcttactctttaggaatggaaactcaagtaccggaaatgcagttttccttatcatctgatgatgattcaataggtacgcaagtaaaaagcgtaactgcacaaaaatcgcctatgacgcaagagactacgaaaaacgatacagaaagaaataaagatgttgataaaagttgtaacccagtcagcacttcccatcccgatttaggcggatcaaatatcgaggagaacatattcattaacactcaaattcaaagccgacttgatgacgcagaggaagaaacaaatcttaagttaaaacttgaaaaattcaagtattcgttcaagagtagtaacgcagatgatacccacagcaatgcaaatgtaacagctaaaagaagaccagcaataaggaaggctaattcgaaactcaaaacaaaacctaaaactaaacgagaccctaaaattatcaaaaatataactgatttcaatattaataactacgaacgttcaaggactgccagcttattaaagcaattatcaggtaagcacaagaaggttttggacataataaagacgcaaaatgaaggaaacagtgataaacctcccagagcaaggaataacaagggtgaaaaagctacttttgatacatatagtgaacaggagtggaaagatattatgaaacttcttctacaaaagtttccgcaaagtgaggaaacggatttgaatgaagtccagaaatttttatatggaagcgaaaaaagctcgaattctctagacaatcaagaatcctcacaacaaagactttggacagcatcacaattaccacccgagcttcccgatgaggctattcaaccagagcaggaagaaaggatacgcgatacccaaagtgcagtaaatttcttatcgttgtctcaagtaatggatgacaaaagtgaaattatgaaagacgaagaaagcataattatttcacggggagattctacaagctctcaagaatatggaaacgggttagagccacaacaaccggtaggaaatgttgttggtgaagatattgaactggctgtgggaacacgtataaatgcattttcactgacagattataaagcttgcaaacctatgtctgttgaggtaagtagaagatgcgaaaacagtacggataatgattatgacaatatttctattgtctcagatactacagatgagacatccacattgtttccactagaccagtatcggtatgttttcattgaaaatgatgaaagaccaccattagccaccgacacgataggcagcacacagtttttcactccaaacacatcgcctttggatgggataatcgatttaacacaggaatcattcaaagctgttcgatcgttaatatcacctttgaaagtagaaaacaacaaaacaggggtaacatcacaagcatcaaatcaggttcaggtaccagctacaagaacccctacaattattcctcaaaagaaccttactacaactttaaaaactgaagaagaaaagaataacataggaagttccatcagagttaaattattgcaagaaagcgtagttaagctaaaccccaaactggtgaaacataacttttatagagttgaggcaaatgattctgaagaagaggagacagaatttgatgaccaattctgcattgctgatatccaattggtagattcctccaaaatttcgactaaagattctacacaaaatcctactactagcaacgacattattgatacctctgcagctagttccatagcttctcccgagaaattttgtgagatcatgatgtcccaatcaatgaaagagcttcgacaaagcttgaaaacagtggggttgaaacctatgaggacgaaggttgaaatcattcaatccttacaaactgcatctcaaattctgtccacagctaatccagataataaaggtgagcatggtggggtggcaaatttcagtaagatagaaatatttgatcatttaaccgaactaattgaagccttccctgattttttggagcgaatatatacctttgaacccattccgctaaatgagctaattgaaaagctgttcagcgccgagccatttgtttcgcaaatcgacgaaatgaccatcagagaatgggccgatgttcaaggaatatgtctgagaaacgataaaaagtag

SEQ ID NO: 7452 - DNA, 2247 bp, Artificial Sequence
  Description of Artificial Sequence: Synthetic polynucleotide
atggaacttcagagggcacaaagaaatttgaagtttttacaaaacgaggattatgtgaacgttaccgatcaaactaacttgaatggagagagccagaatgcttactctttaggaatggaaactcaagtaccggaaatgcagttttccttatcttctgatgatgattctataggtacgcaagtaaaaagcgtaactgcacaaaaatctcctatgacgcaagagactacgaaaaacgatacagaaagaaataaagatgttgataaaagttgtaacccagtcagcacttcccatcccgatttaggcggaagtaatatcgaggagaacatattcattaacactcaaattcaaagcaggcttgatgacgcagaggaagaaacaaatcttaagttaaaacttgaaaaattcaagtattctttcaagagtagtaacgcagatgatacccacagcaatgcaaatgtaacagctaaaagaagaccagcaataaggaaggctaattctaaactcaaaacaaaacctaaaactaaaagagaccctaaaattatcaaaaatataactgatttcaatattaataactacgaacgttctaggactgccagcttattaaagcaattatctggtaagcacaagaaggttttggacataataaagacgcaaaatgaaggaaacagtgataaacctcccagagcaaggaataacaagggtgaaaaagctacttttgatacatatagtgaacaggagtggaaagatattatgaaacttcttttacaaaagtttccgcaaagtgaggaaacggatttgaatgaagtccagaaatttttatatggaagcgaaaaaagcagtaattctttggacaatcaagaatcctctcaacaaagactttggacagcatctcaattaccacccgagcttcccgatgaggctattcaaccagagcaggaagaaaggatacgcgatacccaaagtgcagtaaatttcttatctttgtctcaagtaatggatgacaaaagtgaaattatgaaagacgaagaaagcataattattagtagaggagattctacaagctctcaagaatatggaaacgggttagagccacaacaaccggtaggaaatgttgttggtgaagatattgaattggctgtgggaacacgtataaatgcattttctttaacagattataaagcttgcaaacctatgtctgttgaggtaagtagaagatgcgaaaacagtacggataatgattatgacaatatttctattgtctctgatactacagatgagacatccacattgtttccattggaccagtatcgttatgttttcattgaaaatgatgaaagaccaccattagccaccgacacgataggcagcacacagtttttcactccaaacacatctcctttggatgggataatcgatttaacacaggaatctttcaaagctgttagatctttaatatctcctttgaaagtagaaaacaacaaaacaggggtaacatctcaagcatctaatcaggttcaggtaccagctacaagaacccctacaattattcctcaaaagaaccttactacaactttaaaaactgaagaagaaaagaataacataggaagttccatcagagttaaattattgcaagaaagcgtagttaagttgaaccccaaattagtgaaacataacttttatagagttgaggcaaatgattctgaagaagaggagacagaatttgatgaccaattctgcattgctgatatccaattggtagattcctccaaaatttctactaaagattctacacaaaatcctactactagcaacgacattattgatacctctgcagctagttccatagcttctcccgagaaattttgtgagatcatgatgtcccaatctatgaaagagcttagacaaagcttgaaaacagtggggttgaaacctatgaggacgaaggttgaaatcattcaatccttacaaactgcatctcaaattttatccacagctaatccagataataaaggtgagcatggtggggtggcaaatttcagtaagatagaaatatttgatcatttaaccgaattgattgaagccttccctgattttttggagagaatatatacctttgaacccattccgttaaatgagttgattgaaaagcttttcagcgccgagccatttgtttctcaaatcgacgaaatgaccatcagagaatgggccgatgttcaaggaatatgtttgagaaacgataaaaagtga

SEQ ID NO: 7453 - DNA, 858 bp, Saccharomyces cerevisiae
atgtgggctcaattatcatatactagaccagaatctcagaagactgacttaacgtcgttgttttccacagatcaagagcaaaatccattaaatgactaccagtaccagatcaatattagggaactggaggagtattacaacaagacgattttaaacgaggataacatacaggaaacaagcagtgaaatatcttcggcagtttcattctctccaccaaaaaatacaaacgctattcaaccggggctactgtatgatccacagttaatgaacccttttctcccatccgctcacctgaatagcacggcacctactacttttaaaaagaaactagaggtacaaataaatccggactatgtcccaaaatcttcacaattaccattaacttcacagaatttgcaacagttgtctcaacaaaagcccaaaaatgatgcttctttttcatcagagaaggaatcctcagctcaacctaaggtgaaaagccaagtgcaggaaactcccaaacaattatacaagacagagctgtgcgaatcattcactttaaaaggaagttgcccttatggcagtaagtgtcagtttgctcacggactcggcgaattaaaggttaagaaatcgtgcaagaatttcaggacgaagccctgtgtgaattgggagaaactaggttattgtccttatggcagaagatgctgcttcaaacatggcgacgacaacgacattgctgtttacgtgaaagctggtacttactgtaacgtctcttcgactagcaaacaatcagacgaaaagagaagcaatggtcgcggctccgccaagaagaagaatctaaatgttaaagtaaaggctttgcagagaatgacctggtga

SEQ ID NO: 7454 - DNA, 858 bp, Artificial Sequence
  Description of Artificial Sequence: Synthetic polynucleotide
atgtgggctcaattatcttatactagaccagaatctcagaagactgacttaacgtctttgttttccacagatcaagagcaaaatccattaaatgactaccagtaccagatcaatattagggaattagaggagtattacaacaagacgattttaaacgaggataacatacaggaaacaagcagtgaaatatcttctgcagtttctttctctccaccaaaaaatacaaacgctattcaaccggggttgttatatgatccacagttaatgaacccttttctcccatccgctcacttgaatagcacggcacctactacttttaaaaagaaattagaggtacaaataaatccggactatgtcccaaaatcttctcaattaccattaacttctcagaatttgcaacagttgtctcaacaaaagcccaaaaatgatgcttctttttcttctgagaaggaatcctctgctcaacctaaggtgaaaagccaagtgcaggaaactcccaaacaattatacaagacagagctctgcgaatctttcactttaaaaggaagttgcccttatggcagtaagtgtcagtttgctcacggactcggcgaattaaaggttaagaaaagttgcaagaatttcaggacgaagccctgtgtgaattgggagaaattgggttattgtccttatggcagaagatgctgcttcaaacatggcgacgacaacgacattgctgtttacgtgaaagctggtacttactgtaacgtctcttctactagcaaacaatctgacgaaaagagaagcaatggtcgcggctccgccaagaagaagaatttgaatgttaaagtaaaggctttgcagagaatgacctggtga

SEQ ID NO: 7455 - DNA, 1104 bp, Saccharomyces cerevisiae
atggcattcaagttatggctactggatgaggaaacaatatacgagcacgtgttcgaacggtacacacaattggagggccagtccgggaaactggcgcaggatttgggtattcaggatagaaggggcggtgtgctagagataacgtttgaaccctctgggctggaaggcggcagaaaaaaaaagcgagtgagaagaagaaataaggctagtagtgttgaagaagatcagaatgttgctgtggatagctatcatgttagcgtggggcagtccatatcaagcttgcgctcgtccagagacaacggaaactccaccacaggatacgttttgtggtctaccacacctttcttcatcaactggctgctgtatagtactagcgctgcacctttccgtcttgggagtcaggtggaagtaacctgcgggtcttcttgcgaggggcacaagcttgagttgcccaggctggtcgacctcacgggcgctgatcgcggcaagagaggtatcttggaacttggagcaggaatatcaggtattttgcccgtgattcttggtaacttcgtcgacacctacgtgtcgacagatcagaagggcattcttaataaattaaaagataacatcatggaaaacttatcacagttgaccagaaagcggtgcatttcccgatcactaagattggaacttcccaccgtcgaaccagttggcgacgctgatatcaccgcagcgtcacttccatctaagtctacgttgcatttggaagtagccgctctagactgggagaagataaacttgcaagacaaaaagacccactctctgcatcctgagttgtcactcataggtgaaacatgttcttccgtgtacgttatagctatggatgtcatatacaacgagtacctgatagatccgtttctgaagacgctcaagcaactcaaacactggttacaaactacctacaatttgcaattccatgtcctcgtggggatacacttgcggtcacaagaggtgacaacactgttcttggagaaagccatcatagaatatgacttcacggtttatgatatcgttgaccaggtcatacaagagtcccgttttaacttttatcttatcacctag

SEQ ID NO: 7456 - DNA, 1104 bp, Artificial Sequence
  Description of Artificial Sequence: Synthetic polynucleotide
atggcattcaagttatggttgttggatgaggaaacaatatacgagcacgtgttcgaaagatacacacaattggagggccagtccgggaaattagcgcaggatttgggtattcaggatagaaggggcggtgtgttggagataacgtttgaaccctctgggttggaaggcggcagaaaaaaaaagagggtgagaagaagaaataaggctagtagtgttgaagaagatcagaatgttgctgtggatagctatcatgttagcgtggggcagtccatatctagcttgcgctcttccagagacaacggaaactccaccacaggatacgttttgtggtctaccacacctttcttcatcaactggttgttatatagtactagcgctgcacctttccgtcttgggagtcaggtggaagtaacctgcgggtcttcttgcgaggggcacaagcttgagttgcccaggttggtcgacctcacgggcgctgatcgcggcaagagaggtatcttggaacttggagcaggaatatctggtattttgcccgtgattcttggtaacttcgtcgacacctacgtgtctacagatcagaagggcattcttaataaattaaaagataacatcatggaaaacttatctcagttgaccagaaagagatgcatttccagatccttgagattggaacttcccaccgtcgaaccagttggcgacgctgatatcaccgcagcgtcccttccatctaagtctacgttgcatttggaagtagccgctttggactgggagaagataaacttgcaagacaaaaagacccactctttgcatcctgagttgtctctcataggtgaaacatgttcttccgtgtacgttatagctatggatgtcatatacaacgagtacttgatagatccgtttttgaagacgctcaagcaactcaaacactggttacaaactacctacaatttgcaattccatgtcctcgtggggatacacttgagatctcaagaggtgacaacattgttcttggagaaagccatcatagaatatgacttcacggtttatgatatcgttgaccaggtcatacaagagtcccgttttaacttttatcttatcacctga

SEQ ID NO: 7457 - DNA, 2958 bp, Saccharomyces cerevisiae
atggctatctgggagcaactagaagtctcaaaggcgcacgttgcttatgcatgtgttggtgtcttttcatctatcttctctttagtgtcactttatgtcaaggagaagctttatattggtgagtccaccgtagcaggtatatttgggctaattgtgggtcctgtttgcttgaactggtttaatcctctgaaatgggggaattcagacagtataacattagagataacgagaatagtattatgtttgcaaatttttgccgttgccgtggaactgccacggaaatatatgttgaagcattgggtatctgtgacgatgctattattgccagtgatgacagctggatggcttattattggtctcttcgtttggattcttatacctggcttgaatttttctgctagtttgttgatatctgcgtgcattaccgcaacagatcctattctggcgcagtcggtcgtctccggtaagtttgcccaaagagtacctggtcacttaagaaatctactgtctgcagagtcaggctgcaatgatggtatggcctttccttttttatttctttctatgaatttaatcctacatcccggtaatggaagagaaattgtcaaagattggatttgcgttactatcctgtatgagtgtttgtttggatgcttgctaggttgcttcattggttatgtaggcagaatcaccatcaggtttgccgaaaagaaaaacattatcgatcgtgagtcgttcttagcattttacgttgtcctggcgttcatgtgtgctgggttcggctccattttgggtgtggatgacctattggtatcatttgcagccggtgcgactttcgcttgggatgggtggttttctcaaaagacacaagaaagtaatgtttctaccgtgattgatttgctactaaactatgcgtattttatctattttggtgccattataccttggagtcaattcaacaacggtgaaattggcacaaacgtctggcgtttaattatactttcgatagtggtcatctttttacgtaggatccctgcagtcatgatattaagacctcttatacctgatataaaatcgtggcgtgaggcactttttgtgggccattttggtcctattggtgtaggtgcaatttttgccgctatactagctcgtggagaattagagtctacctttagtgacgaacccactcctttaaatgttgtaccatcaaaagaggaaagtaaacattggcagctgatagcctgtatatggccaataacttgttttttcattgttacttctatcatagttcatggttcttcagttgcaatcataactctaggtcgtcatttgaacacgataacgttaaccaaaacattcactacacacaccaccaatggtgataatgggaaaagttcatggatgcaaaggttgccatcgttggataaagctggacgatcattttcattgcatcgtatggatactcaaatgactttatcaggggatgaaggtgaagcagaagaaggaggaggtcgtaagggactagcaggaggtgaagatgaagaaggattaaacaatgatcaaattggtagcgtcgcaacgagcggaattcctgcaagacccgctggtggtatgccaaggaggaggaaattgtcaagaaaagagaaaagattgaacagaagacagaaactgagaaacaaaggtagagaaatattttcatcaagatctaaaaatgaaatgtatgatgacgatgagttgaatgatctgggacgagaaaggttgcaaaaagaaaaggaagcacgcgccgccacatttgcattgagcacagccgtcaatacacaacgtaatgaggagattggaatgggtggagatgaagaagaagatgagtacacaccggaaaaggaatatagcgataattacaataacacaccaagttttgagtcgtctgaaagatcttcatctctccgaggaagaacttacgtaccaagaaaccgttacgatggagaagagacagaaagcgagattgaaagcgaagacgagatggaaaatgaaagtgaaagatcaatggccagtagtgaagagaggagaattcgaaaaatgaaagaggaagaaatgaaacctggtactgcttatttagatggtaatagaatgattattgaaaataagcaaggtgaaatcttgaatcaagtagatatcgaggatcgcaatgaggcgagagatgacgaagttagtgttgatagtacagcccattcaagtttaactaccacaatgaccaatctatccagtagtagtgggggaaggttaaagagaattttaactcccacatctttaggaaagatacattcattggttgataaaggaaaggataaaaataaaaacagcaagtatcatgcatttaaaatagacaatctgttaatcatcgagaatgaggacggtgatgttataaaaagatacaagataaatcctcataaatctgatgatgataaaagtaaaaaccgcccaagaaacgatagtgttgtatcaagagctttaacagcagtaggactaaagagcaaagcgaacagcggcgtaccgcctccagtagatgaagaaaaagccatcgaaggaccctccaggaagggcccagggatgttaaagaaaaggacattaacacctgcgccaccgagaggagttcaagattccttagatctggaagatgaaccttcatctgaggaggatttaggtgatagttataacatggacgatagtgaagattacgacgataatgcatatgaatcagaaactgaattcgaaagacaaagaaggttaaatgcgttaggtgagatgacggcaccagcggatcaagatgacgaagagttgccgcccttacctgtggaggcacaaacaggaaacgatggtccaggtacagcggaaggaaaaaaaaagcaaaagagtgctgctgttaagtcggcgctatcaaaaacgcttggtctcaataagtaa

SEQ ID NO: 7458 - DNA, 2958 bp, Artificial Sequence
  Description of Artificial Sequence: Synthetic polynucleotide
atggctatctgggagcaattggaagtctccaaggcgcacgttgcttatgcatgtgttggtgtcttttcttctatcttctctttagtgtctctttatgtcaaggagaagctttatattggtgagtccaccgtagcaggtatatttgggttgattgtgggtcctgtttgcttgaactggtttaatcctttgaaatgggggaatagtgacagtataacattagagataacgagaatagtattatgtttgcaaatttttgccgttgccgtggaattaccaagaaaatatatgttgaagcattgggtatctgtgacgatgcttttattgccagtgatgacagctggatggcttattattggtctcttcgtttggattcttatacctggcttgaatttttctgctagtttgttgatatctgcgtgcattaccgcaacagatcctattttggcgcagtctgtcgtctccggtaagtttgcccaaagagtacctggtcacttaagaaatttattatctgcagagagtggctgcaatgatggtatggcctttccttttttatttctttctatgaatttaatcttgcatcccggtaatggaagagaaattgtcaaagattggatttgcgttactatcttatatgagtgtttgtttggatgcttgttgggttgcttcattggttatgtaggcagaatcaccatcaggtttgccgaaaagaaaaacattatcgatcgtgagagtttcttagcattttacgttgtcttggcgttcatgtgtgctgggttcggctccattttgggtgtggatgacttgttggtatcctttgcagccggtgcgactttcgcttgggatgggtggttttctcaaaagacacaagaaagtaatgtttctaccgtgattgatttgttattaaactatgcgtattttatctattttggtgccattataccttggagtcaattcaacaacggtgaaattggcacaaacgtctggcgtttaattatactttccatagtggtcatctttttacgtaggatccctgcagtcatgatattaagacctcttatacctgatataaaaagttggcgtgaggcactttttgtgggccattttggtcctattggtgtaggtgcaatttttgccgctatattggctcgtggagaattagagtctacctttagtgacgaacccactcctttaaatgttgtaccatctaaagaggaaagtaaacattggcagttgatagcctgtatatggccaataacttgttttttcattgttacttctatcatagttcatggttcttctgttgcaatcataactttaggtcgtcatttgaacacgataacgttaaccaaaacattcactacacacaccaccaatggtgataatgggaaaagttcttggatgcaaaggttgccatctttggataaagctggaagatctttttctttgcatcgtatggatactcaaatgactttaagtggggatgaaggtgaagcagaagaaggaggaggtcgtaagggattagcaggaggtgaagatgaagaaggattaaacaatgatcaaattggtagcgtcgcaacgagcggaattcctgcaagacccgctggtggtatgccaaggaggaggaaattgtccagaaaagagaaaagattgaacagaagacagaaattgagaaacaaaggtagagaaatattttcttctagatctaaaaatgaaatgtatgatgacgatgagttgaatgatttgggaagagaaaggttgcaaaaagaaaaggaagcacgcgccgccacatttgcattgagcacagccgtcaatacacaacgtaatgaggagattggaatgggtggagatgaagaagaagatgagtacacaccggaaaaggaatatagcgataattacaataacacaccaagttttgagtcttctgaaagatcttcttctctcagaggaagaacttacgtaccaagaaaccgttacgatggagaagagacagaaagcgagattgaaagcgaagacgagatggaaaatgaaagtgaaagaagtatggccagtagtgaagagaggagaattagaaaaatgaaagaggaagaaatgaaacctggtactgcttatttagatggtaatagaatgattattgaaaataagcaaggtgaaatcttgaatcaagtagatatcgaggatcgcaatgaggcgagagatgacgaagttagtgttgatagtacagcccattctagtttaactaccacaatgaccaatttatccagtagtagtgggggaaggttaaagagaattttaactcccacatctttaggaaagatacattctttggttgataaaggaaaggataaaaataaaaacagcaagtatcatgcatttaaaatagacaatttattaatcatcgagaatgaggacggtgatgttataaaaagatacaagataaatcctcataaatctgatgatgataaaagtaaaaaccgcccaagaaacgatagtgttgtatctagagctttaacagcagtaggattgaagagcaaagcgaacagcggcgtaccgcctccagtagatgaagaaaaagccatcgaaggaccctccaggaagggcccagggatgttaaagaaaaggacattaacacctgcgccaccgagaggagttcaagattccttagatttggaagatgaaccttcttctgaggaggatttaggtgatagttataacatggacgatagtgaagattacgacgataatgcatatgaaagtgaaactgaattcgaaagacaaagaaggttaaatgcgttaggtgagatgacggcaccagcggatcaagatgacgaagagttgccgcccttacctgtggaggcacaaacaggaaacgatggtccaggtacagcggaaggaaaaaaaaagcaaaagagtgctgctgttaagtctgcgttatccaaaacgcttggtctcaataagtga

SEQ ID NO: 7459 - DNA, 1932 bp, Saccharomyces cerevisiae
atgtggaaattcaacaaaaagctcgcccgtcttacttaccgtctttattcaagctcaggcccaagctcgccccttcatgggaagaagaaactgccgcaaaatctgaaattcgtcgtcttgaaccctacccaatctgggctagtgaaaaatgatcagaagcagcctagacacaggccgtctaagaaacgtagccataaggaaactggagataacaacctcgatttcggctcgaaactccttgtcttcgaaaagcagaattcactagattccgcattgaactccatccgattgaagaaaccgacaagcgccagtctgccctccctggaatacaatgcccttctccaatcgcttacatcaagctacaatcgctaccaactgcgcgagttcatctccacacatcagccagactcctcttcacatctgacgcactggaagaaaagcaagctgtcccaatatataattgaaaaaatctggaattgccaaccaatttcaacacccaccactcccacaggcatcaagtccacatcattgactttccagttcgattctcctagagaaattttccttttactcatcactcaaaatggtaaaatactcaccaacttcaataagctcgggctgacattcatcatctccattcaggataacgaattgaccgtcaagggttcgcctagcttgctcaaatacgcagaaatatccttaaacaaaatatggtcaaacatcactcatgaaaatgtgcgtatgtattccctcatgccatcaaaagacgtcatcaaccttattcagaaggaaactcacactttttttgaatacctcccggacttgcaaatgtacaagatttcagccctaagcaccaagaaaatatccatggccaaagtctttttattaaatgccgtcgcttctaatcctaacacaactcaacaccaccacacaatagcctcaccagcactcaagacagaactctatccgttcaacaatactctagagaacttggactggctaaacaagtcacaagattgggcaagattacagtcagttgtccctaaaaattgcacagatctgatgactcccactgaaaacgccacaccagaattgacagatgcgcaggtcagccaattcgaatcttccttgtctaaaaatataccatctctctccccttccgactctatttcccaatctttatcaataacgctaggtcactccttacagtccgcgtctttttctagtattttccaacctctaatacataagagttttatttcaaaattactgaatctaccaatgtacaaagaatcatcatcatcagccgtacctgtgcctgtgcctcttgatcaacatctaataacaaatgcgcatcaatccttcatacagctgaacttcactcctgtgccgcccacctctggctcctcctcgtccccttttttgcagatttggttcgagattgacgaattcgataacattgttaccacctcaatgaggcctcttttgaaattacaagaaaattctgttatcttaagaactccacaatgccagacagactataagatcacgtcagattacattcaagatcttttacctgatttcgaccagaccaatccggatgcttggttatctgaacaaaaaggcctccaagaatttcttctcaagtcacactggaagttaaacaaatatcagaatcttatgaaaaaaatcaacatttctttaccagataacctaatacagcaataccaattgactgatgttttgacccatcgtgtcttgaatttacgatttcctacgaacactgcccaagatgataaatacatcattcaatattcagatatcagccgcggatttttgaacaatggctcctacagacaattagatttcatcaatgtgaaccccagtgaaacctcactaaaaacctttatcaatgatgttttaagcttttaa

SEQ ID NO: 7460 - DNA, 1932 bp, Artificial Sequence
  Description of Artificial Sequence: Synthetic polynucleotide
atgtggaaattcaacaaaaagctcgcccgtcttacttaccgtctttattctagcagtggcccaagctctccccttcatgggaagaagaaattaccgcaaaatttgaaattcgtcgtcttgaaccctacccaatctgggttagtgaaaaatgatcagaagcagcctagacacaggccgtctaagaaacgtagccataaggaaactggagataacaacctcgatttcggctctaaactccttgtcttcgaaaagcagaattctttagattccgcattgaactccatcaggttgaagaaaccgacaagcgccagtttaccctccttagaatacaatgcccttctccaatctcttacatctagctacaatcgctaccaattgcgcgagttcatctccacacatcagccagactcctcttctcatttaacgcactggaagaaaagcaagttatcccaatatataattgaaaaaatctggaattgccaaccaatttctacacccaccactcccacaggcatcaagtccacatctttgactttccagttcgattctcctagagaaattttccttttactcatcactcaaaatggtaaaatactcaccaacttcaataagctcgggttgacattcatcatctccattcaggataacgaattgaccgtcaagggttctcctagcttgctcaaatacgcagaaatatccttaaacaaaatatggagcaacatcactcatgaaaatgtgcgtatgtattccctcatgccatctaaagacgtcatcaaccttattcagaaggaaactcacactttttttgaatacctcccggacttgcaaatgtacaagatttctgccttgagcaccaagaaaatatccatggccaaagtctttttattaaatgccgtcgcttctaatcctaacacaactcaacaccaccacacaatagcctctccagcactcaagacagaactctatccgttcaacaatactttagagaacttggactggttgaacaagtctcaagattgggcaagattacagtctgttgtccctaaaaattgcacagatttgatgactcccactgaaaacgccacaccagaattgacagatgcgcaggtcagccaattcgaatcttccttgtctaaaaatataccatctctctccccttccgactctatttcccaatctttatctataacgttaggtcactccttacagtccgcgtctttttctagtattttccaacctttgatacataagagttttatttccaaattattgaatttaccaatgtacaaagaatcttcttcttctgccgtacctgtgcctgtgcctcttgatcaacatttgataacaaatgcgcatcaatccttcatacagttgaacttcactcctgtgccgcccacctctggctcctcctcctccccttttttgcagatttggttcgagattgacgaattcgataacattgttaccacctccatgaggcctcttttgaaattacaagaaaattctgttatcttaagaactccacaatgccagacagactataagatcacgtctgattacattcaagatcttttacctgatttcgaccagaccaatccggatgcttggttatctgaacaaaaaggcctccaagaatttcttctcaagtctcactggaagttaaacaaatatcagaatcttatgaaaaaaatcaacatttctttaccagataacttgatacagcaataccaattgactgatgttttgacccatcgtgtcttgaatttaagatttcctacgaacactgcccaagatgataaatacatcattcaatattctgatatcagccgcggatttttgaacaatggctcctacagacaattagatttcatcaatgtgaaccccagtgaaacctctttgaaaacctttatcaatgatgttttaagcttttga

SEQ ID NO: 7461 - DNA, 1092 bp, Saccharomyces cerevisiae
atggagcaccaacaattgcggaagtacgtcgaattgtacaataaggaggtcgaggaattctacaatggtgccgcgtcaggccgcccagctgagttccatccttccaaagtacatgtaaagagcatccatgaaaaggcgggtaccgccaatgctggtgtagaaatctctagcgttggtgtagactgggacagcgaggagaagaatacctttttctggtgcctttcacgctatagtatccaccgtgtagacgagtggcgctcattgttgcctcggaagagcgccatggagattctaggttattacaggttgttaaggagagcgagtgcgagcgcgagatcgcgtaaggcgggtgacgacggagcgcccattgcgtacgaaatgagcgctgagtgggttgccctggagacaaaactgagcgagacagtgatggccatcacggaaggcgcagccgaggttgccgatgaggaaggacactgcgagggccttatcgattatgaaagctggaaacgcaggtgggtggccatctactcgcacagccgtatcgcggagataagacccttgccccgccacgcgctgccgctatcgcgcagcgcgacgcagactttggagcgctgcgtaagtcgctacacacgtacattgctgtggtgcacggcccttgcgggtatggcttcccgcagcgtcagcgccagggcggccgaatctcgaggacacaagtcgctaccgacggtggtaactcgccggcaagttgagcgtgcactatgcacagaagcccgatcacgtgacctacacgtgcttccaaggcgcattgttttgacactgcgcaaatgggaactagactatccgcgagagggcaaactgttccgcaccaaggagatggcacatctgtttctacaaagccagttgtccagacgggatgcgcccccagtccatcaagacgaaaatcaagaaaatcaagaaaatcaagaaaatcaagaacaagataacactgcaagtgaaggtgaaagcgaggcagaaagggatgaaatcgacgaagcggacttgttccgatcagcattacatgaaaatcagttgctaaaatggttatccaaatga

SEQ ID NO: 7462 - DNA, 1092 bp, Artificial Sequence
  Description of Artificial Sequence: Synthetic polynucleotide
atggagcaccaacaattgagaaagtacgtcgaattgtacaataaggaggtcgaggaattctacaatggtgccgcgtctggccgcccagctgagttccatccttccaaagtacatgtaaagagcatccatgaaaaggcgggtaccgccaatgctggtgtagaaatctctagcgttggtgtagactgggacagcgaggagaagaatacctttttctggtgcctttcccgctatagtatccaccgtgtagacgagtggcgctctttgttgcctagaaagagcgccatggagattttgggttattacaggttgttaaggagagcgagtgcgagcgcgagatctcgtaaggcgggtgacgacggagcgcccattgcgtacgaaatgagcgctgagtgggttgccttagagacaaaattaagcgagacagtgatggccatcacggaaggcgcagccgaggttgccgatgaggaaggacactgcgagggccttatcgattatgaaagctggaaacgcaggtgggtggccatctactctcacagccgtatcgcggagataagacccttgccccgccacgcgttaccgttatctcgcagcgcgacgcagactttggagcgctgcgtaagtcgctacacacgtacattgttatggtgcacggcccttgcgggtatggcttcccgcagcgtcagcgccagggcggccgaatctagaggacacaagtctttaccgacggtggtaactcgccgtcaagttgagcgtgcattatgcacagaagcccgttcccgtgacttgcacgtgcttccaaggcgcattgttttgacattacgcaaatgggaattagactatccgagagagggcaaattattccgcaccaaggagatggcacatttatttttgcaaagccagttgtccagaagagatgcgcccccagtccatcaagacgaaaatcaagaaaatcaagaaaatcaagaaaatcaagaacaagataacactgcaagtgaaggtgaaagcgaggcagaaagggatgaaatcgacgaagcggacttgttcagaagtgcattacatgaaaatcagttgttgaaatggttatccaaatga

SEQ ID NO: 7463 - DNA, 1431 bp, Saccharomyces cerevisiae
atgatagcttccaaaagctccttattagttactaaatcgcgcataccctctctatgctttcctttgataaagaggtcctatgtgtcaaagactccgacacactctaacacggctgctaatctgatggttgaaactccggccgccaatgccaacggcaatagtgtgatggcacctcctaactcaatcaattttctacagacacttcccaagaaggaactattccaactgggattcatcggtattgcgaccttgaacagcttcttcctgaacacgatcattaagttgttcccttacatccccatcccagtaataaaattcttcgtctcttctttatactgtggcggtgagaactttaaagaggtcatcgaatgcggcaaacgtctgcagaagagaggtatatcgaacatgatgctttcattaactattgaaaattccgaaggtacaaagagtttgtccagtactccagtagaccaaattgtcaaggaaacaatcagctctgtccacaacatcctactgcccaatattattggccagctggaatctaagccaatcaatgacattgctccaggttatatcgctctaaaaccctctgctttggtcgataaccctcacgaggttctgtacaatttcagtaatcccgcctacaaggctcaaagggatcagctgatcgagaactgctctaagattacaaaagagatttttgaactaaatcaatctttgttaaagaagtaccctgaaagaaaggccccatttatggtttccactattgacgctgagaagtatgatttgcaggagaatggtgtttacgaattacagagaatcttatttcaaaaattcaatcccacttcatctaaactgatatcatgtgtcggtacttggcagttgtacctaagggactctggtgaccatattttgcacgaattgaagctggcccaagaaaacggctataagcttgggctgaaactggttcgtggtgcttatattcattctgaaaaaaaccgtaaccaaattatctttggcgataaaacgggcactgacgaaaattacgatcgtatcatcactcaagttgtcaatgatttaatcatcaatggcgaggattcttattttggtcacttggttgtcgcctctcataattaccaatcccaaatgctcgttactaatttgctaaaatctacccaagacaactcttatgccaaatcgaacattgtgttggggcaattactaggtatggcagataatgttacctatgacctaattaccaaccatggcgctaaaaacataatcaagtatgtcccatggggcccaccattggaaactaaagattatcttttgagaagattgcaagaaaacggggatgctgtgagatctgataatggctggccattaatcaaggccatagcaaagtcgattccaaaaagagtaggcctatga

SEQ ID NO: 7464 - DNA, 1431 bp, Artificial Sequence
  Description of Artificial Sequence: Synthetic polynucleotide
atgatagcttccaaaagctccttattagttactaaaagccgcataccctctttatgctttcctttgataaagaggtcctatgtgagcaagactccgacacactctaacacggctgctaatttaatggttgaaactccggccgccaatgccaacggcaatagtgtgatggcacctcctaactctatcaattttttgcagacacttcccaagaaggaattattccaattaggattcatcggtattgcgaccttgaacagcttcttcttgaacacgatcattaagttgttcccttacatccccatcccagtaataaaattcttcgtctcttctttatactgtggcggtgagaactttaaagaggtcatcgaatgcggcaaacgtttgcagaagagaggtataagcaacatgatgctttctttaactattgaaaattccgaaggtacaaagagtttgtccagtactccagtagaccaaattgtcaaggaaacaatcagctctgtccacaacatcttattgcccaatattattggccagttagaatctaagccaatcaatgacattgctccaggttatatcgctttgaaaccctctgctttggtcgataaccctcacgaggttctttacaatttcagtaatcccgcctacaaggctcaaagggatcagttaatcgagaactgctctaagattacaaaagagatttttgaattgaatcaatctttgttaaagaagtaccctgaaagaaaggccccatttatggtttccactattgacgctgagaagtatgatttgcaggagaatggtgtttacgaattacagagaatcttatttcaaaaattcaatcccacttcttctaaattgatatcttgtgtcggtacttggcagttgtacttgagggactctggtgaccatattttgcacgaattgaagttggcccaagaaaacggctataagcttgggttgaaattggttcgtggtgcttatattcattctgaaaaaaaccgtaaccaaattatctttggcgataaaacgggcactgacgaaaattacgatcgtatcatcactcaagttgtcaatgatttaatcatcaatggcgaggattcttattttggtcacttggttgtcgcctctcataattaccaatcccaaatgctcgttactaatttgttgaaatctacccaagacaactcttatgccaaaagtaacattgtgttggggcaattattgggtatggcagataatgttacctatgacttgattaccaaccatggcgctaaaaacataatcaagtatgtcccatggggcccaccattggaaactaaagattatcttttgagaagattgcaagaaaacggggatgctgtgagatctgataatggctggccattaatcaaggccatagcaaagtctattccaaaaagagtaggcttatga

SEQ ID NO: 7465 - DNA, 2058 bp, Saccharomyces cerevisiae
atgaagtttatagcattaatatcaggtgggaaggactcgttctacaatatttttcactgcctgaagaacaaccatgaattgattgccctgggaaatatatacccaaaagaatcagaagagcaagaattagactctttcatgttccaaacagtaggacatgacttaatagactattattctaaatgtattggtgttccactatttagacgctcaatattacggaacacttctaacaacgtcgagttgaattatactgctactcaggatgatgaaattgaagaactatttgaacttctaagaactgtcaaagataaaattccagatttagaagctgttagtgtaggtgccatcttatcgtcttaccagaggaccagagtggaaaatgtttgttccagattgggtctagtagtgctaagctatttatggcaaagggatcaagccgaactaatgggtgaaatgtgccttatgtccaaggatgttaacaatgttgaaaacgatactaattcaggaaataaatttgacgccaggataatcaaggtggcagcaattggattgaacgagaaacatttaggaatgtccttgcctatgatgcaaccggtgttacagaaacttaaccaactttatcaagttcatatctgtggagagggtggggagtttgagacaatggtcttggatgccccttttttccaacatggatacttggaattaattgatattgtcaaatgtagcgatggtgaagttcacaatgcaaggttaaaggtaaaatttcaaccgcgtaatttgagcaaaagttttttactcaaccaattagatcaattacctgtaccttcgatttttggtaataattggcaagatttaacccaaaatttgccaaagcaacaagctaaaacaggagaacaaagatttgaaaatcacatgtcgaatgctctaccacaaacgacaatcaataaaaccaatgataagttgtacatctctaacctacaatcacgtaaaagtgagacggtcgagaagcaaagtgaagatatttttactgagctagccgacattctgcattccaaccagattccacggaatcatattttatctgcgtcattattaattagagatatgtctaatttcggaaaaatcaacaaaatatacaatgaatttttagatttgtcaaaatacggacctttgccaccatcaagagcatgcgtaggttcgaagtgcttgccagaagattgtcacgtacagttatcagttgttgttgatgtaaaaaatacaggcaaagaaaaaatcaacaagaataagggcggactacatgttcaaggccgttcatattgggctccatgtaatatcggaccatattcccaaagtacttggttaaacgatgatgcaaaccaagtcagttttatcagtgggcaaatcggactagtaccgcagtcaatggaaatattaggaacacctctcactgaccaaatagttttggcattacaacattttgatactttgtgtgaaacaataggagctcaagaaaagttactcatgacatgctatatttcagacgaatcggttctcgactctgtcatcaaaacatgggcgttttattgttcaaatatgaatcatagatcagatctatggatggacaaatctgatgatgttgaaaaatgcctagttcttgtaaagatttctgaattacctagaggcgctgttgcagaatttggtggtgttacttgtaagagattaatagtggacgataatgattccgacaagaaagaaagggaagagaatgatgatgtttcaaccgtattccagaaattgaatttgaatattgaaggttttcataacactacagttagtgcgtttggatataatagaaactttattacgggatttgtagatagtagagaggagttagaacttatcttggaaaaaaccccaaaatcagcccagattaccctctattataatcccaaagaaatcatcactttccaccatcacattggatactatccggtggagaaactttttgattaccgtggtaaagaacaccgctttgggttgcatattcgttcctaa

SEQ ID NO: 7466 - DNA, 2058 bp, Artificial Sequence
  Description of Artificial Sequence: Synthetic polynucleotide
atgaagtttatagcattaatatctggtgggaaggactctttctacaatatttttcactgcttgaagaacaaccatgaattgattgccttaggaaatatatacccaaaagaaagtgaagagcaagaattagactctttcatgttccaaacagtaggacatgacttaatagactattattctaaatgtattggtgttccattatttagacgcagcatattaagaaacacttctaacaacgtcgagttgaattatactgctactcaggatgatgaaattgaagaattatttgaacttttgagaactgtcaaagataaaattccagatttagaagctgttagtgtaggtgccatcttatcttcttaccagaggaccagagtggaaaatgtttgttccagattgggtttagtagtgttgagctatttatggcaaagggatcaagccgaattgatgggtgaaatgtgccttatgtccaaggatgttaacaatgttgaaaacgatactaattctggaaataaatttgacgccaggataatcaaggtggcagcaattggattgaacgagaaacatttaggaatgtccttgcctatgatgcaaccggtgttacagaaacttaaccaactttatcaagttcatatctgtggagagggtggggagtttgagacaatggtcttggatgccccttttttccaacatggatacttggaattaattgatattgtcaaatgtagcgatggtgaagttcacaatgcaaggttaaaggtaaaatttcaaccgcgtaatttgagcaaaagttttttactcaaccaattagatcaattacctgtaccttctatttttggtaataattggcaagatttaacccaaaatttgccaaagcaacaagctaaaacaggagaacaaagatttgaaaatcacatgagtaatgctttgccacaaacgacaatcaataaaaccaatgataagttgtacatctctaacttacaatcccgtaaaagtgagacggtcgagaagcaaagtgaagatatttttactgagttggccgacattttgcattccaaccagattccaagaaatcatattttatctgcgtctttattaattagagatatgtctaatttcggaaaaatcaacaaaatatacaatgaatttttagatttgagtaaatacggacctttgccaccatctagagcatgcgtaggttccaagtgcttgccagaagattgtcacgtacagttaagtgttgttgttgatgtaaaaaatacaggcaaagaaaaaatcaacaagaataagggcggattgcatgttcaaggccgttcttattgggctccatgtaatatcggaccatattcccaaagtacttggttaaacgatgatgcaaaccaagtcagttttatcagtgggcaaatcggattagtaccgcagtccatggaaatattaggaacacctctcactgaccaaatagttttggcattacaacattttgatactttgtgtgaaacaataggagctcaagaaaagttactcatgacatgctatatttctgacgaatctgttctcgactctgtcatcaaaacatgggcgttttattgttctaatatgaatcatagaagtgatttatggatggacaaatctgatgatgttgaaaaatgcttagttcttgtaaagatttctgaattacctagaggcgctgttgcagaatttggtggtgttacttgtaagagattaatagtggacgataatgattccgacaagaaagaaagggaagagaatgatgatgtttctaccgtattccagaaattgaatttgaatattgaaggttttcataacactacagttagtgcgtttggatataatagaaactttattacgggatttgtagatagtagagaggagttagaacttatcttggaaaaaaccccaaaaagtgcccagattaccctctattataatcccaaagaaatcatcactttccaccatcacattggatactatccggtggagaaactttttgattaccgtggtaaagaacaccgctttgggttgcatattcgttcctga

SEQ ID NO: 7467 - DNA, 2340 bp, Saccharomyces cerevisiae
atgtgttacagtaggcaagccattcctccacctgttcctaatagacctggcggtactaccaatagaggacctcctcccttaccacctcgcgcaaatgttcagccaccagtttgttcttctgagaactccagtaaacctcgagaaaatagggtggcaggtgaatcactgcgcacaccaagcagttctaaccctttagctgacagccaggtgaatagtgacaatatttttcaatcacctgtcctttctaacttaaaagctcctccttccgtcttcaacaaagttcaacacccggtaccaaagccgaatattgatgatcaatctgttgatccattggagacaaacaagttctacacaaacatgttattagacgataatacacaacctatatggacacatccttattcaatttggttttctcgtgatccagaattgtttggtttggccgccaatcatactttagcgtctcaaagggtttttgatacaactacaaatcctcccagattctacttcaatcccacaaatataaaatcatttgtattcaaggccagggaatttgtctcttcaaatgatatcaagcttgaattccgggatatgaaacatatgtccatgtgcttactaatgtctttgagtagttcccagtttatagaattcccgctggttcaggggatgggctttgtcacggctatttaccacgatttgggttttgaattaagaagcgccgttggtttcaggagcttagagcgcataagcgtgaatgaaagatatggtaaatataatatacaacttgagaataataggaattggatactttatttgacctcacctgattactcttttccacaagattttcaaatttcattactcgacagcaatacaataatatcatctcataaaatcaatggtcttatctgtcaattatctgcagactccgtccccagtattgacatggcagcgggctgttatccagtatactgtgacctatcagggcaaactgttgatgaacatttcacaaattacagatttaactatacggttgcaggctactcgcagtctggaactactctaatgtatgctttaccacatcataaagcggcattcacaccagaaatgcaggaacgtgaaattgcctcaagcctggattccacagttaaaggcttaatgactggttatctcacaaacagttttgatatgcaggttcaagtacctcaagaattgggctttgaacctgtcgcgttatctttgaataagaaggcagattacagtcaagaaaagctatctaaaattcgggaagctgctgttcaagaagttcaattgagtgaccctcaacaagaatcaaacatagattctatgtatttctctggtaagatacttgcaaagtatgcgtggattctttatgtgacacattacatccttcatgatgaaaatttaacaaaagaattattatctaaactgactattgcaatggagagattcatcagcaatcagcaagtcttacctttaaattacgacgttagttggaaaggcataatttcatcaggctcttctagccaagactttggtaactcttattataatgatcatcattttcattactcttatcatgtcataacggctgccattatctctttagtcgattctgatttaagtggagttactaacaactcctggttagaaaataatagagattgggttgagtgcttaattagagattactctggtgttgacaacgatgatccgtacttccctcaatttaggtcatttgattggtttaatggccattcatgggccaaaggactatttccaagtggtgacggtaaagatgaagaatctacttcagaagatgtcaattcttgctatgcgataaaattgtgggggttggtaactggaaattctaagttaactgacatagcgaacttacaactcggcatcatgagaaatgttttccagagctacttcctatacgaaagcaataatactgtccaaccgaaagaatttattggtaataaagttagtggtattttattcgaaaataaaattgatcacgccacgtattttggcatggagcctcaatacattcatatgattcacgccattcctataacatcagcatcttcatgggtcagaacaccaaattttgtcaaagaggagtgggaagaaaaaatgcagccgataattgatcaagtgaatgacggttggaaaggaataatcatgttaaatatggctctgcttgatccaaaattttcgtacgactttttcagccaacctgatttcaacagaaatttcctagacaatgggcaaagcttaacttggtctttagcttattcaggtgctttttcttag

SEQ ID NO: 7468 - DNA, 2340 bp, Artificial Sequence
  Description of Artificial Sequence: Synthetic polynucleotide
atgtgttacagtaggcaagccattcctccacctgttcctaatagacctggcggtactaccaatagaggacctcctcccttaccacctcgcgcaaatgttcagccaccagtttgttcttctgagaactccagtaaacctagagaaaatagggtggcaggtgaatctttacgcacaccaagcagttctaaccctttagctgacagccaggtgaatagtgacaatatttttcaaagtcctgtcctttctaacttaaaagctcctccttccgtcttcaacaaagttcaacacccggtaccaaagccgaatattgatgatcaatctgttgatccattggagacaaacaagttctacacaaacatgttattagacgataatacacaacctatatggacacatccttattctatttggttttctcgtgatccagaattgtttggtttggccgccaatcatactttagcgtctcaaagggtttttgatacaactacaaatcctcccagattctacttcaatcccacaaatataaaaagttttgtattcaaggccagggaatttgtctcttccaatgatatcaagcttgaattcagagatatgaaacatatgtccatgtgcttattgatgtctttgagtagttcccagtttatagaattcccgttggttcaggggatgggctttgtcacggctatttaccacgatttgggttttgaattaagaagcgccgttggtttcaggagcttagagcgcataagcgtgaatgaaagatatggtaaatataatatacaacttgagaataataggaattggatactttatttgacctctcctgattactcttttccacaagattttcaaatttctttactcgacagcaatacaataatatcttctcataaaatcaatggtcttatctgtcaattatctgcagactccgtccccagtattgacatggcagcgggctgttatccagtatactgtgacttaagtgggcaaactgttgatgaacatttcacaaattacagatttaactatacggttgcaggctactctcagtctggaactactttaatgtatgctttaccacatcataaagcggcattcacaccagaaatgcaggaacgtgaaattgcctccagcttagattccacagttaaaggcttaatgactggttatctcacaaacagttttgatatgcaggttcaagtacctcaagaattgggctttgaacctgtcgcgttatctttgaataagaaggcagattacagtcaagaaaagttatctaaaattagagaagctgctgttcaagaagttcaattgagtgaccctcaacaagaatctaacatagattctatgtatttctctggtaagatacttgcaaagtatgcgtggattctttatgtgacacattacatccttcatgatgaaaatttaacaaaagaattattatctaaattaactattgcaatggagagattcatcagcaatcagcaagtcttacctttaaattacgacgttagttggaaaggcataatttcttctggctcttctagccaagactttggtaactcttattataatgatcatcattttcattactcttatcatgtcataacggctgccattatctctttagtcgattctgatttaagtggagttactaacaactcctggttagaaaataatagagattgggttgagtgcttaattagagattactctggtgttgacaacgatgatccgtacttccctcaatttaggtcttttgattggtttaatggccattcttgggccaaaggattatttccaagtggtgacggtaaagatgaagaatctacttctgaagatgtcaattcttgctatgcgataaaattgtgggggttggtaactggaaattctaagttaactgacatagcgaacttacaactcggcatcatgagaaatgttttccagagctacttcttgtacgaaagcaataatactgtccaaccgaaagaatttattggtaataaagttagtggtattttattcgaaaataaaattgatcacgccacgtattttggcatggagcctcaatacattcatatgattcacgccattcctataacaagtgcatcttcttgggtcagaacaccaaattttgtcaaagaggagtgggaagaaaaaatgcagccgataattgatcaagtgaatgacggttggaaaggaataatcatgttaaatatggctttacttgatccaaaattttcttacgactttttcagccaacctgatttcaacagaaatttcttggacaatgggcaaagcttaacttggtctttagcttattctggtgctttttcttga

SEQ ID NO: 7469 - DNA, 606 bp, Saccharomyces cerevisiae
atggatgagatggataatgtgatacgatctctggagcaagaatatcggttaatattgctcttgaaccataggaacaaaaatcaacatagagcggctagctggtatggatcgttcaatgagatgaaaagaaattgtggacaaataataacgctttttagctcgagaagattacaagccaaacgccttaaagatgttgaatgggtcaagttgcacaggctattacagagagcactttttagacagttaaagagatggtactggcagttcaatggcgtaattgcgctgggacaatttgtaacgttgggttgtacactagtaacattgctggcaaatgtgagggcactgtatatgagattatgggagattaatgaaactgagtttataagatgtggatgcttaataaagaacttaccgagaacaaaagcaaaatcggttgtgaacgatgtcgaagaacttggagaaattatagatgaagatattggcaacaacgttcaagaaaacgaactagtgataacgtctataccaaagcctctgacagagaactgtaagaagaaaaagaaaaggaaaaagaagaacaaatcagccattgatggcatattcggataa

SEQ ID NO: 7470 - DNA, 606 bp, Artificial Sequence
  Description of Artificial Sequence: Synthetic polynucleotide
atggatgagatggataatgtgataagatctttggagcaagaatatagattaatattgctcttgaaccataggaacaaaaatcaacatagagcggctagctggtatggaagtttcaatgagatgaaaagaaattgtggacaaataataacgctttttagcagcagaagattacaagccaaacgccttaaagatgttgaatgggtcaagttgcacaggttattacagagagcactttttagacagttaaagagatggtactggcagttcaatggcgtaattgcgttgggacaatttgtaacgttgggttgtacattggtaacattgttggcaaatgtgagggcattatatatgagattatgggagattaatgaaactgagtttataagatgtggatgcttaataaagaacttaccgagaacaaaagcaaaatctgttgtgaacgatgtcgaagaacttggagaaattatagatgaagatattggcaacaacgttcaagaaaacgaattagtgataacgtctataccaaagcctttaacagagaactgtaagaagaaaaagaaaaggaaaaagaagaacaaaagtgccattgatggcatattcggatga

SEQ ID NO: 7471 - DNA, 903 bp, Saccharomyces cerevisiae
atggttaataattcacagcatccttacatcaaagatggatggtttagagagattaatgataaaagttttccgggccaggcctttactatgaccgtggactcaatactttatgaagcccgcagtgaatttcaggacatcttaatcttccgtaacaaggtatacggtactgttttggtcctcgatggtattgtccaatgtacggaatttgatgagtttgcctatcaagagatgatcacccacattgccatgtttgcgcattctaatcccaagcgtgtacttatcattggcggtggggacggaggtgtcttaagggaagtagccaagcacagctgtgtagaagatatcactatggtagaaattgactcatcagtgatcgaattatcccgtaagttcttgcccacattgagtaatggtgctttcgatgacgaaaggttggacttgaaactttgcgatggcttcaagttcttacaagatataggtgcttccgacgtccataagaaatttgacgtcattattacagatagttctgatcctgaaggtccagctgaagcgttttttcaagagaggtatttcgaactattgaaagatgctttaaatcctaatggcgttgttattatgcaaagctctgaaaatttttggttaaatttaaaatacttacatgatttgaaaaatacagccaaaaaggtatttcctaatacagaatattgctataccatggttccaacctatacatctggccaattaggtttaattgtttgcagtaataacgccaatataccgttgaacattccgcaaagaaagatatctgagcaagaacaagggaagctgaagtactataatcctcaaatacattctagtgcgtttgttttgcctacttgggcagacaaggtcattaatgaatga

SEQ ID NO: 7472 - DNA, 903 bp, Artificial Sequence
  Description of Artificial Sequence: Synthetic polynucleotide
atggttaataattctcagcatccttacatcaaagatggatggtttagagagattaatgataaaagttttccgggccaggcctttactatgaccgtggacagtatactttatgaagcccgcagtgaatttcaggacatcttaatcttccgtaacaaggtatacggtactgttttggtcctcgatggtattgtccaatgtacggaatttgatgagtttgcctatcaagagatgatcacccacattgccatgtttgcgcattctaatcccaagcgtgtacttatcattggcggtggggacggaggtgtcttaagggaagtagccaagcacagctgtgtagaagatatcactatggtagaaattgactcttctgtgatcgaattatcccgtaagttcttgcccacattgagtaatggtgctttcgatgacgaaaggttggacttgaaactttgcgatggcttcaagttcttacaagatataggtgcttccgacgtccataagaaatttgacgtcattattacagatagttctgatcctgaaggtccagctgaagcgttttttcaagagaggtatttcgaattattgaaagatgctttaaatcctaatggcgttgttattatgcaaagctctgaaaatttttggttaaatttaaaatacttacatgatttgaaaaatacagccaaaaaggtatttcctaatacagaatattgctataccatggttccaacctatacatctggccaattaggtttaattgtttgcagtaataacgccaatataccgttgaacattccgcaaagaaagatatctgagcaagaacaagggaagttgaagtactataatcctcaaatacattctagtgcgtttgttttgcctacttgggcagacaaggtcattaatgaatga

SEQ ID NO: 7473 - DNA, 189 bp, Saccharomyces cerevisiae
atggacactgaagagaaaaaaaagactacagcgtcagtagagcatgcccggatgttgcaaaatgaaatacaacagttatttgctcagttgcgggatacgaattctcaaattcgctgcgatcttaacgagtttgaacaaataaaggaatcatctacaacagcggattcaaccacgaacagtgcgaactga

SEQ ID NO: 7474 - DNA, 189 bp, Artificial Sequence
  Description of Artificial Sequence: Synthetic polynucleotide
atggacactgaagagaaaaaaaagactacagcgagtgtagagcatgccagaatgttgcaaaatgaaatacaacagttatttgctcagttgagagatacgaattctcaaattcgctgcgatcttaacgagtttgaacaaataaaggaaagctctacaacagcggattctaccacgaacagtgcgaactga

SEQ ID NO: 7475 - DNA, 306 bp, Saccharomyces cerevisiae
atgactatgaatggaataccagtgaaattattaaatgaggcacagggacatatcgtttctctggagctaacaacgggagcgacttatcgtggtaaacttgttgaaagcgaagatagcatgaacgtacagctaagagatgtaatagctacagagccccagggggctgtaacacacatggatcaaatattcgtacgtgggtcacagatcaaatttatcgttgttccagatctcttaaagaatgcaccattattcaaaaaaaactcatcaagacctatgccaccaataagaggacctaagagaaggtga

SEQ ID NO: 7476 - DNA, 306 bp, Artificial Sequence
  Description of Artificial Sequence: Synthetic polynucleotide
atgactatgaatggaataccagtgaaattattaaatgaggcacagggacatatcgtttctttggagttgacaacgggagcgacttatcgtggtaaacttgttgaaagcgaagatagcatgaacgtacagttaagagatgtaatagctacagagccccagggggctgtaacacacatggatcaaatattcgtacgtgggtctcagatcaaatttatcgttgttccagatctcttaaagaatgcaccattattcaaaaaaaactcttctagacctatgccaccaataagaggacctaagagaaggtga

SEQ ID NO: 7477 - DNA, 2757 bp, Saccharomyces cerevisiae
atgataaaaacacgtatagaggaagttcagttacaattcctcacagggaataccgaacttacgcatttgaaagtctccaatgatcaacttatagtaacgacacaacggacaatttacagaataaatttacaagatccggccatcgtcaatcactttgactgtccattaagcaaggaactagaaactataatgaatgttcatgtttcaccaatgggtagtgtcattcttattcgaaccaactttggccggtatatgttgctaaaggatggcgaattcactcaattgaacaaaataaaaaatctcgacctcagctcgctacattggatcaacgaaaccacctttctgatgggaatcaagaagacgcccaagttgtaccgagttgaattgacaggaaaggatataaccacgaagctatggtatgaaaacaagaaactctctggtggaattgatggcattgcgtattgggagggctctctgctattaactataaaagacaacattttatactggagagacgtgacaaatatgaaatttcctttagtattaccagatgaatctgagcaatttgaaaggttaaaacatcatgcgataaagaaattcgattcgtacaatggactctttgcttgggtcacatccaatggaattgtctttggtgatttaaaagaaaagcaaatggaaaaagatcctgcttctaataattttggaaaattcctatcttcgtcgaaggttctactcaatttcgaactgcctgactaccagaatgataaagatcacctcatcaaggatatagttttgactgctttccacatcctgcttttgagaaaaaatacggtaacaatggtgagtcaattaaataacgacgtagtgtttcatgaaactataccgagacaccagttgactggctccaacactgatagtaatgagaaatttttaggcctagtaagagattcggtgaaagaaacgttttggtgtttctcaaacatcaacgtctttgaaattattatcgaaaatgagcctaattcggtatggaatttattagttcgggataacaaatttgacaaggccctatcgttgaaaggcttgacggtgagggaaatagaatctgtaaaactttcaaaggcaatgtaccttttccacactgctaaagattttcattccgcggctcaaactttgggaagcatgaaggacttgtcacactttggggaaatcgcattgaattttctccaaataaaagattacaacgatttgaacgtaatattgataaaacagttggataacgttccctggaaatcaactcaagtcgtcttgtcgagttggattatttggaattttatgaaacaattgaatgatattgaattaaagataaacacaactaagccagcttctactgatgaagacaatttgctaaactggaacctgaatctcaaggagaaatcgaatgaactaacgaaatttttggaaagccatctagaaaaacttgataatgaaaccgtttatcaaataatgtccaaacaaaaccggcaaaacgaattattgatttttgctagtctaatcaacgatatgaagtttttattatcattttggattgaccaaggaaattggtatgagtccttgaaaattctgcttacaataaataaccatgacctagtctataagtactctttgattctcttattgaattcaccagaggctactgtgtcaacgtggatgaaaatcaaagacttggatccaaataagttaattccaacaattttaaaatttttcacaaattggcaaaataattctaaactgattactaacatatcagaatatcctgaaaattactcactgacatatttgaaatggtgcgttagagaagtcccaaaaatgtgtaatccaatagtgtacaattctatcctttacatgatgattactgatccgagaaacgatatgatactagaaaatgatataatcaaattcatgaaatcaaacgaaaacaaatatgatcttaatttccagttacggttgtctttaaaattcaagaaaactaagacctcgattttccttttaacacgtttaaacttattcgaggatgccattgacttggcattgaaaaataacttgattgatgattgtaaggtaattgtgaatgacgagattcttatagaggattataaattaaggaaaagattatggctgaaaattgcaaaacacttattactttcaatgaaagacatagatataaagcaattaattcgaacgattttaaatgattccaacgaaattttaacgattaaggatcttttgccattttttaatgagtatactacaattgctaacttgaaagaagaactgatcaagtttttagagaatcacaacatgaaaatgaatgagatttcagaagacataataaactccaagaatttgaaggtggaaataaacacagaaatttctaaatttaatgagatttacaggatactagagccaggtaagtcttgtgatgaatgtggtaaatttctacagatcaaaaagttcattgttttcccctgtggccactgttttcactggaactgtataatcagggtaatactgaactcaaatgattataacttgaggcagaagacggaaaacttcttaaaggccaaaagtaagcataatttgaatgatttagaaaatatcattgtagagaaatgtggattgtgcagtgatatcaacatcaataaaattgatcagccaatatctattgatgaaacagaattagccaaatggaatgaatag

SEQ ID NO: 7478 - DNA, 2757 bp, Artificial Sequence
  Description of Artificial Sequence: Synthetic polynucleotide
atgataaaaacacgtatagaggaagttcagttacaattcctcacagggaataccgaacttacgcatttgaaagtctccaatgatcaacttatagtaacgacacaaagaacaatttacagaataaatttacaagatccggccatcgtcaatcactttgactgtccattaagcaaggaattggaaactataatgaatgttcatgtttctccaatgggtagtgtcattcttattagaaccaactttggcagatatatgttgttgaaggatggcgaattcactcaattgaacaaaataaaaaatctcgacctcagctctttgcattggatcaacgaaaccacctttttgatgggaatcaagaagacgcccaagttgtacagagttgaattgacaggaaaggatataaccacgaagttatggtatgaaaacaagaaactctctggtggaattgatggcattgcgtattgggagggctctttattattaactataaaagacaacattttatactggagagacgtgacaaatatgaaatttcctttagtattaccagatgaatctgagcaatttgaaaggttaaaacatcatgcgataaagaaattcgattcttacaatggactctttgcttgggtcacatccaatggaattgtctttggtgatttaaaagaaaagcaaatggaaaaagatcctgcttctaataattttggaaaattcttatcttcttccaaggttttactcaatttcgaattacctgactaccagaatgataaagatcacctcatcaaggatatagttttgactgctttccacatcttacttttgagaaaaaatacggtaacaatggtgagtcaattaaataacgacgtagtgtttcatgaaactataccgagacaccagttgactggctccaacactgatagtaatgagaaatttttaggcttagtaagagattctgtgaaagaaacgttttggtgtttcagtaacatcaacgtctttgaaattattatcgaaaatgagcctaattctgtatggaatttattagttagagataacaaatttgacaaggccctttctttgaaaggcttgacggtgagggaaatagaatctgtaaaactttccaaggcaatgtaccttttccacactgctaaagattttcattccgcggctcaaactttgggaagcatgaaggacttgtctcactttggggaaatcgcattgaattttctccaaataaaagattacaacgatttgaacgtaatattgataaaacagttggataacgttccctggaaatctactcaagtcgtcttgagcagttggattatttggaattttatgaaacaattgaatgatattgaattaaagataaacacaactaagccagcttctactgatgaagacaatttgttgaactggaacttgaatctcaaggagaaatctaatgaattgacgaaatttttggaaagccatttggaaaaacttgataatgaaaccgtttatcaaataatgtccaaacaaaacagacaaaacgaattattgatttttgctagtttaatcaacgatatgaagtttttattatctttttggattgaccaaggaaattggtatgagtccttgaaaattttacttacaataaataaccatgacttggtctataagtactctttgattctcttattgaattctccagaggctactgtgagtacgtggatgaaaatcaaagacttggatccaaataagttaattccaacaattttaaaatttttcacaaattggcaaaataattctaaattgattactaacatatctgaatatcctgaaaattactctttaacatatttgaaatggtgcgttagagaagtcccaaaaatgtgtaatccaatagtgtacaattctatcctttacatgatgattactgatccgagaaacgatatgatattggaaaatgatataatcaaattcatgaaaagtaacgaaaacaaatatgatcttaatttccagttaagattgtctttaaaattcaagaaaactaagacctctattttccttttaacacgtttaaacttattcgaggatgccattgacttggcattgaaaaataacttgattgatgattgtaaggtaattgtgaatgacgagattcttatagaggattataaattaaggaaaagattatggttgaaaattgcaaaacacttattactttctatgaaagacatagatataaagcaattaattagaacgattttaaatgattccaacgaaattttaacgattaaggatcttttgccattttttaatgagtatactacaattgctaacttgaaagaagaattgatcaagtttttagagaatcacaacatgaaaatgaatgagatttctgaagacataataaactccaagaatttgaaggtggaaataaacacagaaatttctaaatttaatgagatttacaggatattggagccaggtaagtcttgtgatgaatgtggtaaatttttgcagatcaaaaagttcattgttttcccctgtggccactgttttcactggaactgtataatcagggtaatattaaacagtaatgattataacttgaggcagaagacggaaaacttcttaaaggccaaaagtaagcataatttgaatgatttagaaaatatcattgtagagaaatgtggattgtgcagtgatatcaacatcaataaaattgatcagccaatatctattgatgaaacagaattagccaaatggaatgaatga

SEQ ID NO: 7479 - DNA, 2193 bp, Saccharomyces cerevisiae
atgaccattgatggcacggggcaatctaaggaggcgctgcaagatgaacggttaaatactggctctgataaggtttaccaaaactatatgatgcctgctttagaactctacgatgccaaggtctccataaaccattggcagttgcgggattgtatcaaaccaggctccatgaaccagagtaaactgtattatatttacgatcattcgataagagtactagatacggattcttccgtattgaggtctccagtaaggcgacataattctattcaaccgagtaacagtggtaaaaactctactgaaaaaacgtctacaaaaggttctaggacaacgggctcgtatatctccaaaaatttacatgttccttccgagaaactggtagagttcaactttaagccgagatgtttcacggaattaaatgggttgactgtttgtggtggtctaatcggttctgatgataagggattcccttctaattggaaccgtttagctcaagatgcaaatatttcgttgccgccaccttcccaaccgattaatatttccaaaaatattagtttccctataaattcacattattcaaatcctaatatctggaagggcatcgtggagttttataatcaagaaacggacacaatgatgacttttacgttgggccagttcatcaataattgtgtcacactttatgacagggccagtatgcagtttgatctttttgcatgcaacaatgatggtcatctttaccaatgcgatgtaagtaatagagatgtaacactagtgaagcgttatgcggatttaaaatttcctttgaataacgcttctttgtcacatgatggtcaaacgatggtagtgtctggcgattctaataaatttgctgtttacaatcaaaatgaattaaccaaccaattctccttacattacgataatcatccttcctggggtagttctgtcaatcgtgttagacggataccacggtttgcgttacctgatgaatcagaatatatcgaaaacatatatgaagctccaaattcagaccatgggttttataactctttttccgaaaacgacttgcaatttgcgacggtatttcaaaatggtacttgcgcaatttatgatatcagaaacatggctactcccatggcagaaattagttcgactagaccacattcccacaacggtgcatttagagtctgtaggttcagttatggcctagatgatttattattcatttctgaacatcagggcagagtacacgttgtagatacaagaaactacgttaaccaccaagttattgttattcctgataaagttaatatggaatatataaacgaacggaagcataatacaaatcataatttcaccacaaataataacaacgaaaacgaaagtaatgatagcaaaaatgaattacaaggggcggattatcggtctttatcaagaagaagattttcgctgccctctatgccaaatgtaaccacagaaccatggataactatggctcaaagaatcccaaaaaagtatttggagccgcaaattctaccttttccgaaagttatggataaaattagtaacgaatcggttctgttttctacgaaaggtagttcatcaagtgacgtagctcatccatacaagagacgatgttcattcagggtaaggagagtatcgacttcggcaccaaccgccgattattctaataacaatgttaacgcaagtcttggcacacctgctgctgattctatcgcaacttcgtcgtcaaattccgcacctcaaaatttaattgaccccttaatactttctcaccagcaagctagtaatgatgtttttgaagatgatgaatattatgaagcttacaatgatgttcactcaacgtatcgtgtttcttcagactatcatggtgtttccgcaagagcttttgaaagttttctcagaccaccttcaacgccagacttaccgtcagatgatgacaattttgctgcaaatagtaggaataatagaggcacatccaattttttgagaagaccagtgattacaactcaggaaagtaacgaattctcagaagaaaacaatatatcaggtatcgattgggttgaagataggaatgggagctccttgattattggtacagattacggaattatgaggtggaatattaactcatgggcaagaagaagtttctctagttatgacttatgttga

SEQ ID NO: 7480 - DNA, 2193 bp, Artificial Sequence
  Description of Artificial Sequence: Synthetic polynucleotide
atgaccattgatggcacggggcaatctaaggaggcgttgcaagatgaaagattaaatactggctctgataaggtttaccaaaactatatgatgcctgctttagaactctacgatgccaaggtctccataaaccattggcagttgagagattgtatcaaaccaggctccatgaaccagagtaaactttattatatttacgatcattccataagagtattggatacggattcttccgtattgaggtctccagtaaggagacataattctattcaaccgagtaacagtggtaaaaactctactgaaaaaacgtctacaaaaggttctaggacaacgggctcctatatctccaaaaatttacatgttccttccgagaaattagtagagttcaactttaagccgagatgtttcacggaattaaatgggttgactgtttgtggtggtttgatcggttctgatgataagggattcccttctaattggaaccgtttagctcaagatgcaaatatttctttgccgccaccttcccaaccgattaatatttccaaaaatattagtttccctataaattctcattattctaatcctaatatctggaagggcatcgtggagttttataatcaagaaacggacacaatgatgacttttacgttgggccagttcatcaataattgtgtcacactttatgacagggccagtatgcagtttgatctttttgcatgcaacaatgatggtcatctttaccaatgcgatgtaagtaatagagatgtaacattagtgaagcgttatgcggatttaaaatttcctttgaataacgcttctttgtctcatgatggtcaaacgatggtagtgtctggcgattctaataaatttgctgtttacaatcaaaatgaattaaccaaccaattctccttacattacgataatcatccttcctggggtagttctgtcaatcgtgttagaagaataccaagatttgcgttacctgatgaaagtgaatatatcgaaaacatatatgaagctccaaatagtgaccatgggttttataactctttttccgaaaacgacttgcaatttgcgacggtatttcaaaatggtacttgcgcaatttatgatatcagaaacatggctactcccatggcagaaattagttctactagaccacattcccacaacggtgcatttagagtctgtaggttcagttatggcttggatgatttattattcatttctgaacatcagggcagagtacacgttgtagatacaagaaactacgttaaccaccaagttattgttattcctgataaagttaatatggaatatataaacgaaagaaagcataatacaaatcataatttcaccacaaataataacaacgaaaacgaaagtaatgatagcaaaaatgaattacaaggggcggattatagatctttatctagaagaagattttctttaccctctatgccaaatgtaaccacagaaccatggataactatggctcaaagaatcccaaaaaagtatttggagccgcaaattttaccttttccgaaagttatggataaaattagtaacgaatctgttttattttctacgaaaggtagttcttccagtgacgtagctcatccatacaagagaagatgttctttcagggtaaggagagtatccacttctgcaccaaccgccgattattctaataacaatgttaacgcaagtcttggcacacctgctgctgattctatcgcaacttcttcttccaattccgcacctcaaaatttaattgaccccttaatactttctcaccagcaagctagtaatgatgtttttgaagatgatgaatattatgaagcttacaatgatgttcactccacgtatcgtgtttcttctgactatcatggtgtttccgcaagagcttttgaaagttttctcagaccaccttctacgccagacttaccgagtgatgatgacaattttgctgcaaatagtaggaataatagaggcacatccaattttttgagaagaccagtgattacaactcaggaaagtaacgaattctctgaagaaaacaatatatctggtatcgattgggttgaagataggaatgggagctccttgattattggtacagattacggaattatgaggtggaatattaacagttgggcaagaagaagtttctctagttatgacttatgttga

SEQ ID NO: 7481 - DNA, 822 bp, Saccharomyces cerevisiae
atgtccaacccatttgatttgttaggtaacgacgtcgaagacgctgacgttgtcgttttgccaccaaaggaaatcgtcaagagcaacacttcctccaagaaggctgacgtcccacctccatccgctgacccatccaaggctagaaagaacagaccaagaccttctggtaacgagggtgctatcagagacaagaccgctggtagaagaaacaacagatcaaaggatgtcactgactctgccaccaccaagaagtccaacaccagaagggccactgaccgccactctagaactggtaagactgacaccaagaagaaggttaaccaaggttggggtgatgacaagaaggaattgagtgctgaaaaggaagctcaagccgatgctgctgctgaaattgctgaagacgctgcagaagctgaagacgctggtaagccaaagaccgctcaattgtctttgcaagactacttgaaccaacaagctaacaaccagttcaacaaggtcccagaagctaagaaggttgaattagacgctgaaagaattgaaactgctgaaaaggaagcttacgttccagcaaccaaggtcaagaacgtcaaatctaagcaattgaagaccaaggagtacttggaatttgatgccacttttgttgaatctaacactagaaagaacttcggtgacagaaacaacaacagcagaaacaacttcaacaaccgtcgtggtggtagaggcgctagaaagggtaacaacactgctaacgctactaactctgctaacaccgttcaaaagaaccgtaacattgacgtttctaacttgccatctttggcttaa

SEQ ID NO: 7482 - DNA, 822 bp, Artificial Sequence
  Description of Artificial Sequence: Synthetic polynucleotide
atgtccaacccatttgatttgttaggtaacgacgtcgaagacgctgacgttgtcgttttgccaccaaaggaaatcgtcaagagcaacacttcctccaagaaggctgacgtcccacctccatccgctgacccatccaaggctagaaagaacagaccaagaccttctggtaacgagggtgctatcagagacaagaccgctggtagaagaaacaacagatccaaggatgtcactgactctgccaccaccaagaagtccaacaccagaagggccactgaccgccactctagaactggtaagactgacaccaagaagaaggttaaccaaggttggggtgatgacaagaaggaattgagtgctgaaaaggaagctcaagccgatgctgctgctgaaattgctgaagacgctgcagaagctgaagacgctggtaagccaaagaccgctcaattgtctttgcaagactacttgaaccaacaagctaacaaccagttcaacaaggtcccagaagctaagaaggttgaattagacgctgaaagaattgaaactgctgaaaaggaagcttacgttccagcaaccaaggtcaagaacgtcaaatctaagcaattgaagaccaaggagtacttggaatttgatgccacttttgttgaatctaacactagaaagaacttcggtgacagaaacaacaacagcagaaacaacttcaacaaccgtcgtggtggtagaggcgctagaaagggtaacaacactgctaacgctactaactctgctaacaccgttcaaaagaaccgtaacattgacgtttctaacttgccatctttggcttga

SEQ ID NO: 7483 - DNA, 1023 bp, Saccharomyces cerevisiae
atgatattaagtcagaggaggatgctgagttcaaagcaactaatagagaacttgataagatacaaatttcataaaacaccatatactcggagctcaatatggcctttcaaaagaaattcggcggtaataatactattattcattggaatgaaaggcgaactacgagtgcttttaactaaacgttcaagaacattgagaagcttctcaggtgatgtttcatttcctggaggtaaagctgattattttcaagaaacctttgaaagcgtagccagaagagaagctgaagaggagattgggttaccgcatgatcctgaggtcttgcataaggagttcggaatgaaattagacaatttggtcatggatatgccatgctatttatcaagaacatttttaagtgttaagccaatggtctgttttctttacaaagataaattagaaaaacatgaggataaatacaaagttcccttagatatccgtaagttttttggtaagctgaaccctggagaaacatcttctttgttttctgtaccactcaatgacttagttatacatcttcttcctgaagccgatgaggatgttaagagttatcaagcagaatattttgagcggaaggagtataagcttaattggggtggaataaaatggttgattatgcattatcattttcacgtagcaaataataacgaaatgccatggttgcaaaccatagaggatttatcaagttcagacgaagacggtgttgatggaggtattttcagattcagggatttgtggggactcacatgtaaaatattattcgacgtttcatgtatagctaatggactaatggacgaaaagttaaaaggagaactagggcacgaagatttgatagttggactacatgactatggtaatcagatgcaaccgaacggaagaagtgaatgggagataggaatgatcaacggcgacagaaacttaaaatatagcgatgtgatacctgaatactacatgaagcacctgctggagtgccgctcgctttggtaa

SEQ ID NO: 7484 - DNA, 1023 bp, Artificial Sequence
  Description of Artificial Sequence: Synthetic polynucleotide
atgatattaagtcagaggaggatgttaagttccaagcaattgatagagaacttgataagatacaaatttcataaaacaccatatactagaagcagtatatggcctttcaaaagaaattctgcggtaataatattattattcattggaatgaaaggcgaattaagagtgcttttaactaaacgttccagaacattgagaagcttctctggtgatgtttcttttcctggaggtaaagctgattattttcaagaaacctttgaaagcgtagccagaagagaagctgaagaggagattgggttaccgcatgatcctgaggtcttgcataaggagttcggaatgaaattagacaatttggtcatggatatgccatgctatttatctagaacatttttaagtgttaagccaatggtctgttttctttacaaagataaattagaaaaacatgaggataaatacaaagttcccttagatatccgtaagttttttggtaagttgaaccctggagaaacatcttctttgttttctgtaccactcaatgacttagttatacatcttcttcctgaagccgatgaggatgttaagagttatcaagcagaatattttgagagaaaggagtataagcttaattggggtggaataaaatggttgattatgcattatcattttcacgtagcaaataataacgaaatgccatggttgcaaaccatagaggatttatccagtagtgacgaagacggtgttgatggaggtattttcagattcagggatttgtggggactcacatgtaaaatattattcgacgtttcttgtatagctaatggattaatggacgaaaagttaaaaggagaattggggcacgaagatttgatagttggattgcatgactatggtaatcagatgcaaccgaacggaagaagtgaatgggagataggaatgatcaacggcgacagaaacttaaaatatagcgatgtgatacctgaatactacatgaagcacttgttggagtgccgctctctttggtga

SEQ ID NO: 7485 - DNA, 1731 bp, Saccharomyces cerevisiae
atgtccctttctctgggtgccgctatttacattgcattaaaacctatatttaaaatttacaccattatgcttgttggctatttggtagctaagttcgatattgtttccatggaaaatgcgaaaggtatatcaaatatggttgttaacgctattttgccttgtttgaccttcaacaaaattgtgtccaatatttcatggagggatataaaggagattggagtgataatactttcagcttttatcttgtttgttttaggtgccacgggcgccttatttactacatttgctacgactgtgcccaaaaaattcttctgggggctcatatttgcgggtttctttccaaatatatcagatttacctattgcctatattcagagcatgggtaacggctccatttttactgctgaagaagctgataaaggtgttgcttattcctgcatttttttatttattcaaagtttcctaatgatgaattttggaatgtggagagtggtcggacttgattttagagatacaaaagaaccagatagtgagaatattactccgtcagtaagtcccgctatcgacgatcgcaaacttactgaaataacaaagttacctaatatcacacgtcctacaaatgcctatcaatcggaagatgcgagaagtaatagcgatttgtcttgtaactctattactacaaatgaaatgacaccgcaggcattctacgaaggttttactggctacatcaaaccctataaagaatcaaatggtgcatcccataaatttgaaagtgaccttccgcatgctgaaatatatagggtttcctcgacttattcaagcccaggcgcattggagttctcgcgaatagatggcagttccctctcatatagtcgtatatcaaaaaatagcgatggcagaagttatagaagaaaaaggaaagcggatatgaatgagttgatttccaaatacagtgccgccgaaaaaataaggcaaggtgaattagatttatcaagaccactatccttgactgaagaagttggaagcaggaacgcaagtattggtaatgtgcacactggttataccgatgaaagttccatcgaagaagaaaattgcactaatatggccaccgacgggaggggtagcctctccttctttatagagagacacaatctcaaatggttgcagtactttattataaattgcctcaggccagcatctctgggggcaatactaggaataatatgtgcattaattccctgggttaaagcatgcttcgtaacgacatatgttcacgttcataaggcgcctgatggagaacctgttctgaattttttaatggattttacagagtatattggaaatgcatgtgttccattggggcttctattacttggcggaacgttggcaagattagaaattaagtcattgccacctggatttattaaatccgccttattgatgacatgctttcgattaattgtcattcctattattggcgtcctatgggtaaataaactatattcgatcgattggctggatacgggcataggaaaatttgacatgatattaacgtggtccatgccgagtgctactgctcaagtatatttcacagcattttatacgccagcatgtggtgatcacattcaaatgaactgtttgtccgtcttatttgtcatgcagtatgcgattcttttcatcactgtggcgtttgttgttacatataccttaaaggtcgatttaaaagtttga

SEQ ID NO: 7486 - DNA, 1731 bp, Artificial Sequence
  Description of Artificial Sequence: Synthetic polynucleotide
atgtccctttctttgggtgccgctatttacattgcattaaaacctatatttaaaatttacaccattatgcttgttggctatttggtagctaagttcgatattgtttccatggaaaatgcgaaaggtatatccaatatggttgttaacgctattttgccttgtttgaccttcaacaaaattgtgtccaatatttcttggagggatataaaggagattggagtgataatactttctgcttttatcttgtttgttttaggtgccacgggcgccttatttactacatttgctacgactgtgcccaaaaaattcttctgggggctcatatttgcgggtttctttccaaatatatctgatttacctattgcctatattcagagcatgggtaacggctccatttttactgctgaagaagctgataaaggtgttgcttattcctgcatttttttatttattcaaagtttcttaatgatgaattttggaatgtggagagtggtcggacttgattttagagatacaaaagaaccagatagtgagaatattactccgtctgtaagtcccgctatcgacgatcgcaaacttactgaaataacaaagttacctaatatcacacgtcctacaaatgcctatcaaagtgaagatgcgagaagtaatagcgatttgtcttgtaactctattactacaaatgaaatgacaccgcaggcattctacgaaggttttactggctacatcaaaccctataaagaaagtaatggtgcatcccataaatttgaaagtgaccttccgcatgctgaaatatatagggtttccagcacttattctagcccaggcgcattggagttcagtagaatagatggcagttccctctcttatagtcgtatatccaaaaatagcgatggcagaagttatagaagaaaaaggaaagcggatatgaatgagttgatttccaaatacagtgccgccgaaaaaataaggcaaggtgaattagatttatctagaccattgtccttgactgaagaagttggaagcaggaacgcaagtattggtaatgtgcacactggttataccgatgaaagttccatcgaagaagaaaattgcactaatatggccaccgacgggaggggtagcctctccttctttatagagagacacaatctcaaatggttgcagtactttattataaattgcctcaggccagcatctttaggggcaatattaggaataatatgtgcattaattccctgggttaaagcatgcttcgtaacgacatatgttcacgttcataaggcgcctgatggagaacctgttttgaattttttaatggattttacagagtatattggaaatgcatgtgttccattggggcttttattacttggcggaacgttggcaagattagaaattaagtctttgccacctggatttattaaatccgccttattgatgacatgctttagattaattgtcattcctattattggcgtcttgtgggtaaataaactttattctatcgattggcttgatacgggcataggaaaatttgacatgatattaacgtggtccatgccgagtgctactgctcaagtatatttcacagcattttatacgccagcatgtggtgatcacattcaaatgaactgtttgtccgtcttatttgtcatgcagtatgcgattcttttcatcactgtggcgtttgttgttacatataccttaaaggtcgatttaaaagtttga

SEQ ID NO: 7487 - DNA, 2052 bp, Saccharomyces cerevisiae
atgacaatcaaggaacataaagtagtttatgaagctcacaacgtaaaggctcttaaggctcctcaacatttttacaacagccaacccggcaagggttacgttactgatatgcaacattatcaagaaatgtatcaacaatctatcaatgagccagaaaaattctttgataagatggctaaggaatacttgcattgggatgctccatacaccaaagttcaatctggttcattgaacaatggtgatgttgcatggtttttgaacggtaaattgaatgcatcatacaattgtgttgacagacatgcctttgctaatcccgacaagccagctttgatctatgaagctgatgacgaatccgacaacaaaatcatcacatttggtgaattactcagaaaagtttcccaaatcgctggtgtcttaaaaagctggggcgttaagaaaggtgacacagtggctatctatttgccaatgattccagaagcggtcattgctatgttggctgtggctcgtattggtgctattcactctgttgtctttgctgggttctccgctggttcgttgaaagatcgtgtcgttgacgctaattctaaagtggtcatcacttgtgatgaaggtaaaagaggtggtaagaccatcaacactaaaaaaattgttgacgaaggtttgaacggagtcgatttggtttcccgtatcttggttttccaaagaactggtactgaaggtattccaatgaaggccggtagagattactggtggcatgaggaggccgctaagcagagaacttacctacctcctgtttcatgtgacgctgaagatcctctatttttattatacacttccggttccactggttctccaaagggtgtcgttcacactacaggtggttatttattaggtgccgctttaacaactagatacgtttttgatattcacccagaagatgttctcttcactgccggtgacgtcggctggatcacgggtcacacctatgctctatatggtccattaaccttgggtaccgcctcaataattttcgaatccactcctgcctacccagattatggtagatattggagaattatccaacgtcacaaggctacccatttctatgtggctccaactgctttaagattaatcaaacgtgtaggtgaagccgaaattgccaaatatgacacttcctcattacgtgtcttgggttccgtcggtgaaccaatctctccagacttatgggaatggtatcatgaaaaagtgggtaacaaaaactgtgtcatttgtgacactatgtggcaaacagagtctggttctcatttaattgctcctttggcaggtgctgtcccaacaaaacctggttctgctaccgtgccattctttggtattaacgcttgtatcattgaccctgttacaggtgtggaattagaaggtaatgatgtcgaaggtgtccttgccgttaaatcaccatggccatcaatggctagatctgtttggaaccaccacgaccgttacatggatacttacttgaaaccttatcctggtcactatttcacaggtgatggtgctggtagagatcatgatggttactactggatcaggggtagagttgacgacgttgtaaatgtttccggtcatagattatccacatcagaaattgaagcatctatctcaaatcacgaaaacgtctcggaagctgctgttgtcggtattccagatgaattgaccggtcaaaccgtcgttgcatatgtttccctaaaagatggttatctacaaaacaacgctactgaaggtgatgcagaacacatcacaccagataatttacgtagagaattgatcttacaagttaggggtgagattggtcctttcgcctcaccaaaaaccattattctagttagagatctaccaagaacaaggtcaggaaagattatgagaagagttctaagaaaggttgcttctaacgaagccgaacagctaggtgacctaactactttggccaacccagaagttgtacctgccatcatttctgctgtagagaaccaatttttctctcaaaaaaagaaataa

SEQ ID NO: 7488 - DNA, 2052 bp, Artificial Sequence
  Description of Artificial Sequence: Synthetic polynucleotide
atgacaatcaaggaacataaagtagtttatgaagctcacaacgtaaaggctcttaaggctcctcaacatttttacaacagccaacccggcaagggttacgttactgatatgcaacattatcaagaaatgtatcaacaatctatcaatgagccagaaaaattctttgataagatggctaaggaatacttgcattgggatgctccatacaccaaagttcaatctggttctttgaacaatggtgatgttgcatggtttttgaacggtaaattgaatgcaagctacaattgtgttgacagacatgcctttgctaatcccgacaagccagctttgatctatgaagctgatgacgaatccgacaacaaaatcatcacatttggtgaattactcagaaaagtttcccaaatcgctggtgtcttaaaaagctggggcgttaagaaaggtgacacagtggctatctatttgccaatgattccagaagcggtcattgctatgttggctgtggctcgtattggtgctattcactctgttgtctttgctgggttctccgctggttctttgaaagatcgtgtcgttgacgctaattctaaagtggtcatcacttgtgatgaaggtaaaagaggtggtaagaccatcaacactaaaaaaattgttgacgaaggtttgaacggagtcgatttggtttcccgtatcttggttttccaaagaactggtactgaaggtattccaatgaaggccggtagagattactggtggcatgaggaggccgctaagcagagaacttacttacctcctgtttcttgtgacgctgaagatcctttatttttattatacacttccggttccactggttctccaaagggtgtcgttcacactacaggtggttatttattaggtgccgctttaacaactagatacgtttttgatattcacccagaagatgttctcttcactgccggtgacgtcggctggatcacgggtcacacctatgctttgtatggtccattaaccttgggtaccgcctctataattttcgaatccactcctgcctacccagattatggtagatattggagaattatccaacgtcacaaggctacccatttctatgtggctccaactgctttaagattaatcaaacgtgtaggtgaagccgaaattgccaaatatgacacttcctctttacgtgtcttgggttccgtcggtgaaccaatctctccagacttatgggaatggtatcatgaaaaagtgggtaacaaaaactgtgtcatttgtgacactatgtggcaaacagagtctggttctcatttaattgctcctttggcaggtgctgtcccaacaaaacctggttctgctaccgtgccattctttggtattaacgcttgtatcattgaccctgttacaggtgtggaattagaaggtaatgatgtcgaaggtgtccttgccgttaaatctccatggccaagcatggctagatctgtttggaaccaccacgaccgttacatggatacttacttgaaaccttatcctggtcactatttcacaggtgatggtgctggtagagatcatgatggttactactggatcaggggtagagttgacgacgttgtaaatgtttccggtcatagattatccacaagtgaaattgaagcatctatctctaatcacgaaaacgtcagtgaagctgctgttgtcggtattccagatgaattgaccggtcaaaccgtcgttgcatatgtttccttgaaagatggttatttacaaaacaacgctactgaaggtgatgcagaacacatcacaccagataatttacgtagagaattgatcttacaagttaggggtgagattggtcctttcgcctctccaaaaaccattattttggttagagatttaccaagaacaaggtctggaaagattatgagaagagttttgagaaaggttgcttctaacgaagccgaacagttgggtgacttgactactttggccaacccagaagttgtacctgccatcatttctgctgtagagaaccaatttttctctcaaaaaaagaaatga

SEQ ID NO: 7489 - DNA, 333 bp, Saccharomyces cerevisiae
atgaccaaagatgccgtgaatctagatgcttacaccgtgagcttcatgcctttctataccgagtatcaaggaccaaccgaagagtttaaggattacaaattcgaagatactatttactttcgtggcaaggaactgaagagggaaaagtctgcgacgccttccagtagcgataacacaactagtaataccttcagtaatggcgccatcctctcgggaaacacaataactggcaagatagtttcagtgaataattacgaaagagagggcactgatcgcaacgaattggcgcgattgcaagaattgatctccctcatcgatgtcataaatcagtaa

SEQ ID NO: 7490 - DNA, 333 bp, Artificial Sequence
  Description of Artificial Sequence: Synthetic polynucleotide
atgaccaaagatgccgtgaatttggatgcttacaccgtgagcttcatgcctttctataccgagtatcaaggaccaaccgaagagtttaaggattacaaattcgaagatactatttactttcgtggcaaggaattgaagagggaaaagtctgcgacgccttccagtagcgataacacaactagtaataccttcagtaatggcgccatcctctctggaaacacaataactggcaagatagtttctgtgaataattacgaaagagagggcactgatcgcaacgaattggcgcgtttgcaagaattgatctccctcatcgatgtcataaatcagtga

SEQ ID NO: 7491 - DNA, 375 bp, Saccharomyces cerevisiae
atgcgagattcccctacccacaaggagcagagggcacaaaacaccatgtctgatcaaatgcccttccctttcaacaatttcacgtactttttcactctcttttcaaagttcttttcatctttccatcactgtacttgttcgctatcggtctctcgccaatatttagctttagatggaatttaccacccacttagagctgcattcccaaacaactcgactcttcgaaggcactttacaaagaaccgcactcctcgccacacgggattctcaccctctatgacgtcctgttccaaggaacatagacaaggaacggccccaaagttgccctctccaaattacaactcgggcaccgaaggtaccagatttcaaatttga

SEQ ID NO: 7492 - DNA, 375 bp, Artificial Sequence
  Description of Artificial Sequence: Synthetic polynucleotide
atgagagattcccctacccacaaggagcagagggcacaaaacaccatgtctgatcaaatgcccttccctttcaacaatttcacgtactttttcactctcttttccaagttcttttcttctttccatcactgtacttgttctttaagtgtctctcgccaatatttagctttagatggaatttaccacccacttagagctgcattcccaaacaactctactcttagaaggcactttacaaagaaccgcactcctcgccacacgggattctctccctctatgacgtcctgttccaaggaacatagacaaggaacggccccaaagttgccctctccaaattacaacagtggcaccgaaggtaccagatttcaaatttga

SEQ ID NO: 7493 - DNA, 150 bp, Saccharomyces cerevisiae
atgtggagacgtcggcgcgagccctgggaggagttatcttttcttcttaacagcttatcaccccggaattggtttatccggagatggggtcttatggctggaagaggccagcacctttgctggctccggtgcgcttgtgacggcccgtga

SEQ ID NO: 7494 - DNA, 150 bp, Artificial Sequence
  Description of Artificial Sequence: Synthetic polynucleotide
atgtggagacgtcgccgcgagccctgggaggagttatcttttcttcttaacagcttatctcccagaaattggtttatcagaagatggggtcttatggctggaagaggccagcacctttgctggctcagatgcgcttgtgacggcccgtga

SEQ ID NO: 7495 - DNA, 132 bp, Saccharomyces cerevisiae
atgtattcgtgcgcgaaaaaaaaaacaactgcagcacctgagtttcgcgtatggtcacccactacactactcggtcaggctcttaccagcttaactacagttgatcggacgggaaacggtgctttctggtag

SEQ ID NO: 7496 - DNA, 132 bp, Artificial Sequence
  Description of Artificial Sequence: Synthetic polynucleotide
atgtattcttgcgcgaaaaaaaaaacaactgcagcacctgagtttcgcgtatggtcccccactacattactcggtcaggctcttaccagcttaactacagttgatagaacgggaaacggtgctttctggtga

SEQ ID NO: 7497 - DNA, 1089 bp, Saccharomyces cerevisiae
atgagatctttaaatacccttttactttctctctttgtcgcaatgtccagtggtgctccactactaaaaattcgtgaagagaagaattcttctttgccatcaatcaaaatttttggtaccggcggtactatcgcttccaagggttcgacaagtgcaacaacggcgggttatagcgtgggattaaccgtaaatgatttaatagaagccgtcccatctttagctgagaaggcaaatctggactatcttcaagtgtctaacgttggttcaaattctttaaactatacgcatctgatcccattgtatcacggtatctccgaggcactagcctctgatgactacgctggtgcggttgtcactcatgggaccgacactatggaggagacagctttcttcttagatttgaccataaattcagagaagccagtatgtatcgcaggcgctatgcgtccagccactgccacgtctgctgatggcccaatgaatttatatcaagcagtgtctattgctgcttctgagaaatcactgggtcgtggcacgatgatcactctaaacgatcgtattgcctctgggttttggacaacgaaaatgaatgccaactctttagatacattcagagcggatgaacagggatatttaggttacttttcaaatgatgacgtggagttttactacccaccagtcaagccaaatggatggcaattttttgacatttccaacctcacagacccttcggaaattccagaagtcattattctgtactcctatcaaggcttgaatcctgagctaatagtaaaggccgtcaaggacctgggcgcaaaaggtatcgtgttggcgggttctggagctggttcctggactgctacgggtagtattgtaaacgaacaactttatgaagagtatggtataccaattgttcacagcagaagaacagcagatggtacagttcctccagatgatgccccagagtacgccattggatctggctacctaaaccctcaaaaatcgcgtattttgctacaattatgtttgtactccggctacggcatggatcagattaggtctgttttttctggcgtctacggtggttaa

SEQ ID NO: 7498 - DNA, 1089 bp, Artificial Sequence
  Description of Artificial Sequence: Synthetic polynucleotide
atgagatctttaaatacccttttactttctctctttgtcgcaatgtccagtggtgctccattgttgaaaattcgtgaagagaagaattcttctttgccatccatcaaaatttttggtaccggcggtactatcgcttccaagggttctacaagtgcaacaacggcgggttatagcgtgggattaaccgtaaatgatttaatagaagccgtcccatctttagctgagaaggcaaatttggactatcttcaagtgtctaacgttggtagtaattctttaaactatacgcatttgatcccattgtatcacggtatctccgaggcattggcctctgatgactacgctggtgcggttgtcactcatgggaccgacactatggaggagacagctttcttcttagatttgaccataaattctgagaagccagtatgtatcgcaggcgctatgcgtccagccactgccacgtctgctgatggcccaatgaatttatatcaagcagtgtctattgctgcttctgagaaatctttgggtcgtggcacgatgatcactttgaacgatcgtattgcctctgggttttggacaacgaaaatgaatgccaactctttagatacattcagagcggatgaacagggatatttaggttacttttctaatgatgacgtggagttttactacccaccagtcaagccaaatggatggcaattttttgacatttccaacctcacagacccttctgaaattccagaagtcattattttatactcctatcaaggcttgaatcctgagttgatagtaaaggccgtcaaggacttgggcgcaaaaggtatcgtgttggcgggttctggagctggttcctggactgctacgggtagtattgtaaacgaacaactttatgaagagtatggtataccaattgttcacagcagaagaacagcagatggtacagttcctccagatgatgccccagagtacgccattggatctggctacttgaaccctcaaaaatctcgtattttgttgcaattatgtttgtactccggctacggcatggatcagattaggtctgttttttctggcgtctacggtggttga

SEQ ID NO: 7499 - DNA, 345 bp, Saccharomyces cerevisiae
atgaagttccaatatgcgttggccaaggaacagctaggcagcaactcgcgcagtggcgtcaaaaaactaataagtaaacaccactggcttccggaatactatttctctgatctctcattttctgttgtacagcagtgggacagtagagccattgaaaaaactacaatcatatcttgtatgcggcccgcaaaccaagagatttatcctttgagacattgtgagaccctccgttcgcaaccgtgctctctgttttcatcactatatgcacgctctttccaaagctcctgcactttgcacgtggcggagccatcgcccggcttccatatgtacggctgccacacctaa

SEQ ID NO: 7500 - DNA, 345 bp, Artificial Sequence
  Description of Artificial Sequence: Synthetic polynucleotide
atgaagttccaatatgcgttggccaaggaacagttaggcagcaactctcgcagtggcgtcaaaaaattgataagtaaacaccactggcttccggaatactatttctctgatctcagtttttctgttgtacagcagtgggacagtagagccattgaaaaaactacaatcatatcttgtatgagacccgcaaaccaagagatttatcctttgagacattgtgagaccctccgttctcaaccgtgctctttattttcttctttgtatgcacgctctttccaaagctcctgcactttgcacgtggcggagccatctcccggcttccatatgtacggctgccacacctga

SEQ ID NO: 7501 - DNA, 132 bp, Saccharomyces cerevisiae; identical to SEQ ID NO: 7495

SEQ ID NO: 7502 - DNA, 132 bp, Artificial Sequence; identical to SEQ ID NO: 7496
  Description of Artificial Sequence: Synthetic polynucleotide

SEQ ID NO: 7503 - DNA, 1089 bp, Saccharomyces cerevisiae; identical to SEQ ID NO: 7497

SEQ ID NO: 7504 - DNA, 1089 bp, Artificial Sequence; identical to SEQ ID NO: 7498
  Description of Artificial Sequence: Synthetic polynucleotide

SEQ ID NO: 7505 - DNA, 213 bp, Saccharomyces cerevisiae
atgaagttccaatatgcgttggccaaggaacagctaggcagcaactcgcgcagtggcgtcaaaaaactaataagtaaacaccactggcttccggaatactatttctctgatctctcattttctgttgtacagcagtgggacagtagagccattgaaaaaactacaatcatatcttgtatgcggcccgcaaaccaagagatttatcctttgtga

SEQ ID NO: 7506 - DNA, 213 bp, Artificial Sequence
  Description of Artificial Sequence: Synthetic polynucleotide
atgaagttccaatatgcgttggccaaggaacagttaggcagcaactctcgcagtggcgtcaaaaaattgataagtaaacaccactggcttccggaatactatttctctgatctcagtttttctgttgtacagcagtgggacagtagagccattgaaaaaactacaatcatatcttgtatgagacccgcaaaccaagagatttatcctttgtga

SEQ ID NO: 7507 - DNA, 165 bp, Saccharomyces cerevisiae
atgatagttgatttctattccaacactttgagacattgtgagaccctccgttcgcaaccgtgctctctgttttcatcactatatgcacgctctttccaaagctcctgcactttgcacgtggcggagccatcgcccggcttccatatgtacggctgccacacctaa

SEQ ID NO: 7508 - DNA, 165 bp, Artificial Sequence
  Description of Artificial Sequence: Synthetic polynucleotide
atgatagttgatttctattccaacactttgagacattgtgagaccctccgttctcaaccgtgctctttattttcttctttgtatgcacgctctttccaaagctcctgcactttgcacgtggcggagccatctcccggcttccatatgtacggctgccacacctga

SEQ ID NO: 7509 - DNA, 132 bp, Saccharomyces cerevisiae; identical to SEQ ID NO: 7495

SEQ ID NO: 7510 - DNA, 132 bp, Artificial Sequence; identical to SEQ ID NO: 7496
  Description of Artificial Sequence: Synthetic polynucleotide

SEQ ID NO: 7511 - DNA, 1089 bp, Saccharomyces cerevisiae; identical to SEQ ID NO: 7497

SEQ ID NO: 7512 - DNA, 1089 bp, Artificial Sequence; identical to SEQ ID NO: 7498
  Description of Artificial Sequence: Synthetic polynucleotide

SEQ ID NO: 7513 - DNA, 345 bp, Saccharomyces cerevisiae; identical to SEQ ID NO: 7499

SEQ ID NO: 7514 - DNA, 345 bp, Artificial Sequence; identical to SEQ ID NO: 7500
  Description of Artificial Sequence: Synthetic polynucleotide

SEQ ID NO: 7515 - DNA, 132 bp, Saccharomyces cerevisiae; identical to SEQ ID NO: 7495

SEQ ID NO: 7516 - DNA, 132 bp, Artificial Sequence; identical to SEQ ID NO: 7496
  Description of Artificial Sequence: Synthetic polynucleotide

SEQ ID NO: 7517 - DNA, 1089 bp, Saccharomyces cerevisiae; identical to SEQ ID NO: 7497

SEQ ID NO: 7518 - DNA, 1089 bp, Artificial Sequence; identical to SEQ ID NO: 7498
  Description of Artificial Sequence: Synthetic polynucleotide

SEQ ID NO: 7519 - DNA, 345 bp, Saccharomyces cerevisiae; identical to SEQ ID NO: 7499

SEQ ID NO: 7520 - DNA, 345 bp, Artificial Sequence; identical to SEQ ID NO: 7500
  Description of Artificial Sequence: Synthetic polynucleotide

SEQ ID NO: 7521 - DNA, 357 bp, Saccharomyces cerevisiae
atgcagcacacgcttacccggaccgcctctctgccagaacgctcgagcagcgcccacagcgccgctactgcgttacccgcacttcgccgcccgccagacagctgcgagactctcgtcccgctactgtgtatcttttggttcgtcttcgttagtatgagcccgctcccgccggctcgtgccaacaaatcagacaacaaaggcttaatctcagcagatcgtaacaacaaggctactctactgcttacaataccccgttgtacatccaagtcgtatacaaatgatttatccccactcaaaatgacattgctatccgccggcaagcacccaaggcctttccgccaagagcaccgttgctag

SEQ ID NO: 7522 - DNA, 357 bp, Artificial Sequence
  Description of Artificial Sequence: Synthetic polynucleotide
atgcagcacacgcttaccagaaccgcctctttaccagaacgcagcagcagcgcccacagcgccgctactgcgttacccgcacttcgccgcccgccagacagctgcgagactctcgtcccgttattatgtatcttttggttcgtcttcgttagtatgagcccgctcccgccggctcgtgccaacaaaagtgacaacaaaggcttaatctctgcagatcgtaacaacaaggctactttattacttacaataccccgttgtacatccaagagttatacaaatgatttatccccactcaaaatgacattgttatccgccggcaagcacccaaggcctttccgccaagagcaccgttgctga

SEQ ID NO: 7523 - DNA, 189 bp, Saccharomyces cerevisiae
atggtttgtattcacactgaaaatcaaaatcaaggggacttttacccttttgttctactggagatttctgttctccatgagtcccccttaggacatctgcgttatcgtttaacagatgtgccgccccagccaaactctcctggcgaaatttattgtttttacataaactgtattatgaacagaaggtag

SEQ ID NO: 7524 - DNA, 189 bp, Artificial Sequence
  Description of Artificial Sequence: Synthetic polynucleotide
atggtttgtattcacactgaaaatcaaaatcaaggggacttttacccttttgttttattggagatttctgttctccatgagtcccccttaggacatttacgttatcgtttaacagatgtgccgccccagccaaactctcctggcgaaatttattgtttttacataaactgtattatgaacagaaggtga

SEQ ID NO: 7525 - DNA, 1389 bp, Saccharomyces cerevisiae
atgttttcaagaacagcatccaagttccgtaatacacggaggcttttaagtacaatttcctcacaaattccaggaaccagaacctctaaacttcctaatgggttgacaattgccacagagtacatccccaacacatcttcggctactgttggaatatttgtcgatgctggttctagggcagaaaacgtaaaaaacaatggtacagcgcattttctagaacacttggctttcaagggtactcagaataggtcacaacaaggaattgaattggaaattgaaaatatcggatctcatttgaatgcatatacatcaagagaaaacacagtttattatgctaagtccctacaagaagatatcccaaaggctgttgatattctaagtgatattttgactaagtcagttttagataatagtgctattgagagagaaagggatgtcatcatcagagaaagtgaagaggtggacaagatgtatgatgaagttgtttttgaccatcttcatgagattacgtataaggaccaacctttaggaagaaccattctgggtcctataaaaaacataaaatcaataacaagaactgatttgaaagactatataaccaagaactataaaggcgacagaatggtattggcaggtgcgggcgctgttgatcatgaaaaattggtacagtatgctcaaaaatactttggccatgtgcccaaatctgaatcgcctgtcccgttgggatcaccaaggggcccattaccagttttttgtagaggtgaaaggtttatcaaagaaaacacgttacctacaacacatattgctatcgcattagaaggcgtgtcatggtctgcacctgattattttgtagctctggcaacacaagcgattgttggtaactgggacagagccattggcacaggtacaaactccccctctccattagctgttgcagcaagtcaaaatggttctttggctaattcttatatgtcattttccacctcttacgctgattcaggtctgtggggaatgtacatagtaactgattctaatgagcataacgtgcagttaattgttaatgagatcctgaaagagtggaagagaataaaatctggcaaaatatcggatgcagaggtgaatagggcaaaagctcagctaaaggcagctctgttgctatcgttggatggatcgacagccattgtagaagatataggcagacaagtggtgaccacaggtaaaagattatcaccagaagaagttttcgagcaggttgataaaatcactaaggatgatattattatgtgggcaaattacagattacaaaacaaaccagtttcaatggttgccctaggaaatacatccactgtccctaatgtatcctatatcgaagaaaaactgaaccaatga

SEQ ID NO: 7526 - DNA, 1389 bp, Artificial Sequence
  Description of Artificial Sequence: Synthetic polynucleotide
atgttttccagaacagcatccaagttccgtaatacaagaaggcttttaagtacaatttcctctcaaattccaggaaccagaacctctaaacttcctaatgggttgacaattgccacagagtacatccccaacacatcttctgctactgttggaatatttgtcgatgctggttctagggcagaaaacgtaaaaaacaatggtacagcgcattttttggaacacttggctttcaagggtactcagaataggtctcaacaaggaattgaattggaaattgaaaatatcggatctcatttgaatgcatatacatctagagaaaacacagtttattatgctaagtccttacaagaagatatcccaaaggctgttgatattttaagtgatattttgactaagtctgttttagataatagtgctattgagagagaaagggatgtcatcatcagagaaagtgaagaggtggacaagatgtatgatgaagttgtttttgaccatcttcatgagattacgtataaggaccaacctttaggaagaaccattttgggtcctataaaaaacataaaatctataacaagaactgatttgaaagactatataaccaagaactataaaggcgacagaatggtattggcaggtgcgggcgctgttgatcatgaaaaattggtacagtatgctcaaaaatactttggccatgtgcccaaatctgaatctcctgtcccgttgggatctccaaggggcccattaccagttttttgtagaggtgaaaggtttatcaaagaaaacacgttacctacaacacatattgctatcgcattagaaggcgtgtcttggtctgcacctgattattttgtagctttggcaacacaagcgattgttggtaactgggacagagccattggcacaggtacaaactccccctctccattagctgttgcagcaagtcaaaatggttctttggctaattcttatatgagtttttccacctcttacgctgattctggtttatggggaatgtacatagtaactgattctaatgagcataacgtgcagttaattgttaatgagatcttgaaagagtggaagagaataaaatctggcaaaatatctgatgcagaggtgaatagggcaaaagctcagttgaaggcagctttattgctttctttggatggaagtacagccattgtagaagatataggcagacaagtggtgaccacaggtaaaagattatctccagaagaagttttcgagcaggttgataaaatcactaaggatgatattattatgtgggcaaattacagattacaaaacaaaccagtttctatggttgccttaggaaatacatccactgtccctaatgtatcctatatcgaagaaaaattgaaccaatga

SEQ ID NO: 7527 - DNA, 507 bp, Saccharomyces cerevisiae
atgtcatcgactaagtttttgaaaccactctgcagaataagggcttttcatacttcaattgccagatcctttaccattccttttctgccaaagattccacagaaacctggaggtgtgagtgggaccgcaaatgattcctcttatatgccgcccgaaagcagagctcagggttcgtaccattggattgtcgagcgcggactgtccttagcggttcttccgctgatcgcagttcccttggtcactacaggccctatttccacttttaccgacacatttctttccttggtcctgctaggtcattgtcatatcggatttcagtcttgcattatagactatatttctgaaagagtctatggaaaggtacatcattacgcgatgtatttattgagcttgggctcctttttatcgttcgtcggtatatataaattagagagtcaagaagctggtcttattgcctctttaaaatcattatgggataacaaacctgtggaaaaaaagaggcagtaa

SEQ ID NO: 7528 - DNA, 507 bp, Artificial Sequence
  Description of Artificial Sequence: Synthetic polynucleotide
atgtcttctactaagtttttgaaaccactctgcagaataagggcttttcatacttctattgccagatcctttaccattccttttttaccaaagattccacagaaacctggaggtgtgagtgggaccgcaaatgattcctcttatatgccgcccgaaagcagagctcagggttcttaccattggattgtcgagcgcggattatccttagcggttcttccgttgatcgcagttcccttggtcactacaggccctatttccacttttaccgacacatttctttccttggtcttgttgggtcattgtcatatcggatttcagtcttgcattatagactatatttctgaaagagtctatggaaaggtacatcattacgcgatgtatttattgagcttgggctcctttttatctttcgtcggtatatataaattagagagtcaagaagctggtcttattgcctctttaaaatctttatgggataacaaacctgtggaaaaaaagaggcagtga

SEQ ID NO: 7529 - DNA, 765 bp, Saccharomyces cerevisiae
atgtctctgaaaaagcagataccaataatctttgaaaacacgcattacttcatagttaataaaccacctggcataccttctcaaccaccagactgcagaacatggggcaggacacatcctaatcttgaccctactccactactagaaagattcaaggctatttattattcacatagagaagtagaattatgtcgtactgtacataggttagaccattgtgttacgggggggatgctgattgcaaagactaaagacggaagtgtaaaattctctagatttttacaaaagggcggcaacaacggttataagttgcaaagaaagtatgtagctattgtcgagtcgtccggtcgtttcaacaaaccaaataactatgaaattaaatatggtcctaaatataatttcttgatttcacatggtggtagggagattactaagttcaaagaagttgacgaaaattgtattgttttacaattggttacaggaaaaaaacatcagattcgaaatcacgtctctcaaattttaaatcagcccatattaaacgacaagagacatggcagcactgtcaattttccagagttgttcaatgaccaaatagcgttgcattcagcgtgcataataacgaaaattggcctgcaaactaaaacgcacttgatacctatggaacacaataatactggccaactttggtcaagaaaatacgtcaatgaagagggtgagttcactttgcccataaaagaagtcctgttggaaaactgggaccagtaa

SEQ ID NO: 7530 - DNA, 765 bp, Artificial Sequence
  Description of Artificial Sequence: Synthetic polynucleotide
atgtctttgaaaaagcagataccaataatctttgaaaacacgcattacttcatagttaataaaccacctggcataccttctcaaccaccagactgcagaacatggggcaggacacatcctaatcttgaccctactccattgttggaaagattcaaggctatttattattctcatagagaagtagaattatgtcgtactgtacataggttagaccattgtgttacgggggggatgttgattgcaaagactaaagacggaagtgtaaaattctctagatttttacaaaagggcggcaacaacggttataagttgcaaagaaagtatgtagctattgtcgagtcttccggtcgtttcaacaaaccaaataactatgaaattaaatatggtcctaaatataatttcttgatttctcatggtggtagggagattactaagttcaaagaagttgacgaaaattgtattgttttacaattggttacaggaaaaaaacatcagattagaaatcacgtctctcaaattttaaatcagcccatattaaacgacaagagacatggcagcactgtcaattttccagagttgttcaatgaccaaatagcgttgcattctgcgtgcataataacgaaaattggcttacaaactaaaacgcacttgatacctatggaacacaataatactggccaactttggtccagaaaatacgtcaatgaagagggtgagttcactttgcccataaaagaagtcttattggaaaactgggaccagtga

SEQ ID NO: 7531 - DNA, 2616 bp, Saccharomyces cerevisiae
atgaactcattatatgaactcgatccgaaatggaagaaactattgaaaacggacaatttcctgggcggattaacagtcaatgaattcgttcaggaattgagcaaagaccatcgtaatgacgtgttgattgatgcaaacacgaaaaatcttccaaccaatgaaaaggatcaggatgcaatcagagaggctatttggaaacaattagatccaaaaccttacattagaacttttgaatctaccttaaaggaactaaaaaacttaaatgaggaaacactaaataaaagacagtatttttccgagcaagtggctactcaggaagttattcattcggagaatgtgataaaattatccaaggatttgcatactactttacttacattcgacaagctagatgatcgcttgacaaatgttactcaagttgtttcgccattgggagataaattagaaaccgcaatcaagaaaaagcaaaactatattcaaagtgtggaattgattcgcaggtacaatgacttttattccatgggaaaatcagatattgttgaacaattaaggctgtctaaaaactggaaattaaacttaaagtccgtgaaattaatgaagaatctattgatattatcatccaaactagagacaagttcaataccaaaaacaataaacacaaagctggttattgaaaagtactctgaaatgatggaaaatgagctgttagagaattttaattctgcatatagagagaataattttactaaattaaatgaaattgccatcattctcaacaattttaatggcggtgttaatgtcattcaaagcttcatcaatcagcacgattatttcattgacaccaagcagattgacttggaaaatgaatttgagaatgttttcataaaaaacgtgaagtttaaggaacagctgattgattttgagaaccacagtgttatcatcgagacatccatgcaaaatttgataaatgatgtggaaactgtaataaaaaatgaatccaagattgttaaaagggtatttgaagaaaaggcaactcatgtgatacaattgtttattcaaagagtttttgctcaaaaaattgaaccaagatttgaggttttattgaggaattccctgtcaatctcaaatttggcttatgtgagaatattacacggactgttcactttatttggtaagttcactaaaagtttaattgattactttcaactattagaaattgacgacagtaaccaaatcttatcaacaaccctagaacaatgttttgctgatttgttttcgcattatctatatgataggtccaaatatttcggtattgagaaaagatccttggaagcgattctagtggatatgacatccaagtttactgtaaactatgataaagaaatcaacaagagggttttattagataagtataaggagaaactatcaactaatgtggatgcattcatgcattctcctagagggaatacacactctcgtcaagattcaacatcaaggagtaaattgtcacaatttaattcctttttgaaaactcatttagataaagatcatttgagtctaaaccgtacaaatactttgagcgattcgtttaacaacagctcttcttctacgcagtatgatgtagcaaacaactcttcaagtttggtaaattctagttttacagcaagcgatattgataacagtccaaacagtccggcgaactattctttgaacgatgttgattctatgttaaaatgtgtggtggagtctactgcaagagtaatggaactaattccaaacaaagcacatctatacatcctagaaatattaaaaataatgtttttgggaattgttgattcgtacatggaaattgcgttagaagtcgcttactggaaaatttgtaaagttgatattaataaaacagcaggagtggtaaacttaaatttcttgaaatttatttcaatgagcacggagatattagatttattgtcaatttcaatcaaatccattttcttaccattattaaataattcgccagaaattaaagctcagattattgagatgacaaattcacaaattcaaaagatggaaatacttattaatataattttgcaagagaccattacggtaatttcgactaaattttccgcaattttgtgcaagcaaaagaagaaggattttgtgccaaaatctcaagagctattggatcaagacaccttaccggctattgagattgtcaatattttaaacttaatctttgaacagtcttccaagtttcttaaaggaaaaaacttacagacatttttaacgttgattggggaagagttatacggtttactactgtcacattattcacactttcaagtcaattccattggcggtgttgtagttacgaaggatatcataggctaccaaactgcaatagaagattggggagtagcgtccttgattgacaaatttgctactttgagagaacttgcaaatctatttactgttcaacctgaattattagaatcactaactaaggagggtcatttagcagacattggaagggatattattcaaagctacatttccaacagagaggacttcaatcatgacaatttcattaatagcgttaaattgaattttagatag

SEQ ID NO: 7532 - DNA, 2616 bp, Artificial Sequence
  Description of Artificial Sequence: Synthetic polynucleotide
atgaactctttatatgaactcgatccgaaatggaagaaacttttgaaaacggacaatttcttgggcggattaacagtcaatgaattcgttcaggaattgagcaaagaccatcgtaatgacgtgttgattgatgcaaacacgaaaaatcttccaaccaatgaaaaggatcaggatgcaatcagagaggctatttggaaacaattagatccaaaaccttacattagaacttttgaatctaccttaaaggaattgaaaaacttaaatgaggaaacattaaataaaagacagtatttttccgagcaagtggctactcaggaagttattcattctgagaatgtgataaaattatccaaggatttgcatactactttacttacattcgacaagttggatgatcgcttgacaaatgttactcaagttgtttctccattgggagataaattagaaaccgcaatcaagaaaaagcaaaactatattcaaagtgtggaattgattcgcaggtacaatgacttttattccatgggaaaatctgatattgttgaacaattaaggttatctaaaaactggaaattaaacttaaagtccgtgaaattaatgaagaatttattgatattatcttccaaattagagacaagtagtataccaaaaacaataaacacaaagttggttattgaaaagtactctgaaatgatggaaaatgagttattagagaattttaattctgcatatagagagaataattttactaaattaaatgaaattgccatcattctcaacaattttaatggcggtgttaatgtcattcaaagcttcatcaatcagcacgattatttcattgacaccaagcagattgacttggaaaatgaatttgagaatgttttcataaaaaacgtgaagtttaaggaacagttgattgattttgagaaccacagtgttatcatcgagacatccatgcaaaatttgataaatgatgtggaaactgtaataaaaaatgaatccaagattgttaaaagggtatttgaagaaaaggcaactcatgtgatacaattgtttattcaaagagtttttgctcaaaaaattgaaccaagatttgaggttttattgaggaattccttatctatctctaatttggcttatgtgagaatattacacggattattcactttatttggtaagttcactaaaagtttaattgattactttcaattattagaaattgacgacagtaaccaaatcttatctacaaccttagaacaatgttttgctgatttgttttctcattatttgtatgataggtccaaatatttcggtattgagaaaagatccttggaagcgattttggtggatatgacatccaagtttactgtaaactatgataaagaaatcaacaagagggttttattagataagtataaggagaaattatctactaatgtggatgcattcatgcattctcctagagggaatacacactctcgtcaagattctacatccaggagtaaattgtctcaatttaattcctttttgaaaactcatttagataaagatcatttgagtttgaaccgtacaaatactttgagcgattcttttaacaacagctcttcttctacgcagtatgatgtagcaaacaactcttccagtttggtaaattctagttttacagcaagcgatattgataacagtccaaacagtccggcgaactattctttgaacgatgttgattctatgttaaaatgtgtggtggagtctactgcaagagtaatggaattgattccaaacaaagcacatctttacatcttggaaatattaaaaataatgtttttgggaattgttgattcttacatggaaattgcgttagaagtcgcttactggaaaatttgtaaagttgatattaataaaacagcaggagtggtaaacttaaatttcttgaaatttatttccatgagcacggagatattagatttattgtctatttccatcaaatccattttcttaccattattaaataattctccagaaattaaagctcagattattgagatgacaaattctcaaattcaaaagatggaaatacttattaatataattttgcaagagaccattacggtaatttctactaaattttccgcaattttgtgcaagcaaaagaagaaggattttgtgccaaaatctcaagagttattggatcaagacaccttaccggctattgagattgtcaatattttaaacttaatctttgaacagtcttccaagtttcttaaaggaaaaaacttacagacatttttaacgttgattggggaagagttatacggtttattattatctcattattctcactttcaagtcaattccattggcggtgttgtagttacgaaggatatcataggctaccaaactgcaatagaagattggggagtagcgtccttgattgacaaatttgctactttgagagaacttgcaaatttatttactgttcaacctgaattattagaatctttgactaaggagggtcatttagcagacattggaagggatattattcaaagctacatttccaacagagaggacttcaatcatgacaatttcattaatagcgttaaattgaattttagatga

SEQ ID NO: 7533 - DNA, 459 bp, Saccharomyces cerevisiae
atgcaaattttcgtcaagactttaaccggtaagactattaccctggaagttgaatcttctgacactattgacaatgtcaagtccaagatccaagacaaggaaggtattccacctgaccaacaaagattgatctttgctggtaagcaattggaagatggtagaactttgtccgactacaacatccaaaaggaatctactctacacttggtcttgagattgagaggtggtggtaagaagagaaagaagaaggtctacaccaccccaaagaagatcaagcacaagcacaagaaggtcaagttggctgtcttgtcctactacaaggtcgatgctgaaggtaaggttaccaaattgagaagagaatgtagcaacccaacttgtggtgctggtgttttcttggctaaccacaaggacagattgtactgtggtaagtgtcattccgtctacaaggttaacgcttaa

SEQ ID NO: 7534 - DNA, 459 bp, Artificial Sequence
  Description of Artificial Sequence: Synthetic polynucleotide
atgcaaattttcgtcaagactttaaccggtaagactattaccttagaagttgaatcttctgacactattgacaatgtcaagtccaagatccaagacaaggaaggtattccacctgaccaacaaagattgatctttgctggtaagcaattggaagatggtagaactttgtccgactacaacatccaaaaggaatctactttgcacttggtcttgagattgagaggtggtggtaagaagagaaagaagaaggtctacaccaccccaaagaagatcaagcacaagcacaagaaggtcaagttggctgtcttgtcctactacaaggtcgatgctgaaggtaaggttaccaaattgagaagagaatgtagcaacccaacttgtggtgctggtgttttcttggctaaccacaaggacagattgtactgtggtaagtgtcattccgtctacaaggttaacgcttga

SEQ ID NO: 7535 - DNA, 693 bp, Saccharomyces cerevisiae
atgaaattgtttcaaaacagttacgatttcaactatccatgggaccaggtaaccgccgctaactggaaaaaatacccaaatgaaatatctacacatgtcatcgcagtggacgttttaagaagagaattgaaggatcaaggtaaggtcttagttactgaacggttgattactgtaaaacaaggtgttcccaaatggatcatgatgatgctaggagggaccaatatgagtcatgtcagagaagtttctgtggtagacttaaataaaaagagcttgaccatgagaagctgtaatttaacgatgtgcaatctattaaaagtctacgaaactgtaacatatagcccgcatcccgatgactcggctaataaaacacttttccagcaggaagcccaaattacagcatatggatccattagaaagctgtgtaataagatggaagattggtcagttcaaaggttttgcgagaacgctaaaaagggtaaaatgggattcgatgctgttttgcaagtatttagtgaaaattgggaaaaacatgttgatgacttgagcaatcaacttgtcagtaaagtcaatgaaaccatggaggatgttaaaatatctgcaggtacgcttcttaaaggaactgaaaggagcggcagaaccatcttacagcaaaatattgacttgtttagagacgcatacaaccacgaaaattag

SEQ ID NO: 7536 - DNA, 693 bp, Artificial Sequence
  Description of Artificial Sequence: Synthetic polynucleotide
atgaaattgtttcaaaacagttacgatttcaactatccatgggaccaggtaaccgccgctaactggaaaaaatacccaaatgaaatatctacacatgtcatcgcagtggacgttttaagaagagaattgaaggatcaaggtaaggtcttagttactgaaagattgattactgtaaaacaaggtgttcccaaatggatcatgatgatgcttggagggaccaatatgagtcatgtcagagaagtttctgtggtagacttaaataaaaagagcttgaccatgagaagctgtaatttaacgatgtgcaatttattaaaagtctacgaaactgtaacatatagcccgcatcccgatgactctgctaataaaacacttttccagcaggaagcccaaattacagcatatggatccattagaaagttatgtaataagatggaagattggtctgttcaaaggttttgcgagaacgctaaaaagggtaaaatgggattcgatgctgttttgcaagtatttagtgaaaattgggaaaaacatgttgatgacttgagcaatcaacttgtcagtaaagtcaatgaaaccatggaggatgttaaaatatctgcaggtacgcttcttaaaggaactgaaaggagcggcagaaccatcttacagcaaaatattgacttgtttagagacgcatacaaccacgaaaattga

SEQ ID NO: 7537 - DNA, 471 bp, Saccharomyces cerevisiae
atgacgcaattaaaatatttgttgctggtttctaggcaaggaaaaatcagattaaagaaatggtacacggcaatgtccgctggtgaaaaggcaaaaattgtgaaagacttgacacctacgatattagcaagaaaacccaaaatgtgtaacatcatcgagtataatgaccacaaagtagtatacaagcgatatgctagtctatattttattgttgggatgacgcccgatgttgacaatgaactgctgaccttggaaattatccatcggtttgtcgaaacaatggacacatatttcggcaatgtttgtgagctagacattatatttaacttcagtaaggtctacgatatcttgaatgagatgattatgtgcgatggctccatcgcagagagcagtaggaaggaagtactgcaccatgtgaccgtgatggacaccatggagagcaacgataatcttgaaagggtattgagttag

SEQ ID NO: 7538 - DNA, 471 bp, Artificial Sequence
  Description of Artificial Sequence: Synthetic polynucleotide
atgacgcaattaaaatatttgttgttggtttctaggcaaggaaaaatcagattaaagaaatggtacacggcaatgtccgctggtgaaaaggcaaaaattgtgaaagacttgacacctacgatattagcaagaaaacccaaaatgtgtaacatcatcgagtataatgaccacaaagtagtatacaagagatatgctagtctttattttattgttgggatgacgcccgatgttgacaatgaattattaaccttggaaattatccatagatttgtcgaaacaatggacacatatttcggcaatgtttgtgagttggacattatatttaacttcagtaaggtctacgatatcttgaatgagatgattatgtgcgatggctccatcgcagagagcagtaggaaggaagtattacaccatgtgaccgtgatggacaccatggagagcaacgataatcttgaaagggtattgagttga

SEQ ID NO: 7539 - DNA, 903 bp, Saccharomyces cerevisiae
atgctttatttgatcggacttggtctctcgtacaaatcagacattaccgttcgtggtttggaagctattaagaaatgttctagagtttatctagaacactataccagtatcctaatggctgcaagccaagaagagttagaatcttactatggtaaagagatcatcttggctgatagggaattagttgagactggttctaagcagatcctaaataacgccgataaggaagacgttgctttcttggtcgtgggcgatccatttggtgccaccacacacacagatttagttctcagagctaaacgtgaggcaattcccgtcgaaattattcataatgcgtccgttatgaatgcagttggggcatgtggcctacaactatacaatttcggtcaaaccgtttccatggttttctttaccgataattggagaccagactcatggtacgacaagatctgggaaaatagaaaaattggccttcatactttagtgttattggacatcaaagttaaggaacaaagcattgaaaatatggcccgtggcagactaatctacgaaccaccaagatacatgtctatcgctcaatgttgtgaacaattattagaaattgaagagaaaagaggtacaaaggcatacactcctgatactccagcagtcgcaattagtagattaggctcgagctcccaaagctttaagtctggtaccataagtgagttagccaattacgattcaggagagccacttcattcgcttgtcatcctcggcagacaatgtcatgaattggagctggaatacctgctagagtttgccgacgacaaagaaaagtttgggaaagatgtggcaaatgaccaagagtacttcaaacctgcggcatgggtcccacccacagaagacgacagcgacgagtaa

SEQ ID NO: 7540 - DNA, 903 bp, Artificial Sequence
  Description of Artificial Sequence: Synthetic polynucleotide
atgctttatttgatcggacttggtctctcttacaaaagtgacattaccgttcgtggtttggaagctattaagaaatgttctagagtttatttggaacactataccagtatcttgatggctgcaagccaagaagagttagaatcttactatggtaaagagatcatcttggctgatagggaattagttgagactggttctaagcagatcttgaataacgccgataaggaagacgttgctttcttggtcgtgggcgatccatttggtgccaccacacacacagatttagttctcagagctaaacgtgaggcaattcccgtcgaaattattcataatgcgtccgttatgaatgcagttggggcatgtggcttacaattgtacaatttcggtcaaaccgtttccatggttttctttaccgataattggagaccagactcttggtacgacaagatctgggaaaatagaaaaattggccttcatactttagtgttattggacatcaaagttaaggaacaaagcattgaaaatatggcccgtggcagattgatctacgaaccaccaagatacatgtctatcgctcaatgttgtgaacaattattagaaattgaagagaaaagaggtacaaaggcatacactcctgatactccagcagtcgcaattagtagattaggcagtagctcccaaagctttaagtctggtaccataagtgagttagccaattacgattctggagagccacttcattctcttgtcatcctcggcagacaatgtcatgaattggagttagaatacttgttggagtttgccgacgacaaagaaaagtttgggaaagatgtggcaaatgaccaagagtacttcaaacctgcggcatgggtcccacccacagaagacgacagcgacgagtga

SEQ ID NO: 7541 - DNA, 1827 bp, Saccharomyces cerevisiae
atgcacactaactcacccttacgagcggataaccaagatctagaaactcaaccactgttgagaccaaacactgaagaaagccaactcctcaatgatgaagtgagaatcaacgttgcaaatgagacccttattaaatctcgttggcggagtataaagtgcttaattatatatctgctaggtattgttttattaagtttctttggcgtcagcatagtgcagtatattaggggacatgtgccgcccacagatgtgatagaaaagaatctagttcaagtaacaaatttcaaactggtggagtttcagcttgatggttggaaagataatatgggctctgacctgaacaatgatacaggtaagtatttgcaggtgtctatacactctcaaatttggttcgattatgacaaatggccaggaacggaaaatgactcggacgccagaagccaacgtgactggatacggtacatcaatgaaaaagttcttaaaaccatttgtatagatctgaataacgtgaccacattcgatggagatctagtgttcaagaataaactgggagatgttgttggcatggaacccatttgttttaatttggctcaccgacagattaataacctacagttcaaaattttagttaaaccgtctatttggaaaatcgtaaaagttttgaaaaaattttggaatagggattttgaatccttaaatataaaatcgaatttagatatgactatcttcaagagaaaatttggcacgaggtttaatttattgaaacttaatgacgaaatcttagattggaaagatattattgattgggaaaaaatatcggcaacgccccttcggatgattcaaaatatgatcgatggaatatctcttcaaggatttacattgcgggactccagttctgatggatttcatgccgatatgagactgaatccgatcacgattcttggaggggtggactggcttcaccttccgccaggcacgtcaatccctttcatcaattgggaaatcaagctaccggactgtaacggtgagcctgctatcgcaattccaaccttgtcttgctttaacgaaccgattaatctgcaccacgacaaggataatatcgtcgtctgtttacaaaatgaaattgaaggtcctctgcccgatgaactactataccaagaatgtcctcaaaatagtcttacaccaatgagccaaatagtgaatgcggtcctgaaccagaacgagactgttacgttcgcagcaagaggccatgtccttgaagatggtatagataataactcattgattccagcagacatgctggaggatattttccaagaagcatcgtttattcccattactaccaatgctacgtttaactccagtgaattgattcaagagtttcagatcaacgatcttcagctacggtgggcagcgcgcaaaaagctcagtcttgtggggacatttttaggattctttgatctatccttctacgagacgcaccagcaagaccgagttcgcatcgataccattcggggacagatcgatctgtaccataacgacatcaatttcttaaacttacccatgaagcaatggatcaactcttcatcgcacattctgcacgatgaggacacaggaaatacgcagatgaagcttcaatttgatctagaaaatgacgacatggaagtcgtcaatagcttggaactaacacgaaccctgaacgaaatactattccagggttttacagttattcactttaatgcgacgatagatgcgtcacttacgacggcattgggcccgtgggttctcaccgggttagccggagagggtgacactttggtcacgtga

SEQ ID NO: 7542 - DNA, 1827 bp, Artificial Sequence
  Description of Artificial Sequence: Synthetic polynucleotide
atgcacactaactctcccttaagagcggataaccaagatttggaaactcaaccattgttgagaccaaacactgaagaaagccaactcctcaatgatgaagtgagaatcaacgttgcaaatgagacccttattaaatctcgttggagaagtataaagtgcttaattatatatttattgggtattgttttattaagtttctttggcgtcagcatagtgcagtatattaggggacatgtgccgcccacagatgtgatagaaaagaatttggttcaagtaacaaatttcaaattagtggagtttcagcttgatggttggaaagataatatgggctctgacttgaacaatgatacaggtaagtatttgcaggtgtctatacactctcaaatttggttcgattatgacaaatggccaggaacggaaaatgacagtgacgccagaagccaacgtgactggataagatacatcaatgaaaaagttcttaaaaccatttgtatagatttgaataacgtgaccacattcgatggagatttggtgttcaagaataaattaggagatgttgttggcatggaacccatttgttttaatttggctcaccgtcagattaataacttacagttcaaaattttagttaaaccgtctatttggaaaatcgtaaaagttttgaaaaaattttggaatagggattttgaatccttaaatataaaatctaatttagatatgactatcttcaagagaaaatttggcacgaggtttaatttattgaaacttaatgacgaaatcttagattggaaagatattattgattgggaaaaaatatctgcaacgccccttcgtatgattcaaaatatgatcgatggaatatctcttcaaggatttacattgagagactccagttctgatggatttcatgccgatatgagattgaatccgatcacgattcttggaggggtggactggcttcaccttccgccaggcacgtccatccctttcatcaattgggaaatcaagttaccggactgtaacggtgagcctgctatcgcaattccaaccttgtcttgctttaacgaaccgattaatttacaccacgacaaggataatatcgtcgtctgtttacaaaatgaaattgaaggtcctttgcccgatgaattattgtaccaagaatgtcctcaaaatagtcttacaccaatgagccaaatagtgaatgcggtcttgaaccagaacgagactgttacgttcgcagcaagaggccatgtccttgaagatggtatagataataactctttgattccagcagacatgttagaggatattttccaagaagcaagttttattcccattactaccaatgctacgtttaactccagtgaattgattcaagagtttcagatcaacgatcttcagttaagatgggcagcgcgcaaaaagctcagtcttgtggggacatttttaggattctttgatttatccttctacgagacgcaccagcaagacagagttcgcatcgataccattagaggacagatcgatttataccataacgacatcaatttcttaaacttacccatgaagcaatggatcaactcttcttctcacattttacacgatgaggacacaggaaatacgcagatgaagcttcaatttgatttggaaaatgacgacatggaagtcgtcaatagcttggaattaacaagaaccttgaacgaaatattattccagggttttacagttattcactttaatgcgacgatagatgcgtcccttacgacggcattgggcccgtgggttctcaccgggttagccggagagggtgacactttggtcacgtga

SEQ ID NO: 7543 - DNA, 1239 bp, Saccharomyces cerevisiae
atgacaaagattaaggtagctaaccccattgtggaaatggacggcgatgagcaaacaagaataatctggcatttaatcagggacaagttagtcttgccctatcttgacgttgatttgaagtactacgatctttccgtggagtatcgtgaccagactaatgatcaagtaactgtggattctgccaccgcgactttaaagtatggagtagctgtcaaatgcgcgactattacacccgatgaggcaagggtcgaggaatttcatttgaaaaagatgtggaaatctccaaatggtactattagaaacattttgggtggtacagtgttcagagaacctattattatccctagaattccaaggctagttcctcaatgggagaagcccatcatcattgggagacacgcattcggcgatcagtacaaagctaccgatgtaatagtccctgaagaaggcgagttgaggcttgtttataaatccaagagcggaactcatgatgtagatctgaaggtatttgactacccagaacatggtggggttgccatgatgatgtacaacactacagattcgatcgaagggtttgcgaaggcctcctttgaattggccattgaaaggaagttaccattatattccactactaagaatactattttgaagaagtatgatggtaaattcaaagatgttttcgaagccatgtatgctagaagttataaagagaagtttgaatcccttggcatctggtacgagcaccgtttaattgatgatatggtggcccaaatgttgaaatctaaaggtggatacataattgccatgaaaaattacgacggtgacgtagaatcagatattgttgcacaaggatttggctccttggggttaatgacatctgtgttgattaccccggacggtaaaacctttgaaagcgaagccgcccacggtacagtaacaagacattttagacagcatcagcaaggaaaggagacgtcaacaaattccattgcatcaattttcgcgtggactagaggtattattcaaaggggtaaacttgataatactccagatgtagttaagttcggccaaatattggaaagcgctacggtaaatacagtgcaagaagatggaatcatgactaaagatttggcgctcattctcggtaagtctgaaagatccgcttatgtcactaccgaggagttcattgacgcggtggaatctagattgaaaaaagagttcgaggcagctgcattgtaa

SEQ ID NO: 7544 - DNA, 1239 bp, Artificial Sequence
  Description of Artificial Sequence: Synthetic polynucleotide
atgacaaagattaaggtagctaaccccattgtggaaatggacggcgatgagcaaacaagaataatctggcatttaatcagggacaagttagtcttgccctatcttgacgttgatttgaagtactacgatctttccgtggagtatcgtgaccagactaatgatcaagtaactgtggattctgccaccgcgactttaaagtatggagtagctgtcaaatgcgcgactattacacccgatgaggcaagggtcgaggaatttcatttgaaaaagatgtggaaatctccaaatggtactattagaaacattttgggtggtacagtgttcagagaacctattattatccctagaattccaaggttggttcctcaatgggagaagcccatcatcattgggagacacgcattcggcgatcagtacaaagctaccgatgtaatagtccctgaagaaggcgagttgaggcttgtttataaatccaagagcggaactcatgatgtagatttgaaggtatttgactacccagaacatggtggggttgccatgatgatgtacaacactacagattctatcgaagggtttgcgaaggcctcctttgaattggccattgaaaggaagttaccattatattccactactaagaatactattttgaagaagtatgatggtaaattcaaagatgttttcgaagccatgtatgctagaagttataaagagaagtttgaatcccttggcatctggtacgagcaccgtttaattgatgatatggtggcccaaatgttgaaatctaaaggtggatacataattgccatgaaaaattacgacggtgacgtagaaagtgatattgttgcacaaggatttggctccttggggttaatgacatctgtgttgattaccccggacggtaaaacctttgaaagcgaagccgcccacggtacagtaacaagacattttagacagcatcagcaaggaaaggagacgagtacaaattccattgcatctattttcgcgtggactagaggtattattcaaaggggtaaacttgataatactccagatgtagttaagttcggccaaatattggaaagcgctacggtaaatacagtgcaagaagatggaatcatgactaaagatttggcgctcattctcggtaagtctgaaagatccgcttatgtcactaccgaggagttcattgacgcggtggaatctagattgaaaaaagagttcgaggcagctgcattgtga

SEQ ID NO: 7545 - DNA, 1452 bp, Saccharomyces cerevisiae
atgtcaaaggaggatttcgttattaagcctgaagctgcaggtgcttccactgacactagtgaatggccattacttttgaagaattttgataagttattagtcagaagtggtcattatacccctatcccagctggtagttcaccactaaagagagacctgaaatcatatatcagctctggtgtcattaatctagataaaccttccaacccatcatcgcacgaagttgtagcttggatcaaaagaatcttacgttgtgagaagactggtcactctggtacattggatccaaaagttacaggttgtttgattgtttgtattgacagagctaccaggttggttaagtctcaacaaggtgctggtaaggagtatgtgtgtattgtcagattgcatgatgctttgaaggatgaaaaggatttgggccgctcactagaaaacttgaccggtgcgcttttccaaagacctcctttaatctctgctgttaagagacaattacgtgttcgtactatctatgagtcaaacttgattgagttcgataacaagagaaacttaggtgttttctgggcttcctgtgaagctggtacttatatgcgtactttgtgtgttcatttaggtatgctattaggtgttggtggtcacatgcaagaattgcgtcgtgttagatccggtgctctgtctgaaaatgacaacatggtcactttacatgatgttatggatgcccaatgggtttacgacaatacaagagatgaatcttacttgagatccattattcaacctttagaaactctattggttggttacaagagaattgtagtgaaggattctgctgtcaatgcagtatgttatggtgcaaagttgatgatccctggtttattgcgttacgaagaaggtattgagttatatgacgaaattgtcttgataactaccaagggtgaagccattgccgttgccatcgcacaaatgtcaaccgttgacttagcttcctgtgatcatggtgttgttgctagtgtgaagagatgtatcatggaaagagatttatacccaagaagatggggtttgggtccagtcgcacaaaagaagaagcaaatgaaggcagacggcaaattggataaatacggccgtgttaacgaaaacaccccagaacaatggaaaaaagaatatgttccattagacaatgctgaacagtcaacttctagctctcaggaaactaaggaaactgaagaagagcctaagaaagctaaagaagattctttaatcaaagaagtcgaaactgagaaggaagaagtgaaagaggatgacagcaaaaaggaaaagaaagagaagaaggacaagaaggaaaagaaggaaaagaaagaaaagaaggacaagaaggaaaagaaagagaaaaaggagaagaaaagaaagtctgaagacggtgattctgaggaaaagaaatctaagaaatctaagaaatga

SEQ ID NO: 7546 - DNA, 1452 bp, Artificial Sequence
  Description of Artificial Sequence: Synthetic polynucleotide
atgtccaaggaggatttcgttattaagcctgaagctgcaggtgcttccactgacactagtgaatggccattacttttgaagaattttgataagttattagtcagaagtggtcattatacccctatcccagctggtagttctccattgaagagagacttgaaaagttatatcagctctggtgtcattaatttggataaaccttccaacccatcttctcacgaagttgtagcttggatcaaaagaatcttacgttgtgagaagactggtcactctggtacattggatccaaaagttacaggttgtttgattgtttgtattgacagagctaccaggttggttaagtctcaacaaggtgctggtaaggagtatgtgtgtattgtcagattgcatgatgctttgaaggatgaaaaggatttgggccgctctttggaaaacttgaccggtgcgcttttccaaagacctcctttaatctctgctgttaagagacaattacgtgttcgtactatctatgagagcaacttgattgagttcgataacaagagaaacttaggtgttttctgggcttcctgtgaagctggtacttatatgcgtactttgtgtgttcatttaggtatgcttttaggtgttggtggtcacatgcaagaattgcgtcgtgttagatccggtgctttatctgaaaatgacaacatggtcactttacatgatgttatggatgcccaatgggtttacgacaatacaagagatgaatcttacttgagatccattattcaacctttagaaactttattggttggttacaagagaattgtagtgaaggattctgctgtcaatgcagtatgttatggtgcaaagttgatgatccctggtttattgcgttacgaagaaggtattgagttatatgacgaaattgtcttgataactaccaagggtgaagccattgccgttgccatcgcacaaatgtctaccgttgacttagcttcctgtgatcatggtgttgttgctagtgtgaagagatgtatcatggaaagagatttatacccaagaagatggggtttgggtccagtcgcacaaaagaagaagcaaatgaaggcagacggcaaattggataaatacggccgtgttaacgaaaacaccccagaacaatggaaaaaagaatatgttccattagacaatgctgaacagtctacttctagctctcaggaaactaaggaaactgaagaagagcctaagaaagctaaagaagattctttaatcaaagaagtcgaaactgagaaggaagaagtgaaagaggatgacagcaaaaaggaaaagaaagagaagaaggacaagaaggaaaagaaggaaaagaaagaaaagaaggacaagaaggaaaagaaagagaaaaaggagaagaaaagaaagtctgaagacggtgattctgaggaaaagaaatctaagaaatctaagaaatga

SEQ ID NO: 7547 - DNA, 2436 bp, Saccharomyces cerevisiae
atggtaatcttcaaagaacgcaaaccaacagaaaaccttttcactagaaaaatacctgccaagtacttcatcttctcgcctagttttttgtctgttcattattttgaattttatttgcccatgtccggtgataataacattgaacctactagtcggggctcgaacgacaatagcaacggtccaagtaacggatcttcggtaaacagtaatcggtacagtttaaacgcacccaagtacagcagccaaccaccgccagcatcacacacttatttgccccccatgtcagtgaatatcccgcccatagcgagcaaatcatcgtcaatatacagcctgctacaccaaagttccccccgcccggagacgccaaatccaatattaccgccacttatcggtagtggtcccggctcccataaaccatctcctacccctacacagcctcctgcacaacccgcaacacaacggcaacctgccacatactcagtgtatccagcgtctatcagcctgaatagatcgaattcatctgcttacccactttctttcaagtcagaggaaaccttaaacaataatcctcctactgctgccaaacgtaccaataccttcccctcaattccaagcagtacgaaaaaacagaaaacaagccaagagaaacgaatctcttccatttcaaggagaaacacgcaagaaataattgctaagcaaattgcagaaaataacaaatctaaaaccatcgaggagtatgcgcagatcgtgaagcatgcagaaatcaaagtcctgagcatggactcacagaacacttcaaaggcagctttgcagctggcggaacaaaacagagaaagagaaagacaagtgtttgcgttactttggttaatgaaaaattgtaaatctcagcacgatagttacgtaccaagaggcaaaatatttgctcaatacgcttcatcttgttcccaaaacaacctgaagcccttatcacaggcgtcattagggaagttgataagaacagtttttcctgatttaacgactagaaggctgggtatgagaggtcaatccaaataccactactgcggattgaaactaactgtcaacgaaagcggctccgtgtcccttaataacaacaatgcttcgttatccttagtacacaataacgatcccatatcgcccctatcgtctccatcgccctcttcaccttcgccgcaggtacctaacgtttcatcgccgttctcattaaatagaaaaagtctttctcgaactgggtcgcccgttaaacagagtagtaatgacaaccctaacgaaccagaactcgaatcacagcatccaaacgaaacagaagcaaataaactagattcgctgccaccagcggcaaataaccctaccggaacactgtcttcagatgaattaactttcactcatgatttaattgaaaaagttttcaattgtaatgacaagctatcagataactataatacccaaatattatcgaacacagaacatccgcttttgacatcatataagttagacttcccaaaaattcccgcaggtgtactccccacagacactgattcggatgttatatcatccttggagtcattatatcatatccattgcaactccgtttatgaatgcatcaagtttctgaagagtgataatatatcaaatgcattattcttctctaactctaactctatatcgcccacgatgtttaatctattcatttctgagccattgattgattgggtaactaaatgtgacttaatcacctatacagggttaatcaaatttttttcacaatttataattcattctaatgagatcagtgactcaatcattcaaaaactggaaagtatgatcaagctattgcccgaacaaattaataaggctgttttagaattaccaaaagcgctagtgcaaaggaagttatcaattattaataattttaccaaactagtgaaaaaactaataaagttattaaaattcattctaaacttcttgaaaagttttcctatatttaaaagtggcatgaataatgactggaagaatattgtaaatttagacgatattttggaaatgatgattaatgaagacgatacaaattcagagacaaacacaataatgcaacatttacaagggttctgtcaagttttcgtaacaaagttcttaaattcctctatgagcgttagcaatgatccctctgtgtctatcgaatgcaagtccttaaatgaaatgattaaagatttttgttcctttatttccctacaaagcaaattttcgtgcttgaaattaattgattgcagcacaagattcaggaatgcaataatcggcgatattagcttaaaatcaaatgagaatttgctatcatggttgtttctaaataatgtcatgggccaattgctgaactactgttttgaagtcatgaaattcgtcaatggcctaaaagtttaa

SEQ ID NO: 7548 - DNA, 2436 bp, Artificial Sequence
  Description of Artificial Sequence: Synthetic polynucleotide
atggtaatcttcaaagaacgcaaaccaacagaaaaccttttcactagaaaaatacctgccaagtacttcatcttcagtcctagttttttgtctgttcattattttgaattttatttgcccatgtccggtgataataacattgaacctactagtagaggctctaacgacaatagcaacggtccaagtaacggatcttctgtaaacagtaatagatacagtttaaacgcacccaagtacagcagccaaccaccgccagcatctcacacttatttgccccccatgtctgtgaatatcccgcccatagcgagcaaaagctcttctatatacagcttgttgcaccaaagttccccccgcccggagacgccaaatccaatattaccgccacttatcggtagtggtcccggctcccataaaccatctcctacccctacacagcctcctgcacaacccgcaacacaaagacaacctgccacatactctgtgtatccagcgtctatcagcttgaatagatctaattcttctgcttacccactttctttcaagagtgaggaaaccttaaacaataatcctcctactgctgccaaacgtaccaataccttcccctctattccaagcagtacgaaaaaacagaaaacaagccaagagaaaagaatctcttccatttctaggagaaacacgcaagaaataattgctaagcaaattgcagaaaataacaaatctaaaaccatcgaggagtatgcgcagatcgtgaagcatgcagaaatcaaagtcttgagcatggactctcagaacacttctaaggcagctttgcagcttgcggaacaaaacagagaaagagaaagacaagtgtttgcgttactttggttaatgaaaaattgtaaatctcagcacgatagttacgtaccaagaggcaaaatatttgctcaatacgcttcttcttgttcccaaaacaacttgaagcccttatctcaggcgtctttagggaagttgataagaacagtttttcctgatttaacgactagaaggcttggtatgagaggtcaatccaaataccactactgcggattgaaattaactgtcaacgaaagcggctccgtgtcccttaataacaacaatgcttctttatccttagtacacaataacgatcccatatctcccttatcttctccatctccctcttctccttctccgcaggtacctaacgtttcttctccgttctctttaaatagaaaaagtctttctagaactgggtctcccgttaaacagagtagtaatgacaaccctaacgaaccagaactcgaatctcagcatccaaacgaaacagaagcaaataaattggattctttaccaccagcggcaaataaccctaccggaacattatcttctgatgaattaactttcactcatgatttaattgaaaaagttttcaattgtaatgacaagttaagtgataactataatacccaaatattatctaacacagaacatccgcttttgacatcttataagttagacttcccaaaaattcccgcaggtgtactccccacagacactgattctgatgttatatcttccttggagtctttatatcatatccattgcaactccgtttatgaatgcatcaagtttttgaagagtgataatatatccaatgcattattcttctctaactctaactctatatctcccacgatgtttaatttattcatttctgagccattgattgattgggtaactaaatgtgacttaatcacctatacagggttaatcaaatttttttctcaatttataattcattctaatgagatcagtgactctatcattcaaaaattagaaagtatgatcaagttgttgcccgaacaaattaataaggctgttttagaattaccaaaagcgttagtgcaaaggaagttatccattattaataattttaccaaattagtgaaaaaattgataaagttattaaaattcattttgaacttcttgaaaagttttcctatatttaaaagtggcatgaataatgactggaagaatattgtaaatttagacgatattttggaaatgatgattaatgaagacgatacaaattctgagacaaacacaataatgcaacatttacaagggttctgtcaagttttcgtaacaaagttcttaaattcctctatgagcgttagcaatgatccctctgtgtctatcgaatgcaagtccttaaatgaaatgattaaagatttttgttcctttatttccttacaaagcaaattttcttgcttgaaattaattgattgcagcacaagattcaggaatgcaataatcggcgatattagcttaaaatctaatgagaatttgttatcttggttgtttttgaataatgtcatgggccaattgttgaactactgttttgaagtcatgaaattcgtcaatggcttgaaagtttga

SEQ ID NO: 7549 - DNA, 1887 bp, Saccharomyces cerevisiae
atggagctgccttcaataaatagcaccacaagtatatccgacaaccaggagttaaggaattactatgacaagttgctgttcaagaacaatagtggcaagtcgctagcggatttgccaggaaaaatggcagattttaacgacaacagcgctgctgcgcatccccgctccagagttgactttatcaacggttacatcggtttcagagaggataagcagtctcttctggggcagaagaacactaaaagggcctcgttcagcgcatttgcggacgaaggaaggaaacagagcgagatgagcattaacgggaagagccctaatttgtctcttttctcatttgagtttaacggcaccccgactcaggacagaaagccatacaaacaggattacttgaatgtgatgaacacttcgcctaacaatattctttctcccttaaacaacagctcccaaaaatactatccacagaaacagcagcagcagcagcagcagcagcagcagcaacagcaacaaagcatctttgacccgggaagaagatcttcctatatttctgatgcgctgattcatggcaatgcggctacccagcaaccacaatactcgcaacctgtatatattaacaacaacccatctttgcaagtaccatacactgctccttccgagtatactcagcagcaacagtactcgtcacccttcaatgctaggcgcaacacccagccagtgctgaacttgcatccggcagccgctcccacaaacgatgccggattggcggttgtcgacggcaagaatttgacgtcatccaaggagctgcatgacttatatcttgactgcgggtcaaactattttgctagtgataaagtttataaatttattgacagcataaagggaactttacgcggggataatgtctccgcctccagttccaggattatagagtttttggattttttgaaaaattgtaatctgaattacaacccacagtctgacgcattcatctccactgctgtttcaaacgcttcgtcgaccggggcggccaaatccaagaacagcacttcaatgcatttgcactataagccattagtgttagtatcgttgaaaaatggtaagctcgaactgttgtctaaaccacaaacggccacacttatactgaaaaggggcgatttggtcattattgatggtgatcgtggtaaagatttagttttggtggtggaaccggttgtagatataaatttggcactatttataaattttttgaagaaaaaaattcactttgattctctaatcaccaatagtcaacagcatttccccaatgaccagtttatcaagactctggttgatacaaccaatggtaagccggtcgctcatgagttgaatccgaagttatatgatatcattgaactaacgcaattgatcatcccatcaaagcaggttctgagatttgccaccccgtgggaatcctccacgaatttacacaacaaattccaggatgagctaaaggctcttcacattgcacagctaaaactgaggtcgctaaataacaataactccggtggcgggttgaacatcaaaatattgaatgcagagttccaattcgacagaaagaaattgactttctactacatttgccaggagcgtaatgatttcagagacctgatcaaagaactctttaagttttacaaaacaagaatttggctttgtgctataccgaacaatttatcgatagattccaaattttatgattcaaacaagtttgagtgggagatgtatcaggatatgatgtcccactattccatggacaacactggaattgtcgtggcccctgaactgaatcgcttgaaactggacgacttccagatcggtgtttatatggaattggtgaaggttttgttcggctaa

SEQ ID NO: 7550 - DNA, 1887 bp, Artificial Sequence
  Description of Artificial Sequence: Synthetic polynucleotide
atggagcttccttccataaatagcaccacaagtatatccgacaaccaggagttaaggaattactatgacaagttgttattcaagaacaatagtggcaagtctttagcggatttgccaggaaaaatggcagattttaacgacaacagcgctgctgcgcatccccgctccagagttgactttatcaacggttacatcggtttcagagaggataagcagtctcttttggggcagaagaacactaaaagggcctctttcagcgcatttgcggacgaaggaaggaaacagagcgagatgagcattaacgggaagagccctaatttgtctcttttctcctttgagtttaacggcaccccgactcaggacagaaagccatacaaacaggattacttgaatgtgatgaacacttctcctaacaatattctttctcccttaaacaacagctcccaaaaatactatccacagaaacagcagcagcagcagcagcagcagcagcagcaacagcaacaaagcatctttgacccgggaagaagatcttcctatatttctgatgcgttaattcatggcaatgcggctacccagcaaccacaatactctcaacctgtatatattaacaacaacccatctttgcaagtaccatacactgctccttccgagtatactcagcagcaacagtactcttctcccttcaatgctaggcgcaacacccagccagtgttgaacttgcatccggcagccgctcccacaaacgatgccggattggcggttgtcgacggcaagaatttgacgtcttccaaggagttacatgacttatatcttgactgcgggtctaactattttgctagtgataaagtttataaatttattgacagcataaagggaactttacgcggggataatgtctccgcctccagttccaggattatagagtttttggattttttgaaaaattgtaatttgaattacaacccacagtctgacgcattcatctccactgctgtttctaacgcttcttccaccggggcggccaaatccaagaacagcacttctatgcatttgcactataagccattagtgttagtatctttgaaaaatggtaagctcgaattattgtctaaaccacaaacggccacacttatattgaaaaggggcgatttggtcattattgatggtgatcgtggtaaagatttagttttggtggtggaaccggttgtagatataaatttggcattatttataaattttttgaagaaaaaaattcactttgattctttgatcaccaatagtcaacagcatttccccaatgaccagtttatcaagactttggttgatacaaccaatggtaagccggtcgctcatgagttgaatccgaagttatatgatatcattgaattgacgcaattgatcatcccatctaagcaggttttgagatttgccaccccgtgggaatcctccacgaatttacacaacaaattccaggatgagttgaaggctcttcacattgcacagttgaaattgaggtccttgaataacaataactccggtggcgggttgaacatcaaaatattgaatgcagagttccaattcgacagaaagaaattgactttctactacatttgccaggagcgtaatgatttcagagacttgatcaaagaactctttaagttttacaaaacaagaatttggctttgtgctataccgaacaatttatctatagattccaaattttatgattccaacaagtttgagtgggagatgtatcaggatatgatgtcccactattccatggacaacactggaattgtcgtggcccctgaattgaatcgcttgaaattagacgacttccagatcggtgtttatatggaattggtgaaggttttgttcggctga

SEQ ID NO: 7551 - DNA, 660 bp, Saccharomyces cerevisiae
atgaaccaagcaatagacttcgcacaagcaagcattgactcctacaagaagcacggcattctggaggatgtaattcatgacacaagctttcaaccctccgggatacttgccgtagagtactcatcaagtgcacctgttgccatgggtaacacgctgcccactgagaaggcacgttccaagccccaattccagttcacgttcaataagcaaatgcaaaaaagcgtaccacaggcgaatgcgtacgttccccaagacgacgatttgttcacactggtaatgaccgatccggatgctccctctaagacagatcacaagtggtctgaattctgccacttggtagaatgcgacttaaagctgttgaatgaggctactcacgagacctccggagcaaccgaattttttgcatcagagttcaatacgaagggctcgaacacactaatagaatatatgggaccagctccacccaagggatccggtccccacagatatgttttcttgttatataagcagcctaagggcgtggactcatctaagttctcgaaaattaaggatagaccgaactggggttacggcacccctgccaccggtgttggcaaatgggctaaggaaaacaacctgcaactagttgcctccaatttcttctatgcggaaacgaaatag

SEQ ID NO: 7552 - DNA, 660 bp, Artificial Sequence
  Description of Artificial Sequence: Synthetic polynucleotide
atgaaccaagcaatagacttcgcacaagcaagcattgactcctacaagaagcacggcattttagaggatgtaattcatgacacaagctttcaaccctccgggatacttgccgtagagtactcttccagtgcacctgttgccatgggtaacacgttacccactgagaaggcacgttccaagccccaattccagttcacgttcaataagcaaatgcaaaaaagcgtaccacaggcgaatgcgtacgttccccaagacgacgatttgttcacattggtaatgaccgatccggatgctccctctaagacagatcacaagtggtctgaattctgccacttggtagaatgcgacttaaagttgttgaatgaggctactcacgagacctccggagcaaccgaattttttgcaagtgagttcaatacgaagggctctaacacattaatagaatatatgggaccagctccacccaagggatccggtccccacagatatgttttcttgttatataagcagcctaagggcgtggactcttctaagttctccaaaattaaggatagaccgaactggggttacggcacccctgccaccggtgttggcaaatgggctaaggaaaacaacttacaattggttgcctccaatttcttctatgcggaaacgaaatga

SEQ ID NO: 7553 - DNA, 606 bp, Saccharomyces cerevisiae
atgtctagtgccatcgttgctaaactgaacaaagaggacatcattaaggacaccgtcaaggacttggcgttcgagattcttggtgagttgtcggtttcgtacgttgattctgacgacatcaaattgggcaatcccatgccaatggaagctacgcaagccgctcctaccatcaagttcacgcccttcgataaaagccaattgtcagccgaggataaactcgctttgttgatgactgacccggacgcgccctctagaacagaacataagtggtcggaggtttgtcactacatcatcactgatattcctgtcgagtacggacctgggggagatattgccatttcggggaagggtgtcgtgagaaataactatattgggcctggtccaccaaagaactccggttatcacagatacgtgttcttcctgtgcaagcaacccaagggagcggattcgtccacttttaccaaggttgagaacattatctcctgggggtacggtactcctggtgcgggtgcctatgactatatcaaggagaacaatctgcaactggtcggtgccaattattacatggtcgaaaacacgaccgttgatttcaactatgacatgtaa

SEQ ID NO: 7554 - DNA, 606 bp, Artificial Sequence
  Description of Artificial Sequence: Synthetic polynucleotide
atgtctagtgccatcgttgctaaattgaacaaagaggacatcattaaggacaccgtcaaggacttggcgttcgagattcttggtgagttgagtgtttcttacgttgattctgacgacatcaaattgggcaatcccatgccaatggaagctacgcaagccgctcctaccatcaagttcacgcccttcgataaaagccaattgagtgccgaggataaactcgctttgttgatgactgacccggacgcgccctctagaacagaacataagtggtctgaggtttgtcactacatcatcactgatattcctgtcgagtacggacctgggggagatattgccatttctgggaagggtgtcgtgagaaataactatattgggcctggtccaccaaagaactccggttatcacagatacgtgttcttcttgtgcaagcaacccaagggagcggattcttccacttttaccaaggttgagaacattatctcctgggggtacggtactcctggtgcgggtgcctatgactatatcaaggagaacaatttacaattggtcggtgccaattattacatggtcgaaaacacgaccgttgatttcaactatgacatgtga

SEQ ID NO: 7555 - DNA, 1149 bp, Saccharomyces cerevisiae
atggccggtacatttttattcacttctgaatccgttggtgaaggtcacccagataagatctgtgaccaagtttccgacgccatcttggacgcttgtttagccgaggaccctcactccaaagttgcgtgtgaaaccgcggcaaagactggtatgattatggtctttggtgaaattactaccaaggcacagttggattaccaaaaaatcgtcagagacaccatcaagaagattggttacgatgattccgccaagggtttcgactataagacctgtaacgtccttgtcgccattgagcaacaatctccagatatcgcccaaggtgtccacgaggagaaggatttggaagacatcggtgccggtgaccaaggtatcatgtttggttacgccacagatgaaactccagagggtttgcctttgactattcttttggctcataaactaaacatggccatggctgacgcgagaagagatggctctttagcgtggttgagaccagacaccaagactcaagtcaccgtcgaatacaaggatgaccacggtagatgggttccacaaagaatcgacaccgtcgtcgtctccgctcaacatgctgacgaaatcacgaccgaggacttaagagcgcaactaaagtccgagatcattgaaaaagtcatcccaagagacatgttggacgaaaacaccaaatactttatccaaccttccggtagattcgtcatcggtggtcctcaaggtgacgctggtttgaccggtagaaagatcatcgtcgacgcttacggtggtgcctcatccgtcggtggtggtgccttctccggtaaggactactctaaggttgatcgttctgccgcttatgccgctagatgggttgccaagtccctagttgccgctggtttatgtaagagagttcaagttcaattttcttatgccatcggtattgcggaaccattgtccttgcacgttgacacctatggtactgcgaccaagtctgacgaagaaattatcgacattatcagcaagaactttgacttgagacctggtgtattggtcaaggagttggacttagctagaccaatctacttgccaaccgcttcttatggccatttcacaaaccaagaatacccatgggaaaagcctaagactttgaagttctaa

SEQ ID NO: 7556 - DNA, 1149 bp, Artificial Sequence
  Description of Artificial Sequence: Synthetic polynucleotide
atggccggtacatttttattcacttctgaatccgttggtgaaggtcacccagataagatctgtgaccaagtttccgacgccatcttggacgcttgtttagccgaggaccctcactccaaagttgcgtgtgaaaccgcggcaaagactggtatgattatggtctttggtgaaattactaccaaggcacagttggattaccaaaaaatcgtcagagacaccatcaagaagattggttacgatgattccgccaagggtttcgactataagacctgtaacgtccttgtcgccattgagcaacaatctccagatatcgcccaaggtgtccacgaggagaaggatttggaagacatcggtgccggtgaccaaggtatcatgtttggttacgccacagatgaaactccagagggtttgcctttgactattcttttggctcataaattgaacatggccatggctgacgcgagaagagatggctctttagcgtggttgagaccagacaccaagactcaagtcaccgtcgaatacaaggatgaccacggtagatgggttccacaaagaatcgacaccgtcgtcgtctccgctcaacatgctgacgaaatcacgaccgaggacttaagagcgcaattgaagtccgagatcattgaaaaagtcatcccaagagacatgttggacgaaaacaccaaatactttatccaaccttccggtagattcgtcatcggtggtcctcaaggtgacgctggtttgaccggtagaaagatcatcgtcgacgcttacggtggtgcctcttccgtcggtggtggtgccttctccggtaaggactactctaaggttgatcgttctgccgcttatgccgctagatgggttgccaagtccttggttgccgctggtttatgtaagagagttcaagttcaattttcttatgccatcggtattgcggaaccattgtccttgcacgttgacacctatggtactgcgaccaagtctgacgaagaaattatcgacattatcagcaagaactttgacttgagacctggtgtattggtcaaggagttggacttagctagaccaatctacttgccaaccgcttcttatggccatttcacaaaccaagaatacccatgggaaaagcctaagactttgaagttctga

SEQ ID NO: 7557 - DNA, 993 bp, Saccharomyces cerevisiae
atggctagtaacgctgcaagggttgtcgctacagcgaaggattttgacaaagttgggttagggatcatcggatactatcttcagttatatgcggtggaattgatactgagtgaagaagatcggtcgcaagagatgaccgcactagcgacagaacttcttgatactattgaagcgtttaagaaggagattggcggcgagagtgaagcagaagacagtgacaaaagcttacacgttatgaacacgctaatacatgatcaagaaaaagccaaaatttatatgctaaattttacaatgtcgttgtataacgagaaactgaaacagctaaaagatggtccctgggatgttatgttaaaaagatcactttggtgttgtattgatttattttcatgcattttacacctgtggaaggaaaatataagtgaaacgagtacaaattcattacaaaaacgaattaagtattgcaaaatttatttgagtaaattggcaaagggtgaaattggttccagcgacgagaaaacgttagattatgcagattttgcggatgatagcgaggagattaaggatgaagatgttgatcaccagacaagcgatttggaaaacaataataatgataaagtcgaaggcctagccccaaaagaccaaacaacatcatacgagcctgtggatgaggtacctgaatttattgatgatgccgatagcgtaaacgaagaagaacagaccgtcgacaagaacgaagatgcaataacaaaagacgaacaacaagttgtgaagaaagaagtggatcttacgcgcccttctgcaccatcagaacctgctgcagcagagcataaatcgtatacaaaggatgagttgacaaaaattatggacagggccagtaaaatagagcaaattcaaaaacttgccaaatacgccataagcgcattgaattatgaagacctgcccaccgccaaagatgagttaactaaggcgttggatctgttaaattctatttga

SEQ ID NO: 7558 - DNA, 993 bp, Artificial Sequence
  Description of Artificial Sequence: Synthetic polynucleotide
atggctagtaacgctgcaagggttgtcgctacagcgaaggattttgacaaagttgggttagggatcatcggatactatcttcagttatatgcggtggaattgatattgagtgaagaagatagatctcaagagatgaccgcattagcgacagaacttcttgatactattgaagcgtttaagaaggagattggcggcgagagtgaagcagaagacagtgacaaaagcttacacgttatgaacacgttgatacatgatcaagaaaaagccaaaatttatatgttgaattttacaatgtctttgtataacgagaaattgaaacagttgaaagatggtccctgggatgttatgttaaaaagatctctttggtgttgtattgatttattttcttgcattttacacctttggaaggaaaatataagtgaaacgagtacaaattctttacaaaaaagaattaagtattgcaaaatttatttgagtaaattggcaaagggtgaaattggttccagcgacgagaaaacgttagattatgcagattttgcggatgatagcgaggagattaaggatgaagatgttgatcaccagacaagcgatttggaaaacaataataatgataaagtcgaaggcttggccccaaaagaccaaacaacatcttacgagcctgtggatgaggtacctgaatttattgatgatgccgatagcgtaaacgaagaagaacagaccgtcgacaagaacgaagatgcaataacaaaagacgaacaacaagttgtgaagaaagaagtggatcttacgcgcccttctgcaccatctgaacctgctgcagcagagcataaaagttatacaaaggatgagttgacaaaaattatggacagggccagtaaaatagagcaaattcaaaaacttgccaaatacgccataagcgcattgaattatgaagacttgcccaccgccaaagatgagttaactaaggcgttggatttattaaattctatttga

SEQ ID NO: 7559 - DNA, 2412 bp, Saccharomyces cerevisiae
atggcgttggaagaagtggtacgatacttaggacctcacaatgagatccctttgacactcactagagactcggagactggccatttcctcctgaaacattttctgcccattttgcagcaatatcatgacacggggaatattaacgagaccaaccccgatagtttccccactgatgaggaaagaaataaattactggcacattatggaattgctgtaaatacagacgaccgaggtgagttatggatagagctggaaaaatgtttacaattattaaacatgctaaatttattcggtttgttccaggatgcattcgaatttgaggagcctgaaacagatcaggatgaagaagatcccagccattcgaaactaccagaaaacaagaccaaaagtgaaaattctaaggataatatcagctcaaagaggattaataatttacaagatatgagcctggattctgatgcacacagagaattaggctctcctttaaaaaaactaaaaatagatacctctgtaatagatgctgagagtgactccactccgaatactgccagaggcaagcctaacgatgatattaataagggccctagcggcgacaatgaaaataatggcactgatgacaatgacagaaccgctggacctatcataacattcactcatgacctaacttctgactttttaagcagtccactgaaaatcatgaaagcactaccttctccagttgtaaatgataatgaacagaagatgaaactagaggcattcttacaacggttgttatttccagaaattcaagaaatgcctacatcccttaataatgacagcagtaatagaaattcagaaggggggagctcaaaccaacaacaacagcacgtatcatttgatagccttttgcaagaggtaaacgacgcttttcctaatactcaattaaatcttaatattcctgtagatgagcatggaaacacaccattacattggctgacttcaatagcaaacctggaattagtgaaacacctggttaagcatggttcaaacagattatatggtgataatatgggggagtcatgcctagtgaaagctgtcaaatcagtaaataattacgactctggtacttttgaggcacttctagattatttatatccatgtttaattttggaagactcaatgaatagaacaattttgcaccatatcattattacgtctggtatgactggctgttcagcagctgcgaaatattatttagatattttaatgggatggattgtcaagaaacaaaatagacccattcaaagtggtactaacgaaaaagaaagcaaaccgaatgacaaaaatggggaaagaaaggactctatactagaaaatttggacctgaaatggataatagcaaacatgctcaatgcgcaggactctaatggcgatacttgcttgaacattgcagcaagattgggaaacatttcaatagtagacgctttattagattacggtgctgacccatttattgcaaacaaatcagggttgagacccgtggattttggggcaggtacttcaaaattacaaaatacgaacggcggtgacgaaaactcgaagatggtctctaagggtgattacgacggtcaaaaaaatggaaaggccaaaaaaataaggtctcaactgttgaaaaacccacctgaaacaacttcgttaattaatgatgtccaaaatttactgaattcaatctcgaaagattatgagaatgaaacagtgcaatataatgagaaattagaaaaactacacaaggaattgaacgaacagcgagaagaattagctaattctagagaacaactagcaaatgtgaagcaattgaaagatgaatactcactaatgcaagagcaattgaccaatttaaaagcaggaattgaagaagaagaggaaagttttagggaagagagcaaaaagctaggaataattgcagatgaaagttcaggtattgattgggactctagcgaatatgatgcagatgaacccttcaaagtagagttcctttcagatttcttggaggataaattacaaaagaattatgaaggcgatatttccaaactattagaagcggagtcgaaagagcagataatggaacagatacgaaatcaacttcccgcagaaaaaatccaatcgatgcttccaccaacggtcttattgaaggcaagaataaatgcatacaagcggaatgataaacacctaaccaatgtattggatacaatcagcaccaaacaatcagaattagagaataaatttagaagagtgttatctttatgtttgaaaatcgacgaaaataaagttgacaatatgcttgatggtttgttacaggccatatcttctgaagacccacaagacattgacactgacgaaatgcaagattttttaaaaaagcatgcttcatga

SEQ ID NO: 7560 - DNA, 2412 bp, Artificial Sequence
  Description of Artificial Sequence: Synthetic polynucleotide
atggcgttggaagaagtggtacgttacttaggacctcacaatgagatccctttgacactcactagagactctgagactggccatttcctcttgaaacattttttgcccattttgcagcaatatcatgacacggggaatattaacgagaccaaccccgatagtttccccactgatgaggaaagaaataaattattggcacattatggaattgctgtaaatacagacgaccgtggtgagttatggatagagttagaaaaatgtttacaattattaaacatgttgaatttattcggtttgttccaggatgcattcgaatttgaggagcctgaaacagatcaggatgaagaagatcccagccattctaaattaccagaaaacaagaccaaaagtgaaaattctaaggataatatcagctctaagaggattaataatttacaagatatgagcttagattctgatgcacacagagaattaggctctcctttaaaaaaattgaaaatagatacctctgtaatagatgctgagagtgactccactccgaatactgccagaggcaagcctaacgatgatattaataagggccctagcggcgacaatgaaaataatggcactgatgacaatgacagaaccgctggacctatcataacattcactcatgacttgacttctgactttttaagcagtccattgaaaatcatgaaagcattaccttctccagttgtaaatgataatgaacagaagatgaaattagaggcattcttacaaagattgttatttccagaaattcaagaaatgcctacatcccttaataatgacagcagtaatagaaattctgaaggggggagcagtaaccaacaacaacagcacgtatcctttgatagccttttgcaagaggtaaacgacgcttttcctaatactcaattaaatcttaatattcctgtagatgagcatggaaacacaccattacattggttgacttccatagcaaacttggaattagtgaaacacttggttaagcatggttccaacagattatatggtgataatatgggggagagttgccttgtgaaagctgtcaaatctgtaaataattacgactctggtacttttgaggcacttttagattatttatatccatgtttaattttggaagactccatgaatagaacaattttgcaccatatcattattacgtctggtatgactggctgttctgcagctgcgaaatattatttagatattttaatgggatggattgtcaagaaacaaaatagacccattcaaagtggtactaacgaaaaagaaagcaaaccgaatgacaaaaatggggaaagaaaggactctatattggaaaatttggacttgaaatggataatagcaaacatgctcaatgcgcaggactctaatggcgatacttgcttgaacattgcagcaagattgggaaacatttctatagtagacgctttattagattacggtgctgacccatttattgcaaacaaaagtgggttgagacccgtggattttggggcaggtacttctaaattacaaaatacgaacggcggtgacgaaaactccaagatggtctctaagggtgattacgacggtcaaaaaaatggaaaggccaaaaaaataaggtctcaattattgaaaaacccacctgaaacaacttctttaattaatgatgtccaaaatttattgaattccatctccaaagattatgagaatgaaacagtgcaatataatgagaaattagaaaaattacacaaggaattgaacgaacagagggaagaattagctaattctagagaacaattggcaaatgtgaagcaattgaaagatgaatactctttgatgcaagagcaattgaccaatttaaaagcaggaattgaagaagaagaggaaagttttagggaagagagcaaaaagttgggaataattgcagatgaaagttctggtattgattgggactctagcgaatatgatgcagatgaacccttcaaagtagagttcctttctgatttcttggaggataaattacaaaagaattatgaaggcgatatttccaaattattagaagcggagagtaaagagcagataatggaacagataagaaatcaacttcccgcagaaaaaatccaatctatgcttccaccaacggtcttattgaaggcaagaataaatgcatacaagagaaatgataaacacttgaccaatgtattggatacaatcagcaccaaacaaagtgaattagagaataaatttagaagagtgttatctttatgtttgaaaatcgacgaaaataaagttgacaatatgcttgatggtttgttacaggccatatcttctgaagacccacaagacattgacactgacgaaatgcaagattttttaaaaaagcatgcttcttga

SEQ ID NO: 7561 - DNA, 1470 bp, Saccharomyces cerevisiae
atgagctcgcaatttccttcgtccccctacaggacagtggatccgtactctccaccaaattacaaacagcagcctaattgtccctcatccaattatgagaaagctggtaaaactgcgtcagaatcaattggaaatttcgggaaaggagattatccaactccatttccttcttccagtataggaagggtttcgtctcccgttaggtcgaataaggttgacgccatcccttcctctccagcttttcctggccagttggcagaaacgtcacccaagttttcttccaaactttcttctccttcaaggcatactagagtcatcaatgctgaactagatcctagcaagatcagcaccattactgtagggcgcaatagttcgcaatgtgatgttgcgctctgtaagaataagttcatatccagagtacacgctagtataacttatttaccacaaacaaatgaagtgaagattcactgcttcagtatgaacggattaatcgttacctatcgtaagcaatttgattgttatcaattaaaggataccatgaataacaataatagggcatataggcttgttcccagattctctaacgaaaaatgtgttaaagaaattcaagacgagggaggattcattaatttcactctggaagagggagacaccgtttatatgacatattacaagggtatcatgttggattttaggcaggttttacttcgcatttcgttaaaagaaaaaaactcttcttcagagccgttaagattcgagaagaaagctgaatttgaaagtgaaagtgaaacgaaacatatgggtagtataaggaagcatccattgatttttactgacacttcgatggacagacccaaaaaaatacttaaggatagcaacaaaatctcaattggtagtgattctggcgttgcagaaaggatgctaaaccacttcctaaattctaaatcgtccccactttcatccgtctcctctgttgatcacgaggaacaaaccctgagacaagattcactatcatctgataaaaatcctatgactatgaagaaaccaaaacttaacaagagggtcttaccttcaaagccaaaaaaatcggtgaaagagaatttggatgagctatctagaagaaatattgatgttatgcatctacagcatattttaaccaatcacctagcttttgcaaacgtccagcagacgccattattccaattacagcaggtgaactcacaaatttctgagctttcaagagatgaattacgttcgattttgagcgacgcgaaatgtgtcggtgtcatttaccgtcatggtaaggacgccgccggcaaaccattggacgaagagtatttctacgatttagaaaacgatgatgattacgagagaagaaacttggtgagttcattaaaaggtggaaggacaggcttaagatcttgtagaaggacacataaacaatatttttggaaaaagccagcaaaatag

SEQ ID NO: 7562 - DNA, 1470 bp, Artificial Sequence
  Description of Artificial Sequence: Synthetic polynucleotide
atgagctctcaatttccttcttccccctacaggacagtggatccgtactctccaccaaattacaaacagcagcctaattgtccctcttccaattatgagaaagctggtaaaactgcgtctgaaagtattggaaatttcgggaaaggagattatccaactccatttccttcttccagtataggaagggtttcttctcccgttaggtctaataaggttgacgccatcccttcctctccagcttttcctggccagttggcagaaacgtctcccaagttttcttccaaactttcttctccttctaggcatactagagtcatcaatgctgaattagatcctagcaagatcagcaccattactgtagggcgcaatagttctcaatgtgatgttgcgctctgtaagaataagttcatatccagagtacacgctagtataacttatttaccacaaacaaatgaagtgaagattcactgcttcagtatgaacggattaatcgttacctatcgtaagcaatttgattgttatcaattaaaggataccatgaataacaataatagggcatataggcttgttcccagattctctaacgaaaaatgtgttaaagaaattcaagacgagggaggattcattaatttcactttggaagagggagacaccgtttatatgacatattacaagggtatcatgttggattttaggcaggttttacttcgcatttctttaaaagaaaaaaactcttcttctgagccgttaagattcgagaagaaagctgaatttgaaagtgaaagtgaaacgaaacatatgggtagtataaggaagcatccattgatttttactgacacttctatggacagacccaaaaaaatacttaaggatagcaacaaaatctctattggtagtgattctggcgttgcagaaaggatgttgaaccacttcttgaattctaaatcttccccactttcctccgtctcctctgttgatcacgaggaacaaaccttgagacaagattctttatcttctgataaaaatcctatgactatgaagaaaccaaaacttaacaagagggtcttaccttctaagccaaaaaaatctgtgaaagagaatttggatgagctttctagaagaaatattgatgttatgcatttacagcatattttaaccaatcacttggcttttgcaaacgtccagcagacgccattattccaattacagcaggtgaactctcaaatttctgagctttctagagatgaattacgttctattttgagcgacgcgaaatgtgtcggtgtcatttaccgtcatggtaaggacgccgccggcaaaccattggacgaagagtatttctacgatttagaaaacgatgatgattacgagagaagaaacttggtgagttctttaaaaggtggaaggacaggcttaagatcttgtagaaggacacataaacaatatttttggaaaaagccagcaaaatga

SEQ ID NO: 7563 - DNA, 267 bp, Saccharomyces cerevisiae
atgggtaagggtactccttcattcggtaaacgtcacaacaagtcccacactttgtgtaacagatgtggtcgtcgttctttccatgttcaaaagaagacctgttcctcctgtggttatccagctgctaagaccagatcttacaactggggtgccaaggctaagagaagacacactactggtactggtagaatgagatacttgaaacacgtttcaagaagattcaagaacggtttccaaaccggctctgcttctaaggcttctgcttaa

SEQ ID NO: 7564 - DNA, 267 bp, Artificial Sequence
  Description of Artificial Sequence: Synthetic polynucleotide
atgggtaagggtactccttctttcggtaaacgtcacaacaagtcccacactttgtgtaacagatgtggtcgtcgttctttccatgttcaaaagaagacctgttcctcctgtggttatccagctgctaagaccagatcttacaactggggtgccaaggctaagagaagacacactactggtactggtagaatgagatacttgaaacacgtttctagaagattcaagaacggtttccaaaccggctctgcttctaaggcttctgcttga

SEQ ID NO: 7565 - DNA, 759 bp, Saccharomyces cerevisiae
atggtcgaagattccagagttagagacgccctcaaaggtggtgatcagaaggcattaccggcctctttggttcctcaagcacctcctgtcttgacatcaaaggataagattactaagcggatgattgtggtattagcgatggcatccctcgagacacacaagatatcgtccaacgggcctggtggtgacaaatatgtccttttgaactgtgacgaccatcaaggtttattaaaaaaaatgggtagagacattagtgaagcaagacctgatattacccaccaatgtcttttgacgttgctagattctccaatcaacaaagccggaaagctgcaggtctatattcaaacaagtcgaggaattctgatcgaggttaaccccactgttcgtataccaagaactttcaaaagattttcaggtttaatggttcagttactacataagctttctatcagatcggtaaattctgaagaaaagttacttaaagtcattaagaacccaattaccgatcacctacctactaagtgccgtaaggtgacattatcctttgacgcaccagttatccgcgttcaagattacatcgaaaaactagacgatgatgaaagtatatgtgtctttgttggtgccatggcaagaggtaaagataactttgcggatgaatacgtcgacgaaaaagtcggcttgtccaattacccattgtctgcctcagttgcatgttctaaattttgccatggcgctgaagatgcttggaatattttatag

SEQ ID NO: 7566 - DNA, 759 bp, Artificial Sequence
  Description of Artificial Sequence: Synthetic polynucleotide
atggtcgaagattccagagttagagacgccctcaaaggtggtgatcagaaggcattaccggcctctttggttcctcaagcacctcctgtcttgacatccaaggataagattactaagagaatgattgtggtattagcgatggcatccctcgagacacacaagatatcttccaacgggcctggtggtgacaaatatgtccttttgaactgtgacgaccatcaaggtttattaaaaaaaatgggtagagacattagtgaagcaagacctgatattacccaccaatgtcttttgacgttgttggattctccaatcaacaaagccggaaagttacaggtctatattcaaacaagtagaggaattttgatcgaggttaaccccactgttcgtataccaagaactttcaaaagattttctggtttaatggttcagttattacataagctttctatcagatctgtaaattctgaagaaaagttacttaaagtcattaagaacccaattaccgatcacttgcctactaagtgccgtaaggtgacattatcctttgacgcaccagttatccgcgttcaagattacatcgaaaaattagacgatgatgaaagtatatgtgtctttgttggtgccatggcaagaggtaaagataactttgcggatgaatacgtcgacgaaaaagtcggcttgtccaattacccattgtctgcctctgttgcatgttctaaattttgccatggcgctgaagatgcttggaatattttatga

SEQ ID NO: 7567 - DNA, 3081 bp, Saccharomyces cerevisiae
atgaaaaggattttctctggtgtgaagtccccaaagttatctgctcccccaaaagttttcaaaaatgatgagagcccatccactccgagctctcccaaattcgaccaagggcttcgaagtttatcagcatcagcttcaagactcttcagtaactcaatatccactcctgggagccctacgttagatcttccgcaagaacactctattaatggtgatatctcaccagaactagtaccaatcgttactttactctctgcacaggctcataggagataccattatggtatattcttgatattacatgatttgaagacagacggaacacctgccgcgcgtcagtgggaagaatgctatggtgtgttgctaggaactcagctggctttatgggatgcaaaagaattatcagattccaagaataataagaacacatcaaccatgaaaaaagccgcatcgagaccttcttttatcaattttacagatgcttctgtgaggagtttggacgctaatgatcaggtaatcattgcatcagagaacgaaaagacaaagaaagatctagacaatgttcttgttgtttcaacaactttaaaaaacaggtatttcttaaaattcaaaaattcaaaatcattcaaaacttggaacgcagcaattaggcttagtttgttcgagtttacggcgttgcaagaggcctacacgggctcatttttgtcaagcagaggtgttaaacttggtgatatcaaagttgttatggcagatacaaaattcacttatgaggactgggttagcgtaagattcgggacaggtatgccatggaaacgttgttatgctgttatttctccacagtctggcaaaaaaaagaaaaattcgaaaggttcaatatgtttctatgaaaataacaaaaaaaccaaaaaatcaaacataatgacaacggtagtagatgcacgggctttatatgccgtttatccttcctcgccgatattaatcgacacatctacaatcataaaattggaaggttttgtctcttttgacaaaagtgaggaacctcaagaaaccaacctatttatcatgcctgaaaagcatcaaggtgttccgggatatgacactattattcgcttcttaatcccagctatgaacgcgttctacttatatggtaggccaaagggtttgattgccaacagaactgacccagactccctgctgtttgccttacccactcttccgcatatatattatttgcaggtggatgacgttttatcattaacaaaagacaaaaattacatacattggagtgctgctgattggaggaataacattgttcaagtattacagaaaaaattaagtaagggctataaaggctgtggtaataaaactgtatcagtttcatctgggatgatgaagtcgccggcaattagttcagctgaattatttgaagggtacgattctctccctgaaagacaaatggaaagtccgcaaaaatctaagatgaagtctcctacattagcatcgaccgatgatattaattccgcttctgcttccgtaaactcacatgctacctcagtaaaacaaactgaattatttgtgactgataattcttcaaaaatcaatgactctgtgtcggcgcagtccagtgtcactactaacttcaaagatacttttaccaccccaatgacatcaggaatgctcaaccatgaaaattcagagagaagctttggttcaggattaaaactcaaaatcactgattcaaatttggaaaatatggaagacgttgaagcgaaatctgctaacgaattctctacgacaccagaagacaaacatattcacctcgccaatgcagccgaattatccgccctttacgacaaatattccacatctccgtttggtaaatcggaggctaattcaagccctaaacctcaaaaattggaagttaaagatcggtcaaaaaatgaaaacagaagcccctatgagagatacgtaggtacatccgctgaaagcaagacatttgaaataggtaacgtcagagagtcgaaaagtacgataaatacttccctttcttcgcctttgagggtagaagatagtagacgttcaaaaaatgaggacctgggatctttgaaagagtttgaagagttatctcaaaagattagcaatatgggaatggcaaatatttcttcagaagctttaagtgacacagcagaaaacagttcttttgttacggacctgaacttgaatatcaataacagttcatcggtcaatctcaatgaagaacaacgtgtgccggattttggggaggaaaacgtatttgatccagattatatggaacaaaaccaaatgttggaaacagaaagtaggtacactacggatgagtttgacttttcagataatcaggatgcagcatccagtaattatagcaatgggcaaaccaaccgaacagtaactgaaaccctttctgccagtgacagaaatgacaagatcccacattcttctttatttacaaacttaaaccagcttacttcgaatggaggaaactatcaggatagggaagatttctctggtgatcaaataaacaaacctcaacaatctcaaccacttcatgtgaaaggaccacaaacttcgtcatttggttacagaaattcttcagccaatagctcgcagcctcaagcaccatacccggttggtcgcccgttaggtaagataagaacgggtccgctgaccgtccagcctatgcaacaaggtggaaactcatcaatgtattctttccaatcttcgcaacatcggtttcattcgtcgcaacagcgccaaaaccaatcactttccttcagaaacaatacctatggaagtggtaacaatcaaaatacattccatccatcgccgcaactgcaacaacagcctcaaaatatgagatatttgaataataagttaccaataaatgatagatctccaataccgcaaacacagcaccatgtaccagatggccgtcccagcctccatataaataccactaaccgcacaaatccgcttactgcacaaagtggattttctcaatttatgcctcccaatagcacatcaaccaacccatattccagctga

SEQ ID NO: 7568 - DNA, 3081 bp, Artificial Sequence
  Description of Artificial Sequence: Synthetic polynucleotide
atgaaaaggattttctctggtgtgaagtccccaaagttatctgctcccccaaaagttttcaaaaatgatgagagcccatccactccgagctctcccaaattcgaccaagggcttaggagtttaagtgcatctgcttccagactcttcagtaacagcatatccactcctgggagccctacgttagatcttccgcaagaacactctattaatggtgatatctctccagaattggtaccaatcgttactttactctctgcacaggctcataggagataccattatggtatattcttgatattacatgatttgaagacagacggaacacctgccgcgcgtcagtgggaagaatgctatggtgtgttgttgggaactcagttagctttatgggatgcaaaagaattaagtgattccaagaataataagaacacatctaccatgaaaaaagccgcatctagaccttcttttatcaattttacagatgcttctgtgaggagtttggacgctaatgatcaggtaatcattgcaagtgagaacgaaaagacaaagaaagatttggacaatgttcttgttgtttctacaactttaaaaaacaggtatttcttaaaattcaaaaattctaaatctttcaaaacttggaacgcagcaattaggcttagtttgttcgagtttacggcgttgcaagaggcctacacgggctcttttttgagtagcagaggtgttaaacttggtgatatcaaagttgttatggcagatacaaaattcacttatgaggactgggttagcgtaagattcgggacaggtatgccatggaaacgttgttatgctgttatttctccacagtctggcaaaaaaaagaaaaattctaaaggttccatatgtttctatgaaaataacaaaaaaaccaaaaaaagtaacataatgacaacggtagtagatgcaagagctttatatgccgtttatccttcctctccgatattaatcgacacatctacaatcataaaattggaaggttttgtctcttttgacaaaagtgaggaacctcaagaaaccaacttgtttatcatgcctgaaaagcatcaaggtgttccgggatatgacactattattcgcttcttaatcccagctatgaacgcgttctacttatatggtaggccaaagggtttgattgccaacagaactgacccagactccttactttttgccttacccactcttccgcatatatattatttgcaggtggatgacgttttatctttaacaaaagacaaaaattacatacattggagtgctgctgattggaggaataacattgttcaagtattacagaaaaaattaagtaagggctataaaggctgtggtaataaaactgtatctgtttcttctgggatgatgaagagcccggcaattagttctgctgaattatttgaagggtacgattctctccctgaaagacaaatggaaagtccgcaaaaatctaagatgaagtctcctacattagcatctaccgatgatattaattccgcttctgcttccgtaaactctcatgctacctctgtaaaacaaactgaattatttgtgactgataattcttctaaaatcaatgactctgtgtctgcgcagtccagtgtcactactaacttcaaagatacttttaccaccccaatgacatctggaatgctcaaccatgaaaattctgagagaagctttggttctggattaaaactcaaaatcactgattctaatttggaaaatatggaagacgttgaagcgaaatctgctaacgaattctctacgacaccagaagacaaacatattcacctcgccaatgcagccgaattatccgccctttacgacaaatattccacatctccgtttggtaaaagtgaggctaatagtagccctaaacctcaaaaattggaagttaaagatagaagtaaaaatgaaaacagaagcccctatgagagatacgtaggtacatccgctgaaagcaagacatttgaaataggtaacgtcagagagagtaaaagtacgataaatacttccctttcttctcctttgagggtagaagatagtagacgttctaaaaatgaggacttgggatctttgaaagagtttgaagagttatctcaaaagattagcaatatgggaatggcaaatatttcttctgaagctttaagtgacacagcagaaaacagttcttttgttacggacttgaacttgaatatcaataacagttcttctgtcaatctcaatgaagaacaacgtgtgccggattttggggaggaaaacgtatttgatccagattatatggaacaaaaccaaatgttggaaacagaaagtaggtacactacggatgagtttgacttttctgataatcaggatgcagcatccagtaattatagcaatgggcaaaccaacagaacagtaactgaaaccctttctgccagtgacagaaatgacaagatcccacattcttctttatttacaaacttaaaccagcttacttccaatggaggaaactatcaggatagggaagatttctctggtgatcaaataaacaaacctcaacaatctcaaccacttcatgtgaaaggaccacaaacttcttcttttggttacagaaattcttctgccaatagctctcagcctcaagcaccatacccggttggtcgcccgttaggtaagataagaacgggtccgttaaccgtccagcctatgcaacaaggtggaaactcttctatgtattctttccaatcttctcaacatagatttcattcttctcaacagcgccaaaaccaatctctttccttcagaaacaatacctatggaagtggtaacaatcaaaatacattccatccatctccgcaattacaacaacagcctcaaaatatgagatatttgaataataagttaccaataaatgatagatctccaataccgcaaacacagcaccatgtaccagatggccgtcccagcctccatataaataccactaaccgcacaaatccgcttactgcacaaagtggattttctcaatttatgcctcccaatagcacatctaccaacccatattccagctga

SEQ ID NO: 7569 - DNA, 2088 bp, Saccharomyces cerevisiae
atgattgtaagaatgatacgtctttgtaaaggtccaaagttgttgcgaagtcaattcgcatcagcaagtgcactatattcaaccaagtcattgttcaaacctcccatgtaccaaaaagcggaaattaatttgattattccacatagaaagcactttttgttgcggtcgattcgattacaatcagacattgcgcaaggaaagaagtccaccaagcccactttaaagttgtccaatgcaaattcaaaatcctcggggtttaaagacattaaacggctattcgtcttatctaaaccggaatccaagtacattggtcttgccctccttttaatcctcatttcaagttcagttagtatggctgtaccttccgttatcggtaaattattagacttggcttccgaaagtgacggcgaagatgaagagggctcaaaaagcaataagttatatggttttacgaagaagcaatttttcacagcattaggagcagtatttataattggagcagttgctaatgcaagcagaatcatcattttaaaggtcaccggtgagagactggtcgcaagattaagaacgagaacaatgaaagctgcattagatcaagatgccacatttttagatactaatcgtgtcggtgatttgatctcaagattatcatctgatgcatctatagtggccaaatcggtcacacaaaacgtctctgatggaacaagggcaattattcaagggtttgtcggttttggcatgatgagcttcctctcgtggaaattgacttgcgtaatgatgattttagcccctcctttaggtgctatggcactgatatatggtaggaaaatacgaaacctatcaagacagttacaaacctcagtaggtgggttaacaaaagtggcagaagagcaattaaatgctactaggacaattcaagcatatggtggtgaaaaaaacgaggttcgccgctatgcaaaagaggttagaaatgtatttcatattggtctgaaggaagcggttacttccggtttattcttcggaagtactgggctagttggcaacactgcaatgctgtcgttattattggttggaacaagcatgattcaaagtggttcaatgactgtcggtgaattatctagtttcatgatgtatgccgtgtataccggaagttcattatttggtttatcgagcttctattcagaacttatgaaaggtgctggtgcggctgccagggtttttgaattaaatgaccgtaagccattgattcgtccgactattggaaaggatcctgtgtcattagcccaaaaacccatcgttttcaaaaacgtgtcattcacttatcccactcggcccaaacaccagattttcaaggatttgaatattactatcaagcctggtgaacacgtttgcgctgtcggtccatcaggaagcggcaaatcaacaattgcgtctttgttgctcaggtactacgatgtgaactcaggatcgatcgaatttggtgatgaagacatcagaaatttcaacttgaggaagtatcgaagactaataggatacgtgcaacaagaaccactacttttcaatgggactattctggacaatatcctctactgcattccgcctgaaattgcggagcaggatgatcgtattagacgtgctattggaaaagctaattgcacaaaatttttggccaattttccagatggattgcagactatggttggtgctagaggcgcgcaattgtccggtggtcaaaagcaaagaattgcattagctagagcgtttttactagatcctgccgtccttattttagatgaagcaaccagtgcccttgactctcaaagtgaagaaatagttgccaaaaatcttcagagacgtgtggaaagggggttcactactatatcaattgcacataggctttcgacgatcaaacacagtactagggtgattgtgttaggaaaacatggctcagtggttgaaaccggttcattccgagatctaatcgccattcctaatagtgaactaaatgcgctgcttgccgaacagcaggacgaggaaggaaaagggggagtgatagatttggacaatagtgttgcccgggaagtataa

SEQ ID NO: 7570 - DNA, 2088 bp, Artificial Sequence
  Description of Artificial Sequence: Synthetic polynucleotide
atgattgtaagaatgatacgtctttgtaaaggtccaaagttgttgagaagtcaattcgcatctgcaagtgcattatattctaccaagtctttgttcaaacctcccatgtaccaaaaagcggaaattaatttgattattccacatagaaagcactttttgttgagatctattagattacaatctgacattgcgcaaggaaagaagtccaccaagcccactttaaagttgtccaatgcaaattctaaatccagtgggtttaaagacattaaaagattattcgtcttatctaaaccggaatccaagtacattggtcttgccctccttttaatcctcatttccagttctgttagtatggctgtaccttccgttatcggtaaattattagacttggcttccgaaagtgacggcgaagatgaagagggctctaaaagcaataagttatatggttttacgaagaagcaatttttcacagcattaggagcagtatttataattggagcagttgctaatgcaagcagaatcatcattttaaaggtcaccggtgagagattggtcgcaagattaagaacgagaacaatgaaagctgcattagatcaagatgccacatttttagatactaatcgtgtcggtgatttgatctccagattatcttctgatgcatctatagtggccaaatctgtcacacaaaacgtctctgatggaacaagggcaattattcaagggtttgtcggttttggcatgatgagcttcctctcttggaaattgacttgcgtaatgatgattttagcccctcctttaggtgctatggcattaatatatggtaggaaaataagaaacttatctagacagttacaaacctctgtaggtgggttaacaaaagtggcagaagagcaattaaatgctactaggacaattcaagcatatggtggtgaaaaaaacgaggttcgccgctatgcaaaagaggttagaaatgtatttcatattggtttgaaggaagcggttacttccggtttattcttcggaagtactgggttggttggcaacactgcaatgctttctttattattggttggaacaagcatgattcaaagtggttctatgactgtcggtgaattatctagtttcatgatgtatgccgtgtataccggaagttctttatttggtttatccagcttctattctgaacttatgaaaggtgctggtgcggctgccagggtttttgaattaaatgaccgtaagccattgattcgtccgactattggaaaggatcctgtgtctttagcccaaaaacccatcgttttcaaaaacgtgtctttcacttatcccactagacccaaacaccagattttcaaggatttgaatattactatcaagcctggtgaacacgtttgcgctgtcggtccatctggaagcggcaaatctacaattgcgtctttgttgctcaggtactacgatgtgaactctggatctatcgaatttggtgatgaagacatcagaaatttcaacttgaggaagtatagaagattaataggatacgtgcaacaagaaccattacttttcaatgggactattttggacaatatcctctactgcattccgcctgaaattgcggagcaggatgatcgtattagacgtgctattggaaaagctaattgcacaaaatttttggccaattttccagatggattgcagactatggttggtgctagaggcgcgcaattgtccggtggtcaaaagcaaagaattgcattagctagagcgtttttattagatcctgccgtccttattttagatgaagcaaccagtgcccttgactctcaaagtgaagaaatagttgccaaaaatcttcagagacgtgtggaaagggggttcactactatatctattgcacataggctttctacgatcaaacacagtactagggtgattgtgttaggaaaacatggctctgtggttgaaaccggttctttcagagatttgatcgccattcctaatagtgaattgaatgcgttacttgccgaacagcaggacgaggaaggaaaagggggagtgatagatttggacaatagtgttgccagagaagtatga

SEQ ID NO: 7571 - DNA, 3597 bp, Saccharomyces cerevisiae
atgcccatcactcaaatcatatcagcgtctgatagcgaggcggggccaaaaccaagcatttcgttggtacctgataagccatctgagccagaaacttcccctaggcatcatcgcctttcaaggtcactttcgaagttcaagcgctggagaggaagatcaaatagcagtttatcgatggggtcgtctgagcagcaagaactgcaggacagtccaaatgaagcccgtagtgatgatgacgaaaacggttacaataacgataatgcagatgacttggcgaaatccaagtatatgatgaaaagtattgccggtttattaactactgctagtgtgtatgcagggatgaataatgctcaagaaatgaatgtgttgtcgcaagttgattctgaagaatctgattccagtgatagtttccaggaaaacattggtcgaaatgaggtaaaaagcaaaaaggaaaatctcaaaactaaatcgcatccggaagtaccaagattagacaaaagaaagccaactttattcgacttctcaataactagggaaaaactgtcaaaagacaatgtggctaagttgagacagcggttttgtttagacgaacaggaaccatttttgaatgatttccctgcatggctacttaaagatgtgttggttcaaggccatatttttattacaacaaaacatttcctattctttgcatatttacctaagaatcctcggtcggttaaaatgtctggaaaccttaatatcaggacaaaactaattaggtctaccaggtattggtgcgtactaaagaatcatttattttctatgtatacctcatcaactgagctatactttccggttttaaccatagatttgagggaggtccaaaaaattgaaacacaaaaacataccttaaacgggagtgctacgaaaacatttaagctttacacagatgaaagtacattcaaattcaatgcagattcagagttctccgctaaatcgtgggtgaacgctttgaaaaaggagcagttcgcagctcagaattctgaaaacaattcgataagtttaaaaattccgctgcccaacattatagagatagatgatcaacctatagtcaacaaagctttaacattgagattaagagctttggagagctcacagacctatgctatcgatgatttcatgtttgttttcatggatgggtccggtagtcaggtcaaagagagccttggcgaacagttggctatattgcagaaatccggtgttaatacactttattatgatattccagccaagaaatcaaaatcaagttttggaaaagagacaccagctacagttgagcaaaagaataacggcgaggattcaaaatatttgaatgttccaacttcggctgtgccttcttcggaaaatgggaaaaagagtcgattcagatttagagaaagaagcaatagttggtttcgtagagctaaacctcttgaagattctcaagttgaggatgtggaggaaatatataaagatgcggcgaatgatatagactcttctgtgcattccacgattcatattcatgaacaagaagatagtcaagagcaaaccgtagcttggaagccaagtcacctcaaaaattttgccgaaatgtgggctgccaaaccaatacactaccggaacaagtttatcccgtttcaaaaggatgatacctatttgattaaagaaacagaagaggtttctgctaacgagcggttcaggtaccatttcaagtttaataaagagaagtcactaatcagtacttactacacatacctgaatagaaatgttcccgtttatggtaagatttacgtatccaatgatacggtgtgcttcagatcgttattaccagggtctaatacatacatggttttgccattggttgatgtggagacatgctataaagaaaagggatttcgatttggttattttgtattggttatagtaattcacggtcacgaggagctattttttgaatttagcactgaggtcgccagggatgatattgaacgcattcttttaaagctcttagataacatatatgcaagcagtgcagaaggatcgaatatatcgagtgcttctcttggcgatgttcagcataaccctgactcagcgaagttgaagcttttcgaagataaaattaatgccgagggctttgaggtaccgttaatgattgatgagaatccgcactataaaacaagcataaaaccaaacaagagttataagtttggattattgacgattggctcaagaggggatgttcaaccatatattgcacttggaaagggcttgataaaagaaggtcaccaagtggtaataattacacattcggaatttagagactttgttgaaagtcatggaatccagtttgaagagattgctggtaacccagtggagttgatgtccttgatggtggaaaatgaatcaatgaatgttaaaatgctgagagaagcttcgagcaaatttaggggatggatcgatgctcttttacagacatcttgggaggtttgtaacagaagaaaatttgatattctgattgaatcaccctcagctatggttggtattcatattactgaagcattgcaaattccttattttcgagcatttaccatgccatggacaagaacaagagcatatccacatgcatttattgtaccagatcaaaaaaggggcggtaactataactacctgacacatgtccttttcgaaaacgttttctggaagggaattagtgggcaagtaaacaagtggagagttgaaactctaggtttagggaaaacaaatctttttcttttacagcagaataatgttcctttcttatacaatgtttctcctacaatttttccgccatcaattgattttagcgagtgggtgagagttacaggatattggtttcttgatgataagagtactttcaaaccgccagcagaattacaagaatttatttctgaggcaagatcaaaaggaaaaaaattggtttatatcgggtttggttcgattgtagtctctaatgccaaagaaatgacggaagctcttgtcgaagcagttatggaagcagatgtatactgcattttaaataagggatggtcagaaaggttgggcgataaggcggcaaagaagacagaggtagatcttccaagaaacattttaaatatcggaaacgttccccatgattggttgttcccacaagtcgatgctgccgttcaccatggtggttctggaactactggagcttcattacgtgctggtttacctactgttataaaacctttctttggtgatcagttcttttatgcaggtagagtagaagacattggagttggtattgctttaaagaaacttaacgctcaaacattagcagatgctttaaaagtagctacgacgaacaaaataatgaaggatagagctggattaataaagaagaaaatttccaaagaagatgggattaaaactgcaataagtgcaatttacaacgaacttgagtatgcaagaagcgttactttatcaagagtgaaaactccgcgcaagaaagaggaaaatgtagatgcaaccaaactgacacctgctgaaacaacggatgaagggtggacgatgatttaa

SEQ ID NO: 7572 - DNA, 3597 bp, Artificial Sequence
  Description of Artificial Sequence: Synthetic polynucleotide
atgcccatcactcaaatcatatctgcgtctgatagcgaggcggggccaaaaccaagcatttctttggtacctgataagccatctgagccagaaacttcccctaggcatcatcgcctttctaggagtctttccaagttcaagcgctggagaggaagatctaatagcagtttatctatggggagttctgagcagcaagaattacaggacagtccaaatgaagcccgtagtgatgatgacgaaaacggttacaataacgataatgcagatgacttggcgaaatccaagtatatgatgaaaagtattgccggtttattaactactgctagtgtgtatgcagggatgaataatgctcaagaaatgaatgtgttgtctcaagttgattctgaagaatctgattccagtgatagtttccaggaaaacattggtagaaatgaggtaaaaagcaaaaaggaaaatctcaaaactaaatctcatccggaagtaccaagattagacaaaagaaagccaactttattcgacttctctataactagggaaaaattatccaaagacaatgtggctaagttgagacagagattttgtttagacgaacaggaaccatttttgaatgatttccctgcatggttacttaaagatgtgttggttcaaggccatatttttattacaacaaaacatttccttttctttgcatatttacctaagaatcctcgttctgttaaaatgtctggaaaccttaatatcaggacaaaattgattaggtctaccaggtattggtgcgtattgaagaatcatttattttctatgtatacctcttctactgagttatactttccggttttaaccatagatttgagggaggtccaaaaaattgaaacacaaaaacataccttaaacgggagtgctacgaaaacatttaagctttacacagatgaaagtacattcaaattcaatgcagattctgagttctccgctaaaagttgggtgaacgctttgaaaaaggagcagttcgcagctcagaattctgaaaacaattctataagtttaaaaattccgttgcccaacattatagagatagatgatcaacctatagtcaacaaagctttaacattgagattaagagctttggagagctctcagacctatgctatcgatgatttcatgtttgttttcatggatgggtccggtagtcaggtcaaagagagccttggcgaacagttggctatattgcagaaatccggtgttaatacactttattatgatattccagccaagaaatctaaatctagttttggaaaagagacaccagctacagttgagcaaaagaataacggcgaggattctaaatatttgaatgttccaactagtgctgtgccttcttctgaaaatgggaaaaagagtcgtttcagatttagagaaagaagcaatagttggtttcgtagagctaaacctcttgaagattctcaagttgaggatgtggaggaaatatataaagatgcggcgaatgatatagactcttctgtgcattccacgattcatattcatgaacaagaagatagtcaagagcaaaccgtagcttggaagccaagtcacctcaaaaattttgccgaaatgtgggctgccaaaccaatacactacagaaacaagtttatcccgtttcaaaaggatgatacctatttgattaaagaaacagaagaggtttctgctaacgagagattcaggtaccatttcaagtttaataaagagaagtctttgatcagtacttactacacatacttgaatagaaatgttcccgtttatggtaagatttacgtatccaatgatacggtgtgcttcagatctttattaccagggtctaatacatacatggttttgccattggttgatgtggagacatgctataaagaaaagggatttagatttggttattttgtattggttatagtaattcacggtcacgaggagttattttttgaatttagcactgaggtcgccagggatgatattgaacgcattcttttaaagctcttagataacatatatgcaagcagtgcagaaggaagtaatatatctagtgcttctcttggcgatgttcagcataaccctgactctgcgaagttgaagcttttcgaagataaaattaatgccgagggctttgaggtaccgttaatgattgatgagaatccgcactataaaacaagcataaaaccaaacaagagttataagtttggattattgacgattggctccagaggggatgttcaaccatatattgcacttggaaagggcttgataaaagaaggtcaccaagtggtaataattacacattctgaatttagagactttgttgaaagtcatggaatccagtttgaagagattgctggtaacccagtggagttgatgtccttgatggtggaaaatgaaagtatgaatgttaaaatgttgagagaagcttctagcaaatttaggggatggatcgatgctcttttacagacatcttgggaggtttgtaacagaagaaaatttgatattttaattgaaagtccctctgctatggttggtattcatattactgaagcattgcaaattccttattttagagcatttaccatgccatggacaagaacaagagcatatccacatgcatttattgtaccagatcaaaaaaggggcggtaactataactacttgacacatgtccttttcgaaaacgttttctggaagggaattagtgggcaagtaaacaagtggagagttgaaactttaggtttagggaaaacaaatctttttcttttacagcagaataatgttcctttcttatacaatgtttctcctacaatttttccgccatctattgattttagcgagtgggtgagagttacaggatattggtttcttgatgataagagtactttcaaaccgccagcagaattacaagaatttatttctgaggcaagaagtaaaggaaaaaaattggtttatatcgggtttggttccattgtagtctctaatgccaaagaaatgacggaagctcttgtcgaagcagttatggaagcagatgtatactgcattttaaataagggatggtctgaaaggttgggcgataaggcggcaaagaagacagaggtagatcttccaagaaacattttaaatatcggaaacgttccccatgattggttgttcccacaagtcgatgctgccgttcaccatggtggttctggaactactggagcttctttacgtgctggtttacctactgttataaaacctttctttggtgatcagttcttttatgcaggtagagtagaagacattggagttggtattgctttaaagaaacttaacgctcaaacattagcagatgctttaaaagtagctacgacgaacaaaataatgaaggatagagctggattaataaagaagaaaatttccaaagaagatgggattaaaactgcaataagtgcaatttacaacgaacttgagtatgcaagaagcgttactttatctagagtgaaaactccgcgcaagaaagaggaaaatgtagatgcaaccaaattaacacctgctgaaacaacggatgaagggtggacgatgatttga

SEQ ID NO: 7573 - DNA, 1476 bp, Saccharomyces cerevisiae
atgaattctccaacaatgaaatcggaacaacttactccaaaactctcaccaatgtccttttgtttggatgaccaaagaaatgcaggctcttttcaaaatctattgaactcacctacgaagctaaaattagacactggcccgattggtaattccttgttatatccaacatcactctctaaattgagcgagttatcaagaggtggacgttctaaacaaagaaggggctctgacactatgaggtctgtatcgcctattaggtttcagtttttgaacaacactccaaagatgttaaaacccgagtacctatctcaaacaaccagtaatctgccattgctatctgccctattgaagaatagcaagaaaactactagtgaaggccagaattcaaaccctgatccattgaacatagagaaaaacatcattaaacaaagcatcaaggacaaactagagcagctgcgcagttcagaatccgttgcgcaagtacaaaagaaagaacgcaatcccccttcatttgaggccaaagtctgtgcggaagaaccgatattacggaaaaacgccgaagggttgctcccctcatacgttcctgttcctgctactcctttggaagatccagaaaatcatggggtgcgaaaggtcgaggacaaaggacttagagtcgtctccggcggctccactcagtgtctaagcaccgaagtgaacgaattgcctaaggatctgaatctagacaatttacctacggataataacgggttcgttcaatatggtctcaaaggcaataacaacaacaacagatatagctttatctcgtctacgtcgacggactatgagcccgaatggtgtgacggacaacaacatatttcaatgcaaatggcctctatggccaatgcagaggaggcaaatagtcgtgaaaaatcgaatttagacataaagatcaagcagctagaacttgaaattacagaattaaagttgcagaatgaaaaattagtgcattccatgacgacgaacagatacattgaagaaagatttatgcttgaggttatgaaggatcctagtatacaggctcaaagatcccaaagagatattgagagaaaagtcaagcaactggagaaaaaattcttcaattgtaaaaaagttcttaagaaattgactgaatcctccgcagtagtggccacctccacttcaaaaactgaaggaaattcagcaagaatcccatgccctaagactagactggcacgcgtttctgttttagacctaaagaaaattgaagaacagccagattcttcttcgggaacttcgtccgaggaagatcatctaacaaacgatgatacggatgctaatactagcgaagatttaaatgttgcttttgaagaggagccaacttctgctatttccacaacagcatctgtgcagagtggggaaagtaaaagaggtttccaacttaaccttcctgtccaagtggagaagaaggaaaaatga

SEQ ID NO: 7574 - DNA, 1476 bp, Artificial Sequence
  Description of Artificial Sequence: Synthetic polynucleotide
atgaattctccaacaatgaaaagtgaacaacttactccaaaactctctccaatgtccttttgtttggatgaccaaagaaatgcaggctcttttcaaaatttattgaactctcctacgaagttgaaattagacactggcccgattggtaattccttgttatatccaacatctctctctaaattgagcgagttatctagaggtggacgttctaaacaaagaaggggctctgacactatgaggtctgtatctcctattaggtttcagtttttgaacaacactccaaagatgttaaaacccgagtacttgtctcaaacaaccagtaatttaccattgttatctgccttattgaagaatagcaagaaaactactagtgaaggccagaatagcaaccctgatccattgaacatagagaaaaacatcattaaacaaagcatcaaggacaaattagagcagttgcgcagttctgaatccgttgcgcaagtacaaaagaaagaacgcaatcccccttcttttgaggccaaagtctgtgcggaagaaccgatattaagaaaaaacgccgaagggttgctcccctcttacgttcctgttcctgctactcctttggaagatccagaaaatcatggggtgagaaaggtcgaggacaaaggacttagagtcgtctccggcggctccactcagtgtttgagcaccgaagtgaacgaattgcctaaggatttgaatttggacaatttacctacggataataacgggttcgttcaatatggtctcaaaggcaataacaacaacaacagatatagctttatctcttctacgtccacggactatgagcccgaatggtgtgacggacaacaacatatttccatgcaaatggcctctatggccaatgcagaggaggcaaatagtcgtgaaaaatctaatttagacataaagatcaagcagttagaacttgaaattacagaattaaagttgcagaatgaaaaattagtgcattccatgacgacgaacagatacattgaagaaagatttatgcttgaggttatgaaggatcctagtatacaggctcaaagatcccaaagagatattgagagaaaagtcaagcaattggagaaaaaattcttcaattgtaaaaaagttcttaagaaattgactgaatcctccgcagtagtggccacctccacttctaaaactgaaggaaattctgcaagaatcccatgccctaagactagattagcacgcgtttctgttttagacttgaagaaaattgaagaacagccagattcttcttctggaacttcttccgaggaagatcatttaacaaacgatgatacggatgctaatactagcgaagatttaaatgttgcttttgaagaggagccaacttctgctatttccacaacagcatctgtgcagagtggggaaagtaaaagaggtttccaacttaaccttcctgtccaagtggagaagaaggaaaaatga

SEQ ID NO: 7575 - DNA, 1161 bp, Saccharomyces cerevisiae
atgtcatccacagcagtaccacgacctaaaccttgggagaccagtgcttcgttagaggagccacagcgtaatgctcagtctttaagtgcgatgatgacctcgaatcagcaggattccaggccaactgaagaaagcaataacagtaatagtgcaagtgagtctgctcccgaagttttgccgcggcctgcggcacttaactcctctggtacctacggcgaatcgaatacaataccgggaatatacggtaatagcaattatgggataccctatgataataatccgtatagtatgaactctatatacggaaacagcatagggaggtatggctatggaggatcgtactatggcaacaattatggatcgttttatggaggagggtacggtgcaggagcgggatatggaatgaataatggaagtggactaggtgagtcgacgaaggccacctttcagttaatagaaagtttgataggcgctgttactggatttgcacaaatgctggaatctacttatatggccacacacaactcgtttttcaccatgatatccgtcgcagaacagtttggtaatttgaaggaaatgctaggttcattttttggtatctttgctataatgaagtttcttaaaaaaatactctatcgtgctactaaggggagactaggaataccaccaaagaatttcgcagaatctgaaggaagcaaaaataaactaattgaagattttcaaaagtttaatgatagtggtaccataaattctaatgagaaagccacaagaaggaaaatttcatggaaaccgctactattttttttgatggcagtatttggttttccatatctactaaacaaatttattactaaactacagacctctggaaccatacgagcatcgcaaggaaatggtagcgagcctattgatccttcgaagttagaatttgcaagagcgttatatgattttgttccagaaaacccagagatggaagttgctttaaaaaagggcgacttgatggcaattttgagtaagaaagaccctcttgggagggattctgactggtggaaagtgaggacaaagaacggcaatattggctacattccgtataactatattgagatcataaaaagacggaagaaaattgagcatgttgatgatgaaacgcgtacacactag

SEQ ID NO: 7576 - DNA, 1161 bp, Artificial Sequence
  Description of Artificial Sequence: Synthetic polynucleotide
atgtcttccacagcagtaccaagacctaaaccttgggagaccagtgcttctttagaggagccacagcgtaatgctcagtctttaagtgcgatgatgacctctaatcagcaggattccaggccaactgaagaaagcaataacagtaatagtgcaagtgagtctgctcccgaagttttgccgagacctgcggcacttaactcctctggtacctacggcgaaagtaatacaataccgggaatatacggtaatagcaattatgggataccctatgataataatccgtatagtatgaactctatatacggaaacagcatagggaggtatggctatggaggatcttactatggcaacaattatggaagtttttatggaggagggtacggtgcaggagcgggatatggaatgaataatggaagtggattaggtgagtctacgaaggccacctttcagttaatagaaagtttgataggcgctgttactggatttgcacaaatgttggaatctacttatatggccacacacaactcttttttcaccatgatatccgtcgcagaacagtttggtaatttgaaggaaatgttgggttctttttttggtatctttgctataatgaagtttcttaaaaaaatactctatcgtgctactaaggggagattaggaataccaccaaagaatttcgcagaatctgaaggaagcaaaaataaattgattgaagattttcaaaagtttaatgatagtggtaccataaattctaatgagaaagccacaagaaggaaaatttcttggaaaccgttgttattttttttgatggcagtatttggttttccatatttattaaacaaatttattactaaattacagacctctggaaccataagagcatctcaaggaaatggtagcgagcctattgatccttctaagttagaatttgcaagagcgttatatgattttgttccagaaaacccagagatggaagttgctttaaaaaagggcgacttgatggcaattttgagtaagaaagaccctcttgggagggattctgactggtggaaagtgaggacaaagaacggcaatattggctacattccgtataactatattgagatcataaaaagaagaaagaaaattgagcatgttgatgatgaaacgcgtacacactga

SEQ ID NO: 7577 - DNA, 798 bp, Saccharomyces cerevisiae
atgtcttgggacgacgaagctatcaatggttctatgggtaatgatgacgccgttttgatggactcatgggatgctgaaattggtgatgacgaacctgtcatgcaatcatgggatgcagaagaggaagaaaagaagcctgccccaaagccaaaaaaagaacaaccaaaaaaggttaaaaaagggaaagaatcctccgctgacagagccctattggatattgacacattggatgaaaagacacgtaaagaattaatcaaaaaggctgaaatggagtctgacttaaacaatgctgcagatttgtttgcgggtttaggtgttgccgaagaacatccaagggctcgtgctttacaaaaggaacaagaggaacaagctctaaaaagacccgcctttaccaaggacacacctatcgaaacacatcctttgtttaacgccgaaacaaagagagagtaccaggatttaagaaaggctcttactgctgctattacaccaatgaacaaaaaatctccgctgaactactcctcatcgttagcgattgatttgattagagatgtagcaaaaccaatgtccatcgaatctataagacaaacagttgctactttgaacgttttgatcaaagataaggaaagagaggagaggcaagctcgtctggcccgtgttagaggtggtactgctactgggggtgctggtaagaagaaagtcaaaggtaagaccaatttgggtggcgcatttaagaaagatcaagatttcgacctagatggccccgacgattttgaattcggtgatgacgactttatgtaa

SEQ ID NO: 7578 - DNA, 798 bp, Artificial Sequence
  Description of Artificial Sequence: Synthetic polynucleotide
atgtcttgggacgacgaagctatcaatggttctatgggtaatgatgacgccgttttgatggactcttgggatgctgaaattggtgatgacgaacctgtcatgcaaagttgggatgcagaagaggaagaaaagaagcctgccccaaagccaaaaaaagaacaaccaaaaaaggttaaaaaagggaaagaatcctccgctgacagagccttattggatattgacacattggatgaaaagacacgtaaagaattaatcaaaaaggctgaaatggagtctgacttaaacaatgctgcagatttgtttgcgggtttaggtgttgccgaagaacatccaagggctcgtgctttacaaaaggaacaagaggaacaagctttgaaaagacccgcctttaccaaggacacacctatcgaaacacatcctttgtttaacgccgaaacaaagagagagtaccaggatttaagaaaggctcttactgctgctattacaccaatgaacaaaaaatctccgttgaactactcctcttctttagcgattgatttgattagagatgtagcaaaaccaatgtccatcgaatctataagacaaacagttgctactttgaacgttttgatcaaagataaggaaagagaggagaggcaagctcgtttggcccgtgttagaggtggtactgctactgggggtgctggtaagaagaaagtcaaaggtaagaccaatttgggtggcgcatttaagaaagatcaagatttcgacttggatggccccgacgattttgaattcggtgatgacgactttatgtga

SEQ ID NO: 7579 - DNA, 528 bp, Saccharomyces cerevisiae
atggtccttttacacaaaagcacacatatatttcctaccgattttgcctctgtttcacgcgccttttttaatagataccccaatccatactccccccatgtactatccatagacacaatatcaaggaacgttgatcaagaaggaaatttgcgcacaacgaggctgttgaaaaagtccggaaagctgcccacatgggtcaaaccctttttaagaggtataacagaaacatggataatcgaagtttccgtagtgaaccccgctaactccacaatgaaaacttacactaggaatctggatcacactggaatcatgaaggttgaagaatatactacctatcaatttgacagtgctacaagtagtacgatagcagacagccgggtgaagttttcaagtggcttcaatatgggtatcaaatctaaggtagaggattggtcgcgcactaaatttgacgaaaacgttaagaaaagcagaatgggcatggcatttgttatccaaaaactcgaagaggcgagaaatcctcagttttga

SEQ ID NO: 7580 - DNA, 528 bp, Artificial Sequence
  Description of Artificial Sequence: Synthetic polynucleotide
atggtccttttacacaaaagcacacatatatttcctaccgattttgcctctgtttctcgcgccttttttaatagataccccaatccatactccccccatgtattgtccatagacacaatatctaggaacgttgatcaagaaggaaatttgcgcacaacgaggttattgaaaaagtccggaaagttgcccacatgggtcaaaccctttttaagaggtataacagaaacatggataatcgaagtttccgtagtgaaccccgctaactccacaatgaaaacttacactaggaatttggatcacactggaatcatgaaggttgaagaatatactacctatcaatttgacagtgctacaagtagtacgatagcagacagcagagtgaagttttctagtggcttcaatatgggtatcaaatctaaggtagaggattggagccgcactaaatttgacgaaaacgttaagaaaagcagaatgggcatggcatttgttatccaaaaactcgaagaggcgagaaatcctcagttttga

SEQ ID NO: 7581 - DNA, 765 bp, Saccharomyces cerevisiae
atgaaggcctgttccatattatttaccaccttaattactctagccgctgctcaaaaagactctggttccttagatggccagaactctgaagatagctcacaaaaggaaagctcaaactctcaagagatcacacctaccacgacaaaggaagcccaagaaagcgcatcaactgtagtttctaccggaaaaagcttagtacaaactagcaacgtcgtcagcaacacctatgctgtggctccaagtaccaccgtagtgacgacggatgcacaaggcaaaaccacgacacagtacctatggtgggtggccgaaagcaactctgccgtaagcacaacttcaactgcctctgtgcagcccaccggagagacgtcaagcggaatcaccaactccgcatcctcctcaacgacatcaacatcaacggacgggccagttactatagtaactaccacgaattcgttaggtgagacttacacatctactgtttggtggctaccgtcctcagccacaactgacaacacggcttcatcaagtaaatcatcttcgggatcctcatcaaaaccggaatcaagcaccaaggtagtaagcactatcaaatcaacttataccactacgtcaggttctacagtagagacactgaccactacatacaagtctacagtcaacggtaaggtagcgtccgtaatgtccaattctaccaatggcgcctttgccggcactcacatagcttatggtgcgggtgcattcgccgttggtgcccttttgttatag

SEQ ID NO: 7582 - DNA, 765 bp, Artificial Sequence
  Description of Artificial Sequence: Synthetic polynucleotide
atgaaggcctgttccatattatttaccaccttaattactttggccgctgctcaaaaagactctggttccttagatggccagaactctgaagatagctctcaaaaggaaagcagtaactctcaagagatcacacctaccacgacaaaggaagcccaagaaagcgcatctactgtagtttctaccggaaaaagcttagtacaaactagcaacgtcgtcagcaacacctatgctgtggctccaagtaccaccgtagtgacgacggatgcacaaggcaaaaccacgacacagtacttatggtgggtggccgaaagcaactctgccgtaagcacaacttctactgcctctgtgcagcccaccggagagacgtctagcggaatcaccaactccgcatcctcctctacgacatctacaagtacggacgggccagttactatagtaactaccacgaattctttaggtgagacttacacatctactgtttggtggcttccgtcctctgccacaactgacaacacggcttcttccagtaaatcttcttctggatcctcttctaaaccggaaagtagcaccaaggtagtaagcactatcaaatctacttataccactacgtctggttctacagtagagacattaaccactacatacaagtctacagtcaacggtaaggtagcgtccgtaatgtccaattctaccaatggcgcctttgccggcactcacatagcttatggtgcgggtgcattcgccgttggtgcccttttgttatga

SEQ ID NO: 7583 - DNA, 1368 bp, Saccharomyces cerevisiae
atgtcagaagaggataaagcgaaaaaattagagaatttattgaagttattacagttgaataatgacgatacttcaaaattcactcaagaacagaaaaaagctatgaaagaccacaaattctggagaacgcaaccggtcaaagatttcgatgaaaaggtggtggaagaaggccccattgataagccaaagacaccggaagatatatctgacaagccactacctttattgtctagcttcgaatggtgtagtattgatgtggacaacaaaaaacagcttgaagatgttttcgttctactaaatgaaaactacgtggaagaccgcgatgcaggcttcagatttaactataccaaagaattcttcaattgggctttaaagagtccaggttggaagaaggattggcatattggtgttcgcgttaaagaaacacagaaattagttgcctttatctcagccataccagtaacacttggtgttagaggtaaacaagtgcctagtgtagaaatcaatttcttgtgcgttcacaaacagctaagatcgaagagattaacacctgttctaattaaagaaattacgagacgagtgaacaaatgtgacatctggcatgcattgtacacggcaggtattgttttgccagcacctgtgagtacgtgtcgttatactcatcgtcccttgaattggaagaaactttatgaagtagatttcacagggttaccagatgggcacacagaggaggatatgattgctgagaatgcgttaccggccaaaacaaagacagcgggattgagaaaattaaagaaggaagatattgaccaagtttttgagttgttcaaaagatatcaatccaggttcgaactaattcaaattttcacaaaagaagaattcgaacataatttcattggtgaagaatcgttaccattggataaacaagtaattttctcatatgtagtcgaacagcccgatggaaaaattacagacttcttctcattttactcattgccattcacaatcctaaataacacaaaatataaggacctaggcatcgggtacttgtattattatgccaccgatgcagatttccaattcaaagacaggtttgatccaaaagctactaaggctttgaaaacaagattgtgtgaattgatttatgacgcttgtattttggccaaaaacgctaatatggatgtttttaacgcgttgacttcgcaagataatacattgttcttggatgatttgaagttcgggcccggtgacgggttcttgaacttctatttatttaattatagagcaaagccgattaccggtggcttgaatcccgacaatagtaacgacattaaaaggcgtagcaatgtcggtgttgttatgttgtag

SEQ ID NO: 7584 - DNA, 1368 bp, Artificial Sequence
  Description of Artificial Sequence: Synthetic polynucleotide
atgtctgaagaggataaagcgaaaaaattagagaatttattgaagttattacagttgaataatgacgatacttctaaattcactcaagaacagaaaaaagctatgaaagaccacaaattctggagaacgcaaccggtcaaagatttcgatgaaaaggtggtggaagaaggccccattgataagccaaagacaccggaagatatatctgacaagccattgcctttattgtctagcttcgaatggtgtagtattgatgtggacaacaaaaaacagcttgaagatgttttcgttttgttgaatgaaaactacgtggaagaccgcgatgcaggcttcagatttaactataccaaagaattcttcaattgggctttaaagagtccaggttggaagaaggattggcatattggtgttcgcgttaaagaaacacagaaattagttgcctttatcagtgccataccagtaacacttggtgttagaggtaaacaagtgcctagtgtagaaatcaatttcttgtgcgttcacaaacagttaagatccaagagattaacacctgttttgattaaagaaattacgagaagagtgaacaaatgtgacatctggcatgcattgtacacggcaggtattgttttgccagcacctgtgagtacgtgtcgttatactcatcgtcccttgaattggaagaaactttatgaagtagatttcacagggttaccagatgggcacacagaggaggatatgattgctgagaatgcgttaccggccaaaacaaagacagcgggattgagaaaattaaagaaggaagatattgaccaagtttttgagttgttcaaaagatatcaatccaggttcgaattgattcaaattttcacaaaagaagaattcgaacataatttcattggtgaagaatctttaccattggataaacaagtaattttctcttatgtagtcgaacagcccgatggaaaaattacagacttcttctccttttactctttgccattcacaatcttgaataacacaaaatataaggacttgggcatcgggtacttgtattattatgccaccgatgcagatttccaattcaaagacaggtttgatccaaaagctactaaggctttgaaaacaagattgtgtgaattgatttatgacgcttgtattttggccaaaaacgctaatatggatgtttttaacgcgttgacttctcaagataatacattgttcttggatgatttgaagttcgggcccggtgacgggttcttgaacttctatttatttaattatagagcaaagccgattaccggtggcttgaatcccgacaatagtaacgacattaaaaggcgtagcaatgtcggtgttgttatgttgtga

SEQ ID NO: 7585 - DNA, 1731 bp, Saccharomyces cerevisiae
atgatttctgctactaattgggttccaagagggttttcctcggaatttcctgaaaagtatgttctggatgatgaggaagtggaaagaattaaccaattagcacagttgaatttggatgatgctaaagctactttggaagaagcagaaggcgaatcaggtgttgaagatgacgccgcaacaggtagttctaataagttgaaggatcagttggatatagatgatgatttgaaagaatataacctggaagaatatgacgatgaggaaattgcagataatgagggtggtaaagacgtttccatgttcccgggtttaagtaatgatagcgatgttaaattccatgagggtgaaaaaggtgaagatccatatatttcattgcctaatcaagaggatagtcaagaggagaagcaggagttacaagtttacccatccgataatttagttcttgctgcgagaacagaagatgacgtttcgtatttggatatctacgtttacgatgacggtgctgggttccacagtagcgatattcccgttgaagaaggtgatgaagctgacccagatgttgctcgtggattggttcgtgaccctgcactttacgttcaccatgatttaatgttgcctgcttttccactatgtgttgagtggcttgactacaaggttggatccaattccgaagaagcagccaattatgctgccattggtacgtttgatccacaaattgaaatttggaacttggactgtgttgacaaggcctttcccgatatgattctgggtgaacctcttgataattcaatggtgtctttgaaaagcaaaaagaagaagaagaagtctaagactggacacattactactcatcataccgatgctgttttatccatggcacacaacaaatatttccgttccgttttagcatccacctctgcagatcataccgtaaaactatgggatttgaactcaggtaacgcagcccgctccttagcttccattcattcaaacaaaaatgtttcatcatctgaatggcacatgttgaatggttccattcttttgaccggtggttatgattctcgagtagctttaacagatgttagaatttctgacgaaagtcaaatgagtaaatactggtctgccatggcaggtgaggaaatagaaactgttacatttgccagtgaaaatataatattatgtggtactgattctggtaatgtgtattctttcgatattagaaacaatgaaaaccgtaaaccagtttggacattgaaggcacacgatgctggtatctccacattatgttcaaacaaattcatccctggtatgatgagtacaggggccatgggtgaaaagactgtcaaattatggaaattccccttggatgatgctacgaacactaagggcccaagcatggttctgtctcgtgatttcgatgtcggaaatgtattgacatcgtcattcgctccagacatcgaggtagcgggtaccatggtcattggtggtgtcaataaagttttgaaactatgggacgtttttaccaatagatctgtacgtaagagctttaaaagtgaactagagaatgttcaagcaagagcaaaagaagaagcccaaaaaataggaaaaagttcaagaatcgccagaaaatacaccagtaacgataacccagatactgttataaccattgatgatcaaggtgaagatgaagaagaaagagaaggtggagatgagcatgatgacatggcataa

SEQ ID NO: 7586 - DNA, 1731 bp, Artificial Sequence
  Description of Artificial Sequence: Synthetic polynucleotide
atgatttctgctactaattgggttccaagagggttttccagtgaatttcctgaaaagtatgttttggatgatgaggaagtggaaagaattaaccaattagcacagttgaatttggatgatgctaaagctactttggaagaagcagaaggcgaaagtggtgttgaagatgacgccgcaacaggtagttctaataagttgaaggatcagttggatatagatgatgatttgaaagaatataacttggaagaatatgacgatgaggaaattgcagataatgagggtggtaaagacgtttccatgttcccgggtttaagtaatgatagcgatgttaaattccatgagggtgaaaaaggtgaagatccatatatttctttgcctaatcaagaggatagtcaagaggagaagcaggagttacaagtttacccatccgataatttagttcttgctgcgagaacagaagatgacgtttcttatttggatatctacgtttacgatgacggtgctgggttccacagtagcgatattcccgttgaagaaggtgatgaagctgacccagatgttgctcgtggattggttcgtgaccctgcactttacgttcaccatgatttaatgttgcctgcttttccattatgtgttgagtggcttgactacaaggttggatccaattccgaagaagcagccaattatgctgccattggtacgtttgatccacaaattgaaatttggaacttggactgtgttgacaaggcctttcccgatatgattttgggtgaacctcttgataattctatggtgtctttgaaaagcaaaaagaagaagaagaagtctaagactggacacattactactcatcataccgatgctgttttatccatggcacacaacaaatatttccgttccgttttagcatccacctctgcagatcataccgtaaaattatgggatttgaacagtggtaacgcagcccgctccttagcttccattcattccaacaaaaatgtttcttcttctgaatggcacatgttgaatggttccattcttttgaccggtggttatgattctagagtagctttaacagatgttagaatttctgacgaaagtcaaatgagtaaatactggtctgccatggcaggtgaggaaatagaaactgttacatttgccagtgaaaatataatattatgtggtactgattctggtaatgtgtattctttcgatattagaaacaatgaaaaccgtaaaccagtttggacattgaaggcacacgatgctggtatctccacattatgttctaacaaattcatccctggtatgatgagtacaggggccatgggtgaaaagactgtcaaattatggaaattccccttggatgatgctacgaacactaagggcccaagcatggttttatctcgtgatttcgatgtcggaaatgtattgacatcttctttcgctccagacatcgaggtagcgggtaccatggtcattggtggtgtcaataaagttttgaaattatgggacgtttttaccaatagatctgtacgtaagagctttaaaagtgaattagagaatgttcaagcaagagcaaaagaagaagcccaaaaaataggaaaaagtagtagaatcgccagaaaatacaccagtaacgataacccagatactgttataaccattgatgatcaaggtgaagatgaagaagaaagagaaggtggagatgagcatgatgacatggcatga

SEQ ID NO: 7587 - DNA, 1515 bp, Saccharomyces cerevisiae
atggctcctattgaatacctactgtttgaagaacctactggttacgcagttttcaaggttaagttgcaacaagatgacattggttcaagattaaaagaagttcaagagcaaatcaatgattttggtgcttttacaaagttaatcgaacttgtatctttcgcgccattcaaaggtgctgctgaagcccttgaaaatgctaacgacatatcagaaggtttagtctctgagagtttgaaagctatcttggatttaaacttaccaaaggcttcctcgaaaaagaagaacattactttggctatttccgataaaaacttaggtccttctattaaggaagaatttccatatgttgattgtatttcaaatgaacttgctcaggatttgattcgtggtgtcagattacatggcgaaaaattattcaaaggtctacaatctggtgacttagaaagagcccaattaggtttaggtcacgcttactccagagctaaagtgaagttctctgttcaaaagaacgacaatcacatcattcaagctattgctttattagatcaattagataaagatatcaacacttttgctatgagagttaaagagtggtatggctggcatttccccgaactggctaaattggtaccagacaactacacttttgccaagttggttctttttatcaaggacaaagcttcattaaacgatgactccttacatgatttggctgctcttttgaatgaggattcgggaattgcacaaagagtcattgacaatgcccgtatctccatgggacaagatatatcagaaaccgatatggaaaatgtttgtgttttcgctcagagagtcgcttccttagctgattacagaagacaattatacgattacttatgcgaaaaaatgcacactgttgcaccaaacttatcagaattgattggtgaagtgattggtgctagattaatttctcacgcaggttccctaactaatttatctaagcaagcagcttcaacggttcaaattcttggtgctgaaaaggctttgttcagagctttaaaaactaaaggtaacactccaaaatacggtttgatttaccacagtggttttatttctaaggcctctgccaagaacaagggtcgtatttctagatacttggctaacaaatgttctatggcctctagaattgacaattactctgaggaaccatctaatgtttttggttccgtactaaagaaacaagttgagcaaagattagaattctacaacactggtaagccaactttgaagaatgaattagccattcaagaagccatggaactttataacaaagataaaccagctgcagaagtggaagaaaccaaggaaaaggaatcctcaaagaagagaaaattagaagatgatgatgaagaaaagaaggaaaagaaagagaaaaaatcgaagaaggaaaagaaagaaaagaaggaaaagaaggacaaaaaggaaaagaaagataaaaaggaaaagaaggataaaaagaagaaaagtaaggattaa

SEQ ID NO: 7588 - DNA, 1515 bp, Artificial Sequence
  Description of Artificial Sequence: Synthetic polynucleotide
atggctcctattgaatacttgttatttgaagaacctactggttacgcagttttcaaggttaagttgcaacaagatgacattggttccagattaaaagaagttcaagagcaaatcaatgattttggtgcttttacaaagttaatcgaacttgtatctttcgcgccattcaaaggtgctgctgaagcccttgaaaatgctaacgacatatctgaaggtttagtctctgagagtttgaaagctatcttggatttaaacttaccaaaggcttcctctaaaaagaagaacattactttggctatttccgataaaaacttaggtccttctattaaggaagaatttccatatgttgattgtatttctaatgaacttgctcaggatttgattcgtggtgtcagattacatggcgaaaaattattcaaaggtttacaatctggtgacttagaaagagcccaattaggtttaggtcacgcttactccagagctaaagtgaagttctctgttcaaaagaacgacaatcacatcattcaagctattgctttattagatcaattagataaagatatcaacacttttgctatgagagttaaagagtggtatggctggcatttccccgaattggctaaattggtaccagacaactacacttttgccaagttggttctttttatcaaggacaaagcttctttaaacgatgactccttacatgatttggctgctcttttgaatgaggattctggaattgcacaaagagtcattgacaatgcccgtatctccatgggacaagatatatctgaaaccgatatggaaaatgtttgtgttttcgctcagagagtcgcttccttagctgattacagaagacaattatacgattacttatgcgaaaaaatgcacactgttgcaccaaacttatctgaattgattggtgaagtgattggtgctagattaatttctcacgcaggttccttgactaatttatctaagcaagcagcttccacggttcaaattcttggtgctgaaaaggctttgttcagagctttaaaaactaaaggtaacactccaaaatacggtttgatttaccacagtggttttatttctaaggcctctgccaagaacaagggtcgtatttctagatacttggctaacaaatgttctatggcctctagaattgacaattactctgaggaaccatctaatgtttttggttccgtattgaagaaacaagttgagcaaagattagaattctacaacactggtaagccaactttgaagaatgaattagccattcaagaagccatggaactttataacaaagataaaccagctgcagaagtggaagaaaccaaggaaaaggaatcctccaagaagagaaaattagaagatgatgatgaagaaaagaaggaaaagaaagagaaaaaatccaagaaggaaaagaaagaaaagaaggaaaagaaggacaaaaaggaaaagaaagataaaaaggaaaagaaggataaaaagaagaaaagtaaggattga

SEQ ID NO: 7589 - DNA, 831 bp, Saccharomyces cerevisiae
atgctttttaaacaatggaatgacttaccagaaccaaaacatctgctagatctcccagagatttcaaaaaacctgcaatctttagaagtctgcccggttccaaaagttgagtttcctcaggacttggatgttcctcaatattcgacagccgtcattactactaagataatgaacccattattccccaaaaatctgcttcaattaacctctattggtgaaattaaaactacattgacggtgaaaagtccaagtcttccccaatcttcaggtaaacactcgtggaattacgacgaaaactttccaaacgaggttgatcctgatcaaaaaaatgacaccgccgatgaaacagtatatggtttttctttcccgatttattcatttggaaagacgttattattttctatggaggagaatttcattagtatatcgccgatttttggtaacatgataagtagatctatcatatcacagttagcccagttctcccctgatataatagtaattggcacctctgataaaatcgccagcatgaaggtaatgacggaaaatgaatgtacactacaaccaccagaatttataacgggattcataggaagtgtgctaacacaattgattgtcggtcccagtaagggactgaaatttaaatgtcttgtagcgcctagtgaggggcctaatggatttgagaaactttcgttgtctgacatgggttctttagttgatttgtgcggtcaatggcttggttttgagccttcaagatattctgaagaatgctatcgcttatggaggtgtgatagcgcggcaattggtgcacaatcaggcctatatatatga

SEQ ID NO: 7590 - DNA, 831 bp, Artificial Sequence
  Description of Artificial Sequence: Synthetic polynucleotide
atgctttttaaacaatggaatgacttaccagaaccaaaacatttattagatctcccagagatttccaaaaacttacaatctttagaagtctgcccggttccaaaagttgagtttcctcaggacttggatgttcctcaatattctacagccgtcattactactaagataatgaacccattattccccaaaaatttacttcaattaacctctattggtgaaattaaaactacattgacggtgaaaagtccaagtcttccccaatcttctggtaaacactcttggaattacgacgaaaactttccaaacgaggttgatcctgatcaaaaaaatgacaccgccgatgaaacagtatatggtttttctttcccgatttattcttttggaaagacgttattattttctatggaggagaatttcattagtatatctccgatttttggtaacatgataagtagatctatcatatctcagttagcccagttctcccctgatataatagtaattggcacctctgataaaatcgccagcatgaaggtaatgacggaaaatgaatgtacattacaaccaccagaatttataacgggattcataggaagtgtgttaacacaattgattgtcggtcccagtaagggattgaaatttaaatgtcttgtagcgcctagtgaggggcctaatggatttgagaaactttctttgtctgacatgggttctttagttgatttgtgcggtcaatggcttggttttgagccttccagatattctgaagaatgctatcgcttatggaggtgtgatagcgcggcaattggtgcacaaagtggcttgtatatatga

SEQ ID NO: 7591 - DNA, 345 bp, Saccharomyces cerevisiae
atgtctgaattaggtgccaaatatcaacagttgcaaaatgagttagaagagtttattgtggccagacaaaaattagagacacaattacaagaaaacaagattgtaaatgaagagtttgaccaattagaagaagatacacctgtgtacaaattgacaggcaatgtccttttaccagttgaacaaagtgaggcacgtaccaacgtggacaaaagattagagttcatcgaaacagaaattacaagatgcgaaaagaacataagggacaagcaggaagaactagaaaagatgagaagcgagctaattaaactgaacaatacagcagcttccactggcccaggaaggtaa

SEQ ID NO: 7592 - DNA, 345 bp, Artificial Sequence
  Description of Artificial Sequence: Synthetic polynucleotide
atgtctgaattaggtgccaaatatcaacagttgcaaaatgagttagaagagtttattgtggccagacaaaaattagagacacaattacaagaaaacaagattgtaaatgaagagtttgaccaattagaagaagatacacctgtgtacaaattgacaggcaatgtccttttaccagttgaacaaagtgaggcacgtaccaacgtggacaaaagattagagttcatcgaaacagaaattacaagatgcgaaaagaacataagggacaagcaggaagaattggaaaagatgagaagcgagttgattaaattgaacaatacagcagcttccactggcccaggaaggtga

SEQ ID NO: 7593 - DNA, 783 bp, Saccharomyces cerevisiae
atgctttgtcgcaatactgccagaacgggctgtaaattctttcgtttatatcattcgaaccctatcgaacatgttaaaccaattcatattaaacctttaacttatggaaaagaatcaccccagtataaagtattgtcactagctctacaaaagtttgttcccgagcacggtttctctgaaagatccattgttgaatctttaaatgagctcggctatccttcctccatgatctcttcaataggtgctcccaactcgccctcgtttttccattcttccaccgctgtcatggaactgataaagtttcaattggtagataaaaggtatcgtttaactgaaggaatcaaccctgacgtaactccacaatacaaactaccctcattagaacatttgctgttaaaaagattggagatggacaagccaatcggtgggcatttgtcggaactaatgtcacaattggctattccaagcgcctttctctttgaaactgcaattcctgaactacacagattgtccgatgatatgatttacttttccaacgaaaaggaccaccatgattctgcatggtatgctaagagattggctgtttcgagcacctacattggttcaaagttatttatggctcaggataaatcccacaattacaaagaaacgtttacttttgcaaaggataaattacatagggtcatgcgtttgggtgagtactataacaatactgaagagtttgcctggtatacgttaatgtctacggtaaatttaatcaaatctcaattagttaggggttaa

SEQ ID NO: 7594 - DNA, 783 bp, Artificial Sequence
  Description of Artificial Sequence: Synthetic polynucleotide
atgctttgtcgcaatactgccagaacgggctgtaaattctttcgtttatatcattccaaccctatcgaacatgttaaaccaattcatattaaacctttaacttatggaaaagaaagtccccagtataaagtattgtccttggctttacaaaagtttgttcccgagcacggtttctctgaaagatccattgttgaatctttaaatgagctcggctatccttcctccatgatctcttctataggtgctcccaactctcccagttttttccattcttccaccgctgtcatggaattgataaagtttcaattggtagataaaaggtatcgtttaactgaaggaatcaaccctgacgtaactccacaatacaaattgccctctttagaacatttgttattaaaaagattggagatggacaagccaatcggtgggcatttgagtgaattgatgtctcaattggctattccaagcgcctttctctttgaaactgcaattcctgaattgcacagattgtccgatgatatgatttacttttccaacgaaaaggaccaccatgattctgcatggtatgctaagagattggctgtttccagcacctacattggttccaagttatttatggctcaggataaatcccacaattacaaagaaacgtttacttttgcaaaggataaattacatagggtcatgcgtttgggtgagtactataacaatactgaagagtttgcctggtatacgttaatgtctacggtaaatttaatcaaatctcaattagttaggggttga

SEQ ID NO: 7595 - DNA, 1311 bp, Saccharomyces cerevisiae
atgaccgtgctatatgctccttcgggtgctactcagctatatttccatctgctaaggaagtcgccacacaacaggctagttgtctctcaccaaacacgtcgtcacctcatggggttcgttaggaacgcccttggattggatcctcctccctctccagaagatcctactccggagaacagattccatccatgggatcagtctccctcagtggacttgcgtgaaagggccgccaagattagaacgctagcacactgccctgttaccggcaaagatattaactacacttgtcctctgtcaggaattccgactcatcactcacgagaggcttgggagatggataaagcatatcacgattctaaaaaatatgaaatcctgaaaaaagttaatatttatgagcatgacttaagaagcggtagacccttcccggagtttgattttccccaacagcaaggctacgacaaggccgttaacctaacaaactgggatttgtttttctacacaagatcattctattccatggatacagagttccaattagccgcagtcacaaagatgctaagctatccaattacgattgggtctttgctgcacaaattttccccgtattcattgaacccaaaggggcctatcaccttagaaggtctaaaatctctggctgctctcaggtatactttatatccgttggagaatagatctttaccaaccacaactaagaaccgtgctatgagaattttcatcctaggtgcacgtgctgaagctcaattgccgggccacgtttggaaacagctccagtttcttttcccagagcagagtttcgaaatacatttcattggacccgaatgcctgtataaaagggataaacaggagtacgtcaagtctactacgccggtagtacaaagagtagacgagactctgaaattcatttatcgtacaaactttttcgaagtattccatgaggctcaagattttttcccatacgatccatacatggatgtcttttttactttccatccaggctacgcatctccagaatctcacggttcatggatgggtgaaactatgaaggcattactggaaacaaaatgtgctatcttcacaacgggtttcaataagaaagacctaacggacgacataaatcttgtcaaatccaaatacggtaaggaaatggatgtcttaatggagcccgtcagaaacgtatttggaagtacgaagtgggaattaaatgacatgaatcctcaagaagtttatcaatttaacatgtatattgccgggttcagaggtaaaaggtaccatacaatcaagagacaatga

SEQ ID NO: 7596 - DNA, 1311 bp, Artificial Sequence
  Description of Artificial Sequence: Synthetic polynucleotide
atgaccgtgctttatgctccttctggtgctactcagttatatttccatttattgaggaagtctccacacaacaggttggttgtctctcaccaaacacgtcgtcacctcatggggttcgttaggaacgcccttggattggatcctcctccctctccagaagatcctactccggagaacagattccatccatgggatcagtctccctctgtggacttgcgtgaaagggccgccaagattagaacgttggcacactgccctgttaccggcaaagatattaactacacttgtcctttatctggaattccgactcatcactctagagaggcttgggagatggataaagcatatcacgattctaaaaaatatgaaatcttgaaaaaagttaatatttatgagcatgacttaagaagcggtagacccttcccggagtttgattttccccaacagcaaggctacgacaaggccgttaacttaacaaactgggatttgtttttctacacaagatctttctattccatggatacagagttccaattagccgcagtcacaaagatgttaagctatccaattacgattgggtctttgttgcacaaattttccccgtattctttgaacccaaaggggcctatcaccttagaaggtttgaaatctttggctgctctcaggtatactttatatccgttggagaatagatctttaccaaccacaactaagaaccgtgctatgagaattttcatcttgggtgcacgtgctgaagctcaattgccgggccacgtttggaaacagctccagtttcttttcccagagcagagtttcgaaatacatttcattggacccgaatgcttatataaaagggataaacaggagtacgtcaagtctactacgccggtagtacaaagagtagacgagactttgaaattcatttatcgtacaaactttttcgaagtattccatgaggctcaagattttttcccatacgatccatacatggatgtcttttttactttccatccaggctacgcatctccagaatctcacggttcttggatgggtgaaactatgaaggcattattggaaacaaaatgtgctatcttcacaacgggtttcaataagaaagacttaacggacgacataaatcttgtcaaatccaaatacggtaaggaaatggatgtcttaatggagcccgtcagaaacgtatttggaagtacgaagtgggaattaaatgacatgaatcctcaagaagtttatcaatttaacatgtatattgccgggttcagaggtaaaaggtaccatacaatcaagagacaatga

SEQ ID NO: 7597 - DNA, 336 bp, Saccharomyces cerevisiae
atgctaggaagggcattgcgacctgggtggctgggcattactaggacggtggttaagaaaccaagttgcgggtcctactttaacagaacctttcaaacagcaattaacactacaatgcctcccatgcaagagggcatgctgagtacaatgatgatgatgacggctacggcaacaaggatcactggcacagtcagtgagccattaaacggttcaaatatagtgatgcaactcgattcagtgatgagaaagaggaaaaaaaagatgaagaaacacaaactgcggaaaagaagaaagagggagaaggcagaaagaagaaagctatctcagggtagataa

SEQ ID NO: 7598 - DNA, 336 bp, Artificial Sequence
  Description of Artificial Sequence: Synthetic polynucleotide
atgcttggaagggcattgagacctgggtggttaggcattactaggacggtggttaagaaaccaagttgcgggtcctactttaacagaacctttcaaacagcaattaacactacaatgcctcccatgcaagagggcatgttaagtacaatgatgatgatgacggctacggcaacaaggatcactggcacagtcagtgagccattaaacggtagtaatatagtgatgcaactcgattctgtgatgagaaagaggaaaaaaaagatgaagaaacacaaattaagaaaaagaagaaagagggagaaggcagaaagaagaaagttatctcagggtagatga

SEQ ID NO: 7599 - DNA, 954 bp, Saccharomyces cerevisiae
atggaggacagtagcaatacaatcataccctcacccactgacgtgggggcgctagcaaacagaatcaactttcaaaccagagatgcccacaataaaatcaataccttcatgggcataaagatggccatcgccatgagacatggctttatatacagacagggtattctggcgtactattatgtgttcgatgccatcgagcaagagatagatcgcctactgaatgaccccgtaacggaggaggagctgcaaacttcgaccattctgaagcagttttggctcgaagattttagaagatctacgcagatctataaggacctgaagctgctatactcaaacacgtttaaaagcacagaatcattaaacgaattcctggctacgttccagaagccaccgctactacagcagtttatcaataacatccacgaaaacatacacaaggagccatgcaccattctttcttactgtcacgttctgtacttggcgcttttcgccggcggcaagctaatacgatcgaatttgtacagaagactggggctcttccccaacttcgagaagctatcacagaaggaactggtcaaaaagggcacaaacttcttcaccttcagcgatctgggtcccactgaagaaacacgcttgaaatgggaatacaagaagaactatgagctggccaccaggacggaattgaccgaagcacaaaagttgcagatcattagcgtcgcagaaggcatttttgattggaacttcaacatcgttgcagaaattggagagttgaatcgtcgcgagttaatgggcaagttcagcttcaagtgtattacgtacttgtacgaagaatggatgttcaacaaggattctgctactagaagagcactccacacggtcatgctgctggtgctttctattatcgcgatctgggttctttacttcttggtaaagagttttcttagcatagtataa

SEQ ID NO: 7600 - DNA, 954 bp, Artificial Sequence
  Description of Artificial Sequence: Synthetic polynucleotide
atggaggacagtagcaatacaatcataccctctcccactgacgtgggggcgttggcaaacagaatcaactttcaaaccagagatgcccacaataaaatcaataccttcatgggcataaagatggccatcgccatgagacatggctttatatacagacagggtattttggcgtactattatgtgttcgatgccatcgagcaagagatagatcgcttattgaatgaccccgtaacggaggaggagttacaaacttctaccattttgaagcagttttggctcgaagattttagaagatctacgcagatctataaggacttgaagttattgtactctaacacgtttaaaagcacagaatctttaaacgaattcttggctacgttccagaagccaccgttgttacagcagtttatcaataacatccacgaaaacatacacaaggagccatgcaccattctttcttactgtcacgttctttacttggcgcttttcgccggcggcaagttaataaggtctaatttgtacagaagattagggctcttccccaacttcgagaagttatctcagaaggaattggtcaaaaagggcacaaacttcttcaccttcagcgatttaggtcccactgaagaaacacgcttgaaatgggaatacaagaagaactatgagttggccaccaggacggaattgaccgaagcacaaaagttgcagatcattagcgtcgcagaaggcatttttgattggaacttcaacatcgttgcagaaattggagagttgaatcgtcgcgagttaatgggcaagttcagcttcaagtgtattacgtacttgtacgaagaatggatgttcaacaaggattctgctactagaagagcactccacacggtcatgttattggtgctttctattatcgcgatctgggttctttacttcttggtaaagagttttcttagcatagtatga

SEQ ID NO: 7601 - DNA, 1842 bp, Saccharomyces cerevisiae
atgtctaagcagtttgttcgttctgcaaagaacatgatgaagggctactcatccacacaagtgcttgtgagagatgccacggcgaacgactcgaggactccatcgatagacactctcgacgatttggcacagagatcttacgattcggtggacttcttcgagattatggatatgttagacaagaggctgaacgataagggcaaatactggagacacgttgccaaatcgctgaccgttttggactatcttgttcgtttcgggagtgagaactgtgtgctatggtgcagagagaatttttacgtaattaagacattaagggaattcagacacgaaaatgagtccggatttgacgagggacaaattatcagagtaaaggctaaagaactcgtctctttgttgaatgatgaagaaaggctacgcgaagagaggtctatgaatacaagaaacagaagggcgaacagagctgctaggccaaggccaagaagacaaagaacaaggagcaacccacacgattcttctccctcttaccaggacgatttggaaaaggccctagaggagagcagaattactgctcaagaagatgaacaacgtagaagagaactggcccagtacgacgatgaagatcctgacttccaagctgccttacaactaagtaaagaagaagaggagttgaagcaattgcaggaactacagagattacagaagcaacaacagtctctgtctcaatttcaagctcctttacaacaacaacaaccacaacaacaaccagcgtactacgacattttcggtaatccaatctcccaagatgaatacttacagtatcagtaccaacaggaccaggaacaagcaatggctcagcaaagatggctggaccagcagcaagaacaacagcagcttgctgaacaacaatattttcagcagcaacaacaagctgcggccgccgcttctgccttgcaacagcaacaaacagccgctaatatgcaacaacaacaacaacagcccgctgattttcaacaacctttgcctacaggttctaataatccgttttccatggataatcttgaaagacaaaagcaggagcaacagcatgctcaattgcaaagacaacaagaagaagctagacaacaacaagaacaattgaagctacaacaattgcaaagacaacaacaagaggaagctcaattacaccagaagaggcaagaagaagcccaattacaacagcagcaagcccaattgctacaacagcaagcccagttccagcaacaacaacccttgaagcaaacaaggactgggaaccagtctatatcggataaatacagcgacttgaataccttgttagcaactggtacagggatagatacttttggtaacactggagaggcacgtattcctgcacaacatacaaagacaggcacatttataaattctcagggtacaggctacaaacaggttactaatgaacccaagaacaaccctttcttaagcaaccaatacactggtttaccaagcacaaatatcgtgcccacgcaaacagggtacgggtttggtaaccaacctcaaagtcctcctactaattctcctcagcaaaatcctactggtataagctactctcagccacaacagcaacaacagccacagcaacaaccgcaatacatgcaaaatttccaacaacagcaacctcaatacgcccaaaacttccaacaacaaccacaatacactcaaaattatcaacaacaaccacaatacattcaacctcatcaacaacaacagcagcagcagcagcagcaacagcagcaacagggatatactcctgaccaaggtgtaagcttaattgatctttga

SEQ ID NO: 7602 - DNA, 1842 bp, Artificial Sequence
  Description of Artificial Sequence: Synthetic polynucleotide
atgtctaagcagtttgttcgttctgcaaagaacatgatgaagggctactcttccacacaagtgcttgtgagagatgccacggcgaacgacagcaggactccaagtatagacactctcgacgatttggcacagagatcttacgattctgtggacttcttcgagattatggatatgttagacaagaggttaaacgataagggcaaatactggagacacgttgccaaatctttaaccgttttggactatcttgttcgtttcgggagtgagaactgtgtgttgtggtgcagagagaatttttacgtaattaagacattaagggaattcagacacgaaaatgagtccggatttgacgagggacaaattatcagagtaaaggctaaagaactcgtctctttgttgaatgatgaagaaaggttacgcgaagagaggtctatgaatacaagaaacagaagggcgaacagagctgctaggccaaggccaagaagacaaagaacaaggagcaacccacacgattcttctccctcttaccaggacgatttggaaaaggccttagaggagagcagaattactgctcaagaagatgaacaacgtagaagagaattggcccagtacgacgatgaagatcctgacttccaagctgccttacaattgagtaaagaagaagaggagttgaagcaattgcaggaattacagagattacagaagcaacaacagtctttatctcaatttcaagctcctttacaacaacaacaaccacaacaacaaccagcgtactacgacattttcggtaatccaatctcccaagatgaatacttacagtatcagtaccaacaggaccaggaacaagcaatggctcagcaaagatggttagaccagcagcaagaacaacagcagcttgctgaacaacaatattttcagcagcaacaacaagctgcggccgccgcttctgccttgcaacagcaacaaacagccgctaatatgcaacaacaacaacaacagcccgctgattttcaacaacctttgcctacaggttctaataatccgttttccatggataatcttgaaagacaaaagcaggagcaacagcatgctcaattgcaaagacaacaagaagaagctagacaacaacaagaacaattgaagttacaacaattgcaaagacaacaacaagaggaagctcaattacaccagaagaggcaagaagaagcccaattacaacagcagcaagcccaattgttgcaacagcaagcccagttccagcaacaacaacccttgaagcaaacaaggactgggaaccagtctatatctgataaatacagcgacttgaataccttgttagcaactggtacagggatagatacttttggtaacactggagaggcacgtattcctgcacaacatacaaagacaggcacatttataaattctcagggtacaggctacaaacaggttactaatgaacccaagaacaaccctttcttaagcaaccaatacactggtttaccaagcacaaatatcgtgcccacgcaaacagggtacgggtttggtaaccaacctcaaagtcctcctactaattctcctcagcaaaatcctactggtataagctactctcagccacaacagcaacaacagccacagcaacaaccgcaatacatgcaaaatttccaacaacagcaacctcaatacgcccaaaacttccaacaacaaccacaatacactcaaaattatcaacaacaaccacaatacattcaacctcatcaacaacaacagcagcagcagcagcagcaacagcagcaacagggatatactcctgaccaaggtgtaagcttaattgatctttga

SEQ ID NO: 7603 - DNA, 2502 bp, Saccharomyces cerevisiae
atgataacactcttattatacctgtgcgtaatatgtaacgcaatagtgttaataagggctgattcgatagcggacccttggcctgaagcgcgacatctactaaataccatagctaagtccagagacccaatgaaagaagctgctatggaacccaatgcagatgaatttgttggattctatgtaccgatggattattccccacgtaatgaggaaaaaaactaccagagcatttggcaaaacgaaatcacagattctcaacgtcatatttatgaattacttgtacaatcaagtgaacaattcaacaactcagaagcaacatatacacttagccagattcacctttggagtcaatataatttcccgcataatatgactttggcacacaaatacttagaaaaattcaatgatctaacccacttcaccaatcattcggccatcttcgacttagctgtgatgtatgccactgggggatgtgcttctggtaatgatcaaaccgtgatccctcaggattctgctaaagcactgctatattaccaaagggctgcccaactagggaatttaaaggctaagcaagtgctagcttataaatactattctggcttcaatgtcccacgaaattttcataaatctttagtattgtacagggacattgctgaacagctgagaaagtcgtactccagggacgaatgggatattgtcttcccctattgggaaagttacaacgtgagaatatcggattttgagagtggcctattaggtaaaggtttgaattccgttccatcttctacagtaaggaaaagaactacgagaccagatattggttcaccctttattgcgcaagttaacggtgtacagatgaccttgcaaatcgaaccgatgggtaggttcgctttcaacggtaacgatggcaacataaatggcgacgaagatgacgaggatgccagtgaaagacgaatcattcggatatattatgcagctttgaatgattataaaggaacatattcacaaagcagaaattgtgagcgcgccaaaaacttgttggaattaacgtacaaggaatttcagcctcatgtcgacaatttggatcctttgcaagtattttactacgtccgttgcttacaattattggggcacatgtatttcaccggcgaaggctcctcgaagcctaatattcatatggccgaagagatcctgaccacgtcgctagaaataagcagaagggcacagggacctataggtagagcgtgcatagatctgggcttaataaatcaatacatcacaaacaatatttctcaagcaatttcgtattatatgaaagctatgaaaacacaagctaacaatggaatcgtagaattccaattatccaaattggccacttcattccctgaagaaaaaatcggcgacccatttaacttaatggaaactgcctacttgaatggattcattccagccatatatgagtttgcagtaatgatcgaatctggaatgaacagtaagagtagtgtggaaaacactgcttacctgttcaaaacattcgttgacaaaaacgaagctattatggcacctaaactgaggacagcatttgccgcattaatcaacgatcgttcagaagtggctttatgggcttattcccaactagccgagcaaggctacgagactgctcaagtctctgccgcctacttaatgtaccagttgccatatgagtttgaggatcctccaagaaccacagatcagagaaaaactttggcaatttcctactatacaagagcgtttaaacagggaaatatagatgctggtgttgtcgcgggagatatctattttcagatgcagaattacagtaaagctatggctctttatcagggtgcagctttgaagtactctatacaggctatctggaacttagggtacatgcatgagcatgggctaggtgtaaacagagatttccatcttgctaaacgttactacgaccaagtttcagaacacgatcatagattttacttggcttccaaattgagtgttttaaaattacacctaaagtcatggttgacttggatcaccagagaaaaagtaaactactggaaaccttcctcgccacttaaccctaacgaagatactcagcactcgaagacttcatggtacaagcaattgacgaagattctacaaagaatgagacataaggaggatagtgacaaagctgcggaagattctcacaaacacagaactgtagtgcagaatggagctaaccataggggtgacgaccaagaggaggcttccgagattttgggcttccaaatggaggatcttgttacgatgggatgtatcttggggatattcctattaagtatattaatgagtacactggcggcccgtagaggctggaatgtccgtttcaatggagcacaattaaatgcaaatggtaaccggcagcaagagcaacaacaacaacaacaagcacaaggtcccccgggctgggacttcaatgttcagatattcgccatatga

SEQ ID NO: 7604 - DNA, 2502 bp, Artificial Sequence
  Description of Artificial Sequence: Synthetic polynucleotide
atgataacactcttattatacttgtgcgtaatatgtaacgcaatagtgttaataagggctgattctatagcggacccttggcctgaagcgagacatttattgaataccatagctaagtccagagacccaatgaaagaagctgctatggaacccaatgcagatgaatttgttggattctatgtaccgatggattattccccacgtaatgaggaaaaaaactaccagagcatttggcaaaacgaaatcacagattctcaacgtcatatttatgaattacttgtacaaagtagtgaacaattcaacaactctgaagcaacatatacacttagccagattcacctttggagtcaatataatttcccgcataatatgactttggcacacaaatacttagaaaaattcaatgatttgacccacttcaccaatcattctgccatcttcgacttagctgtgatgtatgccactgggggatgtgcttctggtaatgatcaaaccgtgatccctcaggattctgctaaagcattattatattaccaaagggctgcccaattagggaatttaaaggctaagcaagtgttggcttataaatactattctggcttcaatgtcccaagaaattttcataaatctttagtattgtacagggacattgctgaacagttaagaaagtcctactccagggacgaatgggatattgtcttcccctattgggaaagttacaacgtgagaatatctgattttgagagtggcttattaggtaaaggtttgaattccgttccatcttctacagtaaggaaaagaactacgagaccagatattggttctccctttattgcgcaagttaacggtgtacagatgaccttgcaaatcgaaccgatgggtaggttcgctttcaacggtaacgatggcaacataaatggcgacgaagatgacgaggatgccagtgaaagaagaatcattagaatatattatgcagctttgaatgattataaaggaacatattctcaaagcagaaattgtgagcgcgccaaaaacttgttggaattaacgtacaaggaatttcagcctcatgtcgacaatttggatcctttgcaagtattttactacgtccgttgcttacaattattggggcacatgtatttcaccggcgaaggctcctccaagcctaatattcatatggccgaagagatcttgaccacgtctttggaaataagcagaagggcacagggacctataggtagagcgtgcatagatttgggcttaataaatcaatacatcacaaacaatatttctcaagcaatttcttattatatgaaagctatgaaaacacaagctaacaatggaatcgtagaattccaattatccaaattggccacttctttccctgaagaaaaaatcggcgacccatttaacttaatggaaactgcctacttgaatggattcattccagccatatatgagtttgcagtaatgatcgaatctggaatgaacagtaagagtagtgtggaaaacactgcttaccttttcaaaacattcgttgacaaaaacgaagctattatggcacctaaattgaggacagcatttgccgcattaatcaacgatcgttctgaagtggctttatgggcttattcccaattggccgagcaaggctacgagactgctcaagtctctgccgcctacttaatgtaccagttgccatatgagtttgaggatcctccaagaaccacagatcagagaaaaactttggcaatttcctactatacaagagcgtttaaacagggaaatatagatgctggtgttgtcgcgggagatatctattttcagatgcagaattacagtaaagctatggctctttatcagggtgcagctttgaagtactctatacaggctatctggaacttagggtacatgcatgagcatgggttaggtgtaaacagagatttccatcttgctaaacgttactacgaccaagtttctgaacacgatcatagattttacttggcttccaaattgagtgttttaaaattacacttgaagtcttggttgacttggatcaccagagaaaaagtaaactactggaaaccttcctctccacttaaccctaacgaagatactcagcactccaagacttcttggtacaagcaattgacgaagattttacaaagaatgagacataaggaggatagtgacaaagctgcggaagattctcacaaacacagaactgtagtgcagaatggagctaaccataggggtgacgaccaagaggaggcttccgagattttgggcttccaaatggaggatcttgttacgatgggatgtatcttggggatattcttattaagtatattaatgagtacattagcggcccgtagaggctggaatgtccgtttcaatggagcacaattaaatgcaaatggtaacagacagcaagagcaacaacaacaacaacaagcacaaggtcccccgggctgggacttcaatgttcagatattcgccatatga

SEQ ID NO: 7605 - DNA, 894 bp, Saccharomyces cerevisiae
atggtcgtcatagctaatgcgcacaacgaattaatccatgacgctgttctagactattatgggaagcgccttgcaacctgctcttctgacaagacaatcaagatctttgaagtcgaaggagaaacacacaagttaatagacacgttgactggccacgaaggcccagtttggcgtgttgattgggcacatcctaaattcggaaccattttggcatcgtgttcttatgatggtaaagtgttgatttggaaggaagaaaacggtagatggtctcaaattgccgttcatgctgtccactctgcttctgtcaactctgttcaatgggctcctcatgaatatggccccctactgctggttgcttcctctgatggtaaggtctccgtagtagagttcaaagaaaacggtactacttccccaataatcatcgatgctcatgccattggcgttaactctgcttcttgggctccagctaccatcgaagaagatggtgaacacaacggtactaaagaatctcgcaagtttgttactgggggtgctgacaatttggtaaagatttggaagtacaattcagatgcccaaacttatgttctggaaagcaccttagaaggtcacagcgattgggttagagacgtagcatggtcacctactgttcttctacgttcttatttggccagtgtttctcaagatcgcacctgtattatttggactcaagacaatgaacaaggcccatggaaaaaaactttattaaaagaagaaaaattcccagatgttttatggagagccagttggtctttgtcaggtaatgtactagctctttccggtggcgataataaagttactttatggaaggaaaatcttgagggtaaatgggaacccgctggtgaagttcatcagtga

SEQ ID NO: 7606 - DNA, 894 bp, Artificial Sequence
  Description of Artificial Sequence: Synthetic polynucleotide
atggtcgtcatagctaatgcgcacaacgaattaatccatgacgctgttttggactattatgggaagcgccttgcaacctgctcttctgacaagacaatcaagatctttgaagtcgaaggagaaacacacaagttaatagacacgttgactggccacgaaggcccagtttggcgtgttgattgggcacatcctaaattcggaaccattttggcatcttgttcttatgatggtaaagtgttgatttggaaggaagaaaacggtagatggtctcaaattgccgttcatgctgtccactctgcttctgtcaactctgttcaatgggctcctcatgaatatggccccttattattggttgcttcctctgatggtaaggtctccgtagtagagttcaaagaaaacggtactacttccccaataatcatcgatgctcatgccattggcgttaactctgcttcttgggctccagctaccatcgaagaagatggtgaacacaacggtactaaagaatctcgcaagtttgttactgggggtgctgacaatttggtaaagatttggaagtacaattctgatgcccaaacttatgttttggaaagcaccttagaaggtcacagcgattgggttagagacgtagcatggtctcctactgttcttttgcgttcttatttggccagtgtttctcaagatcgcacctgtattatttggactcaagacaatgaacaaggcccatggaaaaaaactttattaaaagaagaaaaattcccagatgttttatggagagccagttggtctttgtctggtaatgtattggctctttccggtggcgataataaagttactttatggaaggaaaatcttgagggtaaatgggaacccgctggtgaagttcatcagtga

SEQ ID NO: 7607 - DNA, 936 bp, Saccharomyces cerevisiae
atgagtgatatcttgaacgtaagtcaacaacgtgaagcaattaccaaggccgctgcgtatatttctgctattttagaaccacatttcaaaaatacaacaaatttcgagcctccgagaactttgattatatgtggttcagggcttggtggaatatctaccaagctgtctagagacaatccacccccggtaacagtcccataccaagacatcccaggattcaagaaaagtacggttccaggtcattccggtacactaatgttcggatctatgaatggttcaccagtagtattaatgaatggtcgtcttcatggatatgaaggcaacacattgtttgagactacttttcctattagagtgcttaaccacatgggtcatgttcgtaatttaattgtcactaatgccgctggtggtataaacgcgaaatatcaagcctgcgatttgatgtgcatttatgatcatttaaatatccctggccttgctggccagcacccattgagaggtcctaacttggatgaagatggacctcgttttttagccttgagtgatgcatatgatctggagttgaggaagcttttatttaagaaatggaaagagctcaagattcaaaggccactgcatgaaggtacttatacttttgtatctggacccactttcgaaacaagagcagaatccaaaatgataaggatgttgggaggagatgctgtcggaatgagtactgttcccgaagtcattgttgcaagacattgcggatggagggttttggccttaagtttgattaccaatacttgcgtggtggatagccctgccagtgcgttggacgaatcacctgtacccttagaaaaaggcaaagcgactcacgctgaagtactggagaatggtaaaatcgcctctaatgacgtgcaaaacttaattgctgccgtaatgggggaattataa

SEQ ID NO: 7608 - DNA, 936 bp, Artificial Sequence
  Description of Artificial Sequence: Synthetic polynucleotide
atgagtgatatcttgaacgtaagtcaacaacgtgaagcaattaccaaggccgctgcgtatatttctgctattttagaaccacatttcaaaaatacaacaaatttcgagcctccgagaactttgattatatgtggttctgggcttggtggaatatctaccaagttatctagagacaatccacccccggtaacagtcccataccaagacatcccaggattcaagaaaagtacggttccaggtcattccggtacattgatgttcggatctatgaatggttctccagtagtattaatgaatggtcgtcttcatggatatgaaggcaacacattgtttgagactacttttcctattagagtgcttaaccacatgggtcatgttcgtaatttaattgtcactaatgccgctggtggtataaacgcgaaatatcaagcctgcgatttgatgtgcatttatgatcatttaaatatccctggccttgctggccagcacccattgagaggtcctaacttggatgaagatggacctcgttttttagccttgagtgatgcatatgatttagagttgaggaagcttttatttaagaaatggaaagagctcaagattcaaaggccattgcatgaaggtacttatacttttgtatctggacccactttcgaaacaagagcagaatccaaaatgataaggatgttgggaggagatgctgtcggaatgagtactgttcccgaagtcattgttgcaagacattgcggatggagggttttggccttaagtttgattaccaatacttgcgtggtggatagccctgccagtgcgttggacgaatctcctgtacccttagaaaaaggcaaagcgactcacgctgaagtattggagaatggtaaaatcgcctctaatgacgtgcaaaacttaattgctgccgtaatgggggaattatga

SEQ ID NO: 7609 - DNA, 1383 bp, Saccharomyces cerevisiae
atgatgcttgaagggtatacggtacaacctccacagtctactttgataggtgacattgaaattcaggacgaaaatgcaaaccaagaagttaagaacgtactttaccaaggagttcaaaagggtataaaaaggctagaaaaaagacaaaggagggttgcattaggtgatgtaacctctcaaaaggcaaacaaaatacacaatgctatacataataaattccatcagacgaagaacaattttgaaatagagaacatacgctcatcggccttggtaaaagaacaacaacgagacgtaaggcatgaagatagcgactattttttaattgatagttctgaaggctcttctactgatgacgaacaagttaatgaagatgctattgatgatttgttaagtcgaagagtaaatgatcagcagattcaagccgatgaagtgtatgaagatttcgatggagaaatgcaagatgtcattgaagaggatgttgatagtcaaattgaaccactatcaccaataaacaacgatgaaattcagactgagctggacagggcgtttgaaaaatattttcggtcggttcccaatccgctggatgatgatacccatgatgttgtgatggttgtggagtacgcttccgacatattctattacttgagagaacttgaagtgaaatataggcctaatccctactatatgcaaaatcaagtagagcttacatggccgttcagacgaactatgatagattggctagttcaactgcattttagatttcaacttttaccagaaacgctatacctgacgattaatatagtggatagatttctgtcaaagaagaccgttactttgaacaggtttcaattggttggtgtatcggctttatttattgctgccaagtttgaagagattaactgccccactttggatgatctagtttacatgctggaaaatacatacactagagatgacattattagagcggaacagtatatgatagatactctggaatttgaaataggttggccaggacccatgccatttttaagaaggataagtaaagcagatgactatgacttcgaaccaagaacattagcaaagtacttattggaaactacaatagtagaacccaaactagtggctgcggcaccaagctggttagctgctggcgcgtattttctgagcagaacaattcttggttcaaatgattggtctttaaaacatgtattctactctggctatacatccagccaaataattcctttagcatcactgatattggagaattgcaagaacgcatctcgacgccatcattcaatttggaaaaaatactttgaccaaaagcattaccgctgttctcaaattgtagaagaatggattgtttcgacagaagcctaa

SEQ ID NO: 7610 - DNA, 1383 bp, Artificial Sequence
  Description of Artificial Sequence: Synthetic polynucleotide
atgatgcttgaagggtatacggtacaacctccacagtctactttgataggtgacattgaaattcaggacgaaaatgcaaaccaagaagttaagaacgtactttaccaaggagttcaaaagggtataaaaaggttagaaaaaagacaaaggagggttgcattaggtgatgtaacctctcaaaaggcaaacaaaatacacaatgctatacataataaattccatcagacgaagaacaattttgaaatagagaacatacgcagcagtgccttggtaaaagaacaacaaagagacgtaaggcatgaagatagcgactattttttaattgatagttctgaaggctcttctactgatgacgaacaagttaatgaagatgctattgatgatttgttaagtagaagagtaaatgatcagcagattcaagccgatgaagtgtatgaagatttcgatggagaaatgcaagatgtcattgaagaggatgttgatagtcaaattgaaccattatctccaataaacaacgatgaaattcagactgagttggacagggcgtttgaaaaatattttagatctgttcccaatccgttagatgatgatacccatgatgttgtgatggttgtggagtacgcttccgacatattctattacttgagagaacttgaagtgaaatataggcctaatccctactatatgcaaaatcaagtagagcttacatggccgttcagaagaactatgatagattggttagttcaattgcattttagatttcaacttttaccagaaacgttgtacttgacgattaatatagtggatagatttttatccaagaagaccgttactttgaacaggtttcaattggttggtgtatccgctttatttattgctgccaagtttgaagagattaactgccccactttggatgatttggtttacatgttggaaaatacatacactagagatgacattattagagcggaacagtatatgatagatactttggaatttgaaataggttggccaggacccatgccatttttaagaaggataagtaaagcagatgactatgacttcgaaccaagaacattagcaaagtacttattggaaactacaatagtagaacccaaattagtggctgcggcaccaagctggttagctgctggcgcgtattttttgagcagaacaattcttggtagtaatgattggtctttaaaacatgtattctactctggctatacatccagccaaataattcctttagcatctttgatattggagaattgcaagaacgcatctcgtcgccatcattctatttggaaaaaatactttgaccaaaagcattaccgctgttctcaaattgtagaagaatggattgtttctacagaagcctga

SEQ ID NO: 7611 - DNA, 681 bp, Saccharomyces cerevisiae
atgagtactttagcggaagtttatactattattgaggacgccgaacaggaatgtcgaaaaggagattttacaaatgcaaaagcgaagtatcaagaagccattgaagttttaggtccgcagaacgagaatttgtctcaaaataaattaagttctgacgttacgcaagccattgacctattaaaacaggacattacagccaaaatccaagaattggaacttttgattgaaaagcagtcatcagaagaaaataatattggaatggtcaacaacaatatgcttattggctctgttattttaaacaacaaatctccgataaatggaataagcaatgctaggaattgggataacccagcatatcaggacactttaagtcccataaacgatccacttcttatgtcaattttaaaccgcttacaatttaatttgaataatgatattcaattgaaaacagaaggaggaaaaaattccaaaaactcggaaatgaagattaacttaagactggaacaattcaaaaaggagttggtattatatgagcagaaaaaatttaaagaatatggtatgaaaattgacgaaattacgaaagaaaataaaaaattggctaatgaaattgggcgattaagagaacgctgggacagcttagtagaaagtgcgaagcaaagaagggataagcaaaaaaactag

SEQ ID NO: 7612 - DNA, 681 bp, Artificial Sequence
  Description of Artificial Sequence: Synthetic polynucleotide
atgagtactttagcggaagtttatactattattgaggacgccgaacaggaatgtagaaaaggagattttacaaatgcaaaagcgaagtatcaagaagccattgaagttttaggtccgcagaacgagaatttgtctcaaaataaattaagttctgacgttacgcaagccattgacttattaaaacaggacattacagccaaaatccaagaattggaacttttgattgaaaagcagtcttctgaagaaaataatattggaatggtcaacaacaatatgcttattggctctgttattttaaacaacaaatctccgataaatggaataagcaatgctaggaattgggataacccagcatatcaggacactttaagtcccataaacgatccacttcttatgtctattttaaaccgcttacaatttaatttgaataatgatattcaattgaaaacagaaggaggaaaaaattccaaaaactctgaaatgaagattaacttaagattagaacaattcaaaaaggagttggtattatatgagcagaaaaaatttaaagaatatggtatgaaaattgacgaaattacgaaagaaaataaaaaattggctaatgaaattgggcgtttaagagaacgctgggacagcttagtagaaagtgcgaagcaaagaagggataagcaaaaaaactga

SEQ ID NO: 7613 - DNA, 1422 bp, Saccharomyces cerevisiae
atgggtggagaaattattactttgcaagcaggtcaatgcgggaaccacgttggtaagtttctctggtctcaattggcgaaagaacacgctataggcaccgatgggctatctcagcttcctgattccagtacggaaagagatgatgacacaaagcctttcttccgcgaaaacagtaggaataagtttacgccaagggctattatgatggattccgagcctagtgtcatcgccgacgtggagaacacatttcgtgggtttttcgacccaagaaatacctgggtagcttctgatggcgctagcgctggtaattcttgggccaatgggtatgatataggaactcgtaaccaggatgatattcttaacaagatcgacaaggagattgattctaccgacaatttcgaaggtttccagttgctgcactcagtagccggagggaccggttcagggctcggatccaacctcttagaagcgctgtgtgatcgatatcctaaaaaaatactcacgacatattctgtgttccctgcaagatcttctgaggttgttgttcaatcttataacactattctggctttgagaagactgatagaagatagcgatgcaacggtggtgtttgataacgcttcgttgctgaatatttccggtaaagtgtttagaaatccgaacatcgatttacaacacacgaatcaattgatatcgaccataatatcttcagtaacgaacagtatacggtttccgagttacatgtattcatccatgtccagtatttactctaccttgattccttctcctgaacttcatttcctaagccctagtttcactccatttacatcagattatattcacgatgatatagcgcataaaggccattccagttatgacgtcatgttagatttattagacccttccaattctcttgtctctaccgcgatgaacaatccaacatattttaacgtttataatacaatcattggtaatgtagaacctcgtcagatatcgcgtgctatgaccaaattacaacaacgcatcaaattcccctcatggtcctcttctgcgatgcacgttaacattggaagaagatcgccatacttgcctttacaaccaaatgaaaacgaagttagcggcatgatgttaagcaatatgtctaccgtggtgaacgtctttgagaatgcgtgcaatacttttgacaaagtatttgccaagggcgcatttttaaataattataatgtaggcgacttgttccaatcaatgcagaacgttcaagatgaattcgccgagtcaagagaagtagtacaaagcctgatggaggattatgtagctgcagaacaagattcgtacttggacgatgtacttgttgatgatgaaaatatggttggcgagttggaagaggacctggatgccgacggtgatcataaattagtataa

SEQ ID NO: 7614 - DNA, 1422 bp, Artificial Sequence
  Description of Artificial Sequence: Synthetic polynucleotide
atgggtggagaaattattactttgcaagcaggtcaatgcgggaaccacgttggtaagtttctctggtctcaattggcgaaagaacacgctataggcaccgatgggttatctcagcttcctgattccagtacggaaagagatgatgacacaaagcctttcttccgcgaaaacagtaggaataagtttacgccaagggctattatgatggattccgagcctagtgtcatcgccgacgtggagaacacatttcgtgggtttttcgacccaagaaatacctgggtagcttctgatggcgctagcgctggtaattcttgggccaatgggtatgatataggaactcgtaaccaggatgatattcttaacaagatcgacaaggagattgattctaccgacaatttcgaaggtttccagttgttgcactctgtagccggagggaccggttctgggctcggatccaacctcttagaagcgttatgtgatagatatcctaaaaaaatactcacgacatattctgtgttccctgcaagatcttctgaggttgttgttcaatcttataacactattttggctttgagaagattaatagaagatagcgatgcaacggtggtgtttgataacgcttctttgttgaatatttccggtaaagtgtttagaaatccgaacatcgatttacaacacacgaatcaattgatatctaccataatatcttctgtaacgaacagtataagatttccgagttacatgtattcttccatgtccagtatttactctaccttgattccttctcctgaacttcatttcttgagccctagtttcactccatttacatctgattatattcacgatgatatagcgcataaaggccattccagttatgacgtcatgttagatttattagacccttccaattctcttgtctctaccgcgatgaacaatccaacatattttaacgtttataatacaatcattggtaatgtagaacctcgtcagatatctcgtgctatgaccaaattacaacaacgcatcaaattccccagctggtcctcttctgcgatgcacgttaacattggaagaagatctccatacttgcctttacaaccaaatgaaaacgaagttagcggcatgatgttaagcaatatgtctaccgtggtgaacgtctttgagaatgcgtgcaatacttttgacaaagtatttgccaagggcgcatttttaaataattataatgtaggcgacttgttccaatctatgcagaacgttcaagatgaattcgccgagagcagagaagtagtacaaagcttgatggaggattatgtagctgcagaacaagattcttacttggacgatgtacttgttgatgatgaaaatatggttggcgagttggaagaggacttggatgccgacggtgatcataaattagtatga

SEQ ID NO: 7615 - DNA, 1269 bp, Saccharomyces cerevisiae
atgagaatatcaatattacagctggtgccggttgttggctacatcggatttgcactgggagaattatacaaacccaaaaactccatttcttgttctccaaataacccttgtcccgcagaatggccgtgctgctcgccgtataatgaatgtggcgctggaccgatatgtgtcggtggctgcaacgtgaggtcatctttcgacgaggaaagctgtgctcctatacctgcattagtcgccagtcaaaaacttgaatttgttagcacaccaaaggttcctaaatttattgtgaactatcaacctaagccaccaataagagagggaaatggaccgaataaggcaaataccaaggtgggtgtagtagaaggggagctaaattccaagagaatcatacactacgccaaattcttggtcactccagacagtaaagaggcagagaaaatgttggaagatttcgatttcacacatagcggctacacatcaattgaagcgagtagcgggaatattgttctggctatgccaaaaaaaactaccggaagtttgatcacatcgaccaggtcgtttctatacggcaaggcaagcgtgcgaatgaaaacggcgaggtcgaggggtgtggtgactgcatttgacttaacatccgcaattggggacgagattgattttgagtggctgggtggtgatttaatgacggcccaatcaaactactattctcaagggcatttggattacacaagaatgcaaagatttcccgtaggcgctgacacttgggccacttaccacacttatgagattgattgggacccggataggataatatggtatgttgatggtaaaatagctcgcacagtcctgaagaaggatacctgggaccccattagtaaagaatataggtacccacaaacgccgatgagactagaaatcgctgtttggccaggcggctcggaaaccaacggacccggtacaataaactgggcaggtggcctcatagattgggaaaattcacccgatattatcgaaaagggccaatttacggcgcatgttgaacaaatcaccgtaacgccgtaccaaaataaattcacagaacaagtgcagttttgtataaaggcaaagaaaaaggcaccaaccttttcccaaaaagatttgtcaagagtagtcgtttcgtataacaggcaagacagactgaatcatcatgatgaggggtctctcaaatgggactgctttgttactccaaagataaatgactggttgagttcttggaaacggtcaaaatag

SEQ ID NO: 7616 - DNA, 1269 bp, Artificial Sequence
  Description of Artificial Sequence: Synthetic polynucleotide
atgagaatatccatattacagttggtgccggttgttggctacatcggatttgcattgggagaattatacaaacccaaaaactccatttcttgttctccaaataacccttgtcccgcagaatggccgtgctgctctccgtataatgaatgtggcgctggaccgatatgtgtcggtggctgcaacgtgaggtcttctttcgacgaggaaagctgtgctcctatacctgcattagtcgccagtcaaaaacttgaatttgttagcacaccaaaggttcctaaatttattgtgaactatcaacctaagccaccaataagagagggaaatggaccgaataaggcaaataccaaggtgggtgtagtagaaggggagttgaattccaagagaatcatacactacgccaaattcttggtcactccagacagtaaagaggcagagaaaatgttggaagatttcgatttcacacatagcggctacacatccattgaagcgagtagcgggaatattgttttggctatgccaaaaaaaactaccggaagtttgatcacatctaccaggtcttttttgtacggcaaggcaagcgtgcgtatgaaaacggcgaggagtaggggtgtggtgactgcatttgacttaacatccgcaattggggacgagattgattttgagtggttaggtggtgatttaatgacggcccaaagtaactactattctcaagggcatttggattacacaagaatgcaaagatttcccgtaggcgctgacacttgggccacttaccacacttatgagattgattgggacccggataggataatatggtatgttgatggtaaaatagctcgcacagtcttgaagaaggatacctgggaccccattagtaaagaatataggtacccacaaacgccgatgagattagaaatcgctgtttggccaggcggctctgaaaccaacggacccggtacaataaactgggcaggtggcctcatagattgggaaaattctcccgatattatcgaaaagggccaatttacggcgcatgttgaacaaatcaccgtaacgccgtaccaaaataaattcacagaacaagtgcagttttgtataaaggcaaagaaaaaggcaccaaccttttcccaaaaagatttgtccagagtagtcgtttcttataacaggcaagacagattgaatcatcatgatgaggggtctctcaaatgggactgctttgttactccaaagataaatgactggttgagttcttggaaaagaagtaaatga

SEQ ID NO: 7617 - DNA, 2061 bp, Saccharomyces cerevisiae
atggttagaacccgtgtattattctgcttatttatatctttttttgctacggttcaatcgagtgctacacttattagcacttcatgtatttcccaagctgcgctataccaatttggatgttctagtaaatctaaaagttgctactgtaaaaacatcaattggctgggttcagtgacagcatgtgcctatgagaattccaaatctaacaaaacactagacagcgccttaatgaagttagcatcccaatgttcaagcatcaaagtttatactttagaggacatgaagaatatttatttaaatgcgtcaaattatttgagagcacctgagaaaagtgataaaaaaaccgtggttagtcaaccgctcatggcgaacgagacagcgtatcattattattatgaggaaaattatggtatccatcttaacctaatgcgctctcaatggtgcgcttggggtctcgtcttcttctgggtggctgtgcttactgcagccactatcttgaacattctgaaaagggtgtttggtaagaacatcatggcaaactccgtcaaaaaatcacttatttatccttctgtttacaaagattataatgaacgaactttttatttatggaagcgtctaccatttaattttacaactcgaggcaagggtctcgtcgtattaatttttgttattttgactatattatctctcagttttggtcataatattaaacttccacacccatatgataggcccagatggagaagaagtatggcctttgtgagtcgtagagcagacttgatggccattgcacttttcccagtagtctatctattcggaataagaaataatcccttcatccctataacagggctttccttttctacatttaatttctatcataaatggtctgcctacgtttgtttcatgttggccgttgtacactcaattgtcatgaccgcctcgggagtgaaaagaggtgtgtttcaaagtctggttaggaaattttactttaggtggggtatagtggcaacgatattaatgtctattattattttccaaagtgaaaaagtatttagaaatagagggtatgagatattccttcttattcataaagcgatgaatattatgttcattattgccatgtactaccattgtcacaccctgggctggatgggttggatttggtcaatggctggtattttatgctttgatagattctgcaggattgttagaataatcatgaatggtggcttgaaaactgctactttgagtaccactgatgattctaatgttattaaaatttcagtaaaaaaaccaaagtttttcaagtaccaagtaggagctttcgcatacatgtatttcttatcaccaaaaagtgcatggttctatagtttccaatcacatccatttacagtattatcggaacgacaccgtgatccaaacaatccagatcaattgacgatgtacgtaaaggcaaataaaggtatcactcgagttttgttatcgaaagttctaagtgctccaaatcatactgttgattgtaaaatattccttgaaggcccatatggtgtaacggttccacatatcgctaagctaaaaagaaatctggtaggtgtagccgctggtttgggtgttgcggctatttatccgcactttgtcgaatgtttacggttaccatctactgatcaacttcagcataaattttactggattgttaatgacctatcccatttgaaatggtttgaaaatgaattgcaatggttaaaggagaaaagttgtgaagtctcagtcatatatactggttccagtgttgaggacacaaattcagatgagagtacaaaaggttttgatgataaagaagaaagcgaaatcactgttgaatgtctcaataaaagacctgatttgaaagaactagtgcgctcggaaataaaactctcagaactagagaataataatattaccttttattcctgcgggccagcaacgtttaacgacgattttagaaatgcagtggtccaaggtatagactcttccttgaagattgacgttgaactagaagaagaaagttttacatggtaa

SEQ ID NO: 7618 - DNA, 2061 bp, Artificial Sequence
  Description of Artificial Sequence: Synthetic polynucleotide
atggttagaacccgtgtattattctgcttatttatatctttttttgctacggttcaaagtagtgctacacttattagcacttcttgtatttcccaagctgcgttgtaccaatttggatgttctagtaaatctaaaagttgctactgtaaaaacatcaattggttaggttctgtgacagcatgtgcctatgagaattccaaatctaacaaaacattagacagcgccttaatgaagttagcatcccaatgtagcagcatcaaagtttatactttagaggacatgaagaatatttatttaaatgcgtctaattatttgagagcacctgagaaaagtgataaaaaaaccgtggttagtcaaccgctcatggcgaacgagacagcgtatcattattattatgaggaaaattatggtatccatcttaacttgatgcgctctcaatggtgcgcttggggtctcgtcttcttctgggtggctgtgcttactgcagccactatcttgaacattttgaaaagggtgtttggtaagaacatcatggcaaactccgtcaaaaaatctcttatttatccttctgtttacaaagattataatgaaagaactttttatttatggaagcgtttgccatttaattttacaactagaggcaagggtctcgtcgtattaatttttgttattttgactatattatctctcagttttggtcataatattaaacttccacacccatatgataggcccagatggagaagaagtatggcctttgtgagtcgtagagcagacttgatggccattgcacttttcccagtagtctatcttttcggaataagaaataatcccttcatccctataacagggctttccttttctacatttaatttctatcataaatggtctgcctacgtttgtttcatgttggccgttgtacactctattgtcatgaccgccagtggagtgaaaagaggtgtgtttcaaagtttggttaggaaattttactttaggtggggtatagtggcaacgatattaatgtctattattattttccaaagtgaaaaagtatttagaaatagagggtatgagatattccttcttattcataaagcgatgaatattatgttcattattgccatgtactaccattgtcacaccttaggctggatgggttggatttggtctatggctggtattttatgctttgatagattctgcaggattgttagaataatcatgaatggtggcttgaaaactgctactttgagtaccactgatgattctaatgttattaaaattagtgtaaaaaaaccaaagtttttcaagtaccaagtaggagctttcgcatacatgtatttcttatctccaaaaagtgcatggttctatagtttccaatctcatccatttacagtattatctgaaagacaccgtgatccaaacaatccagatcaattgacgatgtacgtaaaggcaaataaaggtatcactcgtgttttgttatccaaagttttgagtgctccaaatcatactgttgattgtaaaatattccttgaaggcccatatggtgtaacggttccacatatcgctaagttgaaaagaaatttggtaggtgtagccgctggtttgggtgttgcggctatttatccgcactttgtcgaatgtttaagattaccatctactgatcaacttcagcataaattttactggattgttaatgacttatcccatttgaaatggtttgaaaatgaattgcaatggttaaaggagaaaagttgtgaagtcagtgtcatatatactggttccagtgttgaggacacaaattctgatgagagtacaaaaggttttgatgataaagaagaaagcgaaatcactgttgaatgtctcaataaaagacctgatttgaaagaattagtgcgcagtgaaataaaactctctgaattagagaataataatattaccttttattcctgcgggccagcaacgtttaacgacgattttagaaatgcagtggtccaaggtatagactcttccttgaagattgacgttgaattggaagaagaaagttttacatggtga

SEQ ID NO: 7619 - DNA, 1083 bp, Saccharomyces cerevisiae
atgtcctcacaagaatatacaacttttatagatataccagtgacaagagcgcaggttgaacactgttcttactcgttttggtcctcactgtatcccaaatatgtgccaaaatccatagtgttaaaatccttaccgaaaaaatttattcaatatttggaacaagacggtatcaagctaccccaagaggaaaactccaggtctgtgtacaccgaggaaataataagaaatgaagataatgactatagtgattgggaggacgatgaggataccgccaccgaatttgtccaagaagttgagccattgatagattttccagaattacaccagaaattaaaggatgctttgaacgaattaggtgcagtggctcccaagttaaactggtctgcaccaagagacgctacctggattttgccgaataacactatgaagtgtaacgaggtaaatgagctttacctattgttgaacgcatccaattacataatgcatgaccttcaaagagcatttaaaggctgcgtggacggggatgatataaaaggattgaaatttgacttggtacttagacaatggtgtgatatgaatccggcactcgaatttagggtcttcgttaagaatgcgcatatcgttggggccacccagcgtgatttaaattattatgactatttagatgagttgtcagataccttcaaggaccttattgatgaaatagttcatgatgtcgtcctgcccaagtttcctgataaaagtttcgttcttgacgtttatattccaagacctttcaataaaatcttcattgttgatataaatccgtttgccaggaagacagattctttgctattttcatggaacgagattgctgcgatagcacctccgaagaatgatgttgaagattatgaattaaggttagtgacgaggcataacacggggagattcgcttcaaaagagcactccgaaaatcatgttccacaggatctcgtagaagctagtttaaatcctgaagcaatccgagagctcactcaaaaatggaaagaactactctctcaacaggcaaaggaagaaagcagtgatagtgagaatgaaacttag

SEQ ID NO: 7620 - DNA, 1083 bp, Artificial Sequence
  Description of Artificial Sequence: Synthetic polynucleotide
atgtcctctcaagaatatacaacttttatagatataccagtgacaagagcgcaggttgaacactgttcttactctttttggtcctctttgtatcccaaatatgtgccaaaatccatagtgttaaaatccttaccgaaaaaatttattcaatatttggaacaagacggtatcaagttgccccaagaggaaaactccaggtctgtgtacaccgaggaaataataagaaatgaagataatgactatagtgattgggaggacgatgaggataccgccaccgaatttgtccaagaagttgagccattgatagattttccagaattacaccagaaattaaaggatgctttgaacgaattaggtgcagtggctcccaagttaaactggtctgcaccaagagacgctacctggattttgccgaataacactatgaagtgtaacgaggtaaatgagctttacttgttgttgaacgcatccaattacataatgcatgaccttcaaagagcatttaaaggctgcgtggacggggatgatataaaaggattgaaatttgacttggtacttagacaatggtgtgatatgaatccggcactcgaatttagggtcttcgttaagaatgcgcatatcgttggggccacccagcgtgatttaaattattatgactatttagatgagttgagtgataccttcaaggaccttattgatgaaatagttcatgatgtcgtcttgcccaagtttcctgataaaagtttcgttcttgacgtttatattccaagacctttcaataaaatcttcattgttgatataaatccgtttgccaggaagacagattctttgttattttcttggaacgagattgctgcgatagcacctccgaagaatgatgttgaagattatgaattaaggttagtgacgaggcataacacggggagattcgcttccaaagagcactccgaaaatcatgttccacaggatctcgtagaagctagtttaaatcctgaagcaatcagagagctcactcaaaaatggaaagaattactctctcaacaggcaaaggaagaaagcagtgatagtgagaatgaaacttga

SEQ ID NO: 7621 - DNA, 1116 bp, Saccharomyces cerevisiae
atgactagacctaaaactttttttgatatttctattggaggtaaaccccaaggccgtatagtttttgagttgtacaatgacatagtgcctaaaacggctgaaaattttttgaagttgtgtgaaggaaatgctggtatggcaaagactaaacctgatgtaccattgtcgtacaagggttccattttccacagagtgatcaaagacttcatgtgtcaatttggtgattttaccaattttaatggtactggcggtgagagcatatacgatgaaaaattcgaggatgaaaatttcactgttaaacatgataaaccattccttctatccatggccaacgccggtccaaataccaatggatctcaagctttcataacctgtgttcctacacctcatttggacgggaagcacgttgtgtttggtgaagtgattcaaggtaaaagaattgttcgtttgattgaaaaccaacaatgtgaccaagaaaacaacaagccattgcgtgatgtaaagattgatgactgtggcgtgttacctgacgattatcaagtgccagagaatgccgaagctacaccaacagatgagtacggcgataattatgaagatgttttaaaacaagacgaaaaagttgacttgaagaatttcgacaccgtcttgaaagctatcgaaacggtaaagaacattggtactgaacagttcaagaaacagaactattccgtggctttagaaaaatatgtcaaatgtgataaattcttgaaagagtatttcccagaagatttggagaaggaacaaattgaaaaaatcaatcaattgaaagtgtctattccattgaatattgccatctgtgctcttaaattaaaagattacaagcaagtattagtagcctcatcggaggtgttatatgccgaagcggctgacgaaaaagccaaggccaaagctttgtaccgtcgtggcctggcctattaccatgttaatgacacagatatggctctcaatgacctagaaatggccactactttccagccaaatgacgctgccattttgaaagctattcataatactaaattaaaaagaaagcaacaaaacgaaaaagctaaaaagtctctttcgaagatgttctcctga

SEQ ID NO: 7622 - DNA, 1116 bp, Artificial Sequence
  Description of Artificial Sequence: Synthetic polynucleotide
atgactagacctaaaactttttttgatatttctattggaggtaaaccccaaggccgtatagtttttgagttgtacaatgacatagtgcctaaaacggctgaaaattttttgaagttgtgtgaaggaaatgctggtatggcaaagactaaacctgatgtaccattgagttacaagggttccattttccacagagtgatcaaagacttcatgtgtcaatttggtgattttaccaattttaatggtactggcggtgagagcatatacgatgaaaaattcgaggatgaaaatttcactgttaaacatgataaaccattccttctttccatggccaacgccggtccaaataccaatggatctcaagctttcataacctgtgttcctacacctcatttggacgggaagcacgttgtgtttggtgaagtgattcaaggtaaaagaattgttcgtttgattgaaaaccaacaatgtgaccaagaaaacaacaagccattgcgtgatgtaaagattgatgactgtggcgtgttacctgacgattatcaagtgccagagaatgccgaagctacaccaacagatgagtacggcgataattatgaagatgttttaaaacaagacgaaaaagttgacttgaagaatttcgacaccgtcttgaaagctatcgaaacggtaaagaacattggtactgaacagttcaagaaacagaactattccgtggctttagaaaaatatgtcaaatgtgataaattcttgaaagagtatttcccagaagatttggagaaggaacaaattgaaaaaatcaatcaattgaaagtgtctattccattgaatattgccatctgtgctcttaaattaaaagattacaagcaagtattagtagcctcttctgaggtgttatatgccgaagcggctgacgaaaaagccaaggccaaagctttgtaccgtcgtggcttggcctattaccatgttaatgacacagatatggctctcaatgacttggaaatggccactactttccagccaaatgacgctgccattttgaaagctattcataatactaaattaaaaagaaagcaacaaaacgaaaaagctaaaaagtctctttccaagatgttctcctga

SEQ ID NO: 7623 - DNA, 453 bp, Saccharomyces cerevisiae
atgcttttattttcttcttttttttctcacaacaaatgtccgaaacaaaaaaaggggcctcagccattaaaggtagtgaaaggcacttctaagagttgcgccaaacaagggaagattaaagggaaagaaaagctctggcaggctaaaactggcagactggtcatgagtgaaactggcgaaacttcagagtattataagcaggcgctggaagaatacaaagaggtccaagaagacgaagacccggatgtgtgggacacgagaatatccaagaccggatgctacgtagagaacctcgcattacagctgtgccatgccgaaacaggtgactggaggcagtgcttcaacgagatggcgttatttaggaagtgttgggaaaagaatggtaatagagagcgcgtaagcacagtggacgtggatgggacgaccagtaaggattcggaaaagaagaaatga

SEQ ID NO: 7624 - DNA, 453 bp, Artificial Sequence
  Description of Artificial Sequence: Synthetic polynucleotide
atgcttttattttcttcttttttttctcacaacaaatgtccgaaacaaaaaaaggggcctcagccattaaaggtagtgaaaggcacttctaagagttgcgccaaacaagggaagattaaagggaaagaaaagctctggcaggctaaaactggcagattggtcatgagtgaaactggcgaaacttccgagtattataagcaggcgttagaagaatacaaagaggtccaagaagacgaagacccggatgtgtgggacacgagaatatccaagaccggatgctacgtagagaacctcgcattacagttatgccatgccgaaacaggtgactggaggcagtgcttcaacgagatggcgttatttaggaagtgttgggaaaagaatggtaatagagagcgcgtaagcacagtggacgtggatgggacgaccagtaaggattctgaaaagaagaaatga

SEQ ID NO: 7625 - DNA, 2187 bp, Saccharomyces cerevisiae
atggtatttggttttacaaagagggacaggagggtacctgatttatctaggtatgattactactatcagaaccatgaagattataacaaaagtcctcagctctctgctgctgctgcctctgctgcttctgccgcatcaccggatcgaaccaattactcaaggtcgcactcgctggttagtcatgcaccttcaataccgagacaaagaagttcggtaaagagcccaggaagaaggctttccacatcctctgccgctccgccaacgtccagggcagcagctaagcagtattcacagaagacttactcgttgaggtcgcaaaggagcggagagtaccatttacacccgcccggttatactactaatgggagccgtatgaattctatgacgtctggtgcgaatgtcagaagaaactacggtaagaacaaatcgacggccggcaacaataacgattcaagggccaactccattaccgtaaagactacacaagtaacagacccttcaggaaggactcaatcaattaccaaaaagacaataagaaaaataaatgggtatgaatacgtagaaaccacgactacgactaagaatttggttccattaggtgactcgcagcgtcatttcgatgaatttagtgaaaattacatgttgcaagatgacgacattttagaggaacaagctagtgataacattcacgatataatcgaggaaaacgaaacagataacgaaaagccatattccccagtaagcgaaagtcatttacaagatgattcagagctaaacgtggaaaaaccagatttcccacttggatcatatttccaccataagtattctacagacgttatgcctctagaagaagaaagtagtttatcaaacttcagtgacgcattagattatattcctcccacccatcagaccagtagtaaatatattcataataaaaggaagcaagcatcgacgacaagaaggaagaaaagaccgcctgccgtgaaaaacgcagaagcagaggccaagaaaccattaaccgaagcagaaatgtatctgaaggcactagaggttgctaaaagaaacgtttatcacacggatgctgcttcggataacgcatcggcccccctcgggagtaacaaatccaggaaaagtaggatgggtcaaaaaatgaccttgagaagcagtagtgattctccgacggcgactgctaatcttgtcaaatctaatgtcgaggttcaaccaaaaagatttacaagttccttcttcagcagaaatactaaaagcgccccccatgaagtgcacaatcactctgtgtctacacattttaaatcgaataaggctgttgacccagttccagagcctaaaagtgcaaacacagggctaacagataaagaaatgtatgaccaagctttgaaaatcgcacaagcgaggtattacaactcacatggtattcaacctgaagcagtcgataatagcactacggcggctaaacctcgtcaggtcggcgttagccatctgggatccactgggagcatcccgcccaatgagcagcactatttaggggattctgaaattccagtccaaagcgaagtgcatgaatacgagcccattccattgcagaagacaaaaacaactggttcttccaaaaataagttcaaaaccatgttcgataaagtgctgcaattctctcaagaaaactacggctaccagcacaagaaggaacaaggcgaacaaactccagttactcgtaatgctgaagaaagcttcccagcagcgtctatttcggaaggtgtgacaaccgcaaagccatcttcaaacgaaggtgtgatgacgaatccagtagttacagattcaccttcaccccttcaacaacaaatagactcgactactgcgtcctcgaatgggcaaagtcagggcaatgtacctacctccgcagtagcttcaacaacgagaacaagatcaccggaactgcaggataatctaaagtcttcttcttcgcttttacaggaccaaacccctcagcgtcaggaagacgccacggatccaacaacatcatcgacgaatgaattatctgccgctgagccaacaatggtcacttcgacacatgccactaagacaatacaggctcaaacacaagatcctcccacgaagcacaagaagtccagtttcttcactaaactgttcaagaaaaaaagcagccgttag

SEQ ID NO: 7626 - DNA, 2187 bp, Artificial Sequence
  Description of Artificial Sequence: Synthetic polynucleotide
atggtatttggttttacaaagagggacaggagggtacctgatttatctaggtatgattactactatcagaaccatgaagattataacaaaagtcctcagctctctgctgctgctgcctctgctgcttctgccgcaagtccggatagaaccaattactctaggtctcactctttggttagtcatgcaccttccataccgagacaaagaagttctgtaaagagcccaggaagaaggctttccacatcctctgccgctccgccaacgtccagggcagcagctaagcagtattctcagaagacttactctttgaggtctcaaaggagcggagagtaccatttacacccgcccggttatactactaatgggagccgtatgaattctatgacgtctggtgcgaatgtcagaagaaactacggtaagaacaaatctacggccggcaacaataacgatagtagggccaactccattaccgtaaagactacacaagtaacagacccttctggaaggactcaatctattaccaaaaagacaataagaaaaataaatgggtatgaatacgtagaaaccacgactacgactaagaatttggttccattaggtgactctcagcgtcatttcgatgaatttagtgaaaattacatgttgcaagatgacgacattttagaggaacaagctagtgataacattcacgatataatcgaggaaaacgaaacagataacgaaaagccatattccccagtaagcgaaagtcatttacaagatgattctgagttgaacgtggaaaaaccagatttcccacttggatcctatttccaccataagtattctacagacgttatgcctttggaagaagaaagtagtttatctaacttcagtgacgcattagattatattcctcccacccatcagaccagtagtaaatatattcataataaaaggaagcaagcaagcacgacaagaaggaagaaaagaccgcctgccgtgaaaaacgcagaagcagaggccaagaaaccattaaccgaagcagaaatgtatttgaaggcattagaggttgctaaaagaaacgtttatcacacggatgctgcttctgataacgcatctgcccccctcgggagtaacaaatccaggaaaagtaggatgggtcaaaaaatgaccttgagaagcagtagtgattctccgacggcgactgctaatcttgtcaaatctaatgtcgaggttcaaccaaaaagatttacaagttccttcttcagcagaaatactaaaagcgccccccatgaagtgcacaatcactctgtgtctacacattttaaatctaataaggctgttgacccagttccagagcctaaaagtgcaaacacagggttgacagataaagaaatgtatgaccaagctttgaaaatcgcacaagcgaggtattacaactctcatggtattcaacctgaagcagtcgataatagcactacggcggctaaacctcgtcaggtcggcgttagccatttaggatccactgggagcatcccgcccaatgagcagcactatttaggggattctgaaattccagtccaaagcgaagtgcatgaatacgagcccattccattgcagaagacaaaaacaactggttcttccaaaaataagttcaaaaccatgttcgataaagtgttgcaattctctcaagaaaactacggctaccagcacaagaaggaacaaggcgaacaaactccagttactcgtaatgctgaagaaagcttcccagcagcgtctatttctgaaggtgtgacaaccgcaaagccatcttccaacgaaggtgtgatgacgaatccagtagttacagattctccttctccccttcaacaacaaatagactctactactgcgtcctctaatgggcaaagtcagggcaatgtacctacctccgcagtagcttctacaacgagaacaagatctccggaattacaggataatttgaagtcttcttcttctcttttacaggaccaaacccctcagcgtcaggaagacgccacggatccaacaacatcttctacgaatgaattatctgccgctgagccaacaatggtcacttctacacatgccactaagacaatacaggctcaaacacaagatcctcccacgaagcacaagaagtccagtttcttcactaaattattcaagaaaaaaagcagccgttga

SEQ ID NO: 7627 - DNA, 969 bp, Saccharomyces cerevisiae
atgtccattgtagcactaaagaacgcagtggtgacccttatacagaaagcgaaaggtagtggtggaacctcagagttgggggggtctgaatcaactcccttgttgaggggtagtaatagcaatagttcaaggcatgataacttatcctcatctagctcggatattatctatggtagaaattcagcgcaggatctagaaaactcaccgatgtcagtagggaaagataataggaatggcgataacggttcggataacgaaaaggcgaacctagggttcttccaatcagtagatcctcgcgtaattagcgatttgattatcgggctaagcgacggtttaaccgtcccctttgctctaacagctggtctatcttcacttggtgatgcgaaattggtcattaccggtggctttgctgagttgatctcaggtgcgatttctatgggccttggtggctatttgggagcgaagagtgaatctgattattatcatgctgaagtaaagaaggagaaaaggaaattttacgataactccaacctaattaacagagaaattgaagacattctgttagagattaaccctaatttctcggacgaaacaatcgtttcgttcatcaaagatttacaaagaacacctgagctaatggttgacttcattatcaggtacggtaggggtctagacgaacctgccgagaatagagaactaatcagtgcagtcactatcggtggcggttatctacttggtgggctagtaccactagtgccatatttttttgtctcagatgtgggcacaggtctcatttattctataatagtcatggttgtaacattattctggtttggttacgtaaagacaaaactatccatgggtagtggcagttcgacttcaaagaaagttacggaaggtgttgaaatggttgttgtgggtggtgtagcagcaggtgcggcttggttctttgttaagttactgggttaa

SEQ ID NO: 7628 - DNA, 969 bp, Artificial Sequence
  Description of Artificial Sequence: Synthetic polynucleotide
atgtccattgtagcattgaagaacgcagtggtgacccttatacagaaagcgaaaggtagtggtggaacctctgagttgggggggtctgaatctactcccttgttgaggggtagtaatagcaatagttctaggcatgataacttatcctcttctagcagtgatattatctatggtagaaattctgcgcaggatttggaaaactctccgatgtctgtagggaaagataataggaatggcgataacggttctgataacgaaaaggcgaacttggggttcttccaaagtgtagatcctcgcgtaattagcgatttgattatcgggttgagcgacggtttaaccgtcccctttgctttaacagctggtctttcttctcttggtgatgcgaaattggtcattaccggtggctttgctgagttgatcagtggtgcgatttctatgggccttggtggctatttgggagcgaagagtgaatctgattattatcatgctgaagtaaagaaggagaaaaggaaattttacgataactccaacttgattaacagagaaattgaagacattttattagagattaaccctaatttcagtgacgaaacaatcgtttctttcatcaaagatttacaaagaacacctgagttgatggttgacttcattatcaggtacggtaggggtttggacgaacctgccgagaatagagaattgatcagtgcagtcactatcggtggcggttatttacttggtgggttggtaccattggtgccatatttttttgtctctgatgtgggcacaggtctcatttattctataatagtcatggttgtaacattattctggtttggttacgtaaagacaaaactttccatgggtagtggcagttctacttctaagaaagttacggaaggtgttgaaatggttgttgtgggtggtgtagcagcaggtgcggcttggttctttgttaagttattgggttga

SEQ ID NO: 7629 - DNA, 663 bp, Saccharomyces cerevisiae
atgtcggcaggtgatatatcagccataaatatcaagtctgtcaaaaaaaacagaaggaggaagaagagaagaacagctgatgtttcatcatcagattcttcatcatcggatccatcatcagaaagtgaaaaggaggaaatccaaaatggggccatcgaagaacacgttggagaaaatggtaaaagtgatcatgttttctcaaaaggtaatgacgaagacaaacaagaggacattgcaatagaagtttcggatgtcgagcttacagacgaagaaagcaaggatttgaagttaaattcaaaagaagtgatagacgatttaaccaaaatttctttgagcaagatcccagagcctacgaaatctcaaaacaaggagggttttatgaatgcatcgaaaattgccgaaaatatcaagcttgcgagagaagaatacaatgaattggcagaaaactttgtgcccaaagggaaagacaagacaaagttaagggaagaatacttaaatttactttttgaaaactacggtgatgatatcaatcgtcttagagctgccccggatttcacgaataaatcactatccattttggcagatgctctgcaggaaggcataggaatgtttgatattggtgaactagaattggtcttgaaaaataaagaaatggagaactga

SEQ ID NO: 7630 - DNA, 663 bp, Artificial Sequence
  Description of Artificial Sequence: Synthetic polynucleotide
atgtctgcaggtgatatatctgccataaatatcaagtctgtcaaaaaaaacagaaggaggaagaagagaagaacagctgatgtttcttcttctgattcttcttcttctgatccatcttctgaaagtgaaaaggaggaaatccaaaatggggccatcgaagaacacgttggagaaaatggtaaaagtgatcatgttttctccaaaggtaatgacgaagacaaacaagaggacattgcaatagaagtttctgatgtcgagcttacagacgaagaaagcaaggatttgaagttaaattctaaagaagtgatagacgatttaaccaaaatttctttgagcaagatcccagagcctacgaaatctcaaaacaaggagggttttatgaatgcatccaaaattgccgaaaatatcaagcttgcgagagaagaatacaatgaattggcagaaaactttgtgcccaaagggaaagacaagacaaagttaagggaagaatacttaaatttactttttgaaaactacggtgatgatatcaatcgtcttagagctgccccggatttcacgaataaatctttatccattttggcagatgctttacaggaaggcataggaatgtttgatattggtgaattggaattggtcttgaaaaataaagaaatggagaactga

SEQ ID NO: 7631 - DNA, 2454 bp, Saccharomyces cerevisiae
atggatctgaaaacctcatataaaggtatatcgttaaaccctatttatgcaggaagcagtgctgttgccactgtttcagaaaatggtaaaatactagctactccggtgcttgacgaaatcaacataatcgatttaaccccaggctccagaaaaattttgcacaagatttctaatgaagacgagcaagaaattactgcactgaaattaactcctgatggtcaatatctcacgtatgtttcacaagctcagcttttaaaaatctttcaccttaagaccgggaaagttgtcagatcaatgaaaatctcttctccatcgtacattctcgacgcagattccacttcaacgcttctcgcagtcggagggacagatggtagtataattgttgtggatattgaaaatggttacattactcattcgttcaaaggtcatggtggtacaatttccagtttgaagttttatggacaattgaatagtaaaatatggttattagcatccggtgacaccaatggtatggtaaaggtttgggatcttgttaaaaggaagtgcttgcacacattacaagagcacacatctgctgtgagagggttggatatcattgaggtaccagataatgatgagccaagcctaaatttactttccggtggtagagacgatatcatcaatctctgggatttcaatatgaaaaagaaatgtaaattgttgaaaacacttccagtaaatcaacaggtagagtcatgcggattcctaaaggatggtgacggtaaacgcataatttatacagccggcggtgatgctatctttcagttaattgactctgaatctggtagcgtgcttaaaagaaccaataaacctatagaagagttattcattattggtgtacttccaatattgagcaattcacagatgtttttagtattgtctgaccagacattacaactaattaacgttgaagaagacttaaagaatgatgaagacacaatacaggtcacttcgagcattgctggtaatcatggtattattgctgacatgaggtatgttggcccagagctgaataaattagctttagctaccaattctccatcgcttaggataatacccgtccccgatttatcaggcccagaagcttcgctgcctttggatgtcgaaatttatgaaggtcatgaagatttgctaaattcattggatgctactgaggatggcctgtggatcgcaaccgcctctaaagataatacggctattgtttggagatacaatgagaacagctgcaagtttgatatttatgccaagtatattggtcattcagctgccgtaactgctgttggattgccaaatatagtttcaaagggatatcctgaatttttattgacagcatcgaatgatttaacaattaagaaatggataattccaaagccaactgctagtatggatgttcaaatcatcaaggtatccgaatatactcgtcatgcccatgaaaaggatatcaatgctttgtcagtttctcctaacgattctatttttgcaacagcatcatacgacaagacctgtaagatctggaacctagaaaatggtgaattggaagccacgttggccaaccacaagcgtggactatgggatgtatcattttgccaatatgataaattattggcaacttcttcaggtgataaaacagtcaagatatggtcattggatacattcagcgttatgaaaacattggaaggtcataccaatgcggttcaaagatgttcgtttattaataagcaaaaacaactgatcagttgtggtgctgatggcttgatcaaaatatgggattgttctagcggtgaatgtctgaagactttggatggtcataataatagattatgggctttaagtactatgaatgatggtgatatgatcgtaagtgctgatgcagatggtgtttttcagttttggaaagattgtacggaacaagaaatagaagaagaacaagaaaaagctaaattacaagtcgaacaagaacaatcgcttcaaaattatatgagcaaaggtgattggacaaatgcatttttgttagcaatgactttagatcacccaatgaggttgtttaatgttttgaaaagagctttgggcgaatcaaggtctagacaagataccgaagagggcaaaattgaagtcattttcaatgaagaattggaccaagccatctctatcctaaatgatgaacagttaattttgttaatgaaacgatgcagagattggaatacaaatgcaaaaacacataccatagcgcaaagaacaataagatgtattttgatgcatcataacatagcaaaattgagtgagatacccggaatggtaaagatagttgatgcaataattccatacacgcaaaggcatttcacaagggttgataacttagttgaacaaagttacatattagactacgcgctagtggaaatggataagctattctag

SEQ ID NO: 7632 - DNA, 2454 bp, Artificial Sequence
  Description of Artificial Sequence: Synthetic polynucleotide
atggatttgaaaacctcttataaaggtatatctttaaaccctatttatgcaggaagcagtgctgttgccactgtttctgaaaatggtaaaatattggctactccggtgcttgacgaaatcaacataatcgatttaaccccaggctccagaaaaattttgcacaagatttctaatgaagacgagcaagaaattactgcattgaaattaactcctgatggtcaatatctcacgtatgtttctcaagctcagcttttaaaaatctttcaccttaagaccgggaaagttgtcagaagtatgaaaatctcttctccatcttacattctcgacgcagattccacttccacgcttctcgcagtcggagggacagatggtagtataattgttgtggatattgaaaatggttacattactcattctttcaaaggtcatggtggtacaatttccagtttgaagttttatggacaattgaatagtaaaatatggttattagcatccggtgacaccaatggtatggtaaaggtttgggatcttgttaaaaggaagtgcttgcacacattacaagagcacacatctgctgtgagagggttggatatcattgaggtaccagataatgatgagccaagcttgaatttactttccggtggtagagacgatatcatcaatctctgggatttcaatatgaaaaagaaatgtaaattgttgaaaacacttccagtaaatcaacaggtagagagttgcggattcttgaaggatggtgacggtaaacgcataatttatacagccggcggtgatgctatctttcagttaattgactctgaatctggtagcgtgcttaaaagaaccaataaacctatagaagagttattcattattggtgtacttccaatattgagcaattctcagatgtttttagtattgtctgaccagacattacaattgattaacgttgaagaagacttaaagaatgatgaagacacaatacaggtcacttccagcattgctggtaatcatggtattattgctgacatgaggtatgttggcccagagttgaataaattagctttagctaccaattctccaagtcttaggataatacccgtccccgatttaagtggcccagaagcttctttgcctttggatgtcgaaatttatgaaggtcatgaagatttgttgaattctttggatgctactgaggatggcttatggatcgcaaccgcctctaaagataatacggctattgtttggagatacaatgagaacagctgcaagtttgatatttatgccaagtatattggtcattctgctgccgtaactgctgttggattgccaaatatagtttccaagggatatcctgaatttttattgacagcatctaatgatttaacaattaagaaatggataattccaaagccaactgctagtatggatgttcaaatcatcaaggtatccgaatatactcgtcatgcccatgaaaaggatatcaatgctttgagtgtttctcctaacgattctatttttgcaacagcaagctacgacaagacctgtaagatctggaacttggaaaatggtgaattggaagccacgttggccaaccacaagcgtggattatgggatgtatccttttgccaatatgataaattattggcaacttcttctggtgataaaacagtcaagatatggtctttggatacattcagcgttatgaaaacattggaaggtcataccaatgcggttcaaagatgttcctttattaataagcaaaaacaattgatcagttgtggtgctgatggcttgatcaaaatatgggattgttctagcggtgaatgtttgaagactttggatggtcataataatagattatgggctttaagtactatgaatgatggtgatatgatcgtaagtgctgatgcagatggtgtttttcagttttggaaagattgtacggaacaagaaatagaagaagaacaagaaaaagctaaattacaagtcgaacaagaacaatctcttcaaaattatatgagcaaaggtgattggacaaatgcatttttgttagcaatgactttagatcacccaatgaggttgtttaatgttttgaaaagagctttgggcgaaagtaggtctagacaagataccgaagagggcaaaattgaagtcattttcaatgaagaattggaccaagccatctctatcttgaatgatgaacagttaattttgttaatgaaaagatgcagagattggaatacaaatgcaaaaacacataccatagcgcaaagaacaataagatgtattttgatgcatcataacatagcaaaattgagtgagatacccggaatggtaaagatagttgatgcaataattccatacacgcaaaggcatttcacaagggttgataacttagttgaacaaagttacatattagactacgcgttagtggaaatggataagcttttctga

SEQ ID NO: 7633 - DNA, 3258 bp, Saccharomyces cerevisiae
atggcaggcaaaaaaagtcctcgaaaaagtacgatcaatcatagtacacattctggtaaactgccagcaaatattaaaaggctcataaaaaagggcgaatccgatacaaagtccaggcaatcaccacccacactgagtacaacgaggccaagaagatttagccttatatactcttctgagtcatccttgagtgacgtatctgattctgataaaaacaaaagtacaaacccacataaaattaaaagaaaagcaaagaacatttcaaataattcccaaggaaaaaaaagtaaacttatacaaaggcaaatagacaatgacgacgagggcacagagtcatccgattaccaagctgtaacagatggcgaagagagtgaaaatgaagaagaagagagtgaagaagaagaagaagatgatgacgaagacgacgacgacgatgatgatgacggaagtgatagtgatagtgatagcgaaacaagttctgatgacgagaatatagattttgtcaaactgacggcccaaagaaagaaaagagccatgaaagctttatctgccatgaatacaaatagcaatacactctattcctctcgtgagaacagtaacaaaaataaatcagttaaactatcccctaagaaagaaaatgaagaagagcagaaagaagaaaaagaaaaagagaaagaagagcaacaaaaacaacaagaatcaaacaaaaaagaagtaaacggttcaggcactactactacacaacaggcgctatcgtttaaattcaaaaaagaggacgacggcattagttttggtaatggtaatgaaggctataacgaggatataggtgaagaagtcttggatttaaaaaacaaagagaacaatggtaatgaagaagataaactggattctaaggtgatgttaggtaacaacgatgagttacgatttcccaatatttcagagtcagatgaatctgaatatgatattgaccaggatgcgtactttgacgtgattaacaatgaagattctcatggagaaattggtacagatcttgaaacgggggaagacgatcttcccatattggaagaagaagaacaaaacattgtttctgagctacaaaatgacgacgaactctcattcgatggtagtatacacgaagaagggtctgatcctgtagaagatgctgaaaataaatttttgcaaaatgaatacaatcaagaaaacggatatgatgaagaagatgacgaagaagatgaaataatgtctgattttgatatgccgttttatgaagatcctaaatttgcaaatctttattattatggcgatggttcagagccaaagctatccttgagtacatctttaccgttaatgctaaatgatgaaaaactatctaaactaaaaaagaaagaggccaaaaaacgggaacaggaagaaaggaaacaaagacgaaagctctataaaaagacgcaaaaacctagtacgagaacaacctccaatgtggacaatgatgagtatattttcaatgttttttttcaatcagatgatgaaaatagtggccataagagcaagaaaggcaggcataaatcgggcaaaagtcatattgaacataagaataaaggctcgaatttgataaaatccaatgatgatctggaaccatccactcatagtacggtcctgaattccgggaaatatgattcttctgacgatgaatatgataacattttgttggatgttgcccatatgccttcagatgatgaatgcagtgaatctgaaacgtcccacgatgctgacacggatgaagaattgagggcactagattcagatagcttagacattggcacagaactggacgacgattacgaagacgacgacgatgattccagcgtgacaaatgtgttcatagacatcgatgatttagatccagactctttttactttcattacgacagcgatggatcttcctctttgataagttctaactcagacaaagaaaattctgatggatccaaagattgcaaacatgatctcttagagactgttgtgtacgttgatgacgaatccacagatgaagatgataacctaccgcccccaagttcaaggtcaaaaaacattggctcaaaagcaaaggaaatcgtaagttcaaatgttgttggattacgtccaccaaaattgggtacttgggagacggacaacaaaccttttagtattattgatggtctgtctactaaatcattatacgccttaatccaagaacatcaacagcttcgcgagcaacatcaaagggctcaaaccccagatgttaaaagagagggaagctctaatggcaataacggtgacgaattgacactcaatgagctgctaaacatgagtgaattggaggatgattcaccatcccacacagacgatatggagaacaattacaatgatgcaattaatagcaaaagcacaaatggccatgctgcagattggtatgaagttcctaaggttccattatctgcatttagaaataagggtattaatgcctatgaagaagatgagtacatgataccagcaaattctaacagaaaagttcccattggctatattggtaatgaaagaacaagaaagaagattgataagatgaaagagctacaacggaaaaaaactgaaaaaaaaaggcagttaaagaaaaaaaagaagcttcttaaaataagaaagcaaagacaaaaggcaataaaggagcaagaaactatgaatttacaattgggaatcaatggccatgagatcatcggtaacaataacagccatagcgacataaataccggtaccgattttacaaccaatgaaaatacccctatgaatgaacttccctctcacgcacctgaagatgcgtcattaatacctcataattctgatcttgccgtggacagcaatacaaggaaaaattcaacaaaaagtgttggtttagatgaaattcatgagattttgggcaaagatgaaaatgacttactgtctgtaggtgatattaacggttatgatgcacaagaaggtcatgtgatcgaagatactgacgccgatatcctagcatcgttaaccgctcctgtgcaattcgacaatacattaagccatgaaaatagtaattccatgtggagaagaaggcaaagtatggtggaagcagcggctgaaaatcttcgtttcactaaaaatggtttatttagtgagagtgcattggcagatatcgaaggaattatgggcaatgatgttaaccattcattcgaattcaatgacgtcttacaatga

SEQ ID NO: 7634 - DNA, 3258 bp, Artificial Sequence
  Description of Artificial Sequence: Synthetic polynucleotide
atggcaggcaaaaaaagtcctagaaaaagtacgatcaatcatagtacacattctggtaaattaccagcaaatattaaaaggctcataaaaaagggcgaatccgatacaaagtccaggcaatctccacccacattgagtacaacgaggccaagaagatttagccttatatactcttctgagtcttccttgagtgacgtatctgattctgataaaaacaaaagtacaaacccacataaaattaaaagaaaagcaaagaacatttctaataattcccaaggaaaaaaaagtaaacttatacaaaggcaaatagacaatgacgacgagggcacagagtcttccgattaccaagctgtaacagatggcgaagagagtgaaaatgaagaagaagagagtgaagaagaagaagaagatgatgacgaagacgacgacgacgatgatgatgacggaagtgatagtgatagtgatagcgaaacaagttctgatgacgagaatatagattttgtcaaattaacggcccaaagaaagaaaagagccatgaaagctttatctgccatgaatacaaatagcaatacactctattcctctcgtgagaacagtaacaaaaataaatctgttaaactttcccctaagaaagaaaatgaagaagagcagaaagaagaaaaagaaaaagagaaagaagagcaacaaaaacaacaagaatctaacaaaaaagaagtaaacggttctggcactactactacacaacaggcgttatcttttaaattcaaaaaagaggacgacggcattagttttggtaatggtaatgaaggctataacgaggatataggtgaagaagtcttggatttaaaaaacaaagagaacaatggtaatgaagaagataaattggattctaaggtgatgttaggtaacaacgatgagttaagatttcccaatatttctgagtctgatgaatctgaatatgatattgaccaggatgcgtactttgacgtgattaacaatgaagattctcatggagaaattggtacagatcttgaaacgggggaagacgatcttcccatattggaagaagaagaacaaaacattgtttctgagttacaaaatgacgacgaactctctttcgatggtagtatacacgaagaagggtctgatcctgtagaagatgctgaaaataaatttttgcaaaatgaatacaatcaagaaaacggatatgatgaagaagatgacgaagaagatgaaataatgtctgattttgatatgccgttttatgaagatcctaaatttgcaaatctttattattatggcgatggttctgagccaaagttatccttgagtacatctttaccgttaatgttgaatgatgaaaaattatctaaattgaaaaagaaagaggccaaaaaaagagaacaggaagaaaggaaacaaagaagaaagctctataaaaagacgcaaaaacctagtacgagaacaacctccaatgtggacaatgatgagtatattttcaatgttttttttcaatctgatgatgaaaatagtggccataagagcaagaaaggcaggcataaatctggcaaaagtcatattgaacataagaataaaggcagtaatttgataaaatccaatgatgatttggaaccatccactcatagtacggtcttgaattccgggaaatatgattcttctgacgatgaatatgataacattttgttggatgttgcccatatgccttctgatgatgaatgcagtgaatctgaaacgtcccacgatgctgacacggatgaagaattgagggcattggattctgatagcttagacattggcacagaattagacgacgattacgaagacgacgacgatgattccagcgtgacaaatgtgttcatagacatcgatgatttagatccagactctttttactttcattacgacagcgatggatcttcctctttgataagttctaacagcgacaaagaaaattctgatggatccaaagattgcaaacatgatctcttagagactgttgtgtacgttgatgacgaatccacagatgaagatgataacttaccgcccccaagttctaggtccaaaaacattggctctaaagcaaaggaaatcgtaagtagtaatgttgttggattacgtccaccaaaattgggtacttgggagacggacaacaaaccttttagtattattgatggtctttctactaaatctttatacgccttaatccaagaacatcaacagcttcgcgagcaacatcaaagggctcaaaccccagatgttaaaagagagggaagctctaatggcaataacggtgacgaattgacactcaatgagttattaaacatgagtgaattggaggatgattctccatcccacacagacgatatggagaacaattacaatgatgcaattaatagcaaaagcacaaatggccatgctgcagattggtatgaagttcctaaggttccattatctgcatttagaaataagggtattaatgcctatgaagaagatgagtacatgataccagcaaattctaacagaaaagttcccattggctatattggtaatgaaagaacaagaaagaagattgataagatgaaagagttacaaagaaaaaaaactgaaaaaaaaaggcagttaaagaaaaaaaagaagcttcttaaaataagaaagcaaagacaaaaggcaataaaggagcaagaaactatgaatttacaattgggaatcaatggccatgagatcatcggtaacaataacagccatagcgacataaataccggtaccgattttacaaccaatgaaaatacccctatgaatgaacttccctctcacgcacctgaagatgcgtctttaatacctcataattctgatcttgccgtggacagcaatacaaggaaaaattctacaaaaagtgttggtttagatgaaattcatgagattttgggcaaagatgaaaatgacttattatctgtaggtgatattaacggttatgatgcacaagaaggtcatgtgatcgaagatactgacgccgatatcttggcatctttaaccgctcctgtgcaattcgacaatacattaagccatgaaaatagtaattccatgtggagaagaaggcaaagtatggtggaagcagcggctgaaaatcttcgtttcactaaaaatggtttatttagtgagagtgcattggcagatatcgaaggaattatgggcaatgatgttaaccattctttcgaattcaatgacgtcttacaatga

SEQ ID NO: 7635 - DNA, 1110 bp, Saccharomyces cerevisiae
atgaatcagagcgatagcagcttgatggatttaccactggagatacatttatcattactagagtacgtgcctaatgaacttcgtgctgtcaataaatacttctacgttttgcataaccacagctataaggagaagagtttggcgtggatagctgaggacaactatatatgggccgttgtcaaacattcattatgtttatatgtcaagagtttggacccacttcgacagcatgccagagaaatcattcaagaaacgaaggaaccaggttttaatgtgccactgtgcatgactaaatacatcgcagattcttggtatattgtatacaatgcgctgcaatatcctggaaagataattaatatgggatgggacaaatataccaaaagtcaagattcaaatggttctgattctaccagtaactttaatagtcggcccaaggaaagaactcttatgcagtcgttgacagctttacctgttaacttttggtccaggaggaaggacgagcctacaccggtaaacgtttggttttatgtaaaaaatgcgcacgttgccagatacataccgaaaattattacggaaataggcatatgcaactatgggccgaagcagatcgtggcaagtgcaggatatatcaacgaattgataacatctgaaggaatatactgtgttaacctaggccaccttcccaggctatacgatgagcaaatttttgaaggcactggaacgacacatcttcccctggaactgaaagctatcgacaggacagattcagatgtttgtatcaatggtgatttagttctactcggttatgactttattccatatcagatatcgaagccgtggttactctttagaatcgaacccgtaaatagcattgaagcaatcttcaactatagtgaatgttctttttcataccagtttgcatggagtttggcctgcttacaatctgaagagaaaatttcatttcctagagacacgataattgggcacggtttaccttacaagccatccaaattgataagaattttcgtctacaagcatccggaacaaaagcaagatcttggtcaagaaatagcattgcccaactggaataccccttatcttcgaagatga

SEQ ID NO: 7636 - DNA, 1110 bp, Artificial Sequence
  Description of Artificial Sequence: Synthetic polynucleotide
atgaatcagagcgatagcagcttgatggatttaccattggagatacatttatctttattggagtacgtgcctaatgaacttcgtgctgtcaataaatacttctacgttttgcataaccacagctataaggagaagagtttggcgtggatagctgaggacaactatatatgggccgttgtcaaacattctttatgtttatatgtcaagagtttggacccacttcgtcagcatgccagagaaatcattcaagaaacgaaggaaccaggttttaatgtgccattgtgcatgactaaatacatcgcagattcttggtatattgtatacaatgcgttgcaatatcctggaaagataattaatatgggatgggacaaatataccaaaagtcaagattctaatggttctgattctaccagtaactttaatagtagacccaaggaaagaactcttatgcagtctttgacagctttacctgttaacttttggtccaggaggaaggacgagcctacaccggtaaacgtttggttttatgtaaaaaatgcgcacgttgccagatacataccgaaaattattacggaaataggcatatgcaactatgggccgaagcagatcgtggcaagtgcaggatatatcaacgaattgataacatctgaaggaatatactgtgttaacttgggccaccttcccaggttgtacgatgagcaaatttttgaaggcactggaacgacacatcttcccttagaattgaaagctatcgacaggacagattctgatgtttgtatcaatggtgatttagttttactcggttatgactttattccatatcagatatccaagccgtggttactctttagaatcgaacccgtaaatagcattgaagcaatcttcaactatagtgaatgttctttttcttaccagtttgcatggagtttggcctgcttacaatctgaagagaaaatttcctttcctagagacacgataattgggcacggtttaccttacaagccatccaaattgataagaattttcgtctacaagcatccggaacaaaagcaagatcttggtcaagaaatagcattgcccaactggaataccccttatcttagaagatga

SEQ ID NO: 7637 - DNA, 1224 bp, Saccharomyces cerevisiae
atggcggttgcgatcaaaaaggagaagacgaaatttgcccccgttaaggaagttttatccgagaaggatcatgctaattatactaaatttcaggatacatcgaaactagaatggttttgcaggacgtcaaatcacaaaaagttcaagtcacatagtttattaaaagcagtaagaaatccaacggaaacaagaatagagacacaaactctgtattttacggatctcaccaacggcaaatgtggattaattcaactattatattccagtgttatgggcggtatatacaaaggttttcagttaaatttcaaaatatttaaagccagcagtgaggaaaactctgaagaagacattgatatatgggaaagctttaaaattgataatatcaaagattttgatacgttaaaagttgaatcggacaatgttacgtttcacttcgtacctttggaaaattcttcctccagtggatttgctcaattattaattaagatagatattccgaagggaagtacaagctgtttactaaaagatttgaaggttgacattaccgtaaatttacaagaaggattcataataaacccggacggttccaattattaccttgacaagagcatcagcttggaagagttagcaaaaagagactcttctagtacgtccagaaaaatgataagacatgtttttgttcctagaggtttttgcaatggtaccatctcatacaagaaaaacgataaacctgtgaagctggacttgaaggacacgcctatgttgtatctggatgctgtccaggggctaatacccaataaggcggctagtaaatggaattttctttgtttcaatggtgagaagcgttcgatgatgtgtattgaattcaccacaacaaaagaatatggcagcactacagtgactatatgggcggttagtgataaggacaaaattttggaggtcgggtcaagtgtaaatgatcatgctgttaaatttccatctacaaaagaggataagcaaaatggttggaaatatcctacatccatttcatttccgcgtggttttgaagaatctaatttaagattagtcaataggtacgatataatgagtgagctgcccgctttcattaggtctattgctgaaaatctggcaaacatgaagccattcatttaccaattctgccagaagtctaaattcgatgacgatgaaggagtttccatcattgaaagtacatttatcaattga

SEQ ID NO: 7638 - DNA, 1224 bp, Artificial Sequence
  Description of Artificial Sequence: Synthetic polynucleotide
atggcggttgcgatcaaaaaggagaagacgaaatttgcccccgttaaggaagttttatccgagaaggatcatgctaattatactaaatttcaggatacaagtaaattagaatggttttgcaggacgtccaatcacaaaaagttcaagagtcatagtttattaaaagcagtaagaaatccaacggaaacaagaatagagacacaaactttatattttacggatctcaccaacggcaaatgtggattaattcaattattatattccagtgttatgggcggtatatacaaaggttttcagttaaatttcaaaatatttaaagccagcagtgaggaaaactctgaagaagacattgatatatgggaaagctttaaaattgataatatcaaagattttgatacgttaaaagttgaaagtgacaatgttacgtttcacttcgtacctttggaaaattcttcctccagtggatttgctcaattattaattaagatagatattccgaagggaagtacaagctgtttattgaaagatttgaaggttgacattaccgtaaatttacaagaaggattcataataaacccggacggttccaattattaccttgacaagagcatcagcttggaagagttagcaaaaagagactcttctagtacgtccagaaaaatgataagacatgtttttgttcctagaggtttttgcaatggtaccatctcctacaagaaaaacgataaacctgtgaagttggacttgaaggacacgcctatgttgtatttggatgctgtccaggggttgatacccaataaggcggctagtaaatggaattttctttgtttcaatggtgagaagcgttccatgatgtgtattgaattcaccacaacaaaagaatatggcagcactacagtgactatatgggcggttagtgataaggacaaaattttggaggtcgggagtagtgtaaatgatcatgctgttaaatttccatctacaaaagaggataagcaaaatggttggaaatatcctacatccatttcctttccgcgtggttttgaagaatctaatttaagattagtcaataggtacgatataatgagtgagttgcccgctttcattaggtctattgctgaaaatttggcaaacatgaagccattcatttaccaattctgccagaagtctaaattcgatgacgatgaaggagtttccatcattgaaagtacatttatcaattga

SEQ ID NO: 7639 - DNA, 1188 bp, Saccharomyces cerevisiae
atgtctgctacatcttcaagtggtgacgtgaaaaaatttcaagctgtaccaaaaccaacgagcaatgcatcaccaccaccagcatcgagtgggtttaacgcaaggaccctatggccggatttgatagaaacaccagaaaaccagtgggtttttgagtgcaaagatattattgaaaagataggcactaatggaccgatagcagtggaaataaaaaaaaatatggaaaaatgcttaatgtacttttacacacttaaaaaaaaattaaatctttttgatcacacctatacggcatcatgcattctattttacaggtattggttcatatatggaatacctacagccataactgaatgtattcatatatcacagggaattctggtcaccgcttgcaaaacaatggagaataataggcctatagaggcctatattaaggcgacttgtgagtttttgatgcaaaatataccgtctttaaaaagtcgaacaaatattgataaacttaaatgggaatttagagataagttagtgacgaatgaaaaaaaaatactatgtttatttggctttgacttaaatatcagtaatccaaaagaattgattgaagaagtgttcagtggctattatagattcaacagggatcacaatctgccagaaaactttaaaaaagcttttccaaaaattcttcaagaatcaagaaattttatggtccaagctgtcacccagccagtttctttattgtgcgacggttatacgttcattgtactatctctcatatactgtggtttagagtataaaaagcttgtagacaaagatttcagatatccgaaaaacttcttcaaggatagattccctatcgaagtaacgccggaaaattttgccaatatctttaccgattacaagttactggaagagaattttttcaacttaaaaagtaataaaggtgctaaattacaaattgattcaagcatgattgattcggtgattgacgaaagtggcgatgtggaaaatgaagtttcagaaatctctgatccgtttaactacgagttgattaaatccggtgaggtgaaggaagagtttttgaatcatattgaaacaagggttaaagatttactagataaggctaaacaagaaagtatgaagagaaaggctaaagatcctataagaaccccagatgccaaaaaacctaaaatataa

SEQ ID NO: 7640 - DNA, 1188 bp, Artificial Sequence
  Description of Artificial Sequence: Synthetic polynucleotide
atgtctgctacatcttccagtggtgacgtgaaaaaatttcaagctgtaccaaaaccaacgagcaatgcatctccaccaccagcaagtagtgggtttaacgcaaggaccttatggccggatttgatagaaacaccagaaaaccagtgggtttttgagtgcaaagatattattgaaaagataggcactaatggaccgatagcagtggaaataaaaaaaaatatggaaaaatgcttaatgtacttttacacacttaaaaaaaaattaaatctttttgatcacacctatacggcatcttgcattttattttacaggtattggttcatatatggaatacctacagccataactgaatgtattcatatatctcagggaattttagtcaccgcttgcaaaacaatggagaataataggcctatagaggcctatattaaggcgacttgtgagtttttgatgcaaaatataccgtctttaaaaagtaggacaaatattgataaacttaaatgggaatttagagataagttagtgacgaatgaaaaaaaaatattatgtttatttggctttgacttaaatatcagtaatccaaaagaattgattgaagaagtgttcagtggctattatagattcaacagggatcacaatttaccagaaaactttaaaaaagcttttccaaaaattcttcaagaatctagaaattttatggtccaagctgtcacccagccagtttctttattgtgcgacggttatacgttcattgtattatctctcatatactgtggtttagagtataaaaagcttgtagacaaagatttcagatatccgaaaaacttcttcaaggatagattccctatcgaagtaacgccggaaaattttgccaatatctttaccgattacaagttattggaagagaattttttcaacttaaaaagtaataaaggtgctaaattacaaattgattctagcatgattgattctgtgattgacgaaagtggcgatgtggaaaatgaagtttctgaaatctctgatccgtttaactacgagttgattaaatccggtgaggtgaaggaagagtttttgaatcatattgaaacaagggttaaagatttattagataaggctaaacaagaaagtatgaagagaaaggctaaagatcctataagaaccccagatgccaaaaaacctaaaatatga

SEQ ID NO: 7641 - DNA, 1482 bp, Saccharomyces cerevisiae
atgaataaagacgtcgactatcaaacttttaaaaaaagtttaagaaaagaatttaaaaaagctgtgaagactatcctaaatttacaagcatataatggtgatttgataagggactttttggctctttatattccgtaccatgtagttttttataatctttcgatcatgaaaaaaggttcaccattaaggattcaaaccaataaccttctgaaagaagcgctggccaaaattttaaactttaatcttgcgatgggtccaaaacatatcatcaagataatgaagaaagataaagccgatccagagacaatgaataaattaaaactggtactatatataaaattatttcaaggagtatttggtcatgtagataaaaattataacctcgcatttcaatcttttcgctggtgcttacaattcattgcgtactcaaaaaggacaagactatttgcaagtatcgcagacgagcaaattggagctttttatgaactttgcgaactatttatatccatgttgtgttgccactgttttctaattgatttgaaagaaaatgaagcattggtaggcaataatctaaaaaattttatcaaaagacaaaaccctaattattcccatggcttcgatttaaatgaggagaccaagtcacttcaatggcactggtcactcgacgaggtagatgttattgaggcgttatactgcgtcgctttcgatgcgatggataagataacgcttaaattttcaaaggtcaatgaaaattttgtttttagtcagttttttcagtattgtgcagaaatcgaagaaatgttagccattctgagaggaaaaatttgggagtgtgaatgtgatgtgttcggtcccagaatcggactattagtagatagtaaccacatgaatgaaacaattcaaaaaaatattctgtcaataactttcaaacttaaaaatgaccctcagattatatgctgcttgaataaaattctggaaggcttattactttcatcaggtgttcaatttaaagttatccagtttttttatgtattaaaactatactatatgcaagataatgaatacacattcgaagcatcatctgaaatggataaattgaccatagaatgcttatgtatcatcgaaaatattattgatgcttgtgacaatcctgatgaagtaactgactaccaactacctaaggtactgttgactgctatggaggggaaattacttgttgctgaaaaaatatccgaagataatgactgttcagaatctctggacgattatcatccccgaacttaccaattcagacatcccagaataataatagacaagatgaaaacaaaattgaagcagaaactgcgctttgactcacctaaagatccagaaacagatgatcattggattgagtattggaaatattgctatcaggataacatagggaacttgccggacattttgtcacgtatatatcaaacctttactgatccctccaattaa

SEQ ID NO: 7642 - DNA, 1482 bp, Artificial Sequence
  Description of Artificial Sequence: Synthetic polynucleotide
atgaataaagacgtcgactatcaaacttttaaaaaaagtttaagaaaagaatttaaaaaagctgtgaagactatcttgaatttacaagcatataatggtgatttgataagggactttttggctctttatattccgtaccatgtagttttttataatctttctatcatgaaaaaaggttctccattaaggattcaaaccaataaccttttgaaagaagcgttggccaaaattttaaactttaatcttgcgatgggtccaaaacatatcatcaagataatgaagaaagataaagccgatccagagacaatgaataaattaaaattagtattatatataaaattatttcaaggagtatttggtcatgtagataaaaattataacctcgcatttcaatcttttcgctggtgcttacaattcattgcgtactctaaaaggacaagattatttgcaagtatcgcagacgagcaaattggagctttttatgaactttgcgaattatttatatccatgttgtgttgccactgttttttgattgatttgaaagaaaatgaagcattggtaggcaataatttgaaaaattttatcaaaagacaaaaccctaattattcccatggcttcgatttaaatgaggagaccaagtctcttcaatggcactggtctctcgacgaggtagatgttattgaggcgttatactgcgtcgctttcgatgcgatggataagataacgcttaaattttccaaggtcaatgaaaattttgtttttagtcagttttttcagtattgtgcagaaatcgaagaaatgttagccattttaagaggaaaaatttgggagtgtgaatgtgatgtgttcggtcccagaatcggattattagtagatagtaaccacatgaatgaaacaattcaaaaaaatattttatctataactttcaaacttaaaaatgaccctcagattatatgctgcttgaataaaattttggaaggcttattactttcttctggtgttcaatttaaagttatccagtttttttatgtattaaaactttactatatgcaagataatgaatacacattcgaagcatcttctgaaatggataaattgaccatagaatgcttatgtatcatcgaaaatattattgatgcttgtgacaatcctgatgaagtaactgactaccaattacctaaggtacttttgactgctatggaggggaaattacttgttgctgaaaaaatatccgaagataatgactgttctgaatctttggacgattatcatcccagaacttaccaattcagacatcccagaataataatagacaagatgaaaacaaaattgaagcagaaattgcgctttgactctcctaaagatccagaaacagatgatcattggattgagtattggaaatattgctatcaggataacatagggaacttgccggacattttgtctcgtatatatcaaacctttactgatccctccaattga

SEQ ID NO: 7643 - DNA, 2445 bp, Saccharomyces cerevisiae
atgacatccgatgatgggaatgctggacaagaaagagagaaggatgctgaactgattgaggttgggggcaagaaagtgagcaagacttcgacagggaaacggaagtttcataacaagtccaagaccggttgcgacaattgtaaaagaagaagagtaaaatgtgatgaaggcaaaccattttgcaagaaatgtacaaacatgaaattggactgtgtttacagccctattcagccaagaagaagaaaagattcttcgtcgtcaaaatttgcatcagcggtccacgatagggtaggcaagaaaaatctgagtgacaatgccatcatgttacaacaacaacaacagcaacttcatcatcaacaagaacagcaatttcgtcaacaacagcaagttcagttacagcagcaactgttgccacatgttggtactgatgaacaaagcaattcccctaatagcgttcctccatccgtatccaataatatggagaatcttttgttaccgcacctattagcgagtttagtgaataacaccagtaacagtaccaacagcagtgcaaatggagctgaagcgcataataatataacacaaacagctcccagttcaatgataaacaacaaccacccaaacatggccctaccagggaattcgccattgagtataccgataacacctagttttcaatcaacggccatgaatttatcaagtagccttaacggcttactctcgcctggtaggctaaattcggtgacgaatggattgcagcagccacaacttcaacaacaaaatcagcaaattccacaacaacaaggaacacagtcccccttcagcaatattcccttcgaccagctagcgcaattgaacaagatgggcttgaacttcaatatgaagagcttcaatacattatttccatacggtgctgcaaatggaatggcctctgagtttcaagagttatttggcctcggaaagtttgctacatctaataacagagcaatcaaagttagcacagcagaggaggcactcgcaaatatgcaacaggaacaggaggacaaaaacaagcaatttacgaagaacccattggataatactaagacggatgctgttaattcgggcaataacccccttaacggaaacgaaaataaagttactgcttctgatatactatctcataacaaaaacttgataatcgacaataccggtctcacaatcagtcccccacacacgttgtccaaaccttccatagatcaaaacattgcgtccccttcaacgggagtatccaatgtaacctctacaaagtcattgttatctataccggacaacaggaccgctttgggaaattctcctactttgaagacgtccccaatgggtgacctgttatccaactcggaggcattgtctccacgttcatcaaattctcacactcaacaacaatcttctccccattcaaacgcttcatcagcctcacgactagtccctgaattagtcgggctgtctagaaaatcaaatttgaatttgatagatctaaaactttttcatcactattgtactgacgtatggcataccataaccgaagcaggcatttctggtcctgaagtatggagcacttatattccggatttggcttttcattttcccttcttgatgcatacaattttggcttttagcgccactcatttgtccagaactgaagccggcttggataactacgtgtctagtcatcgtttagaagcgttgagactgttaagagaggctgtgctcgaaatttcagatgataacacagatgctttggtggctagtgctctaatattaatcctagattcattggcaaatgcttcaagcagctcaccaacggcatggattttccatgttaaaggcgccgtaactatactaactgctgtatggcccctgtcggagacatccaagttttataacttaatttctgttgacttgagtgatttgggtgaagctgtaatcaaccaaagtaatcataataatgataatgacaatagcaataatggtgatggaaataacaataatacgatatcggaactcgtatgctttgacgaaagtatagcagatttatatcccgtagaaattgattcaccgtacttgataactttagcatatttggacaaactgcatcgcgaaaaaaatcaattagattttatgttgagagtcttctcatttcctgctcttttggataggacttttttagcattattaatgacaggcgacctaggggccatgagaataatgaggtcttactatacattattgagaggttataccacagaaataaaggacaaagtgtggttcttggatagcgtatcacaggttttaccacaggatgttgatgagtatagtggaggtggtggtatgcatatgatgctggatttcttaggaggtgggttaccttctatgaccactacaaacttttcagcttttatgtaa

SEQ ID NO: 7644 - DNA, 2445 bp, Artificial Sequence
  Description of Artificial Sequence: Synthetic polynucleotide
atgacatccgatgatgggaatgctggacaagaaagagagaaggatgctgaattgattgaggttgggggcaagaaagtgagcaagacttctacagggaaaagaaagtttcataacaagtccaagaccggttgcgacaattgtaaaagaagaagagtaaaatgtgatgaaggcaaaccattttgcaagaaatgtacaaacatgaaattggactgtgtttacagccctattcagccaagaagaagaaaagattcttcttcttctaaatttgcaagtgcggtccacgatagggtaggcaagaaaaatttgagtgacaatgccatcatgttacaacaacaacaacagcaacttcatcatcaacaagaacagcaatttcgtcaacaacagcaagttcagttacagcagcaattattgccacatgttggtactgatgaacaaagcaattcccctaatagcgttcctccatccgtatccaataatatggagaatcttttgttaccgcacttattagcgagtttagtgaataacaccagtaacagtaccaacagcagtgcaaatggagctgaagcgcataataatataacacaaacagctcccagttctatgataaacaacaaccacccaaacatggccttaccagggaattctccattgagtataccgataacacctagttttcaatctacggccatgaatttatccagtagccttaacggcttactctcccctggtaggttgaattctgtgacgaatggattgcagcagccacaacttcaacaacaaaatcagcaaattccacaacaacaaggaacacagtcccccttcagcaatattcccttcgaccagcttgcgcaattgaacaagatgggcttgaacttcaatatgaagagcttcaatacattatttccatacggtgctgcaaatggaatggcctctgagtttcaagagttatttggcctcggaaagtttgctacatctaataacagagcaatcaaagttagcacagcagaggaggcactcgcaaatatgcaacaggaacaggaggacaaaaacaagcaatttacgaagaacccattggataatactaagacggatgctgttaatagtggcaataacccccttaacggaaacgaaaataaagttactgcttctgatatattatctcataacaaaaacttgataatcgacaataccggtctcacaatcagtcccccacacacgttgtccaaaccttccatagatcaaaacattgcgtccccttctacgggagtatccaatgtaacctctacaaagtctttgttatctataccggacaacaggaccgctttgggaaattctcctactttgaagacgtccccaatgggtgacttattatccaacagtgaggcattgtctccacgttcttccaattctcacactcaacaacaatcttctccccattccaacgcttcttctgccagtagattggtccctgaattagtcgggttatctagaaaatctaatttgaatttgatagatttgaaactttttcatcactattgtactgacgtatggcataccataaccgaagcaggcatttctggtcctgaagtatggagcacttatattccggatttggcttttcattttcccttcttgatgcatacaattttggcttttagcgccactcatttgtccagaactgaagccggcttggataactacgtgtctagtcatcgtttagaagcgttgagattattaagagaggctgtgctcgaaatttctgatgataacacagatgctttggtggctagtgctttaatattaatcttagattctttggcaaatgcttctagcagctctccaacggcatggattttccatgttaaaggcgccgtaactatattgactgctgtatggcccttatctgagacatccaagttttataacttaatttctgttgacttgagtgatttgggtgaagctgtaatcaaccaaagtaatcataataatgataatgacaatagcaataatggtgatggaaataacaataatacgatatctgaactcgtatgctttgacgaaagtatagcagatttatatcccgtagaaattgattctccgtacttgataactttagcatatttggacaaattgcatcgcgaaaaaaatcaattagattttatgttgagagtcttctcctttcctgctcttttggataggacttttttagcattattaatgacaggcgacttgggggccatgagaataatgaggtcttactatacattattgagaggttataccacagaaataaaggacaaagtgtggttcttggatagcgtatctcaggttttaccacaggatgttgatgagtatagtggaggtggtggtatgcatatgatgcttgatttcttaggaggtgggttaccttctatgaccactacaaacttttctgcttttatgtga

SEQ ID NO: 7645 - DNA, 576 bp, Saccharomyces cerevisiae
atgcaaacgctaaagtgtgttgttgtcggtgatggtgctgttgggaaaacgtgccttctaatctcctatacaacgaatcaatttccagccgactatgttccaacagtgttcgataactatgcggtgactgtgatgattggtgatgaaccatatacgttaggtttgtttgatacggccggtcaagaagattacgatcgattgagacccttgtcatatccttctactgatgtatttttggtttgtttcagtgttatttccccaccctcttttgaaaacgttaaagaaaaatggttccctgaagtacatcaccattgtccaggtgtaccatgcctggtcgtcggtacgcagattgatctaagggatgacaaggtaatcatcgagaagttgcaaagacaaagattacgtccgattacatcagaacaaggttccaggttagcaagagaactgaaagcagtaaaatatgtcgagtgttcggcactaacacaacgcggtttgaagaatgtattcgatgaagctatcgtggccgccttggagcctcctgttatcaagaaaagtaaaaaatgtgcaattttgtag

SEQ ID NO: 7646 - DNA, 576 bp, Artificial Sequence
  Description of Artificial Sequence: Synthetic polynucleotide
atgcaaacgttgaagtgtgttgttgtcggtgatggtgctgttgggaaaacgtgccttttgatctcctatacaacgaatcaatttccagccgactatgttccaacagtgttcgataactatgcggtgactgtgatgattggtgatgaaccatatacgttaggtttgtttgatacggccggtcaagaagattacgatagattgagacccttgagttatccttctactgatgtatttttggtttgtttcagtgttatttccccaccctcttttgaaaacgttaaagaaaaatggttccctgaagtacatcaccattgtccaggtgtaccatgcttagtcgtcggtacgcagattgatttaagggatgacaaggtaatcatcgagaagttgcaaagacaaagattacgtccgattacaagtgaacaaggttccaggttagcaagagaattgaaagcagtaaaatatgtcgagtgttctgcattaacacaacgcggtttgaagaatgtattcgatgaagctatcgtggccgccttggagcctcctgttatcaagaaaagtaaaaaatgtgcaattttgtga

SEQ ID NO: 7647 - DNA, 1362 bp, Saccharomyces cerevisiae
atggagaaagctttggaattagacggagaatatccggaatctctgagggatgaattcaacatccctacatttaaatccatgggactatcgtccgacgataagcctgtgacgtacttatgcgggaattctttaggtttgatgccgaagtcaactaggaattcaattaatgctgagctagatgcgtggagcgattgtgctgtggaatcgcatttcaaacatcctgaagaagccagaggaaaggtgccttgggtcagcattgacttacctattcttccactactagcccccatcgtgggtgctcaagaaaatgaagttgcagtaatgaatagtctcactgcaaatttgaattcattgttaattacgttttataaacctactgagaaaagattcaagatcctttttgaaaagggctcctttccatcagactattatgctttctacaaccagtgcaaaattcatggaatttcggaacctgagaatgtttttattcagatcgagccacgcgagggagagacttatatcagaactcaagatatcctggataccatagaggtaaatcaagatgaattggcgctggtctgtttgtcaggtgttcagtattacacggggcaatatttcgatattggccgaatcacctcatttgcccaccaattccccgacatattggttggatgggatttagcacacgctgtagggaacgtcccattgcaacttcatgattggggtgttgactttgcctgttggtgttcttacaagtacttgaatgccgggcctggtggaattggtggcttatttgtccactcgaagcatactaaaccagaccctgctaaggaaagtttgccaagattagctggttggtggggcaatgatcctgctaagcgatttcaaatgctggaagtattcgagccgattccaggagcattgggattcaggcaatctaatccaagcgttattgacacagtggcattgagaagttcattggaattatttgcgaagtttaatggtattaatgaagttcgtaaaagatcgttgttgctgacgaactatatgacggaactgttggaagcctccaagtattacaaacaccctttaaggatcgagaaattaccatgtttttttacaatattaactccaacaagcacagatgaagaacatggcgcccaattgtcactttacttcgattctgacactggaaaagaggatattatgcccaaagttttccaatatttgcatgaccatggtgtcattggcgatgcaagaagaccaaacgtaattagattggctcctgctcccttatataatacattttcagatgtatacattgcggtgaatgcactaaatgaggcgatggataagttgtag

SEQ ID NO: 7648 - DNA, 1362 bp, Artificial Sequence
  Description of Artificial Sequence: Synthetic polynucleotide
atggagaaagctttggaattagacggagaatatccggaatctttgagggatgaattcaacatccctacatttaaatccatgggattatcttccgacgataagcctgtgacgtacttatgcgggaattctttaggtttgatgccgaagtctactaggaattctattaatgctgagttagatgcgtggagcgattgtgctgtggaaagtcatttcaaacatcctgaagaagccagaggaaaggtgccttgggtcagcattgacttacctattcttccattgttagcccccatcgtgggtgctcaagaaaatgaagttgcagtaatgaatagtctcactgcaaatttgaattctttgttaattacgttttataaacctactgagaaaagattcaagatcctttttgaaaagggctcctttccatctgactattatgctttctacaaccagtgcaaaattcatggaatttctgaacctgagaatgtttttattcagatcgagccacgcgagggagagacttatatcagaactcaagatatcttagataccatagaggtaaatcaagatgaattggcgttggtctgtttgtctggtgttcagtattacacggggcaatatttcgatattggcagaatcacctcttttgcccaccaattccccgacatattggttggatgggatttagcacacgctgtagggaacgtcccattgcaacttcatgattggggtgttgactttgcctgttggtgttcttacaagtacttgaatgccgggcctggtggaattggtggcttatttgtccactccaagcatactaaaccagaccctgctaaggaaagtttgccaagattagctggttggtggggcaatgatcctgctaagagatttcaaatgttggaagtattcgagccgattccaggagcattgggattcaggcaatctaatccaagcgttattgacacagtggcattgagaagttctttggaattatttgcgaagtttaatggtattaatgaagttcgtaaaagaagtttgttgttgacgaactatatgacggaattattggaagcctccaagtattacaaacaccctttaaggatcgagaaattaccatgtttttttacaatattaactccaacaagcacagatgaagaacatggcgcccaattgtctctttacttcgattctgacactggaaaagaggatattatgcccaaagttttccaatatttgcatgaccatggtgtcattggcgatgcaagaagaccaaacgtaattagattggctcctgctcccttatataatacattttctgatgtatacattgcggtgaatgcattgaatgaggcgatggataagttgtga

SEQ ID NO: 7649 - DNA, 2100 bp, Saccharomyces cerevisiae
atggataatgaagaagttaacgaagaatgtatgagattatttttcaagaacgctcgtgcgcatctggataaacatctaacatcaaggttgacatgcgatgaaaatgcatatatcacgttcagatgcttcctggatggaatacatcgcaaatctactaggtttctcgaagagctacttttgaaacaagaaaatatgtaccataataacaattacgaacgcataaatgattccgtgataccattggttctgaaacttttatggcttcaaattcacgaacctacactccaatggtttgagcactggttccatgatatcatgcgactaagtaacagaagaaagttcagagtttttagaatttttcaaaaaaaaatgattcaatttttcaaaattacacacaggtattactatgacatcatcgaacacctatgcgcaaagtacgatatgaattccgttatttcaaatgctctcttcgcgaagttgaatttaatgcaatacacagatggactttcaactcatgagaaaattatcttaaacacgagtaatccactgacgttttccattgtaatctcactacaaagatgcgtgattaatctaggttccacacatttttataaaacactactaaacaagccgtctaacaaacccaagagtgtggaaggttttgagaagtctattaggtacttgaatattgcctcactctatctcccagccgttggagatacttattttcaacgagcgaaaatttacttgatcactgggaaattctcactgtatttctttgaattagtaagaggagcattggtaaggattccgtctaaatgtgcgttaaacaatttgaaagatttcattttgactcctgattttccggaaagaagacgtctgatgaaaaaattggcaattcttgtgtcaaaagatctcaaaggtgagaaatcattctttgaaggtcaaattgttttgcaatttctatcgatagtagaacacactttggttccacagtcatggaacgcatcacgtgcttctaattgttggttattgaaagagcatttacaaatggctgcattaaagtatcattcaggtaatattaatgttatacttgaaaacttggctgccacaatgggaagtttcgatcttatgtttacaactcgaaaaagtaaggaacaaaagaacaaactcaaatatgcagatttgagtgagcgccaggttttttttttagacttgagctttgattttattgctaatatcatagacgtcgtcatcaaaccctcctggcaaaaaaacatggaagactttcgatatctagccattattcgtttgcttatgtgctggattaagtcatatagatctattttgcagtacactcacagacacaggaagttttgcacttcattcgccttgttgctgaacgacttgataaatagtccactgaattgttcaggaaatatatatagccacaggccgaaaagaagctatctttttagagaagatattattttcagggaattttcttgcattaactttgcactaacagattttaatgacgattatgtgtatgattctcccgacatgattaataatataattggatgccctacattgactaaagtgctttctccaaaagaagaatgtgttctgcgaattagatcaataatattttctggcatgaaatttttagagaaaaatgacaccggcgtcatatggaatgccagcaaatataagtttgatttaataagcccaaatattaaaataaaacgccaaatagcattatcggaaatttcctccaaaataaatgtaaaaacacaacaggaaagagtagtctcttcgagaaaagttgaggccaaaagagatgaacaacagcgcaaaagagccgggaaaatagctgtgacagaactggaaaaacaatttgcaaatgtccggagaacaaaaaaattgtctccgctcccagaaaaagatggcgtttcttctgagttggtaaaacatgctgcttcacgagggagaaaaactatcactggcccactatcctctgattttctctcatatccagacgaagcaattgatgctgatgaggacatcaccgtccaagtgccagatactcctacttga

SEQ ID NO: 7650 - DNA, 2100 bp, Artificial Sequence
  Description of Artificial Sequence: Synthetic polynucleotide
atggataatgaagaagttaacgaagaatgtatgagattatttttcaagaacgctcgtgcgcatttggataaacatttaacatccaggttgacatgcgatgaaaatgcatatatcacgttcagatgcttcttggatggaatacatcgcaaatctactaggtttctcgaagagttgcttttgaaacaagaaaatatgtaccataataacaattacgaacgcataaatgattccgtgataccattggttttgaaacttttatggcttcaaattcacgaacctacactccaatggtttgagcactggttccatgatatcatgagattaagtaacagaagaaagttcagagtttttagaatttttcaaaaaaaaatgattcaatttttcaaaattacacacaggtattactatgacatcatcgaacacttatgcgcaaagtacgatatgaattccgttatttctaatgctctcttcgcgaagttgaatttaatgcaatacacagatggactttctactcatgagaaaattatcttaaacacgagtaatccattaacgttttccattgtaatctctttacaaagatgcgtgattaatttgggttccacacatttttataaaacattgttgaacaagccgtctaacaaacccaagagtgtggaaggttttgagaagtctattaggtacttgaatattgccagcctctatctcccagccgttggagatacttattttcaaagagcgaaaatttacttgatcactgggaaattctccttatatttctttgaattagtaagaggagcattggtaaggattccgtctaaatgtgcgttaaacaatttgaaagatttcattttgactcctgattttccggaaagaagacgtttaatgaaaaaattggcaattcttgtgtctaaagatctcaaaggtgagaaatctttctttgaaggtcaaattgttttgcaatttttatctatagtagaacacactttggttccacagagttggaacgcatctcgtgcttctaattgttggttattgaaagagcatttacaaatggctgcattaaagtatcattctggtaatattaatgttatacttgaaaacttggctgccacaatgggaagtttcgatcttatgtttacaactagaaaaagtaaggaacaaaagaacaaactcaaatatgcagatttgagtgagcgccaggttttttttttagacttgagctttgattttattgctaatatcatagacgtcgtcatcaaaccctcctggcaaaaaaacatggaagactttagatatttggccattattcgtttgcttatgtgctggattaagagttatagatctattttgcagtacactcacagacacaggaagttttgcacttctttcgccttgttgttgaacgacttgataaatagtccattgaattgttctggaaatatatatagccacaggccgaaaagaagctatctttttagagaagatattattttcagggaattttcttgcattaactttgcattaacagattttaatgacgattatgtgtatgattctcccgacatgattaataatataattggatgccctacattgactaaagtgctttctccaaaagaagaatgtgttttaagaattagaagtataatattttctggcatgaaatttttagagaaaaatgacaccggcgtcatatggaatgccagcaaatataagtttgatttaataagcccaaatattaaaataaaacgccaaatagcattatctgaaatttcctccaaaataaatgtaaaaacacaacaggaaagagtagtctcttctagaaaagttgaggccaaaagagatgaacaacagcgcaaaagagccgggaaaatagctgtgacagaattggaaaaacaatttgcaaatgtcagaagaacaaaaaaattgtctccgctcccagaaaaagatggcgtttcttctgagttggtaaaacatgctgcttctagagggagaaaaactatcactggcccattgtcctctgattttctctcttatccagacgaagcaattgatgctgatgaggacatcaccgtccaagtgccagatactcctacttga

SEQ ID NO: 7651 - DNA, 1971 bp, Saccharomyces cerevisiae
atgaaagtgctatgtgtcgcagagaaaaattctatagcgaaggcagtttcacagatcctaggaggaggcagatcaacttcaagggattccggctacatgtatgtaaagaactatgatttcatgtttagtgggttcccgtttgccagaaatggggctaactgcgaagttaccatgactagtgttgcagggcacctaacaggcattgatttcagccatgattcgcatgggtggggaaaatgcgccatccaagagttatttgatgcgccactgaacgagattatgaataacaaccaaaaaaagatagcaagcaacatcaagcgagaagcgaggaatgcagactatctgatgatatggacagattgcgaccgggaaggagagtacatcggttgggagatatggcaggaggccaagagaggcaacaggctcatacaaaatgatcaagtataccgggcagtcttttcgcatctcgaaagacaacacatattaaatgcagcacgaaacccaagtcgattggatatgaagagtgtgcacgctgtaggcacgcggattgaaatcgatcttcgagcaggtgttacattcaccagactcttaacagaaacgctacgaaataaactgagaaaccaagccaccatgaccaaggatggtgcaaaacaccgcggtggtaacaagaacgactcacaagtcgtatcgtatggtacatgccagtttccaacgctcggctttgtagtagacaggtttgaaagaatacgaaattttgttcccgaagagttctggtatatccaattggtagtcgaaaacaaagacaacggcggaacaacaacgttccagtgggacaggggccacttgttcgaccggctgagcgtgttaacgttttacgagacatgcatcgaaaccgccggcaatgttgctcaagtagtagacttgaaatcaaagccaacaacgaaatacagacctttacctctgaccacagtggagctacaaaaaaactgcgcccggtacctgcgtctgaacgccaaacaatcactagacgcagcagaaaagctataccaaaaggggttcatatcgtatccaagaacagagactgatactttcccacacgcaatggacctaaaatccttggtcgaaaagcaagctcaattggaccaactcgctgcaggcggcagaaccgcctgggcatcgtacgcggcatcgctgctccaacccgaaaacacaagtaacaataacaagttcaagtttccacgaagcggctcccatgacgacaaagcgcatccaccaatccaccccatcgtaagtctggggcctgaagcaaatgtttcgccagtggaaagaagagtatacgagtacgtggccaggcactttttggcatgctgctcagaggacgccaagggccaatcgatgacccttgtgttggactgggccgttgaacgtttctcagcttcaggtctcgtagtcctagagagaaatttcctcgatgtttacccttgggcccgatgggaaaccaccaagcagttaccgcggcttgaaatgaatgccctcgtagacatcgcgaaggccgaaatgaaggcgggcactacggcgccgcccaagccgatgactgagagtgaactcattctcctcatggatacaaacggcattggcacagacgccaccattgcggagcacatagacaagatccaagtacgtaattacgttaggagcgagaaagtaggcaaggaaacctacttacaacccacgaccctgggtgtctcactagtgcacggcttcgaggccatcggcctcgaagactcctttgcaaagcccttccagcgcagagaaatggagcaagacctcaagaaaatctgcgaaggtcatgcctccaagactgatgttgtaaaggacatagtcgagaagtataggaagtactggcacaagacgaatgcctgcaagaatactctcttgcaagtttatgaccgtgtcaaggcatccatgtaa

SEQ ID NO: 7652 - DNA, 1971 bp, Artificial Sequence
  Description of Artificial Sequence: Synthetic polynucleotide
atgaaagtgttgtgtgtcgcagagaaaaattctatagcgaaggcagtttctcagatcttgggaggaggcagatctacttctagggattccggctacatgtatgtaaagaactatgatttcatgtttagtgggttcccgtttgccagaaatggggctaactgcgaagttaccatgactagtgttgcagggcacttgacaggcattgatttcagccatgattctcatgggtggggaaaatgcgccatccaagagttatttgatgcgccattgaacgagattatgaataacaaccaaaaaaagatagcaagcaacatcaagagagaagcgaggaatgcagactatttaatgatatggacagattgcgacagagaaggagagtacatcggttgggagatatggcaggaggccaagagaggcaacaggctcatacaaaatgatcaagtatacagagcagtcttttctcatctcgaaagacaacacatattaaatgcagcaagaaacccaagtagattggatatgaagagtgtgcacgctgtaggcacgagaattgaaatcgatcttcgtgcaggtgttacattcaccagactcttaacagaaacgcttagaaataaattgagaaaccaagccaccatgaccaaggatggtgcaaaacaccgcggtggtaacaagaacgactctcaagtcgtatcttatggtacatgccagtttccaacgctcggctttgtagtagacaggtttgaaagaataagaaattttgttcccgaagagttctggtatatccaattggtagtcgaaaacaaagacaacggcggaacaacaacgttccagtgggacaggggccacttgttcgacagattgagcgtgttaacgttttacgagacatgcatcgaaaccgccggcaatgttgctcaagtagtagacttgaaatccaagccaacaacgaaatacagacctttacctttgaccacagtggagttacaaaaaaactgcgccagatacttgcgtttgaacgccaaacaatctttggacgcagcagaaaagttgtaccaaaaggggttcatatcttatccaagaacagagactgatactttcccacacgcaatggacttgaaatccttggtcgaaaagcaagctcaattggaccaactcgctgcaggcggcagaaccgcctgggcaagctacgcggcatctttactccaacccgaaaacacaagtaacaataacaagttcaagtttccaagaagcggctcccatgacgacaaagcgcatccaccaatccaccccatcgtaagtttagggcctgaagcaaatgtttctccagtggaaagaagagtatacgagtacgtggccaggcactttttggcatgctgcagtgaggacgccaagggccaatctatgacccttgtgttggactgggccgttgaacgtttcagtgcttctggtctcgtagtcttggagagaaatttcctcgatgtttacccttgggcccgttgggaaaccaccaagcagttaccgaggcttgaaatgaatgccctcgtagacatcgcgaaggccgaaatgaaggcgggcactacggcgccgcccaagccgatgactgagagtgaactcattctcctcatggatacaaacggcattggcacagacgccaccattgcggagcacatagacaagatccaagtacgtaattacgttaggagcgagaaagtaggcaaggaaacctacttacaacccacgaccttgggtgtctctttggtgcacggcttcgaggccatcggcctcgaagactcctttgcaaagcccttccagcgcagagaaatggagcaagacctcaagaaaatctgcgaaggtcatgcctccaagactgatgttgtaaaggacatagtcgagaagtataggaagtactggcacaagacgaatgcctgcaagaatactctcttgcaagtttatgaccgtgtcaaggcatccatgtga

SEQ ID NO: 7653 - DNA, 324 bp, Saccharomyces cerevisiae
atgcatactatttgccttagaagcccgatcgatgaatcctctcctcttccatataaatcaataaggcaacctctagaaaacgcccattcctgccaagcgctttgcagccttatggccgtactctgtgcatccgctgctcatcggctctctgaaaccttccctatgcgtttggtagtcgcgcgtgaatatgctaattggggcgccttccaacatgcgtttacgcggcgcgctggagcttctgtggcggcgacttctgcatggtttgatgcagttgcggctggtactgaaaatgcacatatgcagtcagctgaatcatgcaattaa

SEQ ID NO: 7654 - DNA, 324 bp, Artificial Sequence
  Description of Artificial Sequence: Synthetic polynucleotide
atgcatactatttgccttagaagcccgatcgatgaatcctctcctcttccatataaatctataaggcaacctttggaaaacgcccattcctgccaagcgctttgcagccttatggccgtactctgtgcatccgctgctcatcgtctctctgaaaccttccctatgcgtttggtagtcgcgcgtgaatatgctaattggggcgccttccaacatgcgtttacgcgccgcgctggagcttctgtggcggcgacttctgcatggtttgatgcagttgcggctggtactgaaaatgcacatatgcagtctgctgaaagttgcaattga

SEQ ID NO: 7655 - DNA, 1797 bp, Saccharomyces cerevisiae
atgagtttcggtagtaaagtctccagggctttgagatttttggaaattcctgtcaaagacagggcatctgtgagtttcttgaagaacccggatttgcaacctattaagtcggctaaccaaacatgggggttctggtctaattttgcatattggggtgttatgtccttttcagtgggtacatggatgagtgcctcttctgcactaggtgttggattaagttacccagaaaccattggtacatttatcgtcggtgatgtgttgaccattattttcacattggcaaactcgtgtcctggttacgactggaaggtcggtttcactttggcccaaagattcgtctttggtatttacggttctgccttcggtatcatcatcagaattttgatgagtattgtcaactacgggtccaacgcttgggtgggaggtctttgtatcaatatgatcttggattcatggtctcaccattatttgcacctgccaaacaccttatcttcgaaagttgccatgaccactaaagaattaattggttttatcatcttccacgtccttactgcattctgttacttaatgaaaccctaccacatgaactacattttaatttggtcgtgtgttgctacatttttctctatgttgggtatggtgatctatttagctaaacaggctcacggtgttggagaattgtttacctccactaaatccactgccactggctccaccaaagcttgggcttgggtttatatgatctcgtactggttcggttccgtttctccaggttccaccaaccaaagtgattactcgagatttggttcctccaattgggctatctgggccggtaccatctgtgcattgttaattccaaccactttaatcccagtttttggtgttattggtgcctccacctgtgacaaactatacggtgaacaatattggatgcctatggatatcttcaaccattggttgacaactaactattctgcaggtgctcgtgccggtgcgttcttctgtggtctttcatttgtcctatctcaaatgtcctacaccatctccaactgtgggtttgccagtggtatggatttggccggtttattacccaagtatgtcgacatcaagaggggtgccctttttgccgcatgtgtctcctgggcttgtttgccatggaacttctacaactcttcttctactttcttgactgtcatgagttctttcggtgttgtcatgactcctatcatttctgtcatgatttgcgataacttcttgatcagaaaaagacaatactccatcactaatgcctttattctcaagggtgaatactatttcactaagggtgttaactggagagctattgttgcctgggtttgtggtatgacccccggtctacctggtattgcttgggaagtcaataatgactatttccacaacactggtattgtcaatttcttttacggtgactccttcttctcgtttttgatctcctttttcgtctattggggactatgcctcctcttcccattcaaaattactgtcaaacatgatgacaaagattattatggtgcctttactgacgaagaagcaagaaagaagggcatggttccatacagtgaaatttctgaagaagaaatccgcgcttacacattaggcgaaggttacactaccggccacgagtacagacctgaaggctccgacgatgaaatacctgagttggtcaaaactagctctgaaaacaccaatgagtttgaaatagttcatcataagaataatgaaaagcaatcctccaccgccagtgaaaaagctgcttag

SEQ ID NO: 7656 - DNA, 1797 bp, Artificial Sequence
  Description of Artificial Sequence: Synthetic polynucleotide
atgagtttcggtagtaaagtctccagggctttgagatttttggaaattcctgtcaaagacagggcatctgtgagtttcttgaagaacccggatttgcaacctattaagtctgctaaccaaacatgggggttctggtctaattttgcatattggggtgttatgtccttttctgtgggtacatggatgagtgcctcttctgcattgggtgttggattaagttacccagaaaccattggtacatttatcgtcggtgatgtgttgaccattattttcacattggcaaactcttgtcctggttacgactggaaggtcggtttcactttggcccaaagattcgtctttggtatttacggttctgccttcggtatcatcatcagaattttgatgagtattgtcaactacgggtccaacgcttgggtgggaggtctttgtatcaatatgatcttggattcttggtctcaccattatttgcacttgccaaacaccttatcttctaaagttgccatgaccactaaagaattaattggttttatcatcttccacgtccttactgcattctgttacttaatgaaaccctaccacatgaactacattttaatttggtcttgtgttgctacatttttctctatgttgggtatggtgatctatttagctaaacaggctcacggtgttggagaattgtttacctccactaaatccactgccactggctccaccaaagcttgggcttgggtttatatgatctcctactggttcggttccgtttctccaggttccaccaaccaaagtgattactctagatttggttcctccaattgggctatctgggccggtaccatctgtgcattgttaattccaaccactttaatcccagtttttggtgttattggtgcctccacctgtgacaaactttacggtgaacaatattggatgcctatggatatcttcaaccattggttgacaactaactattctgcaggtgctcgtgccggtgcgttcttctgtggtctttcttttgtcttgtctcaaatgtcctacaccatctccaactgtgggtttgccagtggtatggatttggccggtttattacccaagtatgtcgacatcaagaggggtgccctttttgccgcatgtgtctcctgggcttgtttgccatggaacttctacaactcttcttctactttcttgactgtcatgagttctttcggtgttgtcatgactcctatcatttctgtcatgatttgcgataacttcttgatcagaaaaagacaatactccatcactaatgcctttattctcaagggtgaatactatttcactaagggtgttaactggagagctattgttgcctgggtttgtggtatgacccccggtttgcctggtattgcttgggaagtcaataatgactatttccacaacactggtattgtcaatttcttttacggtgactccttcttctcctttttgatctcctttttcgtctattggggattatgcctcctcttcccattcaaaattactgtcaaacatgatgacaaagattattatggtgcctttactgacgaagaagcaagaaagaagggcatggttccatacagtgaaatttctgaagaagaaatccgcgcttacacattaggcgaaggttacactaccggccacgagtacagacctgaaggctccgacgatgaaatacctgagttggtcaaaactagctctgaaaacaccaatgagtttgaaatagttcatcataagaataatgaaaagcaatcctccaccgccagtgaaaaagctgcttga

SEQ ID NO: 7657 - DNA, 1437 bp, Saccharomyces cerevisiae
atgactggtcctggacctgaaataaataaggaggagcaccccagttctccgggcaagaaacagataacatataatagtatacccaagaatgcaaatctaattgatggatctacgaattcatcgaagaggccaattgaaaagtatgacaagagaatagccgacccaacaaaaagctattttccacatagcatatcaagaacaccaaggagaaaatatacttacattctagtcctcacatcactaaatggaacttttgagagcaaacatgtggtgataccatttaaaccagatggtttgaaattgggaaggcctgttgctaatagtaatagcagctccagttcatcgctcaggggcggtaaaagagtggattcacacactttttcccaagtaaggtccgataatggtaatttcgattcaagagtactctccaggaatcatgcattgttaagttgcgacccgctcacgggtaaggtatatatacgagacttaaaatccagtaatggtacgttcattaacggtcaaagaattggctcaaatgacgtagaaatcaaagttggcgatgtgatagacttgggaacagatatagatacgaaaattgagcatcgaaaaataagtgccacagttgaagaactatttgtacaacctttattagaatcaccgatttttgaaaatgaagatagtgatgattgccatacaattacagaaaaagaggaggctgctgccataacaagtcacatatatggtgattccaacaacctagaattggaagaagttatcctgggctctgatacagaaatactgagtggaatttttattaataattgtattggtacgagcccgactttatctaatatcatcaaaaccctggcaatggaaattccattttccaaatgcgataattttaaattacagtcgatggagaatttcttaattaattatacgacacatctagaatacacgaacaaacttttagtggaaaaaaatgatcagcaactggtaaagctgcaaaatggattaagaaggaaactgtcggggaaatacgaaaagattatcgaacaaaacagaaatcaagtaaaacagttggaaagggaccatatgtttttcaaaaagtcatttgaagtgaagaaaagaagaaataatgaaaagcaaaaaagcatggaaagggaaatagaagacttgaaaactaggttagaagtggaacgatataagaattcacaaatgatgaagaagaacaaacagaaagaacaagaactctcaactgcatctaaaaaaaagactaccgaacatgacactagaggcgtcccgggcatgaatcctaagggtactgacaaatttagcatcaagaacacgctatgtaatcatttcacactattaacatttggaactatttccatcgggattatagctattgtcttcaagatcctttcccccaactag

SEQ ID NO: 7658 - DNA, 1437 bp, Artificial Sequence
  Description of Artificial Sequence: Synthetic polynucleotide
atgactggtcctggacctgaaataaataaggaggagcaccccagttctccgggcaagaaacagataacatataatagtatacccaagaatgcaaatttaattgatggatctacgaattcttccaagaggccaattgaaaagtatgacaagagaatagccgacccaacaaaaagctattttccacatagcatatctagaacaccaaggagaaaatatacttacattttagtcctcacatctttgaatggaacttttgagagcaaacatgtggtgataccatttaaaccagatggtttgaaattgggaaggcctgttgctaatagtaatagcagctccagttcttctctcaggggcggtaaaagagtggattctcacactttttcccaagtaaggtccgataatggtaatttcgattccagagtactctccaggaatcatgcattgttaagttgcgacccgctcacgggtaaggtatatataagagacttaaaatccagtaatggtacgttcattaacggtcaaagaattggcagtaatgacgtagaaatcaaagttggcgatgtgatagacttgggaacagatatagatacgaaaattgagcatagaaaaataagtgccacagttgaagaattatttgtacaacctttattagaatctccgatttttgaaaatgaagatagtgatgattgccatacaattacagaaaaagaggaggctgctgccataacaagtcacatatatggtgattccaacaacttggaattggaagaagttatcttgggctctgatacagaaatattgagtggaatttttattaataattgtattggtacgagcccgactttatctaatatcatcaaaaccttggcaatggaaattccattttccaaatgcgataattttaaattacagtccatggagaatttcttaattaattatacgacacatttggaatacacgaacaaacttttagtggaaaaaaatgatcagcaattggtaaagttacaaaatggattaagaaggaaattaagtgggaaatacgaaaagattatcgaacaaaacagaaatcaagtaaaacagttggaaagggaccatatgtttttcaaaaagagctttgaagtgaagaaaagaagaaataatgaaaagcaaaaaagcatggaaagggaaatagaagacttgaaaactaggttagaagtggaaagatataagaattctcaaatgatgaagaagaacaaacagaaagaacaagaactctccactgcatctaaaaaaaagactaccgaacatgacactagaggcgtcccgggcatgaatcctaagggtactgacaaatttagcatcaagaacacgttgtgtaatcatttcacattattaacatttggaactatttccatcgggattatagctattgtcttcaagatcctttcccccaactga

SEQ ID NO: 7659 - DNA, 987 bp, Saccharomyces cerevisiae
atgtcgaggtgtattcgccagtccgtatgcacaaacttcaatgtctgtaggcgacaatgctttagcacttatgcctctgctctcaaggaaatgacacatcctataaaaccctcagcgcaaacgctcagacatctacaattcactcaaagaataccttttcaaaaaggattggaaatacaggagacattagttagggcaaatttggacatcaaagacattcaatcgaagattgagagaaaattaatacaattggatgaagaatataagggcactgcaacaataaatgataacgaaaaaagaatattagacaaggttatggcaatgaaacctaatccgataatattaacgtttgagtttgagccaacttatacaggtgggaagaggattaagaaaactatgacgccagatcagatagcggcttatgaaagtttcattccagaaacgcaaaaggacaacccacgaccaaagtttgttcaagtggaaaggggtggacaagtaacatttcatggtccaggccaaattgttatttacattattttagatttgaaaacatttcaaagtttccctgctaaatgcttggtttcatgcattgagcaggccactatcagaacgttgaagaataccaagatgtgcgacgacactgacaagcctttgaacttagatgctatgactacaaaggacactggagtttgggttgaaaatggcaagaagaaagttgctagtgttggaatacacgtcagacgttccataacatcgcacggggtagcaattaatgttaatacagatctatcgtatatgaatagttttgaaatgtgcggtttgaaaaatacactgactacttcaattatggaacaacgacccgatgctgttgtaaatgtgcaaagtgtagcaattagttttgtcaaagaaatgacaaagctgctaggaataaaaactttggaaagaatgcaaattgacgacgtcaatattttgaaaaagaatccgtga

SEQ ID NO: 7660 - DNA, 987 bp, Artificial Sequence
  Description of Artificial Sequence: Synthetic polynucleotide
atgtctaggtgtattcgccagtccgtatgcacaaacttcaatgtctgtaggagacaatgctttagcacttatgcctctgctctcaaggaaatgacacatcctataaaaccctctgcgcaaacgctcagacatttacaattcactcaaagaataccttttcaaaaaggattggaaatacaggagacattagttagggcaaatttggacatcaaagacattcaatccaagattgagagaaaattaatacaattggatgaagaatataagggcactgcaacaataaatgataacgaaaaaagaatattagacaaggttatggcaatgaaacctaatccgataatattaacgtttgagtttgagccaacttatacaggtgggaagaggattaagaaaactatgacgccagatcagatagcggcttatgaaagtttcattccagaaacgcaaaaggacaacccaagaccaaagtttgttcaagtggaaaggggtggacaagtaacatttcatggtccaggccaaattgttatttacattattttagatttgaaaacatttcaaagtttccctgctaaatgcttggtttcttgcattgagcaggccactatcagaacgttgaagaataccaagatgtgcgacgacactgacaagcctttgaacttagatgctatgactacaaaggacactggagtttgggttgaaaatggcaagaagaaagttgctagtgttggaatacacgtcagacgttccataacaagtcacggggtagcaattaatgttaatacagatttatcttatatgaatagttttgaaatgtgcggtttgaaaaatacattgactacttctattatggaacaaagacccgatgctgttgtaaatgtgcaaagtgtagcaattagttttgtcaaagaaatgacaaagttattaggaataaaaactttggaaagaatgcaaattgacgacgtcaatattttgaaaaagaatccgtga

SEQ ID NO: 7661 - DNA, 2628 bp, Saccharomyces cerevisiae
atgtcactgaacaacataacattctgtgtctcacaggatctggatgttcccctgaaagtgaaaatcaagtcattggaaggacataagccactgttgaagccatctcaaaaaatcctgaaccctgaattaatgctgatagggtcaaatgtattcccttctagtgatctaattgtatccttacaggtatttgataaagagagaaacagaaatttaactcttccgatatacacgccgtatattcctttcagaaactctagaacctgggattattggttgactttgcccatacgtatcaaacagcttacctttagcagtcatttacgcattattttgtgggaatacaatggatccaagcaaattccctttttcaatctagaaacgagcatctttaacttaaaagactgtactttaaaaagagggtttgaatccttaaaatttcgttatgatgtgattgaccactgtgaagtggtcactgataacaaagatcaagaaaatttgaataaatattttcagggtgaattcacgagactcccttggcttgacgaaatcactataagcaaattaaggaaacaacgggaaaataggacttggcctcagggcacctttgtcttaaacttagaatttccaatgttagagcttcctgttgtgttcatcgaaagggaaattatgaatactcaaatgaatattccaactttgaagaacaatcctggactaagcacagacttacgagaaccgaataggaatgatcctcaaatcaaaatttctttgggggacaaatatcactccacattgaagttttacgatcctgaccaaccaaacaatgatccaatagaggaaaagtataggagattggaaagagcatctaaaaatgcaaacttggacaagcaagtgaagccggacattaaaaagagggactacttgaataaaatcatcaactacccccctggcactaaattaacagcacatgaaaagggttcaatatggaaatataggtattatttgatgaacaataaaaaagctcttacaaagttattacagagtacaaatttgagagaagaatcggaaagagtagaggttttagaactaatggactcatgggcagaaattgatatagacgacgcattagaactattaggctcaacttttaaaaacctttcagtgagatcgtacgccgtaaataggctgaagaaggcatcagacaaggagctggaattgtacttattacagttggtagaagctgtctgttttgagaacctgtccactttttccgacaaatctaacagtgaattcactattgtggatgccgtatcttcgcaaaagctttcgggtgattctatgttactatctacatcgcatgccaaccaaaaattattaaagtccatctcgagtgaatcggaaacttccgggacagaatcgctaccaatcgtcatttctcccttggctgagtttttgattaggagagcactggtcaacccaaggttaggaagttttttctattggtatttaaagtccgagtctgaggacaagccatatttagaccagattttaagttccttttggagtagactggataaaaaatctcggaatatactgaacgatcaagtcaggctaataaatgtgctcagggaatgttgtgaaacaattaagaggctgaaagatactacagccaaaaagatggaattactagtgcatttattggagacgaaagtcaggcctcttgtcaaagtacgaccaattgctttaccactagaccctgatgtgttgatatgcgacgtttgtcctgaaacttcgaaggtatttaaaagctctttatcgccactaaaaataacattcaaaacgaccttaaaccaaccatatcacttaatgtttaaggttggcgatgatttgagacaagatcaactggtagtacagatcataagtttaatgaatgagttattaaaaaatgaaaacgtggacttgaaattgacaccatacaaaattttggcaacaggaccacaagaaggtgccattgaatttatccctaatgacacattagctagcatactaagcaaatatcacggtattcttggctaccttaaactccactatcctgatgagaacgcgacattaggcgtacaaggctgggttttagataattttgtcaaatcttgtgctggctattgtgttattacatacatcttaggtgtcggcgataggcatttagacaacttactagtcacgccagatgggcacttttttcacgcagactttggttatatcttgggtcaggaccccaaaccttttccgccattaatgaaattgccccctcaaattatagaggcgtttgggggtgcagaatcatcaaattatgataaatttcgcagctactgttttgtggcatattcgattttaagaaggaatgcaggcttaatcttaaacctgtttgaattaatgaagacttcgaacatacctgatatcagaatagatcccaatggtgctatattacgtgtaagagagagatttaatttgaatatgtccgaagaagatgccacagtgcattttcagaatctaatcaatgatagtgtaaatgctttgctgcctatcgtgattgatcatttacataatctggcacaatactggcggacctga

SEQ ID NO: 7662 - DNA, 2628 bp, Artificial Sequence
  Description of Artificial Sequence: Synthetic polynucleotide
atgtctttgaacaacataacattctgtgtctcccaggatttggatgttcccttgaaagtgaaaatcaagtctttggaaggacataagccattgttgaagccatctcaaaaaatcttgaaccctgaattaatgttgatagggtctaatgtattcccttctagtgatttgattgtatccttacaggtatttgataaagagagaaacagaaatttaactcttccgatatacacgccgtatattcctttcagaaactctagaacctgggattattggttgactttgcccatacgtatcaaacagcttacctttagcagtcatttacgcattattttgtgggaatacaatggatccaagcaaattccctttttcaatttggaaacgagcatctttaacttaaaagactgtactttaaaaagagggtttgaatccttaaaatttcgttatgatgtgattgaccactgtgaagtggtcactgataacaaagatcaagaaaatttgaataaatattttcagggtgaattcacgagactcccttggcttgacgaaatcactataagcaaattaaggaaacaaagagaaaataggacttggcctcagggcacctttgtcttaaacttagaatttccaatgttagagcttcctgttgtgttcatcgaaagggaaattatgaatactcaaatgaatattccaactttgaagaacaatcctggattaagcacagacttaagagaaccgaataggaatgatcctcaaatcaaaatttctttgggggacaaatatcactccacattgaagttttacgatcctgaccaaccaaacaatgatccaatagaggaaaagtataggagattggaaagagcatctaaaaatgcaaacttggacaagcaagtgaagccggacattaaaaagagggactacttgaataaaatcatcaactacccccctggcactaaattaacagcacatgaaaagggttccatatggaaatataggtattatttgatgaacaataaaaaagctcttacaaagttattacagagtacaaatttgagagaagaaagtgaaagagtagaggttttagaattgatggactcttgggcagaaattgatatagacgacgcattagaattattaggctccacttttaaaaacctttctgtgagatcttacgccgtaaataggttaaagaaggcaagtgacaaggagttagaattgtacttattacagttggtagaagctgtctgttttgagaacctttccactttttccgacaaatctaacagtgaattcactattgtggatgccgtatcttctcaaaagctttctggtgattctatgttattatctacatctcatgccaaccaaaaattattaaagtccatctccagtgaaagtgaaacttccgggacagaatctttaccaatcgtcatttctcccttggctgagtttttgattaggagagcattggtcaacccaaggttaggaagttttttctattggtatttaaagtccgagtctgaggacaagccatatttagaccagattttaagttccttttggagtagattagataaaaaatctagaaatatattaaacgatcaagtcaggttgataaatgtgctcagggaatgttgtgaaacaattaagaggttgaaagatactacagccaaaaagatggaattattggtgcatttattggagacgaaagtcaggcctcttgtcaaagtaagaccaattgctttaccattggaccctgatgtgttgatatgcgacgtttgtcctgaaacttctaaggtatttaaaagctctttatctccattgaaaataacattcaaaacgaccttaaaccaaccatatcacttaatgtttaaggttggcgatgatttgagacaagatcaattggtagtacagatcataagtttaatgaatgagttattaaaaaatgaaaacgtggacttgaaattgacaccatacaaaattttggcaacaggaccacaagaaggtgccattgaatttatccctaatgacacattagctagcatattaagcaaatatcacggtattcttggctaccttaaactccactatcctgatgagaacgcgacattaggcgtacaaggctgggttttagataattttgtcaaatcttgtgctggctattgtgttattacatacatcttaggtgtcggcgataggcatttagacaacttattggtcacgccagatgggcacttttttcacgcagactttggttatatcttgggtcaggaccccaaaccttttccgccattaatgaaattgccccctcaaattatagaggcgtttgggggtgcagaatcttccaattatgataaatttcgcagctactgttttgtggcatattctattttaagaaggaatgcaggcttaatcttaaacttgtttgaattaatgaagacttctaacatacctgatatcagaatagatcccaatggtgctatattacgtgtaagagagagatttaatttgaatatgtccgaagaagatgccacagtgcattttcagaatttgatcaatgatagtgtaaatgctttgttacctatcgtgattgatcatttacataatttggcacaatactggagaacctga

SEQ ID NO: 7663 - DNA, 2349 bp, Saccharomyces cerevisiae
atgacatcatatatcgaaaggctcaagtcggcagcatcgtatcttgatacagttccagatgagcatcatgatttcagaaaacccaccgccaaggttgtaacgacgcaactgactattgctacttcactaggtatttttgctttgctttcgttctcaattctactaaaaaagtggcctagattatacgcaagcagacgatataaagatgacgggaaccttcgcttaccgtcctggaatcagtcaagtttattcggctggttaacagtgttgtataagatacgggacgaacagattctggaatatgcaggtttagatgcgtatgtgtttttgagttttttcaaaatgtgcatcaaattactttctattttttgtttcttctctgtgtgcgttatatctccagtaagatatcattttactggaaaaattgatgacggcaacgatgatgatgacagtgaaagttctttaatacatctggtaaaaagaattgtggagggaagtggcgatggtgacaatcattcagctcccgaacgtacaaatgtgtacctctggatgtatgttctcttcacatatttcttcaccttcatagcaattaaaatggcagttgcggaaacaaagcacgtcgtaagtactaggcaagcttatcttgggaagcaaaatacgattactgatagaacgataaggctctcaggcatcccgatagagcttcgtgattcggaagccttaaagaccagaattgaacaattaaaaatcggcaccgtttcatcaatcactatttgtcgagagtggggtcctttgaacaagctatttcattgtcggaagaaaatactcaaaaacctggaattaaaatattcagaatgtccaagggagctccgtactcgacaaccatattcggagaactatcatttattgggaaacgagcaatcaggcgcagttacacatggagaaaatgttccatcaagcaataataatgacgaggatactatactatattctcaaatttctcttggagagagaccaaaaatgaaaattggatatcgtggtatctttgggaaggaagtagatgccatagagtacctggagcagcaattaaaatttattgatgctgaaattattgaagcgaggaaacaacactactccgcaacacctacggcattcgttacgatggattctgttgctaatgcgcaaatggcagctcaggcggtattagatcctagagtacattacttcataaccagattggctcctgcacctcacgatatcaagtgggatcatgtttgtctttctagaaaggaccggttaacaaaagtttattctactaccgtatttataggcctttcaagtttgtttttagtcattcctgtatcatacttagccacattgctaaatttgaaaacactttcgaaattctggccaagcgtagggcagctactaaaagatcaccagtgggccgctaacattgtaacggggctattaccaacctatctcttcacattgcttaactttggaatcccctatttttacgagtatttgacttcttatcaaggattggtatcatacagcgaagaggaaatctcacttgtttcaaaaaatttcttttatatttttgtcaaccttttcttagttttcacattggcaggtacagcatctaattactgggcgtacctcagcgataccaccaaaattgcttatcaacttgctacatctgtgaaggagttctccttattctatgtcgatttgattatattgcaaggtattggtatgttcccgtttaagttgttattagttggtagtttgatcggctttcctctagtgaaaatcaaggctaagacacctaggcaacggaatgaactttacaatccaccgatatttaactttggactacaattaccacagccaattctgattttgattataacgttgatctacagtgtaatgagcacgaaaattttgacttcagggctggcgtactttattattgggttttacgtctataaatatcaattgatttttgccacagatcatttgccccattctacaggaaaagtatggccattaatttttagaagaatcatcgttggattgctattgtttcaattaacaatgacaggaacactggcaggattcgaaggaggatgggttttgtcatcttgccttttcccgcttccagtagtgacattatgtttcctatatgatttcgagaagaactatttgccgttgtcaaaatatatcgcattgagttcaattcgcgagtacgaaagagacaattctacggtgaattctgccaatgaggaagagtcgtatgcatacccttacgctgtgagtgaattagagggtccgatgttggattga

SEQ ID NO: 7664 - DNA, 2349 bp, Artificial Sequence
  Description of Artificial Sequence: Synthetic polynucleotide
atgacatcttatatcgaaaggctcaagtctgcagcaagttatcttgatacagttccagatgagcatcatgatttcagaaaacccaccgccaaggttgtaacgacgcaattgactattgctacttctttgggtatttttgctttgctttctttctccattttattgaaaaagtggcctagattatacgcaagcagaagatataaagatgacgggaaccttcgcttaccgtcctggaatcagagcagtttattcggctggttaacagtgttgtataagataagagacgaacagattttggaatatgcaggtttagatgcgtatgtgtttttgagttttttcaaaatgtgcatcaaattactttctattttttgtttcttctctgtgtgcgttatatctccagtaagatatcattttactggaaaaattgatgacggcaacgatgatgatgacagtgaaagttctttaatacatttggtaaaaagaattgtggagggaagtggcgatggtgacaatcattctgctcccgaacgtacaaatgtgtacctctggatgtatgttctcttcacatatttcttcaccttcatagcaattaaaatggcagttgcggaaacaaagcacgtcgtaagtactaggcaagcttatcttgggaagcaaaatacgattactgatagaacgataaggctcagcggcatcccgatagagcttcgtgattctgaagccttaaagaccagaattgaacaattaaaaatcggcaccgtttcttctatcactatttgtagagagtggggtcctttgaacaagttatttcattgtagaaagaaaatactcaaaaacttggaattaaaatattctgaatgtccaagggagctccgtactaggcaaccatattctgagaactatcatttattgggaaacgagcaaagtggcgcagttacacatggagaaaatgttccatccagcaataataatgacgaggatactatactttattctcaaatttctcttggagagagaccaaaaatgaaaattggatatcgtggtatctttgggaaggaagtagatgccatagagtacttggagcagcaattaaaatttattgatgctgaaattattgaagcgaggaaacaacactactccgcaacacctacggcattcgttacgatggattctgttgctaatgcgcaaatggcagctcaggcggtattagatcctagagtacattacttcataaccagattggctcctgcacctcacgatatcaagtgggatcatgtttgtctttctagaaaggacagattaacaaaagtttattctactaccgtatttataggcctttccagtttgtttttagtcattcctgtatcttacttagccacattgttgaatttgaaaacactttctaaattctggccaagcgtagggcagttgttgaaagatcaccagtgggccgctaacattgtaacggggttattaccaacctatctcttcacattgcttaactttggaatcccctatttttacgagtatttgacttcttatcaaggattggtatcttacagcgaagaggaaatctctcttgtttccaaaaatttcttttatatttttgtcaaccttttcttagttttcacattggcaggtacagcatctaattactgggcgtacctcagcgataccaccaaaattgcttatcaacttgctacatctgtgaaggagttctccttattctatgtcgatttgattatattgcaaggtattggtatgttcccgtttaagttgttattagttggtagtttgatcggctttcctttagtgaaaatcaaggctaagacacctaggcaaagaaatgaactttacaatccaccgatatttaactttggattacaattaccacagccaattttaattttgattataacgttgatctacagtgtaatgagcacgaaaattttgacttctgggttggcgtactttattattgggttttacgtctataaatatcaattgatttttgccacagatcatttgccccattctacaggaaaagtatggccattaatttttagaagaatcatcgttggattgttgttgtttcaattaacaatgacaggaacattagcaggattcgaaggaggatgggttttgtcttcttgccttttcccgcttccagtagtgacattatgtttcctctatgatttcgagaagaactatttgccgttgagtaaatatatcgcattgagttctattcgcgagtacgaaagagacaattctacggtgaattctgccaatgaggaagagtcttatgcatacccttacgctgtgagtgaattagagggtccgatgttggattga

SEQ ID NO: 7665 - DNA, 966 bp, Saccharomyces cerevisiae
atgatttgcataacgtgcatgcggcccgtagattccctttatacagtgtactcgaatgaccacattcagctgacagattgtccatattgccaagagacagtagacaaatatgttgagatagataatgtcctgttattcattgatttgcttctattaaaagcaggtgcatatagacacttggtattcaatgctttggaattgcatctctcaaaatatccgaaaagaaaagcgctaaatgattgccagtgtttgcgtgactatacgcaagctttgttatttaacgtaaagaactggttttgtaaatatgaccggttaaatcgcctttggcttctactattatcattcgagatttatttaacttgggttactgaggagagtaaatacatctactatttgaaccgtaacaataatgatggtaagctcatcatgctttcaaaaaaattaccagagagcttcaaatgggactcggcaatcatgcgcaataccattacaagtaaagtgtttacctggagcccaccaatacaatatctttactttgcaagttattgtattcttgacgtttctttattccacacctttacccagtatttcatactgaaaaagttgcattggaagcactattccgtttcttcaaaggatgtcatatcatatacgatcttattatcgtacggtgccaaaatttttccgatattgatgttgatatggccttatgatactctaatttcgatgagtatcattaagtgggtagctaatctctatattattgaatcgttgaagattgtaactaatctttcctattggaatatcataaagatttttataagtgtgtctttattacgatatttcatggttaagccaatacttatagttttcgtggcaaagtttaacttttcagttattaagaatttaatacatcaggagtttatactactactacagaagtcaggaacttatttattgttataa

SEQ ID NO: 7666 - DNA, 966 bp, Artificial Sequence
  Description of Artificial Sequence: Synthetic polynucleotide
atgatttgcataacgtgcatgagacccgtagattccctttatacagtgtactctaatgaccacattcagttgacagattgtccatattgccaagagacagtagacaaatatgttgagatagataatgtccttttattcattgatttgcttttattaaaagcaggtgcatatagacacttggtattcaatgctttggaattgcatctctctaaatatccgaaaagaaaagcgttgaatgattgccagtgtttgcgtgactatacgcaagctttgttatttaacgtaaagaactggttttgtaaatatgacagattaaatcgcctttggcttttattattatctttcgagatttatttaacttgggttactgaggagagtaaatacatctactatttgaaccgtaacaataatgatggtaagctcatcatgctttctaaaaaattaccagagagcttcaaatgggactctgcaatcatgcgcaataccattacaagtaaagtgtttacctggagcccaccaatacaatatctttactttgcaagttattgtattcttgacgtttctttattccacacctttacccagtatttcatattgaaaaagttgcattggaagcactattccgtttcttccaaggatgtcatatcttatacgatcttattatcttacggtgccaaaatttttccgatattgatgttgatatggccttatgatactttgatttccatgagtatcattaagtgggtagctaatctctatattattgaatctttgaagattgtaactaatctttcctattggaatatcataaagatttttataagtgtgtctttattaagatatttcatggttaagccaatacttatagttttcgtggcaaagtttaacttttctgttattaagaatttaatacatcaggagtttatattattattgcagaagagtggaacttatttattgttatga

SEQ ID NO: 7667 - DNA, 819 bp, Saccharomyces cerevisiae
atgtctcgcgttggtgtcatggtattaggacctgcaggtgcggggaaaagcacattttgtaattccattatatcacatatgcaaactgtaggacgaagagctcatattgtaaatttagaccctgccgcagaagctaccaagtatgaatttactattgacattagagatttaatttccttagatgatgtcatggaagaaatggatttgggccccaatggtgcgctaatatattgcttcgaatatcttttgaaaaatctagactggcttgacgaagagatcggggatttcaacgatgaatatttaatctttgactgtcccggtcaaattgaactctacacgcatatccctgtcttaccgaacatagtgcgccatttaactcaacaactgaatttcaacctttgcgccacatatcttttggaagcgccatttgtgatagatagctcaaaattttttagcggtgcactatctgctatgtctgcgatgattctattggaactaccccatatcaatgtgttgagcaaactagacttgataaaaggcgacatcaataagaaaaaactgaaaagatttttgaatcccgatgcaatgttattaatggaaacggaaggaatgaatcaagcatccaaccctaaatttctaagactgaaccagtgcatagccaacctcgtcgatgatttcggtatggttcaatttttacctttggaatctaataatcctgacagtatagaaaccatattatcgtatgtcgatgatataacacaatgggcagaaggacaagaacagaaagagcctaacgaccaaatagatgtcgaagaatag

SEQ ID NO: 7668 - DNA, 819 bp, Artificial Sequence
  Description of Artificial Sequence: Synthetic polynucleotide
atgtctcgcgttggtgtcatggtattaggacctgcaggtgcggggaaaagcacattttgtaattccattatatctcatatgcaaactgtaggaagaagagctcatattgtaaatttagaccctgccgcagaagctaccaagtatgaatttactattgacattagagatttaatttccttagatgatgtcatggaagaaatggatttgggccccaatggtgcgttaatatattgcttcgaatatcttttgaaaaatttggactggcttgacgaagagatcggggatttcaacgatgaatatttaatctttgactgtcccggtcaaattgaactctacacgcatatccctgtcttaccgaacatagtgcgccatttaactcaacaattgaatttcaacctttgcgccacatatcttttggaagcgccatttgtgatagatagcagtaaattttttagcggtgcattatctgctatgtctgcgatgattttattggaattgccccatatcaatgtgttgagcaaattagacttgataaaaggcgacatcaataagaaaaaattgaaaagatttttgaatcccgatgcaatgttattaatggaaacggaaggaatgaatcaagcatccaaccctaaatttttaagattgaaccagtgcatagccaacctcgtcgatgatttcggtatggttcaatttttacctttggaatctaataatcctgacagtatagaaaccatattatcttatgtcgatgatataacacaatgggcagaaggacaagaacagaaagagcctaacgaccaaatagatgtcgaagaatga

SEQ ID NO: 7669 - DNA, 1164 bp, Saccharomyces cerevisiae
atgagcactgcaactacaacagttactacctccgatcaggcttctcatcctaccaagatatattgctccggtttgcaatgtggtagagaaacttcgtcccaaatgaaatgccctgtttgtctaaaacaaggcatcgtttccattttctgcgacacaagctgttatgaaaacaactacaaagctcacaaagctttgcacaatgctaaggacggcttggaaggtgcttatgatcctttcccaaaattcaaatattctggtaaagtgaaggcttcatatccacttaccccaagaaggtatgtccctgaagatattcctaaaccggactgggccgctaatgggctaccagtcagtgaacaaagaaatgatagacttaacaacatccctatatacaagaaagatcaaattaagaagattagaaaggcatgtatgttgggtagagaagttcttgatattgccgctgcccatgtcagaccaggcatcactacagatgaattagatgaaatcgtccacaatgaaacaattaagagaggtgcctacccttcccctcttaattattacaactttcctaaatcgctttgtacctctgtcaatgaagttatttgtcacggtgtgcccgataaaactgtcttgaaggaaggtgatattgtcaatttagatgtttccttatactaccaaggttatcatgcagacttgaatgagacatattatgtcggcgaaaacatttctaaggaagctcttaatactactgagacctcaagagaatgtttgaaactagccattaaaatgtgtaagccaggtaccaccttccaagagttaggtgatcatattgaaaaacacgctaccgaaaataagtgcagtgtagtaagaacttattgtggacatggtgttggtgaatttttccattgttccccaaatattccccactacgccaagaatagaacacctggtgttatgaaaccaggtatggttttcaccatcgaacctatgattaatgaaggtacttggaaggatatgacctggcctgatgactggacttctaccacccaagacggtaaactgagtgctcaatttgaacatacactgttggttaccgaacatggtgttgaaatcctaacagccaggaataagaaatcaccaggtggcccaagacagagaattaaatag

SEQ ID NO: 7670 - DNA, 1164 bp, Artificial Sequence
  Description of Artificial Sequence: Synthetic polynucleotide
atgagcactgcaactacaacagttactacctccgatcaggcttctcatcctaccaagatatattgctccggtttgcaatgtggtagagaaacttcttcccaaatgaaatgccctgtttgtttgaaacaaggcatcgtttccattttctgcgacacaagctgttatgaaaacaactacaaagctcacaaagctttgcacaatgctaaggacggcttggaaggtgcttatgatcctttcccaaaattcaaatattctggtaaagtgaaggcttcttatccacttaccccaagaaggtatgtccctgaagatattcctaaaccggactgggccgctaatgggttaccagtcagtgaacaaagaaatgatagacttaacaacatccctatatacaagaaagatcaaattaagaagattagaaaggcatgtatgttgggtagagaagttcttgatattgccgctgcccatgtcagaccaggcatcactacagatgaattagatgaaatcgtccacaatgaaacaattaagagaggtgcctacccttcccctcttaattattacaactttcctaaatctctttgtacctctgtcaatgaagttatttgtcacggtgtgcccgataaaactgtcttgaaggaaggtgatattgtcaatttagatgtttccttatactaccaaggttatcatgcagacttgaatgagacatattatgtcggcgaaaacatttctaaggaagctcttaatactactgagacctccagagaatgtttgaaattggccattaaaatgtgtaagccaggtaccaccttccaagagttaggtgatcatattgaaaaacacgctaccgaaaataagtgcagtgtagtaagaacttattgtggacatggtgttggtgaatttttccattgttccccaaatattccccactacgccaagaatagaacacctggtgttatgaaaccaggtatggttttcaccatcgaacctatgattaatgaaggtacttggaaggatatgacctggcctgatgactggacttctaccacccaagacggtaaattaagtgctcaatttgaacatacattattggttaccgaacatggtgttgaaatcttaacagccaggaataagaaatctccaggtggcccaagacagagaattaaatga

SEQ ID NO: 7671 - DNA, 429 bp, Saccharomyces cerevisiae
atgaaagtaggtggcatagaagacagacaactggaagccttaaaaagggcggcactgaaggcgtgtgaactctcctatagcccctattctcacttccgtgtcggttgttccatattaacaaataacgatgttatcttcactggtgctaatgtcgagaatgcaagctacagtaattgtatatgtgcagaacgatctgctatgatacaagttctaatggcaggccatcgctcaggatggaaatgcatggtcatttgtggcgattctgaggaccagtgtgtttccccttgcggcgtttgcaggcagtttatcaatgaatttgtggtcaaggactttccaatagtcatgcttaattccacaggttctcgttctaaagtcatgacaatgggagaactgctgcccatggcttttggtccatctcatttaaactag

SEQ ID NO: 7672 - DNA, 429 bp, Artificial Sequence
  Description of Artificial Sequence: Synthetic polynucleotide
atgaaagtaggtggcatagaagacagacaattggaagccttaaaaagggcggcattgaaggcgtgtgaactctcctatagcccctattctcacttccgtgtcggttgttccatattaacaaataacgatgttatcttcactggtgctaatgtcgagaatgcaagctacagtaattgtatatgtgcagaaagatctgctatgatacaagttttgatggcaggccatcgctctggatggaaatgcatggtcatttgtggcgattctgaggaccagtgtgtttccccttgcggcgtttgcaggcagtttatcaatgaatttgtggtcaaggactttccaatagtcatgcttaattccacaggttctcgttctaaagtcatgacaatgggagaattattgcccatggcttttggtccatctcatttaaactga

SEQ ID NO: 7673 - DNA, 1080 bp, Saccharomyces cerevisiae
atggccttggtctctagaaggtcgacaagatcggaaagcacctcaataacaaaggaagagcatacaggagaaggttcattgacgaagttgttcttccgatggcttgttaccttggagggtgatcaggatataaacgatggaaaaggttatatatcgttaccgaatgtctcgaattatatattcttccttggtggcaggttcaggacagtaaagggcgccaaaccgttgtggttaggtgttctccttgctattgtatgtcccatggttctcttctccatatttgaggctcacaaattgtggcatacccaaaatggttataaagtgctggtcattttcttctattatttttgggtcataacgctagcatcctttatcagaacagccactagtgatcctggcgttcttccgagaaatattcatttaagtcaactaagaaataattatcagatcccgcaagaatattacaacttgataacactaccaacacattcttcaatttcaaaagacattactatcaagtattgtccatcatgtaggatatggagaccacctcggtcttctcactgttccacatgtaacgtctgcgtaatggttcatgaccaccattgcatatgggtcaataattgcataggaaaaaggaactaccggttctttttaatattcctgttaggtgcaatactttcgtccgtcatattattaactaattgtgccatccatattgcacgggaatcaggggggcctcgcgattgtcccgttgcaatattgttactttgctatgcagggctaaccttatggtatccggcaatactgtttacttatcacatatttatggcaggtaatcagcaaacaacaagggaatttttgaaaggtattggatcgaaaaaaaaccctgtattccatcgtgtggtcaaggaggaaaacatatataataaggggtcctttttgaaaaatatgggtcacttgatgttagaaccaaggggcccaagctttgtaagtgccagaaagccacatgaagctggagattggagatttatggatttatcgccagcacacagctttgaaaaaatacagaaaatataa

SEQ ID NO: 7674 - DNA, 1080 bp, Artificial Sequence
  Description of Artificial Sequence: Synthetic polynucleotide
atggccttggtctctagaaggtctacaagaagtgaaagcaccagtataacaaaggaagagcatacaggagaaggttctttgacgaagttgttcttccgttggcttgttaccttggagggtgatcaggatataaacgatggaaaaggttatatatctttaccgaatgtctccaattatatattcttccttggtggcaggttcaggacagtaaagggcgccaaaccgttgtggttaggtgttctccttgctattgtatgtcccatggttctcttctccatatttgaggctcacaaattgtggcatacccaaaatggttataaagtgttggtcattttcttctattatttttgggtcataacgttggcatcctttatcagaacagccactagtgatcctggcgttcttccgagaaatattcatttaagtcaattgagaaataattatcagatcccgcaagaatattacaacttgataacattaccaacacattcttccatttccaaagacattactatcaagtattgtccaagttgtaggatatggagaccacctagatcttctcactgttccacatgtaacgtctgcgtaatggttcatgaccaccattgcatatgggtcaataattgcataggaaaaaggaactacagattctttttaatattcttattaggtgcaatactttcctccgtcatattattaactaattgtgccatccatattgcaagagaatctggggggcctcgcgattgtcccgttgcaatattgttactttgctatgcagggttaaccttatggtatccggcaatattgtttacttatcacatatttatggcaggtaatcagcaaacaacaagggaatttttgaaaggtattggatctaaaaaaaaccctgtattccatcgtgtggtcaaggaggaaaacatatataataaggggtcctttttgaaaaatatgggtcacttgatgttagaaccaaggggcccaagctttgtaagtgccagaaagccacatgaagctggagattggagatttatggatttatctccagcacacagctttgaaaaaatacagaaaatatga

SEQ ID NO: 7675 - DNA, 4671 bp, Saccharomyces cerevisiae
atgtctgcagtaggtgcgctattagcaagggagtacaacgtgactgccgaaaaatgcgactttttcctagaaaatggttcttttgattcagtgatagcagcattgccagcgctaaatcaggaacaagagactgtaactcaaaaagttagcaagaacggaaaagaattaatcaacgttgcctcggtaaatatcgaaataccagagcgaataagtctttccaacaacggtaggcagttatttaaatttattgttgatatagagatcttaccttgtgaaaatgataacgaggcaacacttgttgtgtcgtcagattccgtatccttatttcaaattggatttaaaatggagaacaattcaaaaatcgctgttgacaaacaacttccgctgatcttggatatatgtgctcataaaaaccaagaaagggccctacgaaatcagttagaaaatcgtaaatctttagaacgcaaaccatcaagaaagagaagaaaaaaaaattcaaatgttaacgatcctgaaaaattactaaaaagtcgtatacacgaattatctttgtcctacaaagattttgaatgctctccagtcgtattccgatacaatgattcctctttaacatgggttttatcttttaatttgaagttgaagtttttaaataataaattcaaccggttttccgtggaggctaaccaaatactggacttgacgttctctaatagggacgagaacgaatttgagcgatatcacaagcacagccatatccattcaaacttcattcaaaaacaatttatttctcaaatcttggaatatagtaaagataggctatcaaagatcaaaccgttcttaccccaatctataccagacctaaaagttaacctcttaccatttcaaagagagagcgttgagtggatgctaattaaagaagggcatggtaattctcttagtgatacacctacagtcatcgacgaagtagggcttatagattttatgaacgagtactatgcatacggttacgagctcattgcacgcagccctgacgaggtagggccatcattgttatggaacaaattaacaggatatattctaactacagaagatgctgcacatttgtacaaccaatataggaaggaaaggttaagcggcgactacccagtttgtgcaaagggggtgttagcagaagagatggggttgggcaaaactattgaaattttatcactaatactcttaaatagaaggaaattgaaggactcagaggcaacatttattgacgatgaaaatagaacaatcacgaagacaaagacgactttgattatctgtcccaatgctatcttaaaacaatggctcgaagaaatcgaattacacgcaaattccttaaaatggtatacctatagaggatataatgagataatgaaagattgcaaaactgtggacgaagctgttcaacaattgtgccaatacgatattatagttacatcatataacattattgccacggaggtccatcatgctgagtttaaccgtagtatcagatcgagaaggttgaaaagcccaaagtatgactattcttcaccgttagctttgatgcagttttatagaatcattctggatgaagttcaaatgctacgtagttcatcaacatattctgcaaaatgcacgagtttacttcatagaatacacacttggggtgtttccgggactccaatacagaacatttacaactttaggatgatcatgtcttatttaaagctgcatccattttgtgatgaggtagactttattcggacacttcaagaagaaattaaactaagaaatgaggctaaagattacactagtaatgattttgtatgccaattaaagggcgttcggttttctatcaaggattgtatgaacattttttacaggtatgatctttgcataaggcattcgaaagccaatgttgcgtctcagattcatattccgcggcaacacaacttcatcattcccctggagtttgcgcctatcgagtgggacaactatttaaatctttggaacaattttttagagttgagtggctataattcggatggcagtggatcaccccgtgtaagcaatgcctttttaaacgaatggttgtctaggctgcgatatatatgttgccatgcattatttccagaaattttaagtacccgacagaagcgccttcacgggcacttgtcaagaatttcaaatatagacgatatcttaatatccatgcgaatggatgcatttgacagtttaattggctattacagagagagattccatttatcgatcaagcaggcacagtatgaacttgaaatttccaatactccggccaaagcccttgaatcatttatcaaaatcagagatgatttgatgatacacatacgccaaaaattcaacgttgaggatccgtttgataagtcgttaaacctcagtgaagatgaggacgaacatatggacgagaggtttggtgagaaggaaacatcttcaggcgacgaaagcgatagagaaataaatggtgctaaaaaccatgataatcacaacaatgacggaatgttatccaaccacctgaagaagaaaggattacgtgctatgatgaatttactgcatgattgctacttcttcctcggttctgtttactataacttgggcactcgtaagctagaagaggcggacgacaagcatcgaaaagagaagactgaagaagtggtgtattctgatgtttttccaaaaaatgagttagaggaaattgaagagaatagacttttagaacaagaaaattatgcgaatgcagaaattttgaggaagtcaatcctctcctctgaggctagaaaagttgatatgactattaaaatggccagaactaagtttgctcctatgacgagcaatatacctttgcgattaatcaatattgaatttgaccacaaaaatgactactcatctaatttagcagtatctcgttgtttcaagtctttgagtaagttgatagaagggttgaatgaacaaactaaaaacttcaacgagttattggatgagttactcattattatctatgaacctgtccacaggacagaggacgatgatagcactaataaaattatcggtaatgaagaatattcaacatcgattgacagtcaagataagatattcagtcttcttggttgcttggagataattttacagaatagggacaatattttaacttcagaatcagaagttaaaattccgaagcatttggtaccggaaggttcaataatttcaaaatatcaaaagcagttattgaacagcttgcgcttgatttcaggaacacctctacgaactgtttttgatgaactgaagaacagcaggatagtaagacggatatcctcaagcaatgaaagtgaatctaccattcaaaattttgaggactacttacttcagtacgaagttgaaagtaaaagcctgtttaagtacaataaacaggtaagagaatctttgaaaatcctgggatcgatttataatgccaagacggaatattatagtcaattacagaggatttccgattcattggtgtccttgcactctttgagtgctccacaactcagccatctaataagaactatcaataagtcattgggcggtacactagatgcaaaaatcaataacattgaatcacggctgatatatttaaaaaatttgtccagattgaaagacacattaaacgataatcaaatattgagctgctctatctgtttgggagaagttgaaataggtgctatcattaagtgtggacattatttttgcaagagttgtatccttacgtggctacgagcccatagtaaatgccctatatgcaaaggtttctgtagtatatcggaagtctataactttaagttcaagaactcaacggagaagagggaaaaagaaattcaagagccacgaagagagggcgccgattcgtctcaagataattcaaatgaaaactcgattatatccaatatgagtgaagtagaaaaattattcggaaataaatacgagcaattccatcaaattaatgaagtccatcaaattcacataaaggaaagttttggtgctaagattgatttcgtcatcaagttaatatcttacctgaggctaaaaagtgagcaggaaaacgctgatccgccacaagttattctatactctcaaaagacagaatatttaaaggtcattggtaaggtattaaagttgtatcacattgaacacttggcatgtctatctaatacagccaatgttggcgaaactataaataacttcaaacgccagccttccgtcacttgcctacttttgaatgtgaaaactttaggtgccggcctgaatttgataaatgcaaaacatattttcctactagatcctatccttaataatagtgatgaattacaagctatgggaaggaataatcgtataggacaagatgaagaaacttttgtgtggaatttcatgatcagaaataccgttgaagaaaacatcctcagatataaatgtatactcgaagagcgcaaaagaaaggagaagtcaaaaaaaggcgataaatacgacgaagcacaagatgaaacggataatgaggaaagcgatgatgcgaagtttgagataagcgtggtagaccaagaagtcagtaatgaacacttatggaactgcttttttcacggtagtgattag

SEQ ID NO: 7676 - DNA, 4671 bp, Artificial Sequence
  Description of Artificial Sequence: Synthetic polynucleotide
atgtctgcagtaggtgcgttattagcaagggagtacaacgtgactgccgaaaaatgcgactttttcttggaaaatggttcttttgattctgtgatagcagcattgccagcgttgaatcaggaacaagagactgtaactcaaaaagttagcaagaacggaaaagaattaatcaacgttgcctctgtaaatatcgaaataccagagagaataagtctttccaacaacggtaggcagttatttaaatttattgttgatatagagatcttaccttgtgaaaatgataacgaggcaacacttgttgtgtcttctgattccgtatccttatttcaaattggatttaaaatggagaacaattctaaaatcgctgttgacaaacaacttccgttgatcttggatatatgtgctcataaaaaccaagaaagggccttaagaaatcagttagaaaatcgtaaatctttagaacgcaaaccatctagaaagagaagaaaaaaaaatagtaatgttaacgatcctgaaaaattattgaaaagtcgtatacacgaattatctttgtcctacaaagattttgaatgctctccagtcgtattcaggtacaatgattcctctttaacatgggttttatcttttaatttgaagttgaagtttttaaataataaattcaacagattttccgtggaggctaaccaaatattggacttgacgttctctaatagggacgagaacgaatttgagagatatcacaagcacagccatatccattccaacttcattcaaaaacaatttatttctcaaatcttggaatatagtaaagataggttatccaagatcaaaccgttcttaccccaatctataccagacttgaaagttaacctcttaccatttcaaagagagagcgttgagtggatgttgattaaagaagggcatggtaattctcttagtgatacacctacagtcatcgacgaagtagggcttatagattttatgaacgagtactatgcatacggttacgagctcattgcacgcagccctgacgaggtagggccatctttgttatggaacaaattaacaggatatattttgactacagaagatgctgcacatttgtacaaccaatataggaaggaaaggttaagcggcgactacccagtttgtgcaaagggggtgttagcagaagagatggggttgggcaaaactattgaaattttaagtttgatactcttaaatagaaggaaattgaaggactctgaggcaacatttattgacgatgaaaatagaacaatcacgaagacaaagacgactttgattatctgtcccaatgctatcttaaaacaatggctcgaagaaatcgaattacacgcaaattccttaaaatggtatacctatagaggatataatgagataatgaaagattgcaaaactgtggacgaagctgttcaacaattgtgccaatacgatattatagttacatcttataacattattgccacggaggtccatcatgctgagtttaaccgtagtatcagatctagaaggttgaaaagcccaaagtatgactattcttctccgttagctttgatgcagttttatagaatcattttagatgaagttcaaatgcttcgtagttcttctacatattctgcaaaatgcacgagtttacttcatagaatacacacttggggtgtttccgggactccaatacagaacatttacaactttaggatgatcatgtcttatttaaagttgcatccattttgtgatgaggtagactttattagaacacttcaagaagaaattaaattgagaaatgaggctaaagattacactagtaatgattttgtatgccaattaaagggcgttagattttctatcaaggattgtatgaacattttttacaggtatgatctttgcataaggcattctaaagccaatgttgcgtctcagattcatattccgagacaacacaacttcatcattcccttggagtttgcgcctatcgagtgggacaactatttaaatctttggaacaattttttagagttgagtggctataattctgatggcagtggaagtccccgtgtaagcaatgcctttttaaacgaatggttgtctaggcttcgttatatatgttgccatgcattatttccagaaattttaagtaccagacagaagcgccttcacgggcacttgtccagaatttctaatatagacgatatcttaatatccatgagaatggatgcatttgacagtttaattggctattacagagagagattccatttatctatcaagcaggcacagtatgaacttgaaatttccaatactccggccaaagcccttgaaagttttatcaaaatcagagatgatttgatgatacacatacgccaaaaattcaacgttgaggatccgtttgataagtctttaaacctcagtgaagatgaggacgaacatatggacgagaggtttggtgagaaggaaacatcttctggcgacgaaagcgatagagaaataaatggtgctaaaaaccatgataatcacaacaatgacggaatgttatccaaccacttgaagaagaaaggattacgtgctatgatgaatttattacatgattgctacttcttcctcggttctgtttactataacttgggcactcgtaagttggaagaggcggacgacaagcatagaaaagagaagactgaagaagtggtgtattctgatgtttttccaaaaaatgagttagaggaaattgaagagaatagacttttagaacaagaaaattatgcgaatgcagaaattttgaggaagtctatcctctcctctgaggctagaaaagttgatatgactattaaaatggccagaactaagtttgctcctatgacgagcaatatacctttgagattaatcaatattgaatttgaccacaaaaatgactactcttctaatttagcagtatctcgttgtttcaagtctttgagtaagttgatagaagggttgaatgaacaaactaaaaacttcaacgagttattggatgagttactcattattatctatgaacctgtccacaggacagaggacgatgatagcactaataaaattatcggtaatgaagaatattctacatccattgacagtcaagataagatattcagtcttcttggttgcttggagataattttacagaatagggacaatattttaacttctgaaagtgaagttaaaattccgaagcatttggtaccggaaggttccataatttccaaatatcaaaagcagttattgaacagcttgcgcttgatttctggaacacctttgagaactgtttttgatgaattgaagaacagcaggatagtaagaagaatatcctctagcaatgaaagtgaatctaccattcaaaattttgaggactacttacttcagtacgaagttgaaagtaaaagcttgtttaagtacaataaacaggtaagagaatctttgaaaatcttgggatctatttataatgccaagacggaatattatagtcaattacagaggatttccgattctttggtgtccttgcactctttgagtgctccacaactcagccatttgataagaactatcaataagtctttgggcggtacattagatgcaaaaatcaataacattgaatctaggttgatatatttaaaaaatttgtccagattgaaagacacattaaacgataatcaaatattgagctgctctatctgtttgggagaagttgaaataggtgctatcattaagtgtggacattatttttgcaagagttgtatccttacgtggttaagagcccatagtaaatgccctatatgcaaaggtttctgtagtatatctgaagtctataactttaagttcaagaactccacggagaagagggaaaaagaaattcaagagccaagaagagagggcgccgattcttctcaagataatagtaatgaaaactctattatatccaatatgagtgaagtagaaaaattattcggaaataaatacgagcaattccatcaaattaatgaagtccatcaaattcacataaaggaaagttttggtgctaagattgatttcgtcatcaagttaatatcttacttgaggttgaaaagtgagcaggaaaacgctgatccgccacaagttattttatactctcaaaagacagaatatttaaaggtcattggtaaggtattaaagttgtatcacattgaacacttggcatgtttgtctaatacagccaatgttggcgaaactataaataacttcaaacgccagccttccgtcacttgcttgcttttgaatgtgaaaactttaggtgccggcttgaatttgataaatgcaaaacatattttcttattagatcctatccttaataatagtgatgaattacaagctatgggaaggaataatcgtataggacaagatgaagaaacttttgtgtggaatttcatgatcagaaataccgttgaagaaaacatcctcagatataaatgtatactcgaagagcgcaaaagaaaggagaagagtaaaaaaggcgataaatacgacgaagcacaagatgaaacggataatgaggaaagcgatgatgcgaagtttgagataagcgtggtagaccaagaagtcagtaatgaacacttatggaactgcttttttcacggtagtgattga

SEQ ID NO: 7677 - DNA, 1833 bp, Saccharomyces cerevisiae
atgcttaaaataaaggcccttttctcgaaaaagaaaccggatcaggcagatttgtctcaggaatctaaaaaaccattcaagggtaagaccaggtcaagcggtacaaataacaaagatgtttcccagattacttcttcccctaagaaaagctttcaggacaaaaatatagttcagtacccgagtgttgtcgcagatgaccatcatatgaagtctttaaccgatgaattagtaaccacgatagactcggactcttcaccgagtgataatattaccacggaaaatgtggaaacagttacttccgtgccagctatcgatgtccatgaaagtagtgaaggtcaattaagttccgaccccttaatatctgacgaatctctttcggaacaaagcgagattatcagtgatatccaggatgacagtactgatgatgacaatatggaagatgaaattccggaaaaatccttcctcgaacaaaaggaattgataggttacaagctgatcaataaaatcggtgaaggtgctttttcaaaagtctttagagccatacctgctaaaaatagttctaatgaatttttaactaaaaactataaagctgttgccattaaagttatcaaaaaggcagatttatcctcgattaatggtgatcatcgtaagaaggacaaagggaaggacagcactaaaacttcttccagagatcaagtcttgaaggaagttgcactacataagacggtttccgctggttgttcacaaattgtcgcgttcatagacttccaagaaacagatagctattattatattattcaagagttactaaccggtggggaaatcttcggcgaaattgttaggttgacctatttcagtgaagatttatcaaggcatgtaatcaaacaattagcactggctgttaaacatatgcattcactaggtgtagtgcatcgtgatataaaacctgagaatcttctttttgaaccgattgaattcacacgctctataaaaccaaaattgaggaaatcggatgatccgcaaacaaaggcagacgagggaattttcacaccaggagttggtggtggtggaattggtatagtaaaactagctgattttggtttgtctaaacaaatattttccaagaacaccaagactccttgtggtacagtcggttacactgcccctgaagttgtcaaagatgagcattattctatgaaagtggatatgtgggggattggttgcgttttgtacacaatgttatgtgggttcccgccattctatgatgagaaaattgacactttaactgaaaaaatatcaaggggtgagtatacctttctgaaaccttggtgggatgaaatcagcgccggtgccaagaatgccgtggctaagctattagaactagagccgtctaaaagatacgacattgaccagtttttggacgacccatggttaaatacattcgattgtttaccaaaggagggcgaatcttcacaaaagaaagcaggtacttccgaaagacgccatccgcataagaaacaattccaactatttcaaagagactcctcgctactgttttcaccagctgctgttgctatgcgtgacgcctttgatattggtaatgctgtgaaacgtaccgaagaagaccgtatgggaacacgtggaggattaggctcgcttgctgaggacgaagaattggaagatagttacagtggcgcccaaggcgatgaacagctggaacaaaatatgttccaattaacgctggatacgtccacgattctgcaaagaagaaaaaaagttcaagaaaatgacgtagggcctacaattccaataagcgccactatcagggaatag

SEQ ID NO: 7678 - DNA, 1833 bp, Artificial Sequence
  Description of Artificial Sequence: Synthetic polynucleotide
atgcttaaaataaaggcccttttctccaaaaagaaaccggatcaggcagatttgtctcaggaatctaaaaaaccattcaagggtaagaccaggagcagcggtacaaataacaaagatgtttcccagattacttcttcccctaagaaaagctttcaggacaaaaatatagttcagtacccgagtgttgtcgcagatgaccatcatatgaagtctttaaccgatgaattagtaaccacgatagacagtgactcttctccgagtgataatattaccacggaaaatgtggaaacagttacttccgtgccagctatcgatgtccatgaaagtagtgaaggtcaattaagttccgaccccttaatatctgacgaatctctttctgaacaaagcgagattatcagtgatatccaggatgacagtactgatgatgacaatatggaagatgaaattccggaaaaatccttcctcgaacaaaaggaattgataggttacaagttaatcaataaaatcggtgaaggtgctttttccaaagtctttagagccatacctgctaaaaatagttctaatgaatttttaactaaaaactataaagctgttgccattaaagttatcaaaaaggcagatttatccagtattaatggtgatcatcgtaagaaggacaaagggaaggacagcactaaaacttcttccagagatcaagtcttgaaggaagttgcattgcataagacggtttccgctggttgttctcaaattgtcgcgttcatagacttccaagaaacagatagctattattatattattcaagagttattaaccggtggggaaatcttcggcgaaattgttaggttgacctatttcagtgaagatttatctaggcatgtaatcaaacaattagcattggctgttaaacatatgcattctttgggtgtagtgcatcgtgatataaaacctgagaatcttctttttgaaccgattgaattcacacgctctataaaaccaaaattgaggaaatctgatgatccgcaaacaaaggcagacgagggaattttcacaccaggagttggtggtggtggaattggtatagtaaaattggctgattttggtttgtctaaacaaatattttccaagaacaccaagactccttgtggtacagtcggttacactgcccctgaagttgtcaaagatgagcattattctatgaaagtggatatgtgggggattggttgcgttttgtacacaatgttatgtgggttcccgccattctatgatgagaaaattgacactttaactgaaaaaatatctaggggtgagtatacctttttgaaaccttggtgggatgaaatcagcgccggtgccaagaatgccgtggctaagcttttagaattagagccgtctaaaagatacgacattgaccagtttttggacgacccatggttaaatacattcgattgtttaccaaaggagggcgaatcttctcaaaagaaagcaggtacttccgaaagacgccatccgcataagaaacaattccaattatttcaaagagactcctctttacttttttctccagctgctgttgctatgcgtgacgcctttgatattggtaatgctgtgaaacgtaccgaagaagaccgtatgggaacacgtggaggattaggctctcttgctgaggacgaagaattggaagatagttacagtggcgcccaaggcgatgaacagttagaacaaaatatgttccaattaacgttagatacgtccacgattttacaaagaagaaaaaaagttcaagaaaatgacgtagggcctacaattccaataagcgccactatcagggaatga

SEQ ID NO: 7679 - DNA, 3135 bp, Saccharomyces cerevisiae
atgtctgattcccagcaatccattaaggttctagaagaactattccagaagttatctgttgccactgctgacaacagacacgaaatcgcttctgaagtcgcttctttcttgaatggtaacatcattgaacatgatgttccagaacacttcttcggtgaattggccaagggtatcaaggacaagaagaccgctgctaacgccatgcaagctgttgctcacattgctaaccaatctaacttgtctccatctgttgaaccatacatcgtccaattggttccagctatctgtaccaacgcaggtaacaaggacaaagaaattcaatctgttgcttccgaaactttgatttccatcgttaacgctgttaacccagttgccatcaaagctttgttgccacatttgactaacgctattgtcgaaactaacaaatggcaagaaaagattgctattttggcagctatctctgctatggtcgatgctgctaaggatcaagttgccctaagaatgccagaattgattccagtcttgtctgaaaccatgtgggacaccaagaaggaagtcaaggctgctgctactgccgccatgaccaaggctaccgaaactgttgacaacaaggatattgaacgtttcattccaagtttgattcaatgtattgctgacccaactgaagttccagaaaccgttcatttgttaggtgctactactttcgttgctgaagttactccagctactttgtccatcatggtcccattgttgtccagaggtttgaacgaaagagaaaccggtatcaagcgtaagtctgctgttattattgacaacatgtgtaagttggtcgaagacccacaagttattgctcctttcttgggtaaattgttgccaggtttgaagagtaactttgctaccattgctgacccagaagccagagaagttactttgagagctttgaagactttgagaagagttggtaacgttggtgaagacgatgctattccagaagtttctcacgctggtgacgtttctactactttgcaagtcgttaacgaattgttgaaggacgaaaccgttgctccaagatttaagattgtcgtcgagtacattgccgccattggtgctgatttgatcgatgaaagaatcattgaccaacaagcttggttcacccacatcaccccatacatgactatcttcttgcacgaaaagaaggccaaggacatcttggacgaattcagaaagagagctgtcgacaacattccagttggtccaaacttcgacgacgaagaagacgaaggtgaagacttatgtaactgtgaattctctttggcttatggtgctaaaatcttgttgaacaagacccaattaagattgaagagagccagaagatatggtatctgtggtccaaacggttgtggtaagtccactttaatgagagctattgccaacggtcaagttgatggtttcccaacccaagaagaatgtagaaccgtctacgtcgaacacgacattgatggtactcactctgacacttccgtcttggatttcgttttcgaatctggtgttggtactaaagaagctatcaaggacaaattgattgaattcggtttcaccgatgaaatgattgctatgccaatctctgctttgtctggtggttggaagatgaagttggctctagctagagctgtgttgagaaatgctgatatcttgttgttagatgaaccaactaaccatttggataccgtcaacgttgcttggttagttaactacttgaacacctgtggtatcacttctatcactatttctcacgactccgttttcttagataacgtctgtgaatatattattaactacgaaggtttgaagttgagaaagtacaagggtaactttaccgaattcgttaagaagtgtccagctgctaaggcttacgaagaattatccaacactgatttggaattcaagttcccagaaccaggttacttggaaggtgttaagactaagcaaaaggctattgtcaaggttaccaacatggaattccaatatccaggtacctctaagccacaaatcactgacattaacttccaatgttctttgtcttccagaattgctgtcattggtccaaatggtgctggtaagtctactttgattaacgtcttgactggtgaactattaccaacctctggtgaagtctacacccacgaaaattgtcgtatcgcttacattaagcaacacgcttttgctcatatcgaatctcatttggacaagactccatctgaatatatccaatggagattccaaaccggtgaagatagagaaaccatggacagagctaacagacaaatcaacgaaaacgatgctgaagctatgaacaagatcttcaagattgaaggtacccctagaagaattgccggtatccactccagaagaaagttcaagaacacttacgaatatgaatgttctttcttattgggtgaaaacattggtatgaaatctgaaagatgggttccaatgatgtccgtcgacaacgcttggattccaagaggtgaattggttgaatctcactctaagatggttgctgaagttgatatgaaggaagctttggcttctggtcaattccgtccattaaccagaaaagaaattgaagaacattgttccatgttgggtttggacccagaaattgtttctcactccagaattagaggtttgtctggtggtcaaaaggttaagttggtcttagctgccggtacatggcaaagacctcacttgattgtcttagatgaacctaccaactatctggacagagattctttgggtgctttgtctaaggctttgaaggaatttgaaggtggtgttattatcattactcactctgctgaattcacaaagaacttgactgaagaagtctgggccgtcaaggacggtagaatgactccatctggtcacaactgggttagtggtcaaggtgctggtccaagaatcgaaaagaaggaagacgaagaagataaattcgatgctatgggtaacaagattgccggtggtaagaagaagaagaagttgtcttctgcggaattgagaaagaagaagaaggaaagaatgaagaagaagaaggaattgggtgatgcttacgtttcttctgacgaagaattctaa

SEQ ID NO: 7680 - DNA, 3135 bp, Artificial Sequence
  Description of Artificial Sequence: Synthetic polynucleotide
atgtctgattcccagcaatccattaaggttttggaagaattattccagaagttatctgttgccactgctgacaacagacacgaaatcgcttctgaagtcgcttctttcttgaatggtaacatcattgaacatgatgttccagaacacttcttcggtgaattggccaagggtatcaaggacaagaagaccgctgctaacgccatgcaagctgttgctcacattgctaaccaatctaacttgtctccatctgttgaaccatacatcgtccaattggttccagctatctgtaccaacgcaggtaacaaggacaaagaaattcaatctgttgcttccgaaactttgatttccatcgttaacgctgttaacccagttgccatcaaagctttgttgccacatttgactaacgctattgtcgaaactaacaaatggcaagaaaagattgctattttggcagctatctctgctatggtcgatgctgctaaggatcaagttgccttgagaatgccagaattgattccagtcttgtctgaaaccatgtgggacaccaagaaggaagtcaaggctgctgctactgccgccatgaccaaggctaccgaaactgttgacaacaaggatattgaacgtttcattccaagtttgattcaatgtattgctgacccaactgaagttccagaaaccgttcatttgttaggtgctactactttcgttgctgaagttactccagctactttgtccatcatggtcccattgttgtccagaggtttgaacgaaagagaaaccggtatcaagcgtaagtctgctgttattattgacaacatgtgtaagttggtcgaagacccacaagttattgctcctttcttgggtaaattgttgccaggtttgaagagtaactttgctaccattgctgacccagaagccagagaagttactttgagagctttgaagactttgagaagagttggtaacgttggtgaagacgatgctattccagaagtttctcacgctggtgacgtttctactactttgcaagtcgttaacgaattgttgaaggacgaaaccgttgctccaagatttaagattgtcgtcgagtacattgccgccattggtgctgatttgatcgatgaaagaatcattgaccaacaagcttggttcacccacatcaccccatacatgactatcttcttgcacgaaaagaaggccaaggacatcttggacgaattcagaaagagagctgtcgacaacattccagttggtccaaacttcgacgacgaagaagacgaaggtgaagacttatgtaactgtgaattctctttggcttatggtgctaaaatcttgttgaacaagacccaattaagattgaagagagccagaagatatggtatctgtggtccaaacggttgtggtaagtccactttaatgagagctattgccaacggtcaagttgatggtttcccaacccaagaagaatgtagaaccgtctacgtcgaacacgacattgatggtactcactctgacacttccgtcttggatttcgttttcgaatctggtgttggtactaaagaagctatcaaggacaaattgattgaattcggtttcaccgatgaaatgattgctatgccaatctctgctttgtctggtggttggaagatgaagttggctttggctagagctgtgttgagaaatgctgatatcttgttgttagatgaaccaactaaccatttggataccgtcaacgttgcttggttagttaactacttgaacacctgtggtatcacttctatcactatttctcacgactccgttttcttagataacgtctgtgaatatattattaactacgaaggtttgaagttgagaaagtacaagggtaactttaccgaattcgttaagaagtgtccagctgctaaggcttacgaagaattatccaacactgatttggaattcaagttcccagaaccaggttacttggaaggtgttaagactaagcaaaaggctattgtcaaggttaccaacatggaattccaatatccaggtacctctaagccacaaatcactgacattaacttccaatgttctttgtcttccagaattgctgtcattggtccaaatggtgctggtaagtctactttgattaacgtcttgactggtgaattattaccaacctctggtgaagtctacacccacgaaaattgtcgtatcgcttacattaagcaacacgcttttgctcatatcgaatctcatttggacaagactccatctgaatatatccaatggagattccaaaccggtgaagatagagaaaccatggacagagctaacagacaaatcaacgaaaacgatgctgaagctatgaacaagatcttcaagattgaaggtacccctagaagaattgccggtatccactccagaagaaagttcaagaacacttacgaatatgaatgttctttcttattgggtgaaaacattggtatgaaatctgaaagatgggttccaatgatgtccgtcgacaacgcttggattccaagaggtgaattggttgaatctcactctaagatggttgctgaagttgatatgaaggaagctttggcttctggtcaattccgtccattaaccagaaaagaaattgaagaacattgttccatgttgggtttggacccagaaattgtttctcactccagaattagaggtttgtctggtggtcaaaaggttaagttggtcttagctgccggtacatggcaaagacctcacttgattgtcttagatgaacctaccaactatttggacagagattctttgggtgctttgtctaaggctttgaaggaatttgaaggtggtgttattatcattactcactctgctgaattcacaaagaacttgactgaagaagtctgggccgtcaaggacggtagaatgactccatctggtcacaactgggttagtggtcaaggtgctggtccaagaatcgaaaagaaggaagacgaagaagataaattcgatgctatgggtaacaagattgccggtggtaagaagaagaagaagttgtcttctgcggaattgagaaagaagaagaaggaaagaatgaagaagaagaaggaattgggtgatgcttacgtttcttctgacgaagaattctga

SEQ ID NO: 7681 - DNA, 705 bp, Saccharomyces cerevisiae
atgaggtttttgaggggatttgtattttctttggctttcactctatataaagtaactgccacggcagaaataggatctgaaattaatgtggaaaatgaggcaccacctgatggtttatcctgggaggagtggcatatggaccatgagcatcagctaaaagattacactccagagactttcttcgcgttacatgatatcaagaagaaaggatttttagatgaaaacgatattctatctctctacgggttgaaccgtgaagaaattgtgggggctggtgatggtatgggacaacacgatgaatctgagaaaattgacaatgaaatggctaagcgtgttgttagccttattatgaggttattggatgttgatgataataccaaaatcaccaaggaggaatatctacaatttgctaagagaggaaacaagttccctgaccttggcgttggtgtaggtcaccactccgattttgagctagaatatgaaattcatcactggaataagtttcataaggacaaagatccagacgttaaagtcgttcacaaagaagacatagaacatgaattgcttcatcatgaacatgaaattgaacatgaagaagaaattcaaagaggcgcttctagagctactgtaataactgatgacgaactagagtctagaatagagctgaaaaatattcccgagaaattcaaaaatggaattttttaa

SEQ ID NO: 7682 - DNA, 705 bp, Artificial Sequence
  Description of Artificial Sequence: Synthetic polynucleotide
atgaggtttttgaggggatttgtattttctttggctttcactttatataaagtaactgccacggcagaaataggatctgaaattaatgtggaaaatgaggcaccacctgatggtttatcctgggaggagtggcatatggaccatgagcatcagttgaaagattacactccagagactttcttcgcgttacatgatatcaagaagaaaggatttttagatgaaaacgatattttatctctctacgggttgaaccgtgaagaaattgtgggggctggtgatggtatgggacaacacgatgaatctgagaaaattgacaatgaaatggctaagcgtgttgttagccttattatgaggttattggatgttgatgataataccaaaatcaccaaggaggaatatttacaatttgctaagagaggaaacaagttccctgaccttggcgttggtgtaggtcaccactccgattttgagttagaatatgaaattcatcactggaataagtttcataaggacaaagatccagacgttaaagtcgttcacaaagaagacatagaacatgaattgcttcatcatgaacatgaaattgaacatgaagaagaaattcaaagaggcgcttctagagctactgtaataactgatgacgaattagagtctagaatagagttgaaaaatattcccgagaaattcaaaaatggaattttttga

SEQ ID NO: 7683 - DNA, 594 bp, Saccharomyces cerevisiae
atgaagttattgcatttatatgaagcgagcttgaagagaaggcccaaaactacgaatgcgataatgacaggtgcgctatttggaattggtgatgtttctgctcaattgttgtttccaacatccaaagtaaacaagggttatgattataaaaggacagctagggctgtcatctatggttctttaattttctcctttataggtgacaagtggtacaagatcttgaacaacaagatttatatgcgtaacagacctcagtaccactggtctaatatggttttacgggtagctgtcgatcaattggcgtttgcgccgctaggtttgccattttatttcacctgtatgtccatcatggaaggtagatcatttgacgtagctaagttgaaaataaaagagcaatggtggcctacacttttgactaattgggcagtttggccacttttccaagcgattaacttttctgttgttcctttacaacataggttactagctgttaatgtcgttgcaatattttggaacacttacttatcttataaaaactcaaaggttatggagaaagacaaggtacctgttcattatccacccgtggtcgaataa

SEQ ID NO: 7684 - DNA, 594 bp, Artificial Sequence
  Description of Artificial Sequence: Synthetic polynucleotide
atgaagttattgcatttatatgaagcgagcttgaagagaaggcccaaaactacgaatgcgataatgacaggtgcgttatttggaattggtgatgtttctgctcaattgttgtttccaacatccaaagtaaacaagggttatgattataaaaggacagctagggctgtcatctatggttctttaattttctcctttataggtgacaagtggtacaagatcttgaacaacaagatttatatgcgtaacagacctcagtaccactggtctaatatggttttaagagtagctgtcgatcaattggcgtttgcgccgttgggtttgccattttatttcacctgtatgtccatcatggaaggtagatcttttgacgtagctaagttgaaaataaaagagcaatggtggcctacacttttgactaattgggcagtttggccacttttccaagcgattaacttttctgttgttcctttacaacataggttattagctgttaatgtcgttgcaatattttggaacacttacttatcttataaaaactccaaggttatggagaaagacaaggtacctgttcattatccacccgtggtcgaatga

SEQ ID NO: 7685 - DNA, 1710 bp, Saccharomyces cerevisiae
atgatgaccaaagctttttttaacaaactaccgtttgaggtattccgtcggtacgttaggacaggtaaaagcatccctcaaagaagccccaggacaagaaaatctcttctggtgggtgggactattgcatcagcagtagttttgtacaactttaatgacacttttcatgattctgtaaagcacacggcactgacgactaaaagaatcgctgtcgtcacacaagctaccactcgttgcttctaccattacaagagggctctaaataaaagctatgagaacaaaaaagaacgagaagttgccttaaataaatgtcataagatgtgtgccttaatcacgttgcatgcgctacgatcgaatggtgggatatatatcaaattaggccagcacattggggccatgacctacctgttgcctaaagaatggacggatacaatgataccgttgcaagaccactgtcccgaatccacctacgaagaaattgatgagttatttaaagaagatctaggcaccagcattgaggatatgtttttagaattcaacaaaaccccgataggtgtagcttccttggcacaggttcatgtggcaaaactaaaaaatagtgacggtaaaggttctagtgtagctgtcaaatgtcagcatccatcgttgaaggagtttataccattagatgttatgctgacaagaacagtgtttgaactgctggatgtcttcttccctgattatccgttaacgtggcttggtgatgagcttcagtcttcaatctacgtggaactgaattttaccaaagaagctgaaaatgcagaaaaaacccgtcattattttagtaagttcaagaagcaaacagcattgaaaatacccaaggtcattgaaagccacaaaagaattttgattatggaatatgttggaggcaaaaggttggatgatttggagtacattgacagtcacggtatctcgcgcagtgaagtttcgagttgtctctctcatattttcaataacatgatttttactcccaatgtaggtattcattgtgatcctcatggaggaaatctggccatacgatctgttaagcccgctaaagataatggataccataactttgaaattgttttatttgaccacggactctatagatatcctagcacgagaacaagaagactttatgccaaattttggttgtcgctcctattcgacaaggaccagacaaaaatgaagaagtatgccaaaggattcgcaaacatcaccgacgaacagtttccccttttagcggctgcaattacgggccgtagcattgatgctgctttgaattacgacatttcaacgagtcgaacacaagaagaaatggacgtcatggcaaatgggatcttggaaggaacgttactgagcgacttgatgagcattttgtctagaatccctcgtgtagtgcttttgatattgaagactaacgacctaaccagacatcttgatgaatgtctacagaatccactcgggccagagaggactttcctgatcatgacgcaatactgcgccaagacggtctacgacgaaaaagtggaaagaattaattcggagtatgcgaggtggtctattaaatggatgtgggagaacttgacaaactggatagtctatgagaggcgtattaatcaattgtatttttatgattttgtgttgtggtggaaaaaatttattccgaagacttggttgtcatcttaa

SEQ ID NO: 7686 - DNA, 1710 bp, Artificial Sequence
  Description of Artificial Sequence: Synthetic polynucleotide
atgatgaccaaagctttttttaacaaattaccgtttgaggtattccgtcgttacgttaggacaggtaaaagcatccctcaaagaagccccaggacaagaaaatctcttttagtgggtgggactattgcatctgcagtagttttgtacaactttaatgacacttttcatgattctgtaaagcacacggcattgacgactaaaagaatcgctgtcgtcacacaagctaccactcgttgcttctaccattacaagagggctttgaataaaagctatgagaacaaaaaagaaagagaagttgccttaaataaatgtcataagatgtgtgccttaatcacgttgcatgcgcttagatctaatggtgggatatatatcaaattaggccagcacattggggccatgacctacttgttgcctaaagaatggacggatacaatgataccgttgcaagaccactgtcccgaatccacctacgaagaaattgatgagttatttaaagaagatttgggcaccagcattgaggatatgtttttagaattcaacaaaaccccgataggtgtagcttccttggcacaggttcatgtggcaaaattgaaaaatagtgacggtaaaggttctagtgtagctgtcaaatgtcagcatccatctttgaaggagtttataccattagatgttatgttaacaagaacagtgtttgaattattagatgtcttcttccctgattatccgttaacgtggcttggtgatgagcttcagtcttctatctacgtggaattgaattttaccaaagaagctgaaaatgcagaaaaaacccgtcattattttagtaagttcaagaagcaaacagcattgaaaatacccaaggtcattgaaagccacaaaagaattttgattatggaatatgttggaggcaaaaggttggatgatttggagtacattgacagtcacggtatcagccgcagtgaagtttctagttgtctctctcatattttcaataacatgatttttactcccaatgtaggtattcattgtgatcctcatggaggaaatttggccataagatctgttaagcccgctaaagataatggataccataactttgaaattgttttatttgaccacggactctatagatatcctagcacgagaacaagaagactttatgccaaattttggttgtctctcttgttcgacaaggaccagacaaaaatgaagaagtatgccaaaggattcgcaaacatcaccgacgaacagtttccccttttagcggctgcaattacgggccgtagcattgatgctgctttgaattacgacatttctacgagtaggacacaagaagaaatggacgtcatggcaaatgggatcttggaaggaacgttattaagcgacttgatgagcattttgtctagaatccctcgtgtagtgcttttgatattgaagactaacgacttgaccagacatcttgatgaatgtttacagaatccactcgggccagagaggactttcttgatcatgacgcaatactgcgccaagacggtctacgacgaaaaagtggaaagaattaattctgagtatgcgaggtggtctattaaatggatgtgggagaacttgacaaactggatagtctatgagaggcgtattaatcaattgtatttttatgattttgtgttgtggtggaaaaaatttattccgaagacttggttgtcttcttga

SEQ ID NO: 7687 - DNA, 570 bp, Saccharomyces cerevisiae
atggtgccgaatttggatttggaaacagctatacagataatctcctcactggagacccagttgagcgagcttgaaggcgccacgaaagaatatgaaaatgatttggaacaagtaatatcaaagttaaaaagcgatcttcttgagagccaacaacaaaataagtgcaataagaaacagataacagatttagagatacaggtagatgagttggaaaatgaaaatatccaactgaggaataagatagagacattacaattggagagtgaccgacgactggaacgcaacgttctactggaacacgagttactcgacaccaaagaggcgctgcaaaagttaagagtcagcaaagaagaagccactagcggtgagactagaaggaacaccaggtcgttacccagtcaaaataaaaaaatgaagttgtttaaggatactatcaaagtctcgaccacatcttcaaccttgtacttgcagaacatggcaaaaactaacaacgctgcaagaagtcactgtaatattccaaatacccaaataacacaatccactgtgatagcaacaacgtcttccgtttaa

SEQ ID NO: 7688 - DNA, 570 bp, Artificial Sequence
  Description of Artificial Sequence: Synthetic polynucleotide
atggtgccgaatttggatttggaaacagctatacagataatctcctctttggagacccagttgagcgagcttgaaggcgccacgaaagaatatgaaaatgatttggaacaagtaatatccaagttaaaaagcgatcttcttgagagccaacaacaaaataagtgcaataagaaacagataacagatttagagatacaggtagatgagttggaaaatgaaaatatccaattaaggaataagatagagacattacaattggagagtgaccgtaggttagaacgcaacgttttattggaacacgagttactcgacaccaaagaggcgttgcaaaagttaagagtcagcaaagaagaagccactagcggtgagactagaaggaacaccaggtctttacccagtcaaaataaaaaaatgaagttgtttaaggatactatcaaagtctccaccacatcttccaccttgtacttgcagaacatggcaaaaactaacaacgctgcaagaagtcactgtaatattccaaatacccaaataacacaatccactgtgatagcaacaacgtcttccgtttga

SEQ ID NO: 7689 - DNA, 354 bp, Saccharomyces cerevisiae
atgggtgtgggtggaacgaggattgtatcgtttagacagccgaattattacccggttactcaacaaaaaggggcaagccagacaggtgcagtggctcagccgtacagctcgtactgtggtttgctaatgcgctgggcggttgttgagataagaagaagagggaaagggaaaggaagaaagaggaagagagagagagagaaagggcacacgaaattcaggatacggcggaggagttatctttattttatacggtcttgccttgtaaggccctactcaagcgggaacaagaaaaacagttgtagcttccacaagatgttggctatagagattgttctgtgcttaaaggctcgctaa

SEQ ID NO: 7690 - DNA, 354 bp, Artificial Sequence
  Description of Artificial Sequence: Synthetic polynucleotide
atgggtgtgggtggaacgaggattgtatcctttagacagccgaattattacccggttactcaacaaaaaggggcaagccagacaggtgcagtggctcagccgtacagctcttactgtggtttgttgatgcgctgggcggttgttgagataagaagaagagggaaagggaaaggaagaaagaggaagagagagagagagaaagggcacacgaaattcaggataagaagaaggagttatctttattttataagatcttgccttgtaaggccctactccagcgggaacaagaaaaacagttgtagcttccacaagatgttggctatagagattgttttgtgcttaaaggctcgctga

SEQ ID NO: 7691 - DNA, 4509 bp, Saccharomyces cerevisiae
atgtcgaataccccttataattcatctgtgccttccattgcatccatgacccagtcttcggtctcaagaagtcctaacatgcatacagcaactacgcccggtgccaacaccagctctaactctccacccttgcacatgtcttcagattcgtccaagatcaagaggaagcgtaacagaattccgctcagttgcaccatttgtcggaaaaggaaagtcaaatgtgacaaactcagaccacactgccagcagtgcactaaaactggggtagcccatctctgccactacatggaacagacctgggcagaagaggcagagaaagaattgctgaaggacaacgaattaaagaagcttagggagcgcgtaaaatctttagaaaagactctttctaaggtgcactcttctccttcgtctaactccttgaaaagttacaacactcccgagagcagcaacctgtttatgggtagcgatgaacacaccacccttgttaatgcaaatacaggctctgcttcctctgcctcgcatatgcatcagcaacaacagcaacagcagcaacaggaacaacaacaagacttttccagaagtgcgaacgccaacgcgaattcctcgtccctttctatctcaaataaatatgacaacgatgagctggacttaactaaggactttgatcttttgcatatcaaaagtaacggaaccatccacttaggtgccacccactggttgtctatcatgaaaggtgacccgtacctaaaacttttgtggggtcatatcttcgctatgagggaaaagttaaatgaatggtactaccaaaaaaattcgtactctaagctgaagtcaagcaaatgtcccatcaatcacgcgcaagcgccgccttctgccgctgccgccgctaccagaaaatgtcctgttgatcactccgcgttttcgtctggcatggtggccccaaaggaggagactcctcttcctaggaaatgtccagttgaccacaccatgttctcttcgggaatgattcctcccagagaggacacttcgtcccagaagaggtgtcccgttgaccacaccatgtattccgcaggaatgatgccgcccaaggacgagacaccttccccattttccactaaagctatgatagaccataacaagcatacaatgaatccgcctcagtcaaaatgtcctgtggaccatagaaactatatgaaggattatccctctgacatggcaaattcttcttcgaacccggcaagtcgttgccccattgaccattcaagcatgaaaaatacagcggccttaccagcttcaacgcacaataccatcccacaccaccaaccacagtccggatctcatgctcgttcgcatcccgcacaaagcaggaaacatgattcctacatgacagaatctgaagtcctcgcaacactttgtgagatgttgccaccaaagcgcgtcatcgcattattcatcgagaaattcttcaaacatttataccctgccattccaatcttagatgaacagaatttcaaaaatcacgtgaatcaaatgctttcgttgtcttcgatgaatcccacagttaacaactttggtatgagcatgccatcttcatctacactagagaaccaacccataacacaaatcaatcttccaaaactttccgattcttgtaacttaggtattctgataataatcttgagattgacatggctatccataccttctaattcctgcgaagtcgacctgggagaagaaagtggctcatttttagtgcccaacgaatctagcaatatgtctgcatctgcattgacctcgatggctaaagaagaatcacttctgctaaagcatgagacaccggtcgaggcactggagctatgtcaaaaatacttgattaaattcgatgaactttctagtatttccaataacaacgttaatttaaccacggtgcagtttgccattttttacaacttctatatgaaaagtgcctctaatgatttgactaccttgacaaataccaacaacactggcatggccaatcctggtcacgattccgagtctcaccagatcctattgtccaatattactcaaatggcctttagttgtgggttacacagagaccctgataattttcctcaattaaacgctaccattccagcaaccagccaggacgtgtctaacaacgggagcaaaaaggcaaaccctagcaccaatccaactttgaataacaacatgtctgctgccactaccaacagcagtagcagatctggcagtgctgattcaagaagtggttctaaccctgtgaacaagaaggaaaatcaggttagtatcgaaagatttaaacacacttggaggaaaatttggtattacattgttagcatggatgttaaccaatctctttccctggggagccctcgactactaagaaatctgagggatttcagcgatacaaagctaccaagtgcgtcaaggattgattatgttcgcgatatcaaagagttaatcattgtgaagaattttactctttttttccaaattgatttgtgtattattgctgtattaaatcacattttgaatgtttctttagcaagaagcgtgagaaaatttgaactggattcattgattaatttattgaaaaatctgacctatggtactgagaatgtcaatgatgtagtgagctccttgatcaacaaagggttattaccaacttcggaaggtggttctgtagattcaaataatgatgaaatttacggtctaccgaaactacccgatattctaaaccatggtcaacataaccaaaacttgtatgctgatggaagaaatacttctagtagtgatatagataagaaattggaccttcctcacgaatctacaacgagagctctattcttttccaagcatatgacaattagaatgttgctgtacttattgaactacattttgtttactcattatgaaccaatgggcagtgaagatcctggtactaatatcctagctaaggagtacgctcaagaggcattaaattttgccatggatggctacagaaactgcatgattttcttcaacaatatcagaaacaccaattcactattcgattacatgaatgttatcttgtcttacccttgtttggacattggacatcgttctttacaatttatcgtttgtttgatcctgagagctaaatgtggcccattgactggtatgcgtgaatcatcgatcattactaatggtacatcaagtggatttaatagttcggtagaagatgaggacgtcaaagttaaacaagaatcttctgatgaattgaaaaaagacgatttcatgaaagatgtaaatttggattcaggcgattcattagcagagattctaatgtcaagaatgctgctatttcaaaaactaacaaaacaactatcaaagaagtacaactacgctattcgtatgaacaaatccactggattctttgtctctttactagatacaccttcaaagaaatcagactcgaaatcgggtggtagttcattcatgttgggtaattggaaacatccaaaggtttcaaacatgagcggatttcttgctggtgacaaagaccaattacagaaatgccccgtgtaccaagatgcgctggggtttgttagtccaaccggtgctaatgaaggttctgctccgatgcaaggcatgtccttacagggctctactgctaggatgggagggacccagttgccaccaattagatcatacaaacctatcacgtacacaagtagtaatctacgtcgtatgaatgaaacgggtgaggcagaagctaagagaagaagatttaatgatggctatattgataataatagtaacaacgatatacctagaggaatcagcccaaaaccttcaaatgggctatcatcggtgcagccactattatcgtcattttccatgaaccagctaaacgggggtaccattccaacggttccatcgttaaccaacattacttcacaaatgggagctttaccatctttagataggatcaccactaatcaaataaatttgccagacccatctagagatgaagcatttgacaactccatcaagcaaatgacgcctatgacaagtgcattcatgaatgctaatactacaattccaagttcaactttaaacgggaatatgaacatgaatggagctggaactgcgaatacagatacaagtgccaacggcagtgctttatcgacactgacaagcccacaaggctcagacttagcatccaattctgctacacagtataaacctgacttagaagactttttgatgcaaaattctaactttaatgggctaatgataaatccttccagtctggtagaagttgttggtggatacaacgatcctaataaccttggaagaaatgacgcggttgattttctacccgttgataatgttgaaattgatggtgttggaataaaaatcaactatcatctactaactagtatttacgttactagtatattatcatatacggtgttagaagatgacgcaaatgatgagaaatag

SEQ ID NO: 7692 - DNA, 4509 bp, Artificial Sequence
  Description of Artificial Sequence: Synthetic polynucleotide
atgagtaataccccttataattcttctgtgccttccattgcatccatgacccagtcttctgtctctagaagtcctaacatgcatacagcaactacgcccggtgccaacaccagctctaactctccacccttgcacatgtcttctgattcttccaagatcaagaggaagcgtaacagaattccgctcagttgcaccatttgtagaaaaaggaaagtcaaatgtgacaaactcagaccacactgccagcagtgcactaaaactggggtagcccatctctgccactacatggaacagacctgggcagaagaggcagagaaagaattgttgaaggacaacgaattaaagaagcttagggagcgcgtaaaatctttagaaaagactctttctaaggtgcactcttctccttcttctaactccttgaaaagttacaacactcccgagagcagcaacttgtttatgggtagcgatgaacacaccacccttgttaatgcaaatacaggctctgcttcctctgcctctcatatgcatcagcaacaacagcaacagcagcaacaggaacaacaacaagacttttccagaagtgcgaacgccaacgcgaattcctcctccctttctatctctaataaatatgacaacgatgagttggacttaactaaggactttgatcttttgcatatcaaaagtaacggaaccatccacttaggtgccacccactggttgtctatcatgaaaggtgacccgtacttgaaacttttgtggggtcatatcttcgctatgagggaaaagttaaatgaatggtactaccaaaaaaattcttactctaagttgaagagcagcaaatgtcccatcaatcacgcgcaagcgccgccttctgccgctgccgccgctaccagaaaatgtcctgttgatcactccgcgttttcttctggcatggtggccccaaaggaggagactcctcttcctaggaaatgtccagttgaccacaccatgttctcttctggaatgattcctcccagagaggacacttcttcccagaagaggtgtcccgttgaccacaccatgtattccgcaggaatgatgccgcccaaggacgagacaccttccccattttccactaaagctatgatagaccataacaagcatacaatgaatccgcctcagtccaaatgtcctgtggaccatagaaactatatgaaggattatccctctgacatggcaaattcttcttccaacccggcaagtcgttgccccattgaccattctagcatgaaaaatacagcggccttaccagcttccacgcacaataccatcccacaccaccaaccacagtccggatctcatgctcgttctcatcccgcacaaagcaggaaacatgattcctacatgacagaatctgaagtcctcgcaacactttgtgagatgttgccaccaaagcgcgtcatcgcattattcatcgagaaattcttcaaacatttataccctgccattccaatcttagatgaacagaatttcaaaaatcacgtgaatcaaatgctttctttgtcttctatgaatcccacagttaacaactttggtatgagcatgccatcttcttctacattagagaaccaacccataacacaaatcaatcttccaaaactttccgattcttgtaacttaggtattttaataataatcttgagattgacatggttatccataccttctaattcctgcgaagtcgacttgggagaagaaagtggctcttttttagtgcccaacgaatctagcaatatgtctgcatctgcattgacctccatggctaaagaagaatctcttttattgaagcatgagacaccggtcgaggcattagagctctgtcaaaaatacttgattaaattcgatgaactttctagtatttccaataacaacgttaatttaaccacggtgcagtttgccattttttacaacttctatatgaaaagtgcctctaatgatttgactaccttgacaaataccaacaacactggcatggccaatcctggtcacgattccgagtctcaccagatcttgttgtccaatattactcaaatggcctttagttgtgggttacacagagaccctgataattttcctcaattaaacgctaccattccagcaaccagccaggacgtgtctaacaacgggagcaaaaaggcaaaccctagcaccaatccaactttgaataacaacatgtctgctgccactaccaacagcagtagcagatctggcagtgctgattccagaagtggttctaaccctgtgaacaagaaggaaaatcaggttagtatcgaaagatttaaacacacttggaggaaaatttggtattacattgttagcatggatgttaaccaatctctttccttagggagccctcgtttgttaagaaatttaagggatttcagcgatacaaagttaccaagtgcgtccaggattgattatgttcgcgatatcaaagagttaatcattgtgaagaattttactctttttttccaaattgatttgtgtattattgctgtattaaatcacattttgaatgtttctttagcaagaagcgtgagaaaatttgaattagattctttgattaatttattgaaaaatttgacctatggtactgagaatgtcaatgatgtagtgagctccttgatcaacaaagggttattaccaacttctgaaggtggttctgtagattctaataatgatgaaatttacggtttaccgaaattgcccgatattttgaaccatggtcaacataaccaaaacttgtatgctgatggaagaaatacttctagtagtgatatagataagaaattggaccttcctcacgaatctacaacgagagctttattcttttccaagcatatgacaattagaatgttgttgtacttattgaactacattttgtttactcattatgaaccaatgggcagtgaagatcctggtactaatatcttggctaaggagtacgctcaagaggcattaaattttgccatggatggctacagaaactgcatgattttcttcaacaatatcagaaacaccaattctttattcgattacatgaatgttatcttgtcttacccttgtttggacattggacatcgttctttacaatttatcgtttgtttgatcttaagagctaaatgtggcccattgactggtatgcgtgaaagttctatcattactaatggtacatctagtggatttaatagttctgtagaagatgaggacgtcaaagttaaacaagaatcttctgatgaattgaaaaaagacgatttcatgaaagatgtaaatttggattctggcgattctttagcagagattttgatgagtagaatgttactttttcaaaaattaacaaaacaattatccaagaagtacaactacgctattcgtatgaacaaatccactggattctttgtctctttattagatacaccttctaagaaaagtgactctaaatctggtggtagttctttcatgttgggtaattggaaacatccaaaggtttctaacatgagcggatttcttgctggtgacaaagaccaattacagaaatgccccgtgtaccaagatgcgttggggtttgttagtccaaccggtgctaatgaaggttctgctccgatgcaaggcatgtccttacagggctctactgctaggatgggagggacccagttgccaccaattagatcttacaaacctatcacgtacacaagtagtaatttacgtcgtatgaatgaaacgggtgaggcagaagctaagagaagaagatttaatgatggctatattgataataatagtaacaacgatatacctagaggaatcagcccaaaaccttccaatgggctttcttctgtgcagccattattatcttctttttccatgaaccagttgaacgggggtaccattccaacggttccatctttaaccaacattacttctcaaatgggagctttaccatctttagataggatcaccactaatcaaataaatttgccagacccatctagagatgaagcatttgacaactccatcaagcaaatgacgcctatgacaagtgcattcatgaatgctaatactacaattccaagttctactttaaacgggaatatgaacatgaatggagctggaactgcgaatacagatacaagtgccaacggcagtgctttatctacattaacaagcccacaaggctctgacttagcatccaattctgctacacagtataaacctgacttagaagactttttgatgcaaaattctaactttaatgggttgatgataaatccttccagtttagtagaagttgttggtggatacaacgatcctaataaccttggaagaaatgacgcggttgattttttgcccgttgataatgttgaaattgatggtgttggaataaaaatcaactatcatttattaactagtatttacgttactagtatattatcttatacggtgttagaagatgacgcaaatgatgagaaatga

SEQ ID NO: 7693 - DNA, 966 bp, Saccharomyces cerevisiae
atggttgacgctaggggtagtacgccatgtttaattggtgattctataagaaacgttaatgatggaaatagtctggatttccagtatactaatcagtttaatgaggaaagtgaggcttcgaggttactaacgccacaaacgagttccaatcacgccctaagcaagatgcagaaggatgatgatattcgagatagatcttatacatctgtagcggaattgaatcgtgagggtgctttgctgaccgacgaagttgatttggagaatgttgatgcttcgaaagttcgcagcaatagagacgacctagaggcagaggagaaaaggaaaaaactactcttgttgaaaaaaaagcaaagaaataaatccatcaactcggaaagtttttcctctccttctctgcgtgcttccaaatctaattcactgattacatcaactgatcctgtcgaagatcacatcagtaagtactcttcatcaggcacccctgaaaatattacaggtgaggcagacgacgaagacgaagacataatcagaaactcttacgggcaaatgatcaaaaacaattccaacaggccacatttggcgaagggtgaatcgtaccagtccgcagaacaggaaatagatcatacggcgcctgaaaaatcagagaaaagacaagaaagaagcggtagatcctttgatagacaaaaatcttcggctgagtttctaagatccttatcgaggtcaataagtcgtggacccacaaagaacaaaacggtttcgccctctaagggagaagactctagaatgtatagtaccagcaactactctatatcattagttgatttggagaacggacccaaaattatcccggaaactttagaagaagagcaggaggacgccgaaaaggagggtgttttgatggaagacgagggtaatgaagaatacaccaaagatttggaagaagcagctaacaaagctcaaccacagtag

SEQ ID NO: 7694 - DNA, 966 bp, Artificial Sequence
  Description of Artificial Sequence: Synthetic polynucleotide
atggttgacgctaggggtagtacgccatgtttaattggtgattctataagaaacgttaatgatggaaatagtttggatttccagtatactaatcagtttaatgaggaaagtgaggcttccaggttattgacgccacaaacgagttccaatcacgccttgagcaagatgcagaaggatgatgatattagagatagatcttatacatctgtagcggaattgaatcgtgagggtgctttgttgaccgacgaagttgatttggagaatgttgatgcttccaaagttcgcagcaatagagacgacttggaggcagaggagaaaaggaaaaaattactcttgttgaaaaaaaagcaaagaaataaatccatcaactctgaaagtttttcctctccttctttacgtgcttccaaatctaattctttgattacatctactgatcctgtcgaagatcacatcagtaagtactcttcttctggcacccctgaaaatattacaggtgaggcagacgacgaagacgaagacataatcagaaactcttacgggcaaatgatcaaaaacaattccaacaggccacatttggcgaagggtgaatcttaccagtccgcagaacaggaaatagatcatacggcgcctgaaaaaagtgagaaaagacaagaaagaagcggtagatcctttgatagacaaaaatcttctgctgagtttttaagatccttatctaggtctataagtcgtggacccacaaagaacaaaacggtttctccctctaagggagaagactctagaatgtatagtaccagcaactactctatatctttagttgatttggagaacggacccaaaattatcccggaaactttagaagaagagcaggaggacgccgaaaaggagggtgttttgatggaagacgagggtaatgaagaatacaccaaagatttggaagaagcagctaacaaagctcaaccacagtga

SEQ ID NO: 7695 - DNA, 2118 bp, Saccharomyces cerevisiae
atgtcccgtgacctacaaaaccatttgttattcgagactgcgactgaggttgctaatagggttggtggtatttactccgtgctaaaatcgaaggctcccattacggttgcccagtataaagaccattaccacttgatagggcccttaaataaagccacttatcaaaatgaagttgatatactagattggaagaagcctgaagccttttccgatgaaatgaggccagtgcagcatgccctgcaaacaatggaatctagaggagttcattttgtttatgggaggtggctgattgaaggtgctccaaaagtaatactttttgacttggattctgtgagaggttattcgaatgaatggaagggtgatttatggtcattagtaggaattccctctcctgagaatgatttcgagacgaatgatgctatcctattggggtatacagtcgcttggtttctaggcgaagtggctcatctcgattcacaacacgcaattgttgcgcactttcacgaatggttggccggtgttgcgttaccattatgccgtaaaaggcgtatcgatgtagttaccattttcaccactcatgctactttattgggacggtatttatgcgcctccggcagtttcgatttttacaattgtttagaatctgttgatgttgatcacgaagctggcagatttggcatataccatcgttattgtatagagagagcggcggctcattctgcagacgtgttcactacggtgtcacaaataactgcttttgaagcggaacatcttttgaaaagaaaaccagatgggattttgcctaatggactgaacgtcatcaaatttcaagcatttcatgagttccaaaatttgcatgctttgaaaaaagaaaaaatcaatgactttgtaagaggccattttcatggttgcttcgatttcgatctagacaacaccttgtacttttttattgctggtagatatgagtataaaaataagggtgctgacatgtttattgaggctctagcgcgtttgaactacagattaaaagtatccggatccaaaaaaactgtggtagcgtttattgtcatgcccgccaaaaataattccttcactgttgaagcattgaagggccaggctgaggtgagggcgttagaaaatactgtacatgaagtgactacttcaattggtaaaagaatattcgatcatgctatcaggtacccccacaatggactgacgacggaattaccaaccgatttgggtgaattactaaagagttcggataaagttatgttaaagagacgtattttggctttgagaaggccggagggacagttacccccaatagttacacacaatatggtcgatgacgctaatgacctgattttaaataaaatcagacaagttcaattgttcaatagcccaagtgatcgtgttaaaatgatcttccatccagaatttttgaacgctaataatccgatccttggtttagattatgatgagttcgttcgtggttgccatttgggtgttttcccttcatactacgagccttggggttacacacctgcagaatgtacagtaatgggtgttccctccatcacgacaaatgtctctggtttcggtgcctatatggaagacttgatcgaaaccaaccaagcgaaagattacggtatttatattgtggatcgtcgtttcaaggcacctgatgaatctgtggaacaattagttgactacatggaagaatttgtaaaaaagacaagaaggcaaagaattaatcaaagaaatagaactgaaagactctccgacttactggactggaagagaatgggtctcgaatacgtcaaggcaaggcagttagcattaagaagaggctatcctgatcagttcagagagctcgttggtgaagaactaaatgattccaacatggatgctttagcaggcggaaagaaattgaaagttgcaagaccgcttagtgtacctggctcaccaagagatttgagatcaaacagcacagtctacatgacccctggtgatttgggtactctgcaggaggttaataacgcggacgattatttttcattgggagtgaatcctgcagctgacgatgacgacgatggcccatatgctgatgacagttaa

SEQ ID NO: 7696 - DNA, 2118 bp, Artificial Sequence
  Description of Artificial Sequence: Synthetic polynucleotide
atgtcccgtgacttgcaaaaccatttgttattcgagactgcgactgaggttgctaatagggttggtggtatttactccgtgttgaaatccaaggctcccattacggttgcccagtataaagaccattaccacttgatagggcccttaaataaagccacttatcaaaatgaagttgatatattggattggaagaagcctgaagccttttccgatgaaatgaggccagtgcagcatgccttgcaaacaatggaatctagaggagttcattttgtttatgggaggtggttgattgaaggtgctccaaaagtaatactttttgacttggattctgtgagaggttattctaatgaatggaagggtgatttatggtctttagtaggaattccctctcctgagaatgatttcgagacgaatgatgctatcttgttggggtatacagtcgcttggtttttgggcgaagtggctcatctcgattctcaacacgcaattgttgcgcactttcacgaatggttggccggtgttgcgttaccattatgccgtaaaaggcgtatcgatgtagttaccattttcaccactcatgctactttattgggaagatatttatgcgcctccggcagtttcgatttttacaattgtttagaatctgttgatgttgatcacgaagctggcagatttggcatataccatcgttattgtatagagagagcggcggctcattctgcagacgtgttcactacggtgagtcaaataactgcttttgaagcggaacatcttttgaaaagaaaaccagatgggattttgcctaatggattgaacgtcatcaaatttcaagcatttcatgagttccaaaatttgcatgctttgaaaaaagaaaaaatcaatgactttgtaagaggccattttcatggttgcttcgatttcgatttggacaacaccttgtacttttttattgctggtagatatgagtataaaaataagggtgctgacatgtttattgaggctttggcgcgtttgaactacagattaaaagtatccggatccaaaaaaactgtggtagcgtttattgtcatgcccgccaaaaataattccttcactgttgaagcattgaagggccaggctgaggtgagggcgttagaaaatactgtacatgaagtgactacttctattggtaaaagaatattcgatcatgctatcaggtacccccacaatggattaacgacggaattaccaaccgatttgggtgaattattgaagagttctgataaagttatgttaaagagacgtattttggctttgagaaggccggagggacagttacccccaatagttacacacaatatggtcgatgacgctaatgacttgattttaaataaaatcagacaagttcaattgttcaatagcccaagtgatcgtgttaaaatgatcttccatccagaatttttgaacgctaataatccgatccttggtttagattatgatgagttcgttcgtggttgccatttgggtgttttcccttcttactacgagccttggggttacacacctgcagaatgtacagtaatgggtgttccctccatcacgacaaatgtctctggtttcggtgcctatatggaagacttgatcgaaaccaaccaagcgaaagattacggtatttatattgtggatcgtcgtttcaaggcacctgatgaatctgtggaacaattagttgactacatggaagaatttgtaaaaaagacaagaaggcaaagaattaatcaaagaaatagaactgaaagactctccgacttattagactggaagagaatgggtctcgaatacgtcaaggcaaggcagttagcattaagaagaggctatcctgatcagttcagagagctcgttggtgaagaattgaatgattccaacatggatgctttagcaggcggaaagaaattgaaagttgcaagaccgcttagtgtacctggctctccaagagatttgagatctaacagcacagtctacatgacccctggtgatttgggtactttacaggaggttaataacgcggacgattatttttctttgggagtgaatcctgcagctgacgatgacgacgatggcccatatgctgatgacagttga

SEQ ID NO: 7697 - DNA, 1719 bp, Saccharomyces cerevisiae
atgttgagatcatccgttgttcgtagtcgcgctactttaaggcctttattgcgtcgtgcttactcctctcataaagaattgaaattcggtgtagaaggaagagcctcccttcttaagggtgtcgaaactttagctgaagcggttgctgctactttgggtccaaagggtagaaacgttttaatcgaacagcctttcggtcctccaaagattactaaggatggtgttacagttgccaaatctattgtgttgaaggacaagtttgaaaatatgggtgccaagttactacaagaagttgcctccaaaaccaatgaggctgctggtgacggtactacttctgctactgtcttaggtagagccatcttcacagaatccgtcaaaaatgtcgccgctggttgtaaccctatggatttgagaaggggttctcaagttgcagttgaaaaagtgattgaatttttgagcgccaacaagaaagaaattaccacatctgaggaaattgctcaagtagcaaccatttctgccaatggggactctcatgttggtaagttactagcttcagctatggaaaaggttggaaaagaaggtgtcatcactatcagagaaggtagaacattggaagatgaacttgaggttactgaaggtatgaggtttgatcgtggttttatttctccatacttcatcactgatccaaagtcgagcaaggtggaatttgaaaagccattgctattgttgagtgaaaagaaaatttcttccattcaagatatcttgccagctttggaaatttccaatcaaagcagaagacctttgttgatcattgctgaagatgttgacggtgaagctcttgcggcttgtattttgaacaagttgaggggtcaagttaaggtttgtgctgtgaaggcgcctggtttcggtgataatagaaagaatacaattggtgatattgcagtcttgacgggcggtactgtttttactgaggagttggatttgaaaccagaacaatgtaccatagaaaacttgggttcttgtgactctattaccgttactaaggaagacaccgttatcctgaacggtagtggtccaaaggaagctattcaagagagaattgaacaaatcaaaggctccatcgacattaccaccacaaattcatatgagaaggagaaactgcaagagcgtttggccaaattgtccgggggtgttgctgtcatcagggtcggtggtgcatctgaagttgaagttggtgaaaagaaggaccgttacgatgatgctttgaacgctaccagagctgcagttgaggaaggtatcttgccaggtggtggtactgccttagtgaaggcatctagagttttggatgaagttgttgtcgacaatttcgatcaaaaattgggtgtcgatatcataagaaaggccattacaagaccagccaagcagatcattgaaaacgctggtgaagaaggttcagttatcatcggcaaattgattgatgaatatggtgatgattttgccaagggttacgatgcctctaagtcagaatacaccgacatgttagccactggtatcatcgatccatttaaagtggttagatccggtttagttgatgcttctggtgttgcctcactattagctactaccgaagttgctattgttgatgccccagaaccaccagcagctgctggcgctggtggtatgccaggtggtatgccaggaatgccaggtatgatgtaa

SEQ ID NO: 7698 - DNA, 1719 bp, Artificial Sequence
  Description of Artificial Sequence: Synthetic polynucleotide
atgttgagaagttccgttgttcgtagtcgcgctactttaaggcctttattgcgtcgtgcttactcctctcataaagaattgaaattcggtgtagaaggaagagcctcccttcttaagggtgtcgaaactttagctgaagcggttgctgctactttgggtccaaagggtagaaacgttttaatcgaacagcctttcggtcctccaaagattactaaggatggtgttacagttgccaaatctattgtgttgaaggacaagtttgaaaatatgggtgccaagttattacaagaagttgcctccaaaaccaatgaggctgctggtgacggtactacttctgctactgtcttaggtagagccatcttcacagaatccgtcaaaaatgtcgccgctggttgtaaccctatggatttgagaaggggttctcaagttgcagttgaaaaagtgattgaatttttgagcgccaacaagaaagaaattaccacatctgaggaaattgctcaagtagcaaccatttctgccaatggggactctcatgttggtaagttattagcttctgctatggaaaaggttggaaaagaaggtgtcatcactatcagagaaggtagaacattggaagatgaacttgaggttactgaaggtatgaggtttgatcgtggttttatttctccatacttcatcactgatccaaagagcagcaaggtggaatttgaaaagccattgttgttgttgagtgaaaagaaaatttcttccattcaagatatcttgccagctttggaaatttccaatcaaagcagaagacctttgttgatcattgctgaagatgttgacggtgaagctcttgcggcttgtattttgaacaagttgaggggtcaagttaaggtttgtgctgtgaaggcgcctggtttcggtgataatagaaagaatacaattggtgatattgcagtcttgacgggcggtactgtttttactgaggagttggatttgaaaccagaacaatgtaccatagaaaacttgggttcttgtgactctattaccgttactaaggaagacaccgttatcttgaacggtagtggtccaaaggaagctattcaagagagaattgaacaaatcaaaggctccatcgacattaccaccacaaattcttatgagaaggagaaattacaagagcgtttggccaaattgtccgggggtgttgctgtcatcagggtcggtggtgcatctgaagttgaagttggtgaaaagaaggaccgttacgatgatgctttgaacgctaccagagctgcagttgaggaaggtatcttgccaggtggtggtactgccttagtgaaggcatctagagttttggatgaagttgttgtcgacaatttcgatcaaaaattgggtgtcgatatcataagaaaggccattacaagaccagccaagcagatcattgaaaacgctggtgaagaaggttctgttatcatcggcaaattgattgatgaatatggtgatgattttgccaagggttacgatgcctctaagtctgaatacaccgacatgttagccactggtatcatcgatccatttaaagtggttagatccggtttagttgatgcttctggtgttgcctctttattagctactaccgaagttgctattgttgatgccccagaaccaccagcagctgctggcgctggtggtatgccaggtggtatgccaggaatgccaggtatgatgtga

SEQ ID NO: 7699 - DNA, 2064 bp, Saccharomyces cerevisiae
atgactttgaaaccttcaaagagacgtaagggcaggtctcgccattccaggaagaagcaaataacgtcagcgatactgactgaggaaggaataatgatcaaggcaaaaccatcaagtccttacacatacgcaaatagaatggcagataaacgaagtcgcagcagcattgacaacatcagtagaactagctttcaaagcaacatcagtagaactagctttcaaagcaacagtgataacaacagtatatttgaaacggcttcactaattagctgtgttacctgtttaagcgatactgatacaatagacagatcggaaacatcgacaacggatacaagtaaagatgatctttctgctaatccaaaacttcattatccttcggtgaatggtcaattgccagcaaacaccgttatcccctatggacgaattctggatgccagatacattgaaaaggaacctctgcattattatgatgccaattcatcacccagttcacctttaagcagctcaatgagtaacattagtgaaaagtgtgatcttgatgaattagagtcttcccaaaaaaaagaaaggaagggcaactcgctatcgcgaggaagtaacagtagtagtagcctcctgacttccagatctccttttacgaaactagtagaggttatatttgctaggccaagacggcatgacgttgtacccaaaagggtttcattgtatattgactataaaccccattcatcttctcacttaaaagaagaagatgacttggttgaggagattttaaagagaagctacaaaaacactagaaggaacaaatccatatttgtgatcattaatccgtttggtggtaaaggtaaggcgaaaaaactgtttatgacaaaggcaaagccgttactattagcaagtcggtgttccatagaagtggtttatacaaaataccctggtcatgctatagagatcgcgcgggaaatggatattgacaaatatgacactattgcttgcgcttcgggagatggcattcctcatgaggtgatcaatgggttataccaaaggcctgatcatgtcaaagcattcaacaatatcgccattacagaaattccatgcggatcaggtaacgcaatgagcgtatcctgccactggacaaacaatccttcgtactcaactttatgcttaattaaatcgatagagactagaattgatttgatgtgttgttcgcagccttcttatgcaagagagcacccaaagttatcatttttaagtcaaacatatggtctcattgcagaaactgacataaacactgaatttattagatggatgggacctgcaaggtttgaattgggtgtagccttcaatatcatacaaaaaaaaaaatatccttgtgagatatatgtaaagtatgctgccaaatcaaaaaacgagttaaaaaatcattacctggaacacaaaaataaagggtcgttagaattccagcatattactatgaacaaagataacgaggattgtgataattacaattacgaaaatgaatacgaaaccgaaaacgaagatgaagatgaagatgcggatgcggatgacgaagactcccacttgatatctcgtgatctggcagattctagtgctgatcaaattaaagaggaagatttcaaaataaaatatccattagatgaaggtatccctagtgactgggaaagattggatcctaatatttcgaacaacctaggtatcttctatacgggtaaaatgccatatgtggctgctgacactaaattctttccggcagcgcttccttcagatggtacaatggatatggttatcaccgatgcaagaacctcgttgacgaggatggcaccaatcctgctgggactagataagggttcccatgttttacaaccggaagtcttacactctaaaattttggcatacaagataataccaaagctagggaacggcttgttctctgtcgatggcgagaaatttcctctagagccccttcaagtcgaaattatgccacgcttatgcaagacgttactgagaaatggccgttatgtggacacagatttcgattctatgtga

SEQ ID NO: 7700 - DNA, 2064 bp, Artificial Sequence
  Description of Artificial Sequence: Synthetic polynucleotide
atgactttgaaaccttctaagagacgtaagggcaggtctcgccattccaggaagaagcaaataacgtctgcgatattgactgaggaaggaataatgatcaaggcaaaaccatctagtccttacacatacgcaaatagaatggcagataaaagaagtcgcagcagcattgacaacatcagtagaactagctttcaaagcaacatcagtagaactagctttcaaagcaacagtgataacaacagtatatttgaaacggcttctttgattagctgtgttacctgtttaagcgatactgatacaatagacagaagtgaaacatctacaacggatacaagtaaagatgatctttctgctaatccaaaacttcattatccttctgtgaatggtcaattgccagcaaacaccgttatcccctatggaagaattttagatgccagatacattgaaaaggaacctttgcattattatgatgccaattcttctcccagtagccctttaagcagcagtatgagtaacattagtgaaaagtgtgatcttgatgaattagagtcttcccaaaaaaaagaaaggaagggcaactctttaagtagaggaagtaacagtagtagtagcctcttaacttccagatctccttttacgaaattagtagaggttatatttgctaggccaagaagacatgacgttgtacccaaaagggtttctttgtatattgactataaaccccattcttcttctcacttaaaagaagaagatgacttggttgaggagattttaaagagaagctacaaaaacactagaaggaacaaatccatatttgtgatcattaatccgtttggtggtaaaggtaaggcgaaaaaattatttatgacaaaggcaaagccgttattattagcaagtagatgttccatagaagtggtttatacaaaataccctggtcatgctatagagatcgcgagagaaatggatattgacaaatatgacactattgcttgcgcttctggagatggcattcctcatgaggtgatcaatgggttataccaaaggcctgatcatgtcaaagcattcaacaatatcgccattacagaaattccatgcggatctggtaacgcaatgagcgtatcctgccactggacaaacaatccttcttactccactttatgcttaattaaatctatagagactagaattgatttgatgtgttgttctcagccttcttatgcaagagagcacccaaagttatcttttttaagtcaaacatatggtctcattgcagaaactgacataaacactgaatttattagatggatgggacctgcaaggtttgaattgggtgtagccttcaatatcatacaaaaaaaaaaatatccttgtgagatatatgtaaagtatgctgccaaatctaaaaacgagttaaaaaatcattacttggaacacaaaaataaagggtctttagaattccagcatattactatgaacaaagataacgaggattgtgataattacaattacgaaaatgaatacgaaaccgaaaacgaagatgaagatgaagatgcggatgcggatgacgaagactcccacttgatatctcgtgatttggcagattctagtgctgatcaaattaaagaggaagatttcaaaataaaatatccattagatgaaggtatccctagtgactgggaaagattggatcctaatatttccaacaacttgggtatcttctatacgggtaaaatgccatatgtggctgctgacactaaattctttccggcagcgcttccttctgatggtacaatggatatggttatcaccgatgcaagaacctctttgacgaggatggcaccaatcttattaggattagataagggttcccatgttttacaaccggaagtcttacactctaaaattttggcatacaagataataccaaagttagggaacggcttgttctctgtcgatggcgagaaatttcctttagagccccttcaagtcgaaattatgccacgcttatgcaagacgttattaagaaatggccgttatgtggacacagatttcgattctatgtga

SEQ ID NO: 7701 - DNA, 327 bp, Saccharomyces cerevisiae
atgaaagaggtgacgaaaatgttatattgtgcattgttggtaacaaaagtgatttatcagatgaaaggcaaatctcaaccgaagagggagagaaaaaagcaaaactattgggtgctaaaatctttatggaaacgtccacaaaggcaggctataatgtcaaagctttattcaaaaagattgccaaatcgctgcctgaatttcaaaacagcgagtcaactcctttggatagcgaaaatgcaaatagtgcaaaccaaaataaaccgggagtcattgatatttctacagcagaggagcaggaacaaagcgcttgtcagtgttagcacctaa

SEQ ID NO: 7702 - DNA, 327 bp, Artificial Sequence
  Description of Artificial Sequence: Synthetic polynucleotide
atgaaagaggtgacgaaaatgttatattgtgcattgttggtaacaaaagtgatttatcagatgaaaggcaaatctcaaccgaagagggagagaaaaaagcaaaactattgggtgttgaaatctttatggaaacgtccacaaaggcaggctataatgtccaagctttattctaaaagattgccaaatcgctgcttgaatttcaaaacagcgagtcaactcctttggatagcgaaaatgcaaatagtgcaaaccaaaataaacagagagtctttgatatttttgcagcagaggagcaggaacaaagcgcttgtcagtgttagcacctga

SEQ ID NO: 7703 - DNA, 648 bp, Saccharomyces cerevisiae
atgagcagatccgggaaatcattgacaaagtacaaaattgtttttttgggagaacagggtgttggaaaaacatcgctgatcactagatttatgtatgatacgttcgatgatcattaccaagccacgattggtatagattttctttccaagaccatgtatttggatgataagacaattagattacagttatgggatacagcaggtcaggaaagatttagatcattaataccttcatatatcagagattcgagagttgctattatcgtttacgacattacgaagagaaaatcatttgaatatattgataaatggatagaagacgttaaaaatgaaagaggtgacgaaaatgttatattgtgcattgttggtaacaaaagtgatttatcagatgaaaggcaaatctcaaccgaagagggagagaaaaaagcaaaactattgggtgctaaaatctttatggaaacgtccacaaaggcaggctataatgtcaaagctttattcaaaaagattgccaaatcgctgcctgaatttcaaaacagcgagtcaactcctttggatagcgaaaatgcaaatagtgcaaaccaaaataaaccgggagtcattgatatttctacagcagaggagcaggaacaaagcgcttgtcagtgttag

SEQ ID NO: 7704 - DNA, 648 bp, Artificial Sequence
  Description of Artificial Sequence: Synthetic polynucleotide
atgagcagatccgggaaatctttgacaaagtacaaaattgtttttttgggagaacagggtgttggaaaaacatctttgatcactagatttatgtatgatacgttcgatgatcattaccaagccacgattggtatagattttctttccaagaccatgtatttggatgataagacaattagattacagttatgggatacagcaggtcaggaaagatttagatctttaataccttcttatatcagagattccagagttgctattatcgtttacgacattacgaagagaaaaagttttgaatatattgataaatggatagaagacgttaaaaatgaaagaggtgacgaaaatgttatattgtgcattgttggtaacaaaagtgatttaagtgatgaaaggcaaatctccaccgaagagggagagaaaaaagcaaaacttttgggtgctaaaatctttatggaaacgtccacaaaggcaggctataatgtcaaagctttattcaaaaagattgccaaatctttgcctgaatttcaaaacagcgagtctactcctttggatagcgaaaatgcaaatagtgcaaaccaaaataaaccgggagtcattgatatttctacagcagaggagcaggaacaaagcgcttgtcagtgttga

SEQ ID NO: 7705 - DNA, 195 bp, Saccharomyces cerevisiae
atgtctagtcgccaaggtggtaagatgaagcctctaaagcaaaagaagaagcaacaacaggacttagatcctgaagacattgccttcaaagagaagcaaaaggccgatgctgctgctaagaaagctttgatggctaatatgaaaagtggtaaacctttagtgggtggtggtatcaaaaaatctggtaagaaataa

SEQ ID NO: 7706 - DNA, 195 bp, Artificial Sequence
  Description of Artificial Sequence: Synthetic polynucleotide
atgtctagtcgccaaggtggtaagatgaagcctttgaagcaaaagaagaagcaacaacaggacttagatcctgaagacattgccttcaaagagaagcaaaaggccgatgctgctgctaagaaagctttgatggctaatatgaaaagtggtaaacctttagtgggtggtggtatcaaaaaatctggtaagaaatga

SEQ ID NO: 7707 - DNA, 2484 bp, Saccharomyces cerevisiae
atggaaggtttgaagaaaaagatttttggtgtttgcctgaaaaatgacttagcacagactaggaatgaaacgaaaggaatccactatgggttaatgactttggaaacttctaaacaactgcaggaatttctccatttgctagtaataaagagagaagtaattcaaaattttgagttgttatttcacatcataaatgttgccgttaaaatcaccgattcaaatcttccaagtgatgatatctggcatttcattttaaaattaagattttcttctgagattaatatagacgaagactccaaagttttaaattatttacttgagactggcatcgcaatggaaaatccagtcagttggaaatgcttggccgttattagcagcatcctcagcagtgtccctcaatccaaaaagattataactaacctgatcgagacagaacatgccaaaaagattggtcagttgtttgataatattcaagatttgcaacaaggaaattttctggtggaaattctctctaactgttttaaaaaaagtgcttcaaattccaagaaagtggaaaaaatacctcagttatggcaaagcaggtctaagaacaagtttttctttgaaaatgaattttacccttttagcagcaaaaatgggagcttacaaacctgccaattcctgtgcaataatttcatgtcaactttatcctttacgggtattctaaggcaggtttcttatagcggatctgaaacattaaaaaatctccgtatatttaagaaaaaagacgatgaaaattcttacttcattcagtgcatttacaacaaaatctatctttggttagacgaaaaagcccctttggaatttgaaagaaagaaaatcaggattaccaaaaacttaaaaaataaaattcaaattaaattgaggcaacctttccatgaatgtgtgagaactaccgctgataaaacagcactcttatttaacaaaacgaaggggtttcagctggaatttgaagacgagaaattaggtgaaactttttttcacaatgtcaacaatatacctaagattagtgaagtacaaaactttttagttttagactatattgaagaagaaccagagaatgaaggtgaagaagaagagcaaatcggaagggcagatgagcagaaagaggatgaagaggaagaatctctcgatgaattatccactcccatggtatatccaataaaatcatctattccccataatcataacgaaaaggttcagttagtcactcccgaccgttctgtttccataagatctgatgaatgggatttaaagtcaaatactgaagacgaagaaggtaatgttcttgcagacctgaaaataagcagcactaaggaaacaaaaaggcaaacagactacgtccatattgattcagaagaccagtcaccagtagtatccgctcagatgagaaaaatgagaagagaatctacgaaaacactagaaatattgagacaagagtttaaagataaggatgtacaaaacaaagaagaccagtccgaacaaatacaaaacccgtttgtaaatacatcctcgttagttgtaggtaaatcctgtcttgttaatcctaaggaaaagcctaatattgatcaaacggtagtcggaataaccgaattaaagtcaaattcttccattaagaaaagggatatcaacattctcgacactatatttgggcaacctccgtccaagaagcaaaaacaattccacaaaaaggagaaaaagaagcagcagaaaaagttgacaaactttaagcccattatcgatgtcccttcccaagataaacgaaaccttaggtcaaacgctccgacaaaacccaaatccataaaagtaagtaagctgcgtaccgataagaaagttacaggggaaaaatcaagcccagaaacagcggcagagaaagttgatgatcaaactgtgcgtagcaacgatgaacaagcaatgagcagagcaactaaagaaaagtgctttccagatgtcaatgaaggcaaagaaattactaaggatgacgctaaagtatctctcgagtccaaaaaaaacaacgaaacttttgttgattcaagtgtagtagaaaaacatacccccccagacaaagactgtaacaattgtaacattacagatattttggaatctaccactgttatcgacttgcagtcaccccatggattatctgctcctggtcagaatactttcacaaacaaacttcaagaacaaatttatagttcaataaatcatttttctaacgaattggtaagaaaaatttcgataataaaccaagagttaaataagaaaatcttaaaagagttgtccgaaaaataccaaaaactattctccgaattacaagataatttccagaatgataccaatgagatgcttaaattcatgggcgagatcaaagacatgatgaatctcccggaagatcagctcgttcatgctattaggacaagaaaatttgataacaacaagagataa

SEQ ID NO: 7708 - DNA, 2484 bp, Artificial Sequence
  Description of Artificial Sequence: Synthetic polynucleotide
atggaaggtttgaagaaaaagatttttggtgtttgcttgaaaaatgacttagcacagactaggaatgaaacgaaaggaatccactatgggttaatgactttggaaacttctaaacaattgcaggaatttctccatttgttagtaataaagagagaagtaattcaaaattttgagttgttatttcacatcataaatgttgccgttaaaatcaccgattctaatcttccaagtgatgatatctggcatttcattttaaaattaagattttcttctgagattaatatagacgaagactccaaagttttaaattatttacttgagactggcatcgcaatggaaaatccagtcagttggaaatgcttggccgttattagcagcatcctcagcagtgtccctcaatccaaaaagattataactaacttgatcgagacagaacatgccaaaaagattggtcagttgtttgataatattcaagatttgcaacaaggaaattttttagtggaaattctctctaactgttttaaaaaaagtgcttctaattccaagaaagtggaaaaaatacctcagttatggcaaagcaggtctaagaacaagtttttctttgaaaatgaattttacccttttagcagcaaaaatgggagcttacaaacctgccaattcttgtgcaataatttcatgtctactttatcctttacgggtattttaaggcaggtttcttatagcggatctgaaacattaaaaaatctccgtatatttaagaaaaaagacgatgaaaattcttacttcattcagtgcatttacaacaaaatctatctttggttagacgaaaaagcccctttggaatttgaaagaaagaaaatcaggattaccaaaaacttaaaaaataaaattcaaattaaattgaggcaacctttccatgaatgtgtgagaactaccgctgataaaacagcactcttatttaacaaaacgaaggggtttcagttagaatttgaagacgagaaattaggtgaaactttttttcacaatgtcaacaatatacctaagattagtgaagtacaaaactttttagttttagactatattgaagaagaaccagagaatgaaggtgaagaagaagagcaaatcggaagggcagatgagcagaaagaggatgaagaggaagaatctctcgatgaattatccactcccatggtatatccaataaaatcttctattccccataatcataacgaaaaggttcagttagtcactcccgaccgttctgtttccataagatctgatgaatgggatttaaagagcaatactgaagacgaagaaggtaatgttcttgcagacttgaaaataagcagcactaaggaaacaaaaaggcaaacagactacgtccatattgattctgaagaccagtctccagtagtatccgctcagatgagaaaaatgagaagagaatctacgaaaacattagaaatattgagacaagagtttaaagataaggatgtacaaaacaaagaagaccagtccgaacaaatacaaaacccgtttgtaaatacatcctctttagttgtaggtaaatcctgtcttgttaatcctaaggaaaagcctaatattgatcaaacggtagtcggaataaccgaattaaagagcaattcttccattaagaaaagggatatcaacattctcgacactatatttgggcaacctccgtccaagaagcaaaaacaattccacaaaaaggagaaaaagaagcagcagaaaaagttgacaaactttaagcccattatcgatgtcccttcccaagataaaagaaaccttaggtctaacgctccgacaaaacccaaatccataaaagtaagtaagttgcgtaccgataagaaagttacaggggaaaaaagtagcccagaaacagcggcagagaaagttgatgatcaaactgtgcgtagcaacgatgaacaagcaatgagcagagcaactaaagaaaagtgctttccagatgtcaatgaaggcaaagaaattactaaggatgacgctaaagtatctctcgagtccaaaaaaaacaacgaaacttttgttgattctagtgtagtagaaaaacatacccccccagacaaagactgtaacaattgtaacattacagatattttggaatctaccactgttatcgacttgcagtctccccatggattatctgctcctggtcagaatactttcacaaacaaacttcaagaacaaatttatagtagtataaatcatttttctaacgaattggtaagaaaaatttctataataaaccaagagttaaataagaaaatcttaaaagagttgtccgaaaaataccaaaaattattctccgaattacaagataatttccagaatgataccaatgagatgcttaaattcatgggcgagatcaaagacatgatgaatctcccggaagatcagctcgttcatgctattaggacaagaaaatttgataacaacaagagatga

SEQ ID NO: 7709 - DNA, 204 bp, Saccharomyces cerevisiae
atggattctaagaccccagtcaccttagctaaagtcatcaaagttttaggccgtaccggttctcgtggtggtgttacccaagttcgtgttgagttcttggaagacacttcccgtaccattgtcagaaatgtcaagggtccagttagagaaaacgacattttggtcttgatggaatctgaacgtgaagctcgtcgtttgcgttaa

SEQ ID NO: 7710 - DNA, 204 bp, Artificial Sequence
  Description of Artificial Sequence: Synthetic polynucleotide
atggattctaagaccccagtcaccttagctaaagtcatcaaagttttaggccgtaccggttctcgtggtggtgttacccaagttcgtgttgagttcttggaagacacttcccgtaccattgtcagaaatgtcaagggtccagttagagaaaacgacattttggtcttgatggaatctgaacgtgaagctcgtcgtttgcgttga

SEQ ID NO: 7711 - DNA, 117 bp, Saccharomyces cerevisiae
atgaatgtaatatttaaattgtatttaacgatagatgcaccaaaaaaaaagaaagttacagtaagagacttcttgtcgattcgttattccatgccatacaggttagcctcaaattaa

SEQ ID NO: 7712 - DNA, 117 bp, Artificial Sequence
  Description of Artificial Sequence: Synthetic polynucleotide
atgaatgtaatatttaaattgtatttaacgatagatgcaccaaaaaaaaagaaagttacagtaagagacttcttgtctattcgttattccatgccatacaggttagcctctaattga

SEQ ID NO: 7713 - DNA, 1029 bp, Saccharomyces cerevisiae
atggattctgagttgaaagggcagcagctaagtgatgcagaatggtgtgttaaaaaaattaatggtgagggaaattgtctcctattatttctaccgatgtcatctccaaccacaattgtaatgattgttttagtttccttggagcgcttagttccctacgttttcaaactttcacaaactcaattatcacagcaatgccagagccaaggttttacggatagtatatcattaaatctaattaaactaaaactaatggacattctacaagctcctcaagaaattaaccaaattggattggtagattcaaatttggtttttagtttcgatgtatctgcggatattacagtttccataaatagcgtaccttcacatgttactaaggatatgttctatatgattttgcaaagtttatgcatgcttttattaaaattggtaaacctttccacccaataccactatgtacaacgggatattttgaatgaaaagcaaaaatgcttagattttcttttaatttctcttcgtgatttagacggtgggagtaaagttatcagtcaatgggctcctgaaaattctaagaattatgaatctctgcagcaatgcacagacgatgacataatcaaaaaattactacataaaggaaaattccagcatcaagaatttctggcggactcattaaaaacattattatctttaagaaacaaatttcaagatgtgtcgcggtttgaagaatctggagaacttaacaaaaaagagcgcgtcagatttcctgcggtgaatcatttttataatgatgattttgaattgcaagcagaccctacaaatgaggctcgaccaaatagccgcggtaaaattaaaccaaagacagatttcaagccaaaatctagagaaagtagtaccagttcgcaacttcgcctggagaatttttctgaatctgaggctacaccagaaaaaacaaaatcaagttcttctttggtcgaagaatacccacagaaaaaaagaaaatttggaaaggtgagaataaaaaactaa

SEQ ID NO: 7714 - DNA, 1029 bp, Artificial Sequence
  Description of Artificial Sequence: Synthetic polynucleotide
atggattctgagttgaaagggcagcagttgagtgatgcagaatggtgtgttaaaaaaattaatggtgagggaaattgtctcttgttatttttaccgatgtcttctccaaccacaattgtaatgattgttttagtttccttggagcgcttagttccctacgttttcaaactttctcaaactcaattatctcagcaatgccagagccaaggttttacggatagtatatctttaaatttaattaaattgaaattaatggacattttacaagctcctcaagaaattaaccaaattggattggtagattctaatttggtttttagtttcgatgtatctgcggatattacagtttccataaatagcgtaccttctcatgttactaaggatatgttctatatgattttgcaaagtttatgcatgcttttattaaaattggtaaacctttccacccaataccactatgtacaaagagatattttgaatgaaaagcaaaaatgcttagattttcttttaatttctcttcgtgatttagacggtgggagtaaagttatcagtcaatgggctcctgaaaattctaagaattatgaatctttgcagcaatgcacagacgatgacataatcaaaaaattattacataaaggaaaattccagcatcaagaatttttggcggactctttaaaaacattattatctttaagaaacaaatttcaagatgtgtccagatttgaagaatctggagaacttaacaaaaaagagcgcgtcagatttcctgcggtgaatcatttttataatgatgattttgaattgcaagcagaccctacaaatgaggctagaccaaatagccgcggtaaaattaaaccaaagacagatttcaagccaaaatctagagaaagtagtaccagttctcaacttcgcttggagaatttttctgaatctgaggctacaccagaaaaaacaaaatctagttcttctttggtcgaagaatacccacagaaaaaaagaaaatttggaaaggtgagaataaaaaactga

SEQ ID NO: 7715 - DNA, 2106 bp, Saccharomyces cerevisiae
atggatggatcccattttcctatgaaatctactaccggagagcccgtttcaagtggtaagaagggcaagaggaggaaggtcatcaagtcatgtgcattttgtagaaaaagaaaactgaaatgcagtcaggccaggcctatgtgtcagcaatgtgtaattagaaaactaccgcaatgcgtttacacagaagagttcaactatcccttgtctaatacggaactgttcgagcaagtgcccaatgtagcgttggttcagaagattgagaatttgcagactctactgaaggaaaacgataacaataatgcgaaaccggtgtattgcaggagttcagaaaatccattacggtcactgagaacttcggttttaggtgataatggctcgaggtatgtgtttggccccacttcctggaaaactttatctttgtttgaacaaaataagtttcaaactgagtttcaaaatttatggaaagtcttgaaaccacttcctgaatgcactaaatcgcaattaaatgaaaatgatgttgtagcagatttgcctagttttcctcaaatggaaagctgtattaaatctttttttgctggaccgctgttcggcatattgcatatcttcaaccaagacgatattctgtccctcttggacagactttttattagagataccacggacaagaacctagtcatcctcctcgatttgcaaggtaatgcaaaagataagtataatcttggcattgtacttcaaattctttgcttgggctattataaccaagatatcccttcttccgtgagtcatttccttcacactttaagtgcagcgtccttgtcatcatcgagctcaaatttcgtggaaaaactacaatttttcttattgtcctatattagtgtaatgataaattgcacggacggtgtatgggatgcgactcaaggcgttgacttaatcaacgagctatgccaggggtgcataagtttgggtttaaatgatattgataaatggtatttgaacgaaagtgaggaaaccaaacaaaacttgaggtgtatttggttttgggctttattccttgatgtatccacctcatatgatataggtaatcctccgtctatttcagatgatcttttggacttaagtatatttactgcgcagaatttccaatcaccgagtattgactttaggagagttaagctaatgcacgattttttagatgtttcccgattcactactcgtgaaattcacaagagagagatgaacgaaaaattgaccactttttcattgagattgattgaatttatacaatctaacttttcacctatcgaacattatacaaattcagtttactactctgatattgatccctttgatatattgattttatcaagatctctaagtatagttgctagtatatacaatattgagatgatcatcgctcaacaaagcagaatcatagataagaacagaatggttcagttcttgttgatatccatatcagtctgtgttaatacaatggtatttcattttaaagagcctatcaacgaccaggagaacgtgttaactgaagggctaaaactgtctattattctaatcaatccacttttaatacgaatagtatcgcaagtgtacagtttagcatttaataggttaatcttcagggagaaggcattccttttccttattgaccttgacactgggaaaaaaatacaattcattaaatatgaagaagaaaactttgatgaacttttgacaggattcgatgttaggactgataaatttctgtcattttcaggaacaataataagattttacgaaattattgatagcatatttgctgttaatgaaagaaataagcgattgttaaaagcagtttccaatttttatcagttaacttcaactttggcgtttgaacgcgtaagtagggttttattcgataaagcgtcccaagcaagaatagagactgaaaaaatttggctgaaaaagggcattaatatggagcacttcagtgatctcatgattgaagattttattaatgatgtttggaaaacgttcaaagagatttccaaagacctttggtccattgacaaaaagaaattttataaacaatatcatttcgatttataa

SEQ ID NO: 7716 - DNA, 2106 bp, Artificial Sequence
  Description of Artificial Sequence: Synthetic polynucleotide
atggatggatcccattttcctatgaaatctactaccggagagcccgtttctagtggtaagaagggcaagaggaggaaggtcatcaagagttgtgcattttgtagaaaaagaaaattgaaatgcagtcaggccaggcctatgtgtcagcaatgtgtaattagaaaattaccgcaatgcgtttacacagaagagttcaactatcccttgtctaatacggaattattcgagcaagtgcccaatgtagcgttggttcagaagattgagaatttgcagactttattgaaggaaaacgataacaataatgcgaaaccggtgtattgcaggagttctgaaaatccattaagatctttgagaacttctgttttaggtgataatggctccaggtatgtgtttggccccacttcctggaaaactttatctttgtttgaacaaaataagtttcaaactgagtttcaaaatttatggaaagtcttgaaaccacttcctgaatgcactaaatctcaattaaatgaaaatgatgttgtagcagatttgcctagttttcctcaaatggaaagctgtattaaatctttttttgctggaccgcttttcggcatattgcatatcttcaaccaagacgatattttatccctcttggacagactttttattagagataccacggacaagaacttggtcatcctcctcgatttgcaaggtaatgcaaaagataagtataatcttggcattgtacttcaaattctttgcttgggctattataaccaagatatcccttcttccgtgagtcatttccttcacactttaagtgcagcgtccttgagttcttctagcagtaatttcgtggaaaaattacaatttttcttattgtcctatattagtgtaatgataaattgcacggacggtgtatgggatgcgactcaaggcgttgacttaatcaacgagctctgccaggggtgcataagtttgggtttaaatgatattgataaatggtatttgaacgaaagtgaggaaaccaaacaaaacttgaggtgtatttggttttgggctttattccttgatgtatccacctcttatgatataggtaatcctccgtctatttctgatgatcttttggacttaagtatatttactgcgcagaatttccaatctccgagtattgactttaggagagttaagttgatgcacgattttttagatgtttccagattcactactcgtgaaattcacaagagagagatgaacgaaaaattgaccactttttctttgagattgattgaatttatacaatctaacttttctcctatcgaacattatacaaattctgtttactactctgatattgatccctttgatatattgattttatctagatctttgagtatagttgctagtatatacaatattgagatgatcatcgctcaacaaagcagaatcatagataagaacagaatggttcagttcttgttgatatccatatctgtctgtgttaatacaatggtatttcattttaaagagcctatcaacgaccaggagaacgtgttaactgaagggttgaaattatctattattttgatcaatccacttttaataagaatagtatctcaagtgtacagtttagcatttaataggttaatcttcagggagaaggcattccttttccttattgaccttgacactgggaaaaaaatacaattcattaaatatgaagaagaaaactttgatgaacttttgacaggattcgatgttaggactgataaatttttatctttttctggaacaataataagattttacgaaattattgatagcatatttgctgttaatgaaagaaataagagattgttaaaagcagtttccaatttttatcagttaacttctactttggcgtttgaacgcgtaagtagggttttattcgataaagcgtcccaagcaagaatagagactgaaaaaatttggttgaaaaagggcattaatatggagcacttcagtgatctcatgattgaagattttattaatgatgtttggaaaacgttcaaagagatttccaaagacctttggtccattgacaaaaagaaattttataaacaatatcatttcgatttatga

SEQ ID NO: 7717 - DNA, 1713 bp, Saccharomyces cerevisiae
atggttgccgctttaacgtatttgcctactgagcttatccaaaggatatttgagttcactgtggtggaaacagactctcaatattggttgtacaatttagtggctctaattgatttttctgtctcttcgagaggtggtggctctataacggaagacttcttgacaaattacgttaggaagaatttgatggttttagatctgacctgtgaggccacgcaagactcgattttacgagcggagtacgggtttctgaagagattgttgccatacattgacatggacgcacaatatatcagagttgttgatttggaaaccaatgctgacaaggcccagaatttaaaagcagaaaaacttattgttatatttgacgaattctcagatttgaaactcatagaaaccttcttccccttggcgaattccaattcaaacataatcgagttcgtattctgtgttcgcaatataaagagttcgttttattcacctttggaaaaattacatattgcgaacatagtcgcagatattgatattaacacattgtatctggacttcgtggattcaaatatctattcggatcaaaatttctttgggatttttgatcccgatatttttcagctgattaataaaaactatagaaacttcttttctaagactaacgaaaaggggaagaaaagaccccccatttgcaagaaaatctgttttccctttgttgaaacattgaatttggattatatggcccttgattcattctttaattcgatactgcataaactaacaacaaagataaaaacatttgaaaggaacaatgagtttgacgtggataaaaatttaaatttaaactcgacaacgacagtagcagctttaattatcaagtcgatcttgcaacaattcttcaacaattttcatatcagcttccctaatttggttaccttgaattttattaagatgtctacctacccaaacaataatgagattacccaatgttgtaacttcatagatttatcttcatatgttctaaacaaatgtttaagtgagaatatctcgataaatttcctctttcagttgcactctttgaaaaattggtcaatgcccaagattaaagaattcactgggcacaaattcaagtatgacgaaacaacattttcaggttcaccagaaaggtacatcaaatcattgaggggaaacattaaaattttgcaagaaatggcaattaacgaaaccaacgatggtacttgctatttcagagtcaagttgatacctgagggggtagaaaaaactcaaataatcaactggatcccctttacttcttcatttagcgatgataccttcaaacaaagacaccatttaaagaggccaatgatttgcttgaagaacaactctttaagatcgctcactgtcaaaatcatacgtattgaaaaatgttcatccatccgaatccagggattttacctaccaaatctgcaggaactgttcatcaacaataccctttgcgacaccacccaacaccaaaaacaagcgtcaaatgatatgagttgtatagagttcacttcatggaatgaactaccacaatgcaagaaattgggatttgctcaattagaggacgactctaactacgttcttaatatcagtaacctacaagaccatttaccaaatctggacctgcgggagagtttcccaactttcttcgatataagacagaagtttgtcgtggtttga

SEQ ID NO: 7718 - DNA, 1713 bp, Artificial Sequence
  Description of Artificial Sequence: Synthetic polynucleotide
atggttgccgctttaacgtatttgcctactgagcttatccaaaggatatttgagttcactgtggtggaaacagactctcaatattggttgtacaatttagtggctttgattgatttttctgtctcttctagaggtggtggctctataacggaagacttcttgacaaattacgttaggaagaatttgatggttttagatttgacctgtgaggccacgcaagacagtattttaagagcggagtacgggtttttgaagagattgttgccatacattgacatggacgcacaatatatcagagttgttgatttggaaaccaatgctgacaaggcccagaatttaaaagcagaaaaacttattgttatatttgacgaattcagtgatttgaaactcatagaaaccttcttccccttggcgaattccaatagcaacataatcgagttcgtattctgtgttcgcaatataaagagttctttttattctcctttggaaaaattacatattgcgaacatagtcgcagatattgatattaacacattgtatttggacttcgtggattctaatatctattctgatcaaaatttctttgggatttttgatcccgatatttttcagttgattaataaaaactatagaaacttcttttctaagactaacgaaaaggggaagaaaagaccccccatttgcaagaaaatctgttttccctttgttgaaacattgaatttggattatatggcccttgattctttctttaattctatattacataaattaacaacaaagataaaaacatttgaaaggaacaatgagtttgacgtggataaaaatttaaatttaaactccacaacgacagtagcagctttaattatcaagtctatcttgcaacaattcttcaacaattttcatatcagcttccctaatttggttaccttgaattttattaagatgtctacctacccaaacaataatgagattacccaatgttgtaacttcatagatttatcttcttatgttttgaacaaatgtttaagtgagaatatctccataaatttcctctttcagttgcactctttgaaaaattggtctatgcccaagattaaagaattcactgggcacaaattcaagtatgacgaaacaacattttctggttctccagaaaggtacatcaaatctttgaggggaaacattaaaattttgcaagaaatggcaattaacgaaaccaacgatggtacttgctatttcagagtcaagttgatacctgagggggtagaaaaaactcaaataatcaactggatcccctttacttcttcttttagcgatgataccttcaaacaaagacaccatttaaagaggccaatgatttgcttgaagaacaactctttaagaagtctcactgtcaaaatcatacgtattgaaaaatgttcttccatcagaatccagggattttacttgccaaatttacaggaattattcatcaacaataccctttgcgacaccacccaacaccaaaaacaagcgtctaatgatatgagttgtatagagttcacttcttggaatgaattaccacaatgcaagaaattgggatttgctcaattagaggacgactctaactacgttcttaatatcagtaacttacaagaccatttaccaaatttggacttgagagagagtttcccaactttcttcgatataagacagaagtttgtcgtggtttga

SEQ ID NO: 7719 - DNA, 645 bp, Saccharomyces cerevisiae
atgataaagtcaacactaatctacagagaagatgggctgcctctttgtacgtctgtggacaacgaaaatgatccctcattatttgaacaaaagcaaaaggtgaaaatcgtcgtttccagattgacaccacagtctgccacggaggctactttggaaagtggctcctttgagatccattatttgaagaaatccatggtgtactacttcgtcatttgcgaatctggatacccaagaaacttagcattctcataccttaacgatatagcgcaagaatttgaacactcatttgctaatgagtaccccaagcctaccgtaagaccataccagtttgtaaactttgataactttctacagatgacaaaaaagtcatacagtgataagaaagttcaggacaatttggaccaactaaaccaagagcttgtaggtgtcaagcaaatcatgtccaagaacatcgaagacctactttacaggggagattctctcgataaaatgagtgacatgagttcttctttgaaagaaacatccaaaaggtacagaaagtccgcgcaaaagatcaacttcgatctcttgatcagtcaatatgctcctattgtcattgtcgctttctttttcgtctttctcttctggtggatcttcctcaaatag

SEQ ID NO: 7720 - DNA, 645 bp, Artificial Sequence
  Description of Artificial Sequence: Synthetic polynucleotide
atgataaagagtacattgatctacagagaagatgggttgcctctttgtacgtctgtggacaacgaaaatgatccctctttatttgaacaaaagcaaaaggtgaaaatcgtcgtttccagattgacaccacagtctgccacggaggctactttggaaagtggctcctttgagatccattatttgaagaaatccatggtgtactacttcgtcatttgcgaatctggatacccaagaaacttagcattctcttaccttaacgatatagcgcaagaatttgaacacagttttgctaatgagtaccccaagcctaccgtaagaccataccagtttgtaaactttgataactttttgcagatgacaaaaaagtcctacagtgataagaaagttcaggacaatttggaccaattgaaccaagagcttgtaggtgtcaagcaaatcatgtccaagaacatcgaagacttactttacaggggagattctctcgataaaatgagtgacatgagttcttctttgaaagaaacatccaaaaggtacagaaagtccgcgcaaaagatcaacttcgatctcttgatcagtcaatatgctcctattgtcattgtcgctttctttttcgtctttctcttctggtggatcttcctcaaatga

SEQ ID NO: 7721 - DNA, 1053 bp, Saccharomyces cerevisiae
atgtctcaactgccaacagattttgcttcattgatcaagagattccaatttgttagtgtcctcgattccaaccctcaaaccaaagttatgtccttattgggaaccattgacaacaaggatgctattatcacggctgaaaagacgcactttctatttgacgaaaccgtgagaagaccctctcaagatggccgctccactccagttttatataattgtgaaaacgaatattcttgcatcaacggaattcaggaattaaaggagattacttccaatgatatttactactggggtttgtcagtgataaagcaggatatggagtcgaaccctaccgccaagttgaatttaatttggcctgctactccaattcatatcaagaaatatgaacaacaaaactttcatttagtcagagagactcctgagatgtacaagagaattgttcagccttacatcgaagaaatgtgtaataacggtagacttaaatgggtaaacaacattctttatgaaggcgctgagtcagaaagggtcgtttataaagatttttctgaggagaataaggacgacggcttcctaattttacctgatatgaaatgggatggcatgaacttagactctttatatctagttgcgatcgtctacaggaccgatatcaagacaataagggatttaagatattctgacagacagtggttaatcaacttgaacaacaagattagatccattgttcctggttgttacaactatgctgtccatccggatgagttgagaattttggttcactaccaaccttcttattatcatttccacattcacatcgttaacataaagcatcccggtttaggtaatagtattgccgcgggcaaggccatcttgttggaagacatcattgaaatgttaaattatctaggaccagaaggctacatgaacaagacaatcacctacgctattggtgaaaatcatgatttgtggaaaaggggtctggaagaagaactcactaaacaattggaaagagatggtatcccaaaaatacccaagattgtgaacggttttaaataa

SEQ ID NO: 7722 - DNA, 1053 bp, Artificial Sequence
  Description of Artificial Sequence: Synthetic polynucleotide
atgtctcaattaccaacagattttgcttctttgatcaagagattccaatttgttagtgtcctcgattccaaccctcaaaccaaagttatgtccttattgggaaccattgacaacaaggatgctattatcacggctgaaaagacgcactttttgtttgacgaaaccgtgagaagaccctctcaagatggccgctccactccagttttatataattgtgaaaacgaatattcttgcatcaacggaattcaggaattaaaggagattacttccaatgatatttactactggggtttgtctgtgataaagcaggatatggagagcaaccctaccgccaagttgaatttaatttggcctgctactccaattcatatcaagaaatatgaacaacaaaactttcatttagtcagagagactcctgagatgtacaagagaattgttcagccttacatcgaagaaatgtgtaataacggtagacttaaatgggtaaacaacattctttatgaaggcgctgagagtgaaagggtcgtttataaagatttttctgaggagaataaggacgacggcttcttgattttacctgatatgaaatgggatggcatgaacttagactctttatatttggttgcgatcgtctacaggaccgatatcaagacaataagggatttaagatattctgacagacagtggttaatcaacttgaacaacaagattagatccattgttcctggttgttacaactatgctgtccatccggatgagttgagaattttggttcactaccaaccttcttattatcatttccacattcacatcgttaacataaagcatcccggtttaggtaatagtattgccgcgggcaaggccatcttgttggaagacatcattgaaatgttaaattatttgggaccagaaggctacatgaacaagacaatcacctacgctattggtgaaaatcatgatttgtggaaaaggggtttggaagaagaactcactaaacaattggaaagagatggtatcccaaaaatacccaagattgtgaacggttttaaatga

SEQ ID NO: 7723 - DNA, 825 bp, Saccharomyces cerevisiae
atggaggagagtaagacaaaaagaaaagaggatcgcatagatttgaagaatacaccgcctcagaagaagtcaaaaagagattcaacaaatgacgaaactgcacgcacatcactacgttcaatcatgcccaggggttataaaatgatggaaaacatgggttacaaagaaggagaaacattaggtagtaatgaaagtgccctaaaagagcctattaaggtagaaatcaatacaaaaaggaggggaattcgtgcagaaaagcccgacccatcaacaatgaatgacatgcagatgagtgaacaacgatttataaaaagagaaagtgaaatgaaaaataataagcggttaaaaaaaatttggtataggatccaaaaagttgcttttgaaatgatgggtgattccgatttatacaatccaggcgaagatccgagagactttaacgtactttggagatcttacgttatgcaactaaatgaggaagtagcaaaaaatgacctaaataatcacagtaacaatgataatgaagataagaataatatgataccaatggtaaatgaaagtttggaggcttcgcctgcaataaaaggtgaaaagtttggacgtccttctacattaatagattgtgatacttcaattatcggtagtcgcattacaaaagacacagaacttgctgaattagaagaattgagcattgaaaaaagaataacaaaattgaatatattcctgaggtccgagaagtactactgttttttttgcggaatcaagtataaggatgaaggtgatctctacgagcattgcccaggagtgaatgaagacgaccacaaatga

SEQ ID NO: 7724 - DNA, 825 bp, Artificial Sequence
  Description of Artificial Sequence: Synthetic polynucleotide
atggaggagagtaagacaaaaagaaaagaggatcgcatagatttgaagaatacaccgcctcagaagaagagtaaaagagattctacaaatgacgaaactgcacgcacatctttacgttccatcatgcccaggggttataaaatgatggaaaacatgggttacaaagaaggagaaacattaggtagtaatgaaagtgccttgaaagagcctattaaggtagaaatcaatacaaaaaggaggggaattcgtgcagaaaagcccgacccatctacaatgaatgacatgcagatgagtgaacaaagatttataaaaagagaaagtgaaatgaaaaataataagagattaaaaaaaatttggtataggatccaaaaagttgcttttgaaatgatgggtgattccgatttatacaatccaggcgaagatccgagagactttaacgtactttggagatcttacgttatgcaattgaatgaggaagtagcaaaaaatgacttgaataatcacagtaacaatgataatgaagataagaataatatgataccaatggtaaatgaaagtttggaggcttcccctgcaataaaaggtgaaaagtttggacgtccttctacattaatagattgtgatacttctattatcggtagtcgcattacaaaagacacagaacttgctgaattagaagaattgagcattgaaaaaagaataacaaaattgaatatattcttgaggtccgagaagtactactgttttttttgcggaatcaagtataaggatgaaggtgatctctacgagcattgcccaggagtgaatgaagacgaccacaaatga

SEQ ID NO: 7725 - DNA, 3531 bp, Saccharomyces cerevisiae
atgtccggctttagcctttccgagtatctgaccaagttccaaacaacagatcgagaatcatatcctcgcttgcaggacccatccagagaactgaatgttatcatagaccaattggccgtttcacccgaacaaatagatgctagtccagattcactagaagcattaatagatctttgccatgacttcccgcacttaacaccgaaattacaaactcaactaagctatttgataagttcatctctgtcgaatctgtcaaaagatattaaggctaatctctcatcaaatgttaactttactgaaattggtggcctgataccgcagtggaaaaggcatttagaagagtatggctaccttattcaggtacttttgacgtttttacaagatgagttacataaggtctcctcgcagtctaccaatctaaaccgttctgccaaaaacagtaagaatgatagtgcaaacgtcgagctgtttaaaagagactgtaatcaaatggaaaacttgcttgaatctataacaaagctactggagattaacttatctaagatatttcagacaactcctgaaaaggatttgtttattggtttgttcacaagaccattatttgtgttattagagattgaacctgtgacgaaggtatcatcactaaagatgtttattcaaaggattttggctatgtgtgttaaaaatcacggtcaaagttcaagtatacaaagttcattgatgacaaatttaacttattttcttcatttgtcggtttttaatgcagaattactaaaactattgaatgatgaatataactatccacaactaacagaagatatcttgaaagaaatcagcaccagggtatttaacgcaaaggataccacaggcccaaaggcaatatcaaattttttgattaaattatcagagctatcaccaggaataatgcttcgacagatgaatcttgtcatcaccttactcaacaatagttctataacattgagatgttccgttgtagaagcatgtggaaatattgtggctgaattggctcaagacccacaaactatggaacattataaacaacaaatagccgtacttattgagttactagaagaaagattccaggattcaaatccctacgttagaacgaaggcgatacaagggtgttcaaagatctgcgatttgagttcgaaatttaacaaaagcaaagctaaatttacttcgttggcagtacgatcattgcaggaccgctcctctttagttcgtaggaactcagtaaagttactttcaaaattattgctaaaacatccttttaaggccatacatggtagccaattgaggctgagtgaatgggaagaatatctcaaaggatctgaatcacagctaaattccactttaaagaaagtagagtcacaagaaactctgaatgacacgattgaaaggtctttgattgaagaagaggtagaacaagatgaaggtcaatgtaggaccgagttagaaggttctttcaataagagcgcagaactttctagaatagaaaatgaggtagagaatataaatgcaacaaataccagtgttctcatgaagctaaagttaatgattgtttactataaagatgccattagtttcattaaagagatacacaagagtattgaattgatatctaatttgctgttttctaagaacagaaacgaagttttagaatcaatggacttcctagttttagcagacgcttttgacattgagttaagcgaatttggtataaaaaaaatgctgcatttggtttggatgaagggcacaaacgatgaaggaacgagtatatcagtacatttgatagaatgttataagcagctatttttaaccgcgccagatagttgcaatatgcaggagaaggcggcacatattgccaaaaatttaattaatctaagcatcggcgcatctattgcagacttggcctctttggaacagctattaggaatgatgtatgaacaaaaattgattgatcaacatgtcattaatatcctttgggctatttacaattctgcatcgaaggccagtatgcagaaagaacaaaatgtgaacaaccgtgactccgaaaaagggttttctaaggaacaaattcatggttctattattattttaggaatgttatcgttagccgataacgaaatagcattaaaaggactggagtcacttttaaacattggacttggtgccgttggtttaaaagatctgaccctttgtcggtattcttgtttagcgttagagagaatggttcccaagagaagcactattattaccaaggcaataaatcaagagcttgaagatgttgcagtgaaaaagttgtatgccataattatcaactataccaaggataatgaatattatcctatgtgcgaacaagcgcttagtgcactgtttacaatctcttctaagcccgatatactagctacagatctgattagagaaaagacaatgatgacatttggtaaacctgaagaggaagactctattttgtcgttagaacaatcatctagagttgtttctctcagtcaattattattcattgtaggacaagtggcaattaaaacacttgtctatctagagaaatgtgaggcagaattcaagaaaagaaagatcgaggcagaaactcggaacggtaaagtaaaaaaccaaggtgcagatgtaactaacaccacacaagataacggtggtgataaagagctagaaatgataggaggtactaatgaggacgatttcacggatgctattcaatttgtaaaagagaatgaattactatttggagaaaaatctatattagggaagttttgcccaattgtagaagagattgtttctaattcaagcaggtttagcgatccaatgcttcaaagaacggcaaccttatgtctagaaaaactaatgtgtttatcatcaaaatattgtgaaaagagcctgccgctattaatcacagtaatggaaaaatctcctgatcctactattcgctcaaatgctgtcttaggactaggtgacatggcagtatgcttcaacaacttagtagacgaaaacacagattatttgtatcgccgtttgcatgatgaaaacttaatggtacaaagaacatgtttaatgacagttaccttcttgattttagctggacaggttaaggttaaaggacaattaggagaaatggccaaatgcctagacaatccagaccagggaataagtgatatgtgcagattatttttcaccgagttagcatccaaggacaacgccatttataatggattcatcgatatctttagtaatttatcgtcagatgatttattgggtaaggagagtttcaagaaaatcatcaaatttctgttaacttttatcgataaggaacggcaccaaaagcaattaaacgagaaattagttggaagactgagaaagtgcgagacccaaaagcaatgggatgatattgcattcgtactaaacaatctaccatacaaaaatgaagacgtcactgcattattggagcaaggtttcaaggttgtatccgcaaaagaataa

SEQ ID NO: 7726 - DNA, 3531 bp, Artificial Sequence
  Description of Artificial Sequence: Synthetic polynucleotide
atgtccggctttagcctttccgagtatttgaccaagttccaaacaacagatagagaaagttatcctcgcttgcaggacccatccagagaattgaatgttatcatagaccaattggccgtttctcccgaacaaatagatgctagtccagattctttggaagcattaatagatctttgccatgacttcccgcacttaacaccgaaattacaaactcaattgagctatttgataagttcttctttatccaatttatccaaagatattaaggctaatctctcttccaatgttaactttactgaaattggtggcttgataccgcagtggaaaaggcatttagaagagtatggctaccttattcaggtacttttgacgtttttacaagatgagttacataaggtctcctctcagtctaccaatttgaaccgttctgccaaaaacagtaagaatgatagtgcaaacgtcgagttatttaaaagagactgtaatcaaatggaaaacttgcttgaatctataacaaagttattggagattaacttatctaagatatttcagacaactcctgaaaaggatttgtttattggtttgttcacaagaccattatttgtgttattagagattgaacctgtgacgaaggtatcttctttgaagatgtttattcaaaggattttggctatgtgtgttaaaaatcacggtcaaagtagtagtatacaaagttctttgatgacaaatttaacttattttcttcatttgagtgtttttaatgcagaattattgaaacttttgaatgatgaatataactatccacaattgacagaagatatcttgaaagaaatcagcaccagggtatttaacgcaaaggataccacaggcccaaaggcaatatccaattttttgattaaattatctgagttatctccaggaataatgcttcgtcagatgaatcttgtcatcaccttactcaacaatagttctataacattgagatgttccgttgtagaagcatgtggaaatattgtggctgaattggctcaagacccacaaactatggaacattataaacaacaaatagccgtacttattgagttattggaagaaagattccaggattctaatccctacgttagaacgaaggcgatacaagggtgttccaagatctgcgatttgagttctaaatttaacaaaagcaaagctaaatttacttctttggcagtaagaagtttgcaggaccgctcctctttagttcgtaggaactctgtaaagttactttctaaattattgttgaaacatccttttaaggccatacatggtagccaattgaggttgagtgaatgggaagaatatctcaaaggatctgaatctcagttgaattccactttaaagaaagtagagtctcaagaaactttgaatgacacgattgaaaggtctttgattgaagaagaggtagaacaagatgaaggtcaatgtaggaccgagttagaaggttctttcaataagagcgcagaactttctagaatagaaaatgaggtagagaatataaatgcaacaaataccagtgttctcatgaagttgaagttaatgattgtttactataaagatgccattagtttcattaaagagatacacaagagtattgaattgatatctaatttgttattttctaagaacagaaacgaagttttagaaagtatggacttcttggttttagcagacgcttttgacattgagttaagcgaatttggtataaaaaaaatgttgcatttggtttggatgaagggcacaaacgatgaaggaacgagtatatctgtacatttgatagaatgttataagcagttatttttaaccgcgccagatagttgcaatatgcaggagaaggcggcacatattgccaaaaatttaattaatttgagcatcggcgcatctattgcagacttggcctctttggaacagcttttaggaatgatgtatgaacaaaaattgattgatcaacatgtcattaatatcctttgggctatttacaattctgcatccaaggccagtatgcagaaagaacaaaatgtgaacaaccgtgactccgaaaaagggttttctaaggaacaaattcatggttctattattattttaggaatgttatctttagccgataacgaaatagcattaaaaggattggagtctcttttaaacattggacttggtgccgttggtttaaaagatttgaccctttgtagatattcttgtttagcgttagagagaatggttcccaagagaagcactattattaccaaggcaataaatcaagagcttgaagatgttgcagtgaaaaagttgtatgccataattatcaactataccaaggataatgaatattatcctatgtgcgaacaagcgcttagtgcattatttacaatctcttctaagcccgatatattggctacagatttgattagagaaaagacaatgatgacatttggtaaacctgaagaggaagactctattttgtctttagaacaatcttctagagttgtttctctcagtcaattattattcattgtaggacaagtggcaattaaaacacttgtctatttggagaaatgtgaggcagaattcaagaaaagaaagatcgaggcagaaactagaaacggtaaagtaaaaaaccaaggtgcagatgtaactaacaccacacaagataacggtggtgataaagagttagaaatgataggaggtactaatgaggacgatttcacggatgctattcaatttgtaaaagagaatgaattactttttggagaaaaatctatattagggaagttttgcccaattgtagaagagattgtttctaatagtagcaggtttagcgatccaatgcttcaaagaacggcaaccttatgtttagaaaaattaatgtgtttatcttctaaatattgtgaaaagagcttaccgttgttaatcacagtaatggaaaaatctcctgatcctactattcgcagtaatgctgtcttaggattaggtgacatggcagtatgcttcaacaacttagtagacgaaaacacagattatttgtatcgccgtttgcatgatgaaaacttaatggtacaaagaacatgtttaatgacagttaccttcttgattttagctggacaggttaaggttaaaggacaattaggagaaatggccaaatgcttggacaatccagaccagggaataagtgatatgtgcagattatttttcaccgagttagcatccaaggacaacgccatttataatggattcatcgatatctttagtaatttatcttctgatgatttattgggtaaggagagtttcaagaaaatcatcaaatttttattaacttttatcgataaggaaagacaccaaaagcaattaaacgagaaattagttggaagattgagaaagtgcgagacccaaaagcaatgggatgatattgcattcgtattgaacaatttaccatacaaaaatgaagacgtcactgcattattggagcaaggtttcaaggttgtatccgcaaaagaatga

SEQ ID NO: 7727 - DNA, 1947 bp, Saccharomyces cerevisiae
atgccttacagccatggtaagaagcttaaaccgtctttgaaactcgcaaaaacaatctccacttcttcttttgtttcctcaacaacctctaattcattttcaccactagaagactctacatctgcatcttcgtcgacatcatcttcatcatcagggaaatcggtaaggtttgctgcacatttatacacagtcaaaaagttcaacacaaaattggcgcctatctcgatatcagaaaaagccgcttcaaatcttacaagaaatttgcataacaatgccattccactaacgttccccttcattggaggtgaagatcatcgttatagtttagacattttagattacagtgatttagaatatgacaataaggatgttgagtatgacaacgagagtgacgtagaggataatgcaatgcttatgcatgatcgtagcatgttcattgaaaaggagattctctgctttggtgaagaggagacattcgatatggcagattggaaactggtcagtaataatttgaatccattcaaaagtgactataaagtggacgttactgggttggaagacaagattttcaaatacttaaatggacaaaatataaaggttcattcattagaactatctgatcctgtaagctacgaggatatttgtagcaataattttggtaactgtcaaatctggggccttatatttgtcaataatttgaacttcgagaaaaaaatagagataaaatttactttaaataactgggcagatattcactatattaatgcacactacaacaagtctgtcacccctcatgttgacgaattcaaatttattattgatatatctgcgttgaagttaaatctaatatcaaaaaacttgatttacactaacttttttgaaaggaaaactacttgtctcctgaatttgcagttctgttgtcgttatgatgtaaatggtttcgaatatagatcattttacgataataatgactataaaaactatgaaataacgatctctttgtcagcaataaatctaaatcgtgcggtttcgaattcatcgatatttaattccaatcttgggccttccaaaatgggggctagcaatgcagaggttactatgtcgaaaaataatgaaaattctaaaaagcctctcagaaaattcattaaagatacagattactacaacgactccccgttaaagcacaaattttatcaatcgtttgaaacaaaagcggcttgtaaaaccgaacctgtatcccaaactttcaaagctgaaacaattgattgtgaaattgaaccatttaattatttctttgaaccgcctgattcccaaactaatgaggacatgtccgatagctcatatgacttatcgctacaagattttaactattgggaatttagtaaccacggactagggaaagcactggctgactcagatatcttacaatttaaaaattatccaaaaccagagccttttagcaggcctcccataatagatgacacattcacattaaataccgatgataggaccttaggttcaaaaacacaaaagcttgaagataatttggccaaagagtggaaaagcgctaagacaaggaccacgttaaacgagacgccattacacgatgatgagcatagaacttccttcacctacaccacttggaataattctaccgatacattgatgaaaagaaaagaggagcgaccagtagaatcagcctcttgttctcagttatccattgcaaccataaaggcggaagaagatttactataccaagattatatcaacagcgggagggaaagctcatctccggaaatttctcccttgaataccacaacctcattaccattttttccaggtgataatatgagtgacagctcaggagaatatgaggagagaacctctcttagccctaataaaattcacatttttcgtgattatttttataagtcgccgtcaccctaa

SEQ ID NO: 7728 - DNA, 1947 bp, Artificial Sequence
  Description of Artificial Sequence: Synthetic polynucleotide
atgccttacagccatggtaagaagcttaaaccgtctttgaaactcgcaaaaacaatctccacttcttcttttgtttcctctacaacctctaattctttttctccattggaagactctacatctgcatcttcttctacatcttcttcttcttctgggaaatctgtaaggtttgctgcacatttatacacagtcaaaaagttcaacacaaaattggcgcctatctccatatctgaaaaagccgcttctaatcttacaagaaatttgcataacaatgccattccattaacgttccccttcattggaggtgaagatcatcgttatagtttagacattttagattacagtgatttagaatatgacaataaggatgttgagtatgacaacgagagtgacgtagaggataatgcaatgcttatgcatgatcgtagcatgttcattgaaaaggagattctctgctttggtgaagaggagacattcgatatggcagattggaaattggtcagtaataatttgaatccattcaaaagtgactataaagtggacgttactgggttggaagacaagattttcaaatacttaaatggacaaaatataaaggttcattctttagaattatctgatcctgtaagctacgaggatatttgtagcaataattttggtaactgtcaaatctggggccttatatttgtcaataatttgaacttcgagaaaaaaatagagataaaatttactttaaataactgggcagatattcactatattaatgcacactacaacaagtctgtcacccctcatgttgacgaattcaaatttattattgatatatctgcgttgaagttaaatttgatatccaaaaacttgatttacactaacttttttgaaaggaaaactacttgtctcttgaatttgcagttctgttgtcgttatgatgtaaatggtttcgaatatagatctttttacgataataatgactataaaaactatgaaataacgatctctttgagtgcaataaatttgaatcgtgcggtttctaattcttctatatttaattccaatcttgggccttccaaaatgggggctagcaatgcagaggttactatgtccaaaaataatgaaaattctaaaaagcctctcagaaaattcattaaagatacagattactacaacgactccccgttaaagcacaaattttatcaaagttttgaaacaaaagcggcttgtaaaaccgaacctgtatcccaaactttcaaagctgaaacaattgattgtgaaattgaaccatttaattatttctttgaaccgcctgattcccaaactaatgaggacatgtccgatagctcttatgacttaagtttacaagattttaactattgggaatttagtaaccacggattagggaaagcattggctgacagtgatatcttacaatttaaaaattatccaaaaccagagccttttagcaggcctcccataatagatgacacattcacattaaataccgatgataggaccttaggttccaaaacacaaaagcttgaagataatttggccaaagagtggaaaagcgctaagacaaggaccacgttaaacgagacgccattacacgatgatgagcatagaacttccttcacctacaccacttggaataattctaccgatacattgatgaaaagaaaagaggagagaccagtagaaagtgcctcttgttctcagttatccattgcaaccataaaggcggaagaagatttattgtaccaagattatatcaacagcgggagggaaagctcttctccggaaatttctcccttgaataccacaaccagtttaccattttttccaggtgataatatgagtgacagcagtggagaatatgaggagagaacctctcttagccctaataaaattcacatttttcgtgattatttttataagagcccgtctccctga

SEQ ID NO: 7729 - DNA, 2328 bp, Saccharomyces cerevisiae
atgtcatttgatagaccggaaatatacagtgctcctgttttacaaggagaatctcctaacgacgatgataatactgaaatcataaagtcctttaagaatttcattttggagttcagacttgactcgcaatttatttacagagatcagttaaggaacaacatccttgtgaagaattattctttaacggttaacatggagcatttgatcggatataacgaagacatatataagaaactatcagacgaaccttcagatatcattccattattcgaaaccgcgatcacacaagtggctaaaaggataagtattctaagcagagctcaatctgctaataacaatgacaaagatccagaaaatactagtatggatactgattctctcttattgaactctttaccaacatttcaattaattttaaactccaatgcaaatcagattccattgagagatttggattctgaacacgtctccaagattgtccgtttatcaggtattataatatccacgtcagttttatcttcccgtgccacgtacctttctataatgtgcagaaattgcagacacacaacatcaataacaatcaacaatttcaattctatcacaggcaataccgtcagtttaccacgttcttgcttatctacgattgagagtgaatcttctatggcaaacgagtcgaatattggtgatgaatcgaccaagaaaaattgtggacctgatccatatattattatccatgagtcttcaaagtttattgatcaacagtttttaaaattacaggaaatcccagaactggttccagtaggtgagatgcctagaaacttaacaatgacttgtgaccgatacctaacaaacaaagttattcctggtacgagagtcactatagtaggtatttattccatctataattctaaaaatggtgccggatccggaaggagcgggggtggaaatggaggaagtggtgttgctattagaacaccttatatcaaaatattaggtattcagtccgatgtagaaacctcctctatttggaattcagtaactatgtttactgaggaggaagaagaggaatttctacagctaagtagaaacccgaagctttatgaaattttgaccaactctattgccccctctatttttggtaatgaagatataaaaaaagccattgtatgtttattgatgggtggttccaagaagatattacccgatggtatgaggttaagaggtgatatcaatgtactattattaggtgatccaggtaccgccaaatctcaactattgaaatttgtggagaaagtgtcacctattgcggtatatacatctggtaagggatcttctgcagctgggttaactgccagtgtacaaagagatccgatgacaagagaattttatttggaaggtggtgctatggtgcttgccgatggtggtgttgtatgcatcgatgaattcgataaaatgagagatgaagatagagtggccattcatgaagctatggagcagcaaacaatctccatcgcaaaagctggtatcactacagtgctaaattctagaactagtgttttagcggctgctaatccgatatacggccggtatgatgatttgaagtctcctggtgacaacattgatttccaaactactattttatcccgttttgatatgatttttattgttaaggatgaccataatgaagaacgtgatatttcaatagctaaccacgttattaatattcatacaggaaatgctaatgctatgcaaaaccaacaagaggaaaatggcagtgaaattagtattgaaaagatgaaacgttacattacgtattgtagattgaaatgtgcaccaagactttcaccgcaggccgctgaaaaactgtcatcgaacttcgtcaccattaggaagcaattattaatcaacgaattagagtcaacggaaaggtcgtctattccaattaccattcgtcaattagaagctattattagaataacagaatcattagccaagttagaattaagtcctattgcacaggagagacatgttgacgaagctattagattgtttcaagcttccacaatggacgcagcgtctcaggatccaattggcggcttaaatcaagcaagcggaacatctttgtcagaaatccgtcgttttgaacaagaactaaaaagaagattacctataggctggtctacttcttatcaaactttgaggagagaatttgtagatacacatagattttctcaattagcactggataaggccttatatgccctagagaagcatgaaacaattcaattgagacaccagggacagaatatttacagaagtggtgtatga

SEQ ID NO: 7730 - DNA, 2328 bp, Artificial Sequence
  Description of Artificial Sequence: Synthetic polynucleotide
atgagttttgatagaccggaaatatacagtgctcctgttttacaaggagaatctcctaacgacgatgataatactgaaatcataaagtcctttaagaatttcattttggagttcagacttgactctcaatttatttacagagatcagttaaggaacaacatccttgtgaagaattattctttaacggttaacatggagcatttgatcggatataacgaagacatatataagaaattaagtgacgaaccttctgatatcattccattattcgaaaccgcgatcacacaagtggctaaaaggataagtattttgagcagagctcaatctgctaataacaatgacaaagatccagaaaatactagtatggatactgattctctcttattgaactctttaccaacatttcaattaattttaaactccaatgcaaatcagattccattgagagatttggattctgaacacgtctccaagattgtccgtttatctggtattataatatccacgtctgttttatcttcccgtgccacgtacctttctataatgtgcagaaattgcagacacacaacatctataacaatcaacaatttcaattctatcacaggcaataccgtcagtttaccacgttcttgcttatctacgattgagagtgaatcttctatggcaaacgagagcaatattggtgatgaaagtaccaagaaaaattgtggacctgatccatatattattatccatgagtcttccaagtttattgatcaacagtttttaaaattacaggaaatcccagaattggttccagtaggtgagatgcctagaaacttaacaatgacttgtgacagatacttgacaaacaaagttattcctggtacgagagtcactatagtaggtatttattccatctataattctaaaaatggtgccggatccggaaggagcgggggtggaaatggaggaagtggtgttgctattagaacaccttatatcaaaatattaggtattcagtccgatgtagaaacctcctctatttggaattctgtaactatgtttactgaggaggaagaagaggaatttttgcagttgagtagaaacccgaagctttatgaaattttgaccaactctattgccccctctatttttggtaatgaagatataaaaaaagccattgtatgtttattgatgggtggttccaagaagatattacccgatggtatgaggttaagaggtgatatcaatgtattgttattaggtgatccaggtaccgccaaatctcaattattgaaatttgtggagaaagtgtctcctattgcggtatatacatctggtaagggatcttctgcagctgggttaactgccagtgtacaaagagatccgatgacaagagaattttatttggaaggtggtgctatggtgcttgccgatggtggtgttgtatgcatcgatgaattcgataaaatgagagatgaagatagagtggccattcatgaagctatggagcagcaaacaatctccatcgcaaaagctggtatcactacagtgttgaattctagaactagtgttttagcggctgctaatccgatatacggcagatatgatgatttgaagtctcctggtgacaacattgatttccaaactactattttatcccgttttgatatgatttttattgttaaggatgaccataatgaagaacgtgatatttctatagctaaccacgttattaatattcatacaggaaatgctaatgctatgcaaaaccaacaagaggaaaatggcagtgaaattagtattgaaaagatgaaacgttacattacgtattgtagattgaaatgtgcaccaagactttctccgcaggccgctgaaaaattatcttccaacttcgtcaccattaggaagcaattattaatcaacgaattagagtctacggaaaggtcttctattccaattaccattcgtcaattagaagctattattagaataacagaatctttagccaagttagaattaagtcctattgcacaggagagacatgttgacgaagctattagattgtttcaagcttccacaatggacgcagcgtctcaggatccaattggcggcttaaatcaagcaagcggaacatctttgagtgaaatccgtcgttttgaacaagaattgaaaagaagattacctataggctggtctacttcttatcaaactttgaggagagaatttgtagatacacatagattttctcaattagcattggataaggccttatatgccttagagaagcatgaaacaattcaattgagacaccagggacagaatatttacagaagtggtgtatga

SEQ ID NO: 7731 - DNA, 333 bp, Saccharomyces cerevisiae
atgtcttcacaaataattgatcgtccaaaacatgaactctctagagcagaattagaggaactagaagaatttgaattcaaacatggtccaatgtccctgataaatgatgctatggtgacaagaacacctgtgataatctcattaagaaacaatcataaaataatagcgagagtgaaagctttcgacaggcattgtaatatggttttagaaaatgtgaaggagctttggacagagaagaagggcaaaaatgtaattaatcgggaaagattcataagtaaactattcttaagaggtgattcagttatcgttgtgttaaaaacccctgttgagtaa

SEQ ID NO: 7732 - DNA, 333 bp, Artificial Sequence
  Description of Artificial Sequence: Synthetic polynucleotide
atgtcttctcaaataattgatcgtccaaaacatgaactctctagagcagaattagaggaattggaagaatttgaattcaaacatggtccaatgtccttgataaatgatgctatggtgacaagaacacctgtgataatctctttaagaaacaatcataaaataatagcgagagtgaaagctttcgacaggcattgtaatatggttttagaaaatgtgaaggagctttggacagagaagaagggcaaaaatgtaattaatagagaaagattcataagtaaattattcttaagaggtgattctgttatcgttgtgttaaaaacccctgttgagtga

SEQ ID NO: 7733 - DNA, 1785 bp, Saccharomyces cerevisiae
atgagctatgagaaaaagtctgtggaaggcgcttatattgacgattctacaacgttcgaagcatttcatctcgactctcgtttattacaagctattaagaatataggatttcagtacccaacattaattcaatcacatgctattcctttggctttacaacagaagagagatattatagcaaaggccgctacaggttccggaaaaactttggcatacctcattcctgtaattgaaactatcctagaatataaaaaaacaattgataacggagaggaaaatggtacactaggtattatacttgttccaacaagagaactggctcaacaagtatataatgttttagaaaaactagtcttatattgttcaaaagatataagaactctgaacatatcatccgatatgtctgactcagttttgagcactctacttatggatcaaccagaaatcatagttggtacacctggtaaattattggatttgttgcaaacaaagattaattctatctcattgaacgaactaaaatttttagtagttgatgaggtggatttagtgttaacatttggttatcaagatgatttaaacaaaattggagagtacttaccattgaaaaaaaatttacaaacatttttgatgagtgcaaccctaaatgacgatatacaggctttgaaacaaaaattttgtcgttctccagctattcttaaattcaatgacgaggaaataaataagaaccaaaacaaattacttcaatattacgttaaagtcagtgaatttgacaaattcttactatgctatgtcatttttaaacttaacttaatcaagggtaaaacattaatttttgtaaataatattgacagaggatataggctcaagctagttatggaacaatttggtatcaagtcctgtattttaaacagcgagctacccgttaattcgaggcaacatattgttgaccaattcaataaaaacgtttaccaactattgattgccacagatgacaccgagtacataaaagaggaagatgacgaaatagaagaagggcacaatacagaaaatcaagaagaaaaaagcttggaaggcgagcctgagaacgataagaaaccaagcaagaaaaagaaggtccaagtgaagaaagataaggaatatggtgtttctcgtggtgttgatttcaaaaatgttgcatgtgtcctcaatttcgatttacctacgacggctaagtcctacgtgcatagagtaggtagaactgctcgtggcggaaagaccggtactgcaatttcattcgtagtcccactgaaagaatttggtaagcataagccatcaatgctacagacagcaaagaaggatgaaaggattctttcacgaatcatcaaacaacagagcaaacttggattagaattacagccttacaaattcgatcaaaagcaggtcgaggcgttccgttacagaatggaagacggtttccgtgctgttactcaagttgccattagagaagctagggtcaaagagttgaaacaagaactattggcaagtgagaagttgaaaagacattttgaggagaatccaaaagagctacaaagtttaagacacgataaagaattacatccagcaagagtgcaacagcatttaaagcgtgttccagattacttgcttcctgaatcagccagaggaaatggaaccaaagtcaagtttgttcctttccacaatgctaagaagcgccattcacataaaaagggaagagtcagtaagccaaagaatggtaaagtagacccgttgaagaacttcaaatga

SEQ ID NO: 7734 - DNA, 1785 bp, Artificial Sequence
  Description of Artificial Sequence: Synthetic polynucleotide
atgagctatgagaaaaagtctgtggaaggcgcttatattgacgattctacaacgttcgaagcatttcatctcgactctcgtttattacaagctattaagaatataggatttcagtacccaacattaattcaatctcatgctattcctttggctttacaacagaagagagatattatagcaaaggccgctacaggttccggaaaaactttggcatacctcattcctgtaattgaaactatcttggaatataaaaaaacaattgataacggagaggaaaatggtacattaggtattatacttgttccaacaagagaattggctcaacaagtatataatgttttagaaaaattggtcttatattgttctaaagatataagaactttgaacatatcttccgatatgtctgactctgttttgagcactttacttatggatcaaccagaaatcatagttggtacacctggtaaattattggatttgttgcaaacaaagattaattctatctctttgaacgaattgaaatttttagtagttgatgaggtggatttagtgttaacatttggttatcaagatgatttaaacaaaattggagagtacttaccattgaaaaaaaatttacaaacatttttgatgagtgcaaccttgaatgacgatatacaggctttgaaacaaaaattttgtcgttctccagctattcttaaattcaatgacgaggaaataaataagaaccaaaacaaattacttcaatattacgttaaagtcagtgaatttgacaaattcttattatgctatgtcatttttaaacttaacttaatcaagggtaaaacattaatttttgtaaataatattgacagaggatataggctcaagttggttatggaacaatttggtatcaagtcctgtattttaaacagcgagttgcccgttaattctaggcaacatattgttgaccaattcaataaaaacgtttaccaattattgattgccacagatgacaccgagtacataaaagaggaagatgacgaaatagaagaagggcacaatacagaaaatcaagaagaaaaaagcttggaaggcgagcctgagaacgataagaaaccaagcaagaaaaagaaggtccaagtgaagaaagataaggaatatggtgtttctcgtggtgttgatttcaaaaatgttgcatgtgtcctcaatttcgatttacctacgacggctaagtcctacgtgcatagagtaggtagaactgctcgtggcggaaagaccggtactgcaatttctttcgtagtcccattgaaagaatttggtaagcataagccaagcatgttacagacagcaaagaaggatgaaaggattctttctagaatcatcaaacaacagagcaaacttggattagaattacagccttacaaattcgatcaaaagcaggtcgaggcgttccgttacagaatggaagacggtttccgtgctgttactcaagttgccattagagaagctagggtcaaagagttgaaacaagaattattggcaagtgagaagttgaaaagacattttgaggagaatccaaaagagttacaaagtttaagacacgataaagaattacatccagcaagagtgcaacagcatttaaagcgtgttccagattacttgcttcctgaaagtgccagaggaaatggaaccaaagtcaagtttgttcctttccacaatgctaagaagcgccattctcataaaaagggaagagtcagtaagccaaagaatggtaaagtagacccgttgaagaacttcaaatga

SEQ ID NO: 7735 - DNA, 2340 bp, Saccharomyces cerevisiae
atggagcgaacaaatacaacaacattcaaatttttttcattgggaggaagtaacgaagttggacgatcatgtcatatattgcaatataaaggtaaaacagtgatgctcgacgcaggaattcatccggcatatcaaggattagcttcattacctttttacgatgaatttgatctttccaaagtcgatatcttactgatatcacatttccatttagaccatgccgcttcacttccgtatgtgatgcaacggactaactttcaaggcagagttttcatgacacatccaaccaaagccatttacagatggctactgcgagattttgtaagagttactagtataggttcttcatcctcctctatggggactaaagacgaaggtctattctcagatgaggatttagttgattctttcgataaaattgaaacggtggactatcattctactgttgacgtcaatggtatcaaatttacggcattccatgcaggccatgtattgggtgcagcgatgtttcaaatagagattgctggccttagggtgttattcacaggtgactattcgagagaagtagatcgtcacttaaattctgctgaggtgcctccactttcatccaacgtattaattgtggaatctacctttggtaccgctactcacgagccccgtttaaatagagaaaggaagctaacccaactaatccattccacagtgatgagaggaggccgtgttctactgcctgtttttgctttagggagagctcaagaaatcatgcttatactggatgagtactggtctcaacatgctgatgaactcggtggtggacaagtcccaatattttatgcatcaaatttggcaaaaaaatgtatgagcgtttttcaaacctatgtaaatatgatgaatgatgacattagaaaaaaatttagagactctcagactaatcccttcatattcaaaaatatatcttatcttagaaacttggaggatttccaagattttggtcccagtgtgatgttggcctcaccaggtatgctgcaaagtgggttatcaagagatttacttgaaaggtggtgccctgaagataaaaatctagtactaatcaccggttactccatcgaaggaacaatggcgaaatttattatgcttgagccagatacaataccttccataaataatccggaaataaccattccaagacgttgtcaagttgaagaaatctcctttgccgcacacgttgacttccaggaaaatttagaatttattgaaaagattagtgcgccaaatatcatccttgttcatggagaagccaatcccatgggccgtttgaaatctgcattgttatccaatttcgcgtctttaaagggtacagataatgaagtccatgtttttaatcctagaaactgtgttgaagtagatcttgaatttcaaggtgtcaaggttgcaaaagctgtgggaaatattgtgaacgaaatatataaagaagaaaacgtagagataaaggaagaaattgcggctaaaattgaacctataaaggaagaaaacgaagacaacttggattctcaagcagaaaaaggtttggttgatgaagaggaacacaaagacatagtcgtttctgggattctagtttcagatgacaaaaatttcgaattagacttcctttctttgtctgatttaagagagcaccatcccgatctttctacaacgatattaagagagcgccagtcagttcgtgtaaattgtaaaaaggagctaatttactggcacattttacaaatgtttggagaggctgaagttcttcaagatgatgatagagtaacaaatcaagaaccaaaggttaaagaagagtcaaaagacaatctgaccaatacaggtaaattgattctacagataatgggtgatattaagttaactattgttaatactctagccgttgtggaatggactcaagatttaatgaatgacactgtagcagactccattattgctatacttatgaatgtggattcagctcccgccagtgtcaagctttcgagtcattcttgtgatgatcatgatcataacaatgtgcagtctaatgcacaaggtaagattgatgaagttgagagggtgaagcaaatctcaaggttgtttaaagaacagtttggtgactgttttactttatttctcaataaagatgaatatgcaagtaataaagaggaaactataactggagtggttaccataggtaaaagcactgctaagattgacttcaacaatatgaaaattttagaatgtaattcaaatcctttgaaaggtagggtggaaagcctcttaaatattggtggtaatttggtcacaccgctatgttaa

SEQ ID NO: 7736 - DNA, 2340 bp, Artificial Sequence
  Description of Artificial Sequence: Synthetic polynucleotide
atggagagaacaaatacaacaacattcaaatttttttctttgggaggaagtaacgaagttggaagatcttgtcatatattgcaatataaaggtaaaacagtgatgctcgacgcaggaattcatccggcatatcaaggattagcttctttacctttttacgatgaatttgatctttccaaagtcgatatcttattgatatctcatttccatttagaccatgccgcttctcttccgtatgtgatgcaaagaactaactttcaaggcagagttttcatgacacatccaaccaaagccatttacagatggttgttaagagattttgtaagagttactagtataggttcttcttcctcctctatggggactaaagacgaaggtcttttcagtgatgaggatttagttgattctttcgataaaattgaaacggtggactatcattctactgttgacgtcaatggtatcaaatttacggcattccatgcaggccatgtattgggtgcagcgatgtttcaaatagagattgctggccttagggtgttattcacaggtgactattctagagaagtagatcgtcacttaaattctgctgaggtgcctccactttcctccaacgtattaattgtggaatctacctttggtaccgctactcacgagccccgtttaaatagagaaaggaagttgacccaattgatccattccacagtgatgagaggaggccgtgttttattgcctgtttttgctttagggagagctcaagaaatcatgcttatattggatgagtactggtctcaacatgctgatgaactcggtggtggacaagtcccaatattttatgcatctaatttggcaaaaaaatgtatgagcgtttttcaaacctatgtaaatatgatgaatgatgacattagaaaaaaatttagagactctcagactaatcccttcatattcaaaaatatatcttatcttagaaacttggaggatttccaagattttggtcccagtgtgatgttggcctctccaggtatgttacaaagtgggttatctagagatttacttgaaaggtggtgccctgaagataaaaatttggtattgatcaccggttactccatcgaaggaacaatggcgaaatttattatgcttgagccagatacaataccttccataaataatccggaaataaccattccaagacgttgtcaagttgaagaaatctcctttgccgcacacgttgacttccaggaaaatttagaatttattgaaaagattagtgcgccaaatatcatccttgttcatggagaagccaatcccatgggccgtttgaaatctgcattgttatccaatttcgcgtctttaaagggtacagataatgaagtccatgtttttaatcctagaaactgtgttgaagtagatcttgaatttcaaggtgtcaaggttgcaaaagctgtgggaaatattgtgaacgaaatatataaagaagaaaacgtagagataaaggaagaaattgcggctaaaattgaacctataaaggaagaaaacgaagacaacttggattctcaagcagaaaaaggtttggttgatgaagaggaacacaaagacatagtcgtttctgggattttggtttctgatgacaaaaatttcgaattagacttcctttctttgtctgatttaagagagcaccatcccgatctttctacaacgatattaagagagcgccagtctgttcgtgtaaattgtaaaaaggagttgatttactggcacattttacaaatgtttggagaggctgaagttcttcaagatgatgatagagtaacaaatcaagaaccaaaggttaaagaagagagtaaagacaatttgaccaatacaggtaaattgattttacagataatgggtgatattaagttaactattgttaatactttggccgttgtggaatggactcaagatttaatgaatgacactgtagcagactccattattgctatacttatgaatgtggattctgctcccgccagtgtcaagctttccagtcattcttgtgatgatcatgatcataacaatgtgcagtctaatgcacaaggtaagattgatgaagttgagagggtgaagcaaatctccaggttgtttaaagaacagtttggtgactgttttactttatttctcaataaagatgaatatgcaagtaataaagaggaaactataactggagtggttaccataggtaaaagcactgctaagattgacttcaacaatatgaaaattttagaatgtaatagtaatcctttgaaaggtagggtggaaagcctcttaaatattggtggtaatttggtcacaccgttatgttga

SEQ ID NO: 7737 - DNA, 4026 bp, Saccharomyces cerevisiae
atgggccgtccaaggaagaatgttagccaggagaaaatacaacagttgaagagagaactggagctggccggtaacaggacagacgtcttgttgcaagacaaaaagggccgttccaggtcttgtcttctttgtagaagaagaaagcaacgatgcgaccataaattacccagttgtaccgcctgtttgaaagcaggaataaagtgcgtgcagccctccaagtactcttcttccacttcgaacagtaacaccaacaacaacacccctacagctggcactgtacctcctacacctcatcctgtaataaaacgtgagctgcaagatagcagtattggcgctggcgctggcgctgccacttctctgaatgacatgacgataataaaacccatttccactagcaatagtaatgttgatgctggcgacgcgaatgaattcaggaaaacgataaagtccgtcacgacaaattccaatccaaacctgatgaggcaagacaaagatcagtatacgattttcttggagaaaaaactaaaaagtttggagactttgctcgatttatcgccgggatgcaaccagtacaactacgaattatcccagtacaagaaggtttctcatttgttcagtaacaacacttctgattactctagaccgaacagcagcaatatggtcatactgccgctgccatctccttccaacaaacccctggagaacacaaacaataacggcagcaacgttaatgcggccactaacgatacatcggccagtacgaacaacataaacaacaataatgctatctgccaatccgcgagccttttgaatgaccctttagagacgctggacttcactaagtgtatttttgccaaatacaatttgaaaaaagagtttttgatgtatgaccctatttttgaactgaatgagaagctgtcacgttccttcttggacacttttttcacaagattacaattcaagtaccctatcttagacgaacaagaaatctatactttttatgaccactacctccacaacaagattcttatcccaccatcttctcccgccacgtcttccgcagcaccaccgtcgaattcacattcgtattctgaaatagaatttcattttctatccggcagaatgtggcttgtcttcagcatcagcgcctacttactgatgaccacaggtaagtacaaggggtttccacctcaccgatatttctccaccgctatccgtcacatcactaagtgtggtctacatttgaattatgttcagcaaatagaactgttgacattgcttgtcctttacattattaggactgatagagattctctgatactatatgacataatcaaggatgtcatgggcatatccaagaagaaacttcatctaaatcaatggtatcctaatgatccatttgcaaataagaaactgcgactattttggtgtgtttacctgttggaaagaatgatttgtgttgctgtggggaaaccttatacaatcaaggagtcggaaataaatttacctcttttcaataacgactctttttatacaaaaggtgtgcatgcggcggctccatcaaccaatgaccatggtgtgcaattcatcaatcagtctctaaagctgcgaagaattgaatctcaatttgtagagactttacagctattgaaaaacgattccaggtcagtgaagcaatccattgatcaattgcccctagtacgaaaattttttgaagatttggaagtttggagaaaaagttattccactcttgacgtgaaaaatttcgaaaacgagacactaaaactttattactatagatcagtgcgattgcttatacaaccatatttggaatttttcgccccggaggatagactatttagagaatgtcaagctgctgcgggtcaaatttgtcagttatacaagatattccatcaaaaaacgcttaatggtcattctacaccagcagtgcatacggtttttgtagctggcgtaactttaatctactgtatgtggttagccaggaattttgacgatcaaaggaggaagaaattaggcgatgcttcgaagcatactagacctttaatcagtgcaagtctcttttcgacgatggatgatttgagagcttgctccgtttgtttatatgttatgacagaaaggtctaattttgcaagaacctttagagatactttcgatcagttaatgaatgccacggtaggtaatttgattgaaagatgtggtccagactcttctgagttaattttcatggctagtagtgtcgccaagcgtactgaacccaagaacatcaatgatgaggccaataaggcaatttcatctggggatactcttcatgattctaactccgcaaatgcagctaatctatccaattcaaacgataaaaatatatctcataatggcggtatgccgcctgctgtggctagaatatttggtaaaggacaagctgaagagcacgccggttttgtggaaaattcacaagtggatttggctgaacaagagaaattcaagaagaagcaaggtgttttagaaaagacctctgtacccaaaagtttagctcacctattaaccaaaatggatgacaggtcacgtatttcaaattcttcaatgtcttatacaacatcttcttcgtcatcatcttcttcttcgtcatcatcgtcgacattatcgtttccttcttcccaagaaaaaaacctgaaaatcaatgtaaacaatgataacaatggtatgaccatcagcagcgtcaacagagaacacaacaataatcacaacaataataatgataataataataataataacaataataataataatagtaataataataataatgttaataataatgataatgaaagtaatagcagaagcactaccaacaacagctgcaataatggcaacaacagccagtatgttcgtaacaacaacgtaactatggaaaatgatgtagaaaggcctattcaagaccaatatatcgtcaagaaaccaaccaaccaaacagagtttgattggcaagtatttcaacagcaggcctttctacaacagcaactagctcagcacaatttacaagcgtatctatcgtccctgaacaccgatactatgaccaatagaagtccttcaaaatcttctagcatatctacagcctcttcgcattcggatccgattccaatagcgatgacgcaaagcccaactccatatcctcaaacttccaatatgctaccgcaacagcatgtatcacgaccactgccgcaacaacagcgggagcagccacaacaacatattacttctccacaaagattctcagaaagcaattttacgaatcaattaaacaatggtatgatcaacagtaatcctctacaatctgcaatattctctaaccatacaagtgaaaataagcaattaagagatgtcgaagaatcaaatttcagtacatcacccctaagagcagattatggcaataatattatctcctcgataccagcgtcatttactagcaattcaattccggtcagtgtcaaacaagctcgaaatggctcttcttcgggcgatatacttttcagcaacggtgctcatgacatgatcaacaatatttccacctggaccaataactccgttctagatgctttgaatagcaagtccatactacaaacaatatttccccagagtcaagagccttcatctctgtccatggacaaacagcagcaacaacatcaacaacaaaatatgtgttctgaaaacaatgtaaccgctaataattttcaacagacgcagaatgacccttcgtataacagaaatttgttcatgatgtccaatcaggaaggtgtacaatataatcttgacgaaacagagaagaatggacctaaaacacaggtggaagcaaacactagcgcaaatctgcatttcgacaatgttattcctacagtaactaacgcagacatcaggaaaaagcgttctaactgggataacatgatgacatctggtccggtagaagacttttggacgattaatgatgactacggctttttaacgtga

SEQ ID NO: 7738 - DNA, 4026 bp, Artificial Sequence
  Description of Artificial Sequence: Synthetic polynucleotide
atgggccgtccaaggaagaatgttagccaggagaaaatacaacagttgaagagagaattagagttggccggtaacaggacagacgtcttgttgcaagacaaaaagggccgttccaggtcttgtcttctttgtagaagaagaaagcaaagatgcgaccataaattacccagttgtaccgcctgtttgaaagcaggaataaagtgcgtgcagccctccaagtactcttcttccacttctaacagtaacaccaacaacaacacccctacagctggcactgtacctcctacacctcatcctgtaataaaacgtgagttacaagatagcagtattggcgctggcgctggcgctgccacttctttgaatgacatgacgataataaaacccatttccactagcaatagtaatgttgatgctggcgacgcgaatgaattcaggaaaacgataaagtccgtcacgacaaattccaatccaaacttgatgaggcaagacaaagatcagtatacgattttcttggagaaaaaattgaaaagtttggagactttgctcgatttatctccgggatgcaaccagtacaactacgaattatcccagtacaagaaggtttctcatttgttcagtaacaacacttctgattactctagaccgaacagcagcaatatggtcatattaccgttaccatctccttccaacaaacccttggagaacacaaacaataacggcagcaacgttaatgcggccactaacgatacatctgccagtacgaacaacataaacaacaataatgctatctgccaatccgcgagccttttgaatgaccctttagagacgcttgacttcactaagtgtatttttgccaaatacaatttgaaaaaagagtttttgatgtatgaccctatttttgaattgaatgagaagttatctcgttccttcttggacacttttttcacaagattacaattcaagtaccctatcttagacgaacaagaaatctatactttttatgaccactacctccacaacaagattcttatcccaccatcttctcccgccacgtcttccgcagcaccaccgtccaattctcattcttattctgaaatagaatttcattttctttccggcagaatgtggcttgtcttcagcatcagcgcctacttattgatgaccacaggtaagtacaaggggtttccacctcacagatatttctccaccgctatccgtcacatcactaagtgtggtttgcatttgaattatgttcagcaaatagaattattgacattgcttgtcctttacattattaggactgatagagattctttgatactttatgacataatcaaggatgtcatgggcatatccaagaagaaacttcatttgaatcaatggtatcctaatgatccatttgcaaataagaaacttcgtttgttttggtgtgtttacttgttggaaagaatgatttgtgttgctgtggggaaaccttatacaatcaaggagagtgaaataaatttacctcttttcaataacgactctttttatacaaaaggtgtgcatgcggcggctccatctaccaatgaccatggtgtgcaattcatcaatcagtctttgaagttaagaagaattgaatctcaatttgtagagactttacagttattgaaaaacgattccaggtctgtgaagcaatccattgatcaattgcccttagtaagaaaattttttgaagatttggaagtttggagaaaaagttattccactcttgacgtgaaaaatttcgaaaacgagacattaaaactttattactatagatctgtgagattgcttatacaaccatatttggaatttttcgccccggaggatagattatttagagaatgtcaagctgctgcgggtcaaatttgtcagttatacaagatattccatcaaaaaacgcttaatggtcattctacaccagcagtgcatacggtttttgtagctggcgtaactttaatctactgtatgtggttagccaggaattttgacgatcaaaggaggaagaaattaggcgatgcttccaagcatactagacctttaatcagtgcaagtctcttttctacgatggatgatttgagagcttgctccgtttgtttatatgttatgacagaaaggtctaattttgcaagaacctttagagatactttcgatcagttaatgaatgccacggtaggtaatttgattgaaagatgtggtccagactcttctgagttaattttcatggctagtagtgtcgccaagcgtactgaacccaagaacatcaatgatgaggccaataaggcaatttcttctggggatactcttcatgattctaactccgcaaatgcagctaatttatccaatagcaacgataaaaatatatctcataatggcggtatgccgcctgctgtggctagaatatttggtaaaggacaagctgaagagcacgccggttttgtggaaaattctcaagtggatttggctgaacaagagaaattcaagaagaagcaaggtgttttagaaaagacctctgtacccaaaagtttagctcacttattaaccaaaatggatgacaggtctcgtatttctaattcttctatgtcttatacaacatcttcttcttcttcttcttcttcttcttcttcttcttctacattatcttttccttcttcccaagaaaaaaacttgaaaatcaatgtaaacaatgataacaatggtatgaccatcagcagcgtcaacagagaacacaacaataatcacaacaataataatgataataataataataataacaataataataataatagtaataataataataatgttaataataatgataatgaaagtaatagcagaagcactaccaacaacagctgcaataatggcaacaacagccagtatgttcgtaacaacaacgtaactatggaaaatgatgtagaaaggcctattcaagaccaatatatcgtcaagaaaccaaccaaccaaacagagtttgattggcaagtatttcaacagcaggcctttttgcaacagcaattggctcagcacaatttacaagcgtatttatcttccttgaacaccgatactatgaccaatagaagtccttccaaatcttctagcatatctacagcctcttctcattctgatccgattccaatagcgatgacgcaaagcccaactccatatcctcaaacttccaatatgttaccgcaacagcatgtatctagaccattaccgcaacaacagagagagcagccacaacaacatattacttctccacaaagattctctgaaagcaattttacgaatcaattaaacaatggtatgatcaacagtaatcctttacaatctgcaatattctctaaccatacaagtgaaaataagcaattaagagatgtcgaagaaagtaatttcagtacatctcccttgagagcagattatggcaataatattatctcctccataccagcgtcttttactagcaattctattccggtcagtgtcaaacaagctagaaatggctcttcttctggcgatatacttttcagcaacggtgctcatgacatgatcaacaatatttccacctggaccaataactccgttttggatgctttgaatagcaagtccatattgcaaacaatatttccccagagtcaagagccttcttctttatccatggacaaacagcagcaacaacatcaacaacaaaatatgtgttctgaaaacaatgtaaccgctaataattttcaacagacgcagaatgacccttcttataacagaaatttgttcatgatgtccaatcaggaaggtgtacaatataatcttgacgaaacagagaagaatggacctaaaacacaggtggaagcaaacactagcgcaaatttacatttcgacaatgttattcctacagtaactaacgcagacatcaggaaaaagcgttctaactgggataacatgatgacatctggtccggtagaagacttttggacgattaatgatgactacggctttttaacgtga

SEQ ID NO: 7739 - DNA, 468 bp, Saccharomyces cerevisiae
atgatgaggggagcgagtaagaggtcaatcagcagtgccgcagtgctgctgattaaaaagaacaagctaccaccgcgaccaaagttcacgccagagatggaagcacaatgcactgagaaattccttcatggcggcagagggcccggtggccaaaagattaataagtgtaattctaaggtacaactacggcatgaacccactgggatcgttgtcgagtgccaagaaacgcggtcacgtgagcaaaatcgaaagcttgcccggcttaagctcgcgcgcgaacttgcggcgtcgtacgacacgatgccgtccagagaggaggcgcttctacagtggcaccgtcaacagaaacgctcgcagcgccggcgcagcgtcgcgaagtacgagcagcgtgaagaggccgctcgagtcgaaaaagaggaacgcgaggcccgagacagagaaatggtgcgcgagttattccgccggtaa

SEQ ID NO: 7740 - DNA, 468 bp, Artificial Sequence
  Description of Artificial Sequence: Synthetic polynucleotide
atgatgaggggagcgagtaagaggtctatcagcagtgccgcagtgttgttaattaaaaagaacaagttaccaccgaggccaaagttcacgccagagatggaagcacaatgcactgagaaattccttcatggcggcagagggcccggtggccaaaagattaataagtgtaattctaaggtacaattaagacatgaacccactgggatcgttgtcgagtgccaagaaacgagatctcgtgagcaaaatagaaagcttgcccgtcttaagctcgcgcgcgaacttgcggcgtcttacgacacgatgccgtccagagaggaggcgcttttacagtggcaccgtcaacagaaacgctctcagcgccgtcgcagcgtcgcgaagtacgagcagcgtgaagaggccgctagagtcgaaaaagaggaacgcgaggccagagacagagaaatggtgcgcgagttattccgccgttga

SEQ ID NO: 7741 - DNA, 945 bp, Saccharomyces cerevisiae
atgatgcggttaatacgtacattgccgcttcgatgcttcaaaactagaatacggcggcaaggctcgttgttgtgtttgcggtgctttagttcgtattcaaaaccacttttgcagaaatcaatgtcattgaaaaatatccagttatcagacctatcctcatcgccattatccaagaacaaggagaagcaggagaagccagagaaggaaaacgaaggaaagcactccattggcctgttagacagattttcagaggactttattactcagggcaatggattgaaacctactacttcacaaaatcaattggatactataaagttttatcaaatgcttcgtgaaagaggcaatttttccgatgaacaatgtaaaattatcatagctctattgttgcaactactaaatgatcagttttattcctgttacaatgatttgttcttaagggatatggagctgaataaacaatcacatttgttcagctcgctagaaacagaattgaaattcgcaattcaaaactctagagacacgcaactaaatgagcaccacttgcaattattaaaactcaagagagaacttaactcaatccatgatgaactgaatgaaatcataatagatcttttgcaaaaggacgctaaattagaatttaacaatcaaaaattagaaaacacccttttgtatcgacaattaaacctgaaattgaacgactgttctaacaagattcaaaccaagatactgggggatatcaggtcacatatcgaaaatttaagatggcagacaaccagaagcggtcttttggtaatattagtccttgtttgttcgattatgatcggtgtaagcgcatctaagaaggaacgcccaggtttacaggaacctgaggaacctgaaattttagcaccaaaggaagacattgatactaccttccctcaagatcaacatgatatagattaa

SEQ ID NO: 7742 - DNA, 945 bp, Artificial Sequence
  Description of Artificial Sequence: Synthetic polynucleotide
atgatgagattaatacgtacattgccgcttagatgcttcaaaactagaataagaagacaaggctctttgttgtgtttgagatgctttagttcttattctaaaccacttttgcagaaatctatgtctttgaaaaatatccagttaagtgacttatcctcttctccattatccaagaacaaggagaagcaggagaagccagagaaggaaaacgaaggaaagcactccattggcttattagacagattttctgaggactttattactcagggcaatggattgaaacctactacttctcaaaatcaattggatactataaagttttatcaaatgcttcgtgaaagaggcaatttttccgatgaacaatgtaaaattatcatagctttattgttgcaattattgaatgatcagttttattcctgttacaatgatttgttcttaagggatatggagttgaataaacaatctcatttgttcagctctttggaaacagaattgaaattcgcaattcaaaactctagagacacgcaattgaatgagcaccacttgcaattattaaaactcaagagagaacttaactctatccatgatgaattgaatgaaatcataatagatcttttgcaaaaggacgctaaattagaatttaacaatcaaaaattagaaaacacccttttgtatagacaattaaacttgaaattgaacgactgttctaacaagattcaaaccaagatattaggggatatcaggagccatatcgaaaatttaagatggcagacaaccagaagcggtcttttggtaatattagtccttgtttgttctattatgatcggtgtaagcgcatctaagaaggaacgcccaggtttacaggaacctgaggaacctgaaattttagcaccaaaggaagacattgatactaccttccctcaagatcaacatgatatagattga

SEQ ID NO: 7743 - DNA, 843 bp, Saccharomyces cerevisiae
atgtcgcaagaaattaggcaaaatgagaaaatcagttatcgtattgaaggaccattcttcattattcacttaatgaaccctgacaatttgaatgcactagaaggtgaagactatatttatttaggagagttactagaactagcggacagaaatcgtgatgtatattttacaattatacaaagcagtggtagatttttttccagtggtgctgatttcaagggtattgcaaaagcccaaggggatgataccaataaatatccttcggaaacaagcaagtgggtgtcaaattttgtcgctagaaatgtttatgtcactgatgccttcatcaagcattccaaagttttaatttgctgtttgaatggaccagcaatagggttgagcgcggcactggtagcgttatgtgacattgtgtacagtataaatgacaaggtttatttgctatacccctttgctaacttaggactaattaccgaaggtggtacaacggtctctttgccattgaagtttggcacaaatacgacgtatgaatgcctcatgttcaacaaaccattcaagtacgatataatgtgcgagaacggatttataagcaagaattttaacatgccatcttcaaacgctgaagcgttcaatgcaaaggtcttagaagaattgagggagaaagtgaaagggctatacctgcccagttgcttagggatgaaaaaattgctgaaatcgaaccacatcgatgcattcaataaggctaactcagtggaagtaaatgaatctctcaagtattgggtagatggagagcccttaaaaagatttaggcagctgggctcgaaacaaaggaagcatcgtttatga

SEQ ID NO: 7744 - DNA, 843 bp, Artificial Sequence
  Description of Artificial Sequence: Synthetic polynucleotide
atgtctcaagaaattaggcaaaatgagaaaatcagttatcgtattgaaggaccattcttcattattcacttaatgaaccctgacaatttgaatgcattggaaggtgaagactatatttatttaggagagttattggaattggcggacagaaatcgtgatgtatattttacaattatacaaagcagtggtagatttttttccagtggtgctgatttcaagggtattgcaaaagcccaaggggatgataccaataaatatccttctgaaacaagcaagtgggtgagtaattttgtcgctagaaatgtttatgtcactgatgccttcatcaagcattccaaagttttaatttgctgtttgaatggaccagcaatagggttgagcgcggcattggtagcgttatgtgacattgtgtacagtataaatgacaaggtttatttgttgtacccctttgctaacttaggattgattaccgaaggtggtacaacggtctctttgccattgaagtttggcacaaatacgacgtatgaatgcctcatgttcaacaaaccattcaagtacgatataatgtgcgagaacggatttataagcaagaattttaacatgccatcttccaacgctgaagcgttcaatgcaaaggtcttagaagaattgagggagaaagtgaaagggttatacttgcccagttgcttagggatgaaaaaattgttgaaaagtaaccacatcgatgcattcaataaggctaactctgtggaagtaaatgaatctctcaagtattgggtagatggagagcccttaaaaagatttaggcagttaggctctaaacaaaggaagcatcgtttatga

SEQ ID NO: 7745 - DNA, 786 bp, Saccharomyces cerevisiae
atgtcagatatagaatcattgggagaggcagcaggtttatttgaggagccagaggattttcttcctcctccaccaaaacctcattttgcagaatatcaaaggtcacacatcacaaaagagtccaaatcagatgttaaagacatcaaactccgtctcgttggaacgtcaccactttggggtcatctcttgtggaatgcaggaatatacaccgcaaatcacttggattctcatccagaattaataaaggggaagactgttttagaattgggtgctgctgctgctttaccttccgttatttgtgctttgaatggggctcaaatggttgtttcaactgattatccagatcctgatttaatgcagaacatcgattataatataaagtctaacgttcctgaagattttaataatgtcagtacggagggttatatttggggaaacgattattctccattgttggcacatatcgaaaaaataggtaacaataatggaaagtttgacttaatcattttaagtgatttagtcttcaatcatacggaacatcacaaattacttcaaacaacaaaggatttattagctgagaaaggtcaggcgttggtagtattttcaccgcatagaccaaaattgttggagaaggatttagaattcttcgaattggctaagaacgagttccatttggttcctcagctaattgaaatggttaattggaaaccgatgtttgacgaagacgaggaaacaatcgaagtcagatctcgtgtttatgcgtactatttaacacatgaaaagtag

SEQ ID NO: 7746 - DNA, 786 bp, Artificial Sequence
  Description of Artificial Sequence: Synthetic polynucleotide
atgagtgatatagaatctttgggagaggcagcaggtttatttgaggagccagaggattttcttcctcctccaccaaaacctcattttgcagaatatcaaaggtctcacatcacaaaagagtccaaatctgatgttaaagacatcaaactccgtctcgttggaacgtctccactttggggtcatctcttgtggaatgcaggaatatacaccgcaaatcacttggattctcatccagaattaataaaggggaagactgttttagaattgggtgctgctgctgctttaccttccgttatttgtgctttgaatggggctcaaatggttgtttccactgattatccagatcctgatttaatgcagaacatcgattataatataaagtctaacgttcctgaagattttaataatgtcagtacggagggttatatttggggaaacgattattctccattgttggcacatatcgaaaaaataggtaacaataatggaaagtttgacttaatcattttaagtgatttagtcttcaatcatacggaacatcacaaattacttcaaacaacaaaggatttattagctgagaaaggtcaggcgttggtagtattttctccgcatagaccaaaattgttggagaaggatttagaattcttcgaattggctaagaacgagttccatttggttcctcagttgattgaaatggttaattggaaaccgatgtttgacgaagacgaggaaacaatcgaagtcagatctcgtgtttatgcgtactatttaacacatgaaaagtga

SEQ ID NO: 7747 - DNA, 171 bp, Saccharomyces cerevisiae
atgtttttacgtttttataatcgactactttatatctataacgaattatttaattttcttcgatttactgtgtttctaccattttgcgaattcgtgccccatcatgacttattttatttaattgttacatatcaaaggacactggtttacaaacataaaaatgattgttga

SEQ ID NO: 7748 - DNA, 171 bp, Artificial Sequence
  Description of Artificial Sequence: Synthetic polynucleotide
atgtttttacgtttttataatagattactttatatctataacgaattatttaattttcttagatttactgtgtttttaccattttgcgaattcgtgccccatcatgacttattttatttaattgttacatatcaaaggacattagtttacaaacataaaaatgattgttga

SEQ ID NO: 7749 - DNA, 1689 bp, Saccharomyces cerevisiae
atgtcactcctttacatcattcttctattcacacaattcttactactgccaaccgatgcctttgataggtctgctaacacaaatattgctgtttattggggtcaaaactcagcaggaacgcaagaatccttagctacttactgtgaatcttctgatgctgatattttcctattatctttcttgaaccaatttccaacccttggtttgaactttgccaacgcatgctctgatactttttctgatggcttacttcactgcacccagattgctgaagatattgaaacttgccagtccctaggaaagaaagttctattatcattaggtggtgcatctggtagctacctcttttcagatgattctcaagcggaaacttttgcacaaactttatgggatactttcggtgaaggtacaggtgccagtgagagaccatttgactcagcagtcgttgatggttttgattttgatattgaaaacaacaacgaagtaggctatagtgcgttagctaccaagttaagaactttgtttgccgaaggtacaaagcaatattacctttctgccgcaccacaatgtccatacccggatgcttctgttggtgacttgttggaaaatgcagacattgattttgcgttcatccaattttacaataattactgcagtgtgagtggtcaattcaattgggatacttggttaacctatgctcaaactgtatccccaaataaaaatatcaaactgttcttaggtttacctggttctgcttctgctgctggctctggttatatttctgacacttctttattggaatcaactattgcagatattgcctcttcaagttcttttggtggtattgcgttatgggatgcatctcaagccttttccaacgagctaaatggtgaaccatatgttgagattttgaagaatttgctaacaagtgctagccagaccgccactactacagttgccacctcaaaaacctcagcagcctcaacttcatctgcttcaacttcatctgcttcaacttctcagaaaaagaccacacaatctacgacatctacacaaagtaaaagcaaagttactttatctccaactgcaagcagcgctatcaaaacatcaattactcaaactacaaaaacattgacgagtagcaccaagacaaaatctagtctaggtaccaccacaacagagagcactttaaattcagttgctatcacaagtatgaaaactactctatcttcccaaataaccagtgctgccttggtgacccctcaaacaactactactagcatagtttcttcggccccaattcaaacagctatcactagtactctttcgccagcaacgaagagttcttctgtcgtttccctacagacagctactactagtacgctttccccaacaacgaccagtacaagctcaggtagtacaagctcaggtagtacaagctcagacagtacagctcgtacattggctaaagaattgaatgctcaatatgcggctggtaaattgaacggtaaatctacctgtactgaaggtgaaattgcatgctctgctgatgggaagttcgccgtttgtgatcatagcgcttgggtttacatggaatgtgcttctggaaccacatgttatgcttatgactccggcgactcagtctatacccaatgtaatttctcttatttggaaagcaattacttttaa

SEQ ID NO: 7750 - DNA, 1689 bp, Artificial Sequence
  Description of Artificial Sequence: Synthetic polynucleotide
atgagtctcctttacatcattcttttattcacacaattcttattattaccaaccgatgcctttgataggtctgctaacacaaatattgctgtttattggggtcaaaactctgcaggaacgcaagaatccttagctacttactgtgaatcttctgatgctgatattttcttattatctttcttgaaccaatttccaacccttggtttgaactttgccaacgcatgctctgatactttttctgatggcttacttcactgcacccagattgctgaagatattgaaacttgccagtccttgggaaagaaagttttattatctttaggtggtgcatctggtagctacctcttttctgatgattctcaagcggaaacttttgcacaaactttatgggatactttcggtgaaggtacaggtgccagtgagagaccatttgactctgcagtcgttgatggttttgattttgatattgaaaacaacaacgaagtaggctatagtgcgttagctaccaagttaagaactttgtttgccgaaggtacaaagcaatattacctttctgccgcaccacaatgtccatacccggatgcttctgttggtgacttgttggaaaatgcagacattgattttgcgttcatccaattttacaataattactgcagtgtgagtggtcaattcaattgggatacttggttaacctatgctcaaactgtatccccaaataaaaatatcaaattattcttaggtttacctggttctgcttctgctgctggctctggttatatttctgacacttctttattggaatctactattgcagatattgcctcttccagttcttttggtggtattgcgttatgggatgcatctcaagccttttccaacgagttgaatggtgaaccatatgttgagattttgaagaatttgttgacaagtgctagccagaccgccactactacagttgccacctccaaaacctctgcagcctctacttcttctgcttccacttcttctgcttccacttctcagaaaaagaccacacaatctacgacatctacacaaagtaaaagcaaagttactttatctccaactgcaagcagcgctatcaaaacatccattactcaaactacaaaaacattgacgagtagcaccaagacaaaatctagtttgggtaccaccacaacagagagcactttaaattctgttgctatcacaagtatgaaaactactttatcttcccaaataaccagtgctgccttggtgacccctcaaacaactactactagcatagtttcttctgccccaattcaaacagctatcactagtactctttctccagcaacgaagagttcttctgtcgtttccttacagacagctactactagtacgctttccccaacaacgaccagtacaagcagtggtagtacaagcagtggtagtacaagcagtgacagtacagctcgtacattggctaaagaattgaatgctcaatatgcggctggtaaattgaacggtaaatctacctgtactgaaggtgaaattgcatgctctgctgatgggaagttcgccgtttgtgatcatagcgcttgggtttacatggaatgtgcttctggaaccacatgttatgcttatgactccggcgactctgtctatacccaatgtaatttctcttatttggaaagcaattacttttga

SEQ ID NO: 7751 - DNA, 1068 bp, Saccharomyces cerevisiae
atgtctactggaagcagtgatagaaaggatgacgtcaaattattggaactgctgaattctatagatgaacagtttttagtgccatacaaaaagccggaagacttgcgtaaaatctcctctactaccaaactacaaggttccaccccaactaaggaactagacaaattagcctctgtattgaaggcacattgcacaaaaataggtattgtttgcaagccaggaacttttgataacaatcataaagttgtgattaccgaaatccaaaattttagtaggccattattctacttactaagtttattccctttgttttacaataacaaggattgccccaaatactttacagaccaactggatgaaagtacgctacaattgctcgatggcttgagagatttcattgccgaattacaagaaagattgaaaaatgacgaaaatgcatctctagacaaagaaaggttaacctcagttggtaaaatattcaatgcgtgcgattctctctctaattgttccaaggctggaccttatgggatcctagcaaacatcttaaaagataatgtggccataatggacgatacaatgaatgaaataaaagagtggcttgaggaacccgatttttcagcaaactcggacgatatatttttggattttgaggattcagaatccgaatctgattcacagaaagaggaatttgaccaggaaaaggtctatgaaaatataaagttgtttttcgatgggtttacgaggaagataaagctaatcaaattacttgtatcaactttcaggaaaactctggtgtcaaaagattttactcctaagaggaatcaagcagaaactttagacagtatacatacatatctgaaggaaatacagttacttttggatgaagtggtatccactgtacaatttgagccgaagaactttaccaatgaggaggtaaaagaagaacaggctgcattagttgcagtaactaaaaaagttcttatccaaatgagtaaactatatgaaggtgatccaaaaagaaagaaatggattgacacatgggagataaaattcaatgaattgttttag

SEQ ID NO: 7752 - DNA, 1068 bp, Artificial Sequence
  Description of Artificial Sequence: Synthetic polynucleotide
atgtctactggaagcagtgatagaaaggatgacgtcaaattattggaattattgaattctatagatgaacagtttttagtgccatacaaaaagccggaagacttgcgtaaaatctcctctactaccaaattacaaggttccaccccaactaaggaattagacaaattagcctctgtattgaaggcacattgcacaaaaataggtattgtttgcaagccaggaacttttgataacaatcataaagttgtgattaccgaaatccaaaattttagtaggccattattctacttattaagtttattccctttgttttacaataacaaggattgccccaaatactttacagaccaattggatgaaagtacgttacaattgctcgatggcttgagagatttcattgccgaattacaagaaagattgaaaaatgacgaaaatgcatctttggacaaagaaaggttaacctctgttggtaaaatattcaatgcgtgcgattctctctctaattgttccaaggctggaccttatgggatcttggcaaacatcttaaaagataatgtggccataatggacgatacaatgaatgaaataaaagagtggcttgaggaacccgatttttctgcaaacagcgacgatatatttttggattttgaggattctgaatccgaatctgattctcagaaagaggaatttgaccaggaaaaggtctatgaaaatataaagttgtttttcgatgggtttacgaggaagataaagttaatcaaattacttgtatccactttcaggaaaactttggtgtctaaagattttactcctaagaggaatcaagcagaaactttagacagtatacatacatatttgaaggaaatacagttacttttggatgaagtggtatccactgtacaatttgagccgaagaactttaccaatgaggaggtaaaagaagaacaggctgcattagttgcagtaactaaaaaagttcttatccaaatgagtaaactttatgaaggtgatccaaaaagaaagaaatggattgacacatgggagataaaattcaatgaattgttttga

SEQ ID NO: 7753 - DNA, 192 bp, Saccharomyces cerevisiae
atggctaaagttcatggttctctagctcgtgctggtaaagtcaagtctcaaacaccaaaggttgaaaaaaccgaaaagccaaagaagcctaagggtcgtgcttacaaaagattattgtacaccagaagattcgttaacgttaccttggttaacggtaagagaagaatgaacccaggtccatccgtccaataa

SEQ ID NO: 7754 - DNA, 192 bp, Artificial Sequence
  Description of Artificial Sequence: Synthetic polynucleotide
atggctaaagttcatggttctttggctcgtgctggtaaagtcaagtctcaaacaccaaaggttgaaaaaaccgaaaagccaaagaagcctaagggtcgtgcttacaaaagattattgtacaccagaagattcgttaacgttaccttggttaacggtaagagaagaatgaacccaggtccatccgtccaatga

SEQ ID NO: 7755 - DNA, 1425 bp, Saccharomyces cerevisiae
atgaaattaaaattgatagtaaatggttgtgaagcacctgatgattataaattgctaagaactactatcaatacagttgcttcgctacgaaagacggctatcttaagatttaatagtgaaagattgacaataatatccactccaaaatcatcactcaacagcagtaacaacggtacaatattacgaggggatactggtcagctttggtgtaccattcctcatgatgtattcagattatatacagttatatcagctcgcgagctcaatacaataacaatggagtgtaattgtgattctttattgagtgtgtttaaaaggtatgatcgagtaatgaaccaaggatcttcctctaatatgactataaaactacagtcaatgccagaatggaatacaaataacggaacactttcaggaggaacagcaggaggcgtagatacaacctcaaaaccgaaccccatttgtgctctaggtataacattcgaagaaattgtacatactagcggcccaaatgacgctatagttatgaatgggggagtggatgagcacaatggtttaccaaccacagtaggcacaggaaatctactcgcaagcaataaggttatcatgcattcgttcaaagtacctgtcaaactattattccgagcacaagatacgcgaatacaagagccaatgattaactatattcaactgatgatgtacaagctgccaccaatatcgggcgagtttggctccgccttccacgggtttattagacgtgttgaacggtacagtaatgtcaaccacattcatttaatgggagtcaaaaaaaaggagcatggaaatgaaggtgatgatgtagaacttaagataattgtgaatgaattagattggcatttggaaatatgctggaatggacccttagactctgtgatacaacgccaagaagggctcactgacaatccttcccaaaaccagcacatcgacacagacggccggcaggaggaaggatctcttccgattatcgaagcggataaaccgatgtcttcactatataccaatactagagatcgagagatggaagaaaatatccgctacgatgaagatttattaagaattgaggatagctcgatcgcagatacgcggggaaacatttacacagctgatactagcggtgatactgaatttaatgacatatccgttatggtggaaaaggctgaacaggaaagttcgtccacacatgaagtaatcatccgttgcaaagattggaaggtgtgttccaagttatacgctgcatttgaagaagttgttttggcgatttctcacgacgaatcctgcgtattccactgttcgttggatcgtggtagcttggaagatagcgaagatgtggaaaaaccaagggaaagaggacaaatcatatattatatagcaagatcgaagggcttgtaa

SEQ ID NO: 7756 - DNA, 1425 bp, Artificial Sequence
  Description of Artificial Sequence: Synthetic polynucleotide
atgaaattaaaattgatagtaaatggttgtgaagcacctgatgattataaattgttaagaactactatcaatacagttgcttctttaagaaagacggctatcttaagatttaatagtgaaagattgacaataatatccactccaaaatcttctctcaacagcagtaacaacggtacaatattaagaggggatactggtcagctttggtgtaccattcctcatgatgtattcagattatatacagttatatctgctcgcgagctcaatacaataacaatggagtgtaattgtgattctttattgagtgtgtttaaaaggtatgatagagtaatgaaccaaggatcttcctctaatatgactataaaattacagtccatgccagaatggaatacaaataacggaacactttctggaggaacagcaggaggcgtagatacaacctccaaaccgaaccccatttgtgctttgggtataacattcgaagaaattgtacatactagcggcccaaatgacgctatagttatgaatgggggagtggatgagcacaatggtttaccaaccacagtaggcacaggaaatttactcgcaagcaataaggttatcatgcattctttcaaagtacctgtcaaattattattcagagcacaagatacgagaatacaagagccaatgattaactatattcaattgatgatgtacaagttaccaccaatatctggcgagtttggctccgccttccacgggtttattagacgtgttgaaagatacagtaatgtcaaccacattcatttaatgggagtcaaaaaaaaggagcatggaaatgaaggtgatgatgtagaacttaagataattgtgaatgaattagattggcatttggaaatatgctggaatggacccttagactctgtgatacaacgccaagaagggctcactgacaatccttcccaaaaccagcacatcgacacagacggcaggcaggaggaaggatctcttccgattatcgaagcggataaaccgatgtcttctttgtataccaatactagagatagagagatggaagaaaatatccgctacgatgaagatttattaagaattgaggatagctctatcgcagatacgagaggaaacatttacacagctgatactagcggtgatactgaatttaatgacatatccgttatggtggaaaaggctgaacaggaaagttcttccacacatgaagtaatcatccgttgcaaagattggaaggtgtgttccaagttatacgctgcatttgaagaagttgttttggcgatttctcacgacgaatcctgcgtattccactgttctttggatcgtggtagcttggaagatagcgaagatgtggaaaaaccaagggaaagaggacaaatcatatattatatagcaagatccaagggcttgtga

SEQ ID NO: 7757 - DNA, 1938 bp, Saccharomyces cerevisiae
atgctgaaatttagaattaggccagtgagacatatacggtgttataaacgacacgcatatttcttacgatataaccatacgactacccctgcacagaagttacaagcacagatcgagcaaatacctctcgaaaattacagaaatttctctatagttgcccatgttgaccatgggaagtcaaccttaagtgacagactgctggaaataacgcatgtcatcgatcccaatgcgagaaataaacaagttttggataaattggaagtcgaaagagaaagaggtattactataaaggcgcaaacatgttcgatgttttataaagataagaggaccggaaaaaactatcttttacatttaattgacacgccaggacatgtggacttcagaggtgaagtttcacggtcatatgcgtcttgtgggggagcaattcttttggttgatgcatcacaaggcatacaagcacagacggttgctaatttttatttagccttcagtttaggattgaaattaattccagtaataaacaaaattgatctaaattttacagatgttaaacaggtaaaggatcagatagtgaataactttgagctccccgaggaagatataatcggagtaagtgctaaaacaggattaaatgtagaggaactgttactaccggctataattgatcgtataccaccaccaacggggaggcctgataaacccttcagagcattattagtggattcttggtacgacgcatacttaggagcggttcttctagtgaatattgttgatggttctgtacgtaaaaatgacaaggttatttgtgctcagacaaaagaaaaatacgaagtcaaagatattggaatcatgtatcctgacagaacctctacaggtacgctaaagacaggacaggttggctatctagtgctgggaatgaaggattctaaagaagcaaaaattggagatactataatgcatttaagtaaagtaaatgaaacggaagtacttcccggatttgaagaacaaaaacccatggtatttgtgggtgctttcccggctgatgggattgaattcaaagccatggatgatgatatgagtagacttgtcctcaacgataggtcagttactttggaacgtgagacctccaatgctttgggtcaaggttggagattgggctttttaggatctttacatgcatctgtttttcgtgaacgactagaaaaagagtatggttcgaaattgatcattactcaacccacagttccttatttggtggagtttaccgatggtaagaaaaagcttataacaaatccggatgagtttccagacggagcaacaaagagggtgaacgttgctgctttccatgaaccgtttatagaggcagttatgacattgccccaggaatatttaggtagtgtcatacgcttatgcgatagtaatagaggagaacaaattgatataacatacctaaacaccaatggacaagtgatgttaaaatattaccttccgctatcgcatctagttgatgacttttttggtaaattaaaatcggtgtccagaggatttgcctctttagattatgaggatgctggctatagaatttctgatgttgtaaaactgcaactcttggttaatggaaatgcgattgatgccttgtcaagagtacttcataaatcggaagtagagagagtgggtagagaatgggtgaagaagtttaaagagtatgttaaatcacaattatatgaggtcgttatacaggcccgagctaataacaagataatagctagagaaacaattaaggcaagaagaaaagatgttctccaaaagctgcatgcttctgatgtctcacgaaggaaaaaacttttggcgaaacagaaagagggtaaaaagcatatgaaaactgtaggtaatattcaaatcaaccaagaggcatatcaggcttttttgcgccgttag

SEQ ID NO: 7758 - DNA, 1938 bp, Artificial Sequence
  Description of Artificial Sequence: Synthetic polynucleotide
atgttgaaatttagaattaggccagtgagacatataagatgttataaaagacacgcatatttcttaagatataaccatacgactacccctgcacagaagttacaagcacagatcgagcaaatacctctcgaaaattacagaaatttctctatagttgcccatgttgaccatgggaagtctaccttaagtgacagattattggaaataacgcatgtcatcgatcccaatgcgagaaataaacaagttttggataaattggaagtcgaaagagaaagaggtattactataaaggcgcaaacatgttccatgttttataaagataagaggaccggaaaaaactatcttttacatttaattgacacgccaggacatgtggacttcagaggtgaagtttctagatcttatgcgtcttgtgggggagcaattcttttggttgatgcatctcaaggcatacaagcacagacggttgctaatttttatttagccttcagtttaggattgaaattaattccagtaataaacaaaattgatttgaattttacagatgttaaacaggtaaaggatcagatagtgaataactttgagctccccgaggaagatataatcggagtaagtgctaaaacaggattaaatgtagaggaattattattaccggctataattgatcgtataccaccaccaacggggaggcctgataaacccttcagagcattattagtggattcttggtacgacgcatacttaggagcggttcttttagtgaatattgttgatggttctgtacgtaaaaatgacaaggttatttgtgctcagacaaaagaaaaatacgaagtcaaagatattggaatcatgtatcctgacagaacctctacaggtacgttgaagacaggacaggttggctatttggtgttgggaatgaaggattctaaagaagcaaaaattggagatactataatgcatttaagtaaagtaaatgaaacggaagtacttcccggatttgaagaacaaaaacccatggtatttgtgggtgctttcccggctgatgggattgaattcaaagccatggatgatgatatgagtagacttgtcctcaacgataggtctgttactttggaacgtgagacctccaatgctttgggtcaaggttggagattgggctttttaggatctttacatgcatctgtttttcgtgaaagattagaaaaagagtatggttccaaattgatcattactcaacccacagttccttatttggtggagtttaccgatggtaagaaaaagcttataacaaatccggatgagtttccagacggagcaacaaagagggtgaacgttgctgctttccatgaaccgtttatagaggcagttatgacattgccccaggaatatttaggtagtgtcatacgcttatgcgatagtaatagaggagaacaaattgatataacatacttgaacaccaatggacaagtgatgttaaaatattaccttccgttatctcatttggttgatgacttttttggtaaattaaaatctgtgtccagaggatttgcctctttagattatgaggatgctggctatagaatttctgatgttgtaaaattacaactcttggttaatggaaatgcgattgatgccttgtccagagtacttcataaaagtgaagtagagagagtgggtagagaatgggtgaagaagtttaaagagtatgttaaatctcaattatatgaggtcgttatacaggccagagctaataacaagataatagctagagaaacaattaaggcaagaagaaaagatgttctccaaaagttgcatgcttctgatgtctctagaaggaaaaaacttttggcgaaacagaaagagggtaaaaagcatatgaaaactgtaggtaatattcaaatcaaccaagaggcatatcaggcttttttgcgccgttga

SEQ ID NO: 7759 - DNA, 834 bp, Saccharomyces cerevisiae
atgataccaaagcttatagtttttggaggcaatggatttttaggtaaaagaatttgtcaagaagcagtgacttcgggctaccaagtcgtttctgtgtcaaggtccggtaaagctcctcatagcaatgaattaaatgataagcaatggatgcaggaggtccaatggaccgctgctgacatttttaagcctgattcttaccatgaattattgaataatgctactaacgtagttcattctttgggaatcctcctagaaaatgaaaattataagcaaactctatccaaatcccctacatatgattcaaaatcacgccttctatcttttggtgcaggtccaaatcctttaaaaaaaagcagtccttattttacttatgaaatgatgaataagcaaagtgctattattttggcagatacatttaaacaaaaaatcctaaagaaaagcaaaaaggagcaagaaaaagcaaatcaaagatcttttacgtatatttccgccgataaaggtttcccattgattcctagtggctatattaattcgaaaagagaggcggagattgaactagaaaaaatgcagagatatttcaggcctattattgtgagacccggttttatgttcgatgagcacagaaatgcaattggaccacggtcttttattcatactgcacttgaactactttactgcggtaacaaatttctattgagaaataagctgcagcttttgaacgacttgattaggccaacagtatccactcagcaggtaagcaaatccgtcctgaaaaatatcgaaaacccagattttaaaggggtagttacacttgaggaaatacttaaagcataa

SEQ ID NO: 7760 - DNA, 834 bp, Artificial Sequence
  Description of Artificial Sequence: Synthetic polynucleotide
atgataccaaagcttatagtttttggaggcaatggatttttaggtaaaagaatttgtcaagaagcagtgacttctggctaccaagtcgtttctgtgtctaggtccggtaaagctcctcatagcaatgaattaaatgataagcaatggatgcaggaggtccaatggaccgctgctgacatttttaagcctgattcttaccatgaattattgaataatgctactaacgtagttcattctttgggaatcctcttggaaaatgaaaattataagcaaactttatccaaatcccctacatatgattctaaaagccgccttttatcttttggtgcaggtccaaatcctttaaaaaaaagcagtccttattttacttatgaaatgatgaataagcaaagtgctattattttggcagatacatttaaacaaaaaatcttgaagaaaagcaaaaaggagcaagaaaaagcaaatcaaagatcttttacgtatatttccgccgataaaggtttcccattgattcctagtggctatattaattctaaaagagaggcggagattgaattggaaaaaatgcagagatatttcaggcctattattgtgagacccggttttatgttcgatgagcacagaaatgcaattggaccaagatcttttattcatactgcacttgaattgctttactgcggtaacaaatttttattgagaaataagttacagcttttgaacgacttgattaggccaacagtatccactcagcaggtaagcaaatccgtcttgaaaaatatcgaaaacccagattttaaaggggtagttacacttgaggaaatacttaaagcatga

SEQ ID NO: 7761 - DNA, 1146 bp, Saccharomyces cerevisiae
atgtcctctcaagcattcacttcagtacatccgaatgcggcaacatctgatgtgaatgttaccattgacactttcgttgctaagttaaaaagaagacaagtgcaaggttcatacgccatcgccttggaaactttacaactgttaatgcgatttatctctgcagctcgttggaaccatgttaatgaccttattgaacaaatcagagatttaggtaatagtctagaaaaagctcatcctactgctttcagttgcggtaacgtaattagaagaatactggctgttttgagggatgaagtagaagaagacactatgagcacaactgtcacatccacatccgttgctgaacctttgatttcctctatgtttaatttattacagaaaccggagcaacctcatcagaatagaaaaaatagttcagggagctctagtatgaaaaccaagactgattaccgtcaagtagccattcagggtatcaaggatcttatagatgagataaaaaacattgatgaaggtattcagcaaattgctattgatttgattcacgatcatgagattttattaactcccacacctgattcaaaaaccgtattaaaatttctgattactgctcgcgaacgtagtaatagaacatttacggttttagttacagaggggttccctaataacaccaagaatgcacatgagtttgccaaaaaattagcacagcacaacatagaaaccctagtagtcccagactcagctgtttttgctttaatgtcccgtgtgggtaaggttattatcggcactaaagccgtttttgtcaatggggggactatctcgtcaaattcaggtgtatcatccgtttgtgaatgcgcccgagaatttagaacccctgtatttgctgttgcaggtttgtataagctttctcctctatatccgttcgacgtagagaagtttgtcgaatttggtgggtcccaacgtatattacctagaatggatccaagaaaaagattagatacagttaatcaaattaccgattatgttccgcctgaaaatattgatatctacattacaaacgtcggtgggttcaatccaagttttatatatcgtattgcgtgggataattacaagcaaattgatgtgcatttggataaaaataaggcgtga

SEQ ID NO: 7762 - DNA, 1146 bp, Artificial Sequence
  Description of Artificial Sequence: Synthetic polynucleotide
atgtcctctcaagcattcacttctgtacatccgaatgcggcaacatctgatgtgaatgttaccattgacactttcgttgctaagttaaaaagaagacaagtgcaaggttcttacgccatcgccttggaaactttacaattattaatgagatttatctctgcagctcgttggaaccatgttaatgaccttattgaacaaatcagagatttaggtaatagtttagaaaaagctcatcctactgctttcagttgcggtaacgtaattagaagaatattggctgttttgagggatgaagtagaagaagacactatgagcacaactgtcacatccacatccgttgctgaacctttgatttcctctatgtttaatttattacagaaaccggagcaacctcatcagaatagaaaaaatagttccgggagctctagtatgaaaaccaagactgattaccgtcaagtagccattcagggtatcaaggatcttatagatgagataaaaaacattgatgaaggtattcagcaaattgctattgatttgattcacgatcatgagattttattaactcccacacctgattctaaaaccgtattaaaatttttgattactgctcgcgaacgtagtaatagaacatttacggttttagttacagaggggttccctaataacaccaagaatgcacatgagtttgccaaaaaattagcacagcacaacatagaaaccttggtagtcccagactctgctgtttttgctttaatgtcccgtgtgggtaaggttattatcggcactaaagccgtttttgtcaatggggggactatctcttccaattctggtgtatcttccgtttgtgaatgcgccagagaatttagaacccctgtatttgctgttgcaggtttgtataagctttctcctttatatccgttcgacgtagagaagtttgtcgaatttggtgggtcccaacgtatattacctagaatggatccaagaaaaagattagatacagttaatcaaattaccgattatgttccgcctgaaaatattgatatctacattacaaacgtcggtgggttcaatccaagttttatatatcgtattgcgtgggataattacaagcaaattgatgtgcatttggataaaaataaggcgtga

SEQ ID NO: 7763 - DNA, 582 bp, Saccharomyces cerevisiae
atggttacccttgaatacaatgcaaacagtaaactgatcactgcgagtgatgctgttgttgcactatctaccgaaactaatatcgatcaaataaatgttctcactacatctttgattggagaaaccaacccaaattttacaccacaaccgaatgaagctctaagcaaaatgatcaagggtttatttgaaagtggtatgaagaatttacaacaaaaaaaattgaatgaggcattgaagaatgtttctttagcaatcgaaatggcacaaagaaaaagagcgccttgggaagcttttgctattcagctaccagagctacactttatgcttcgtagtaaaatagatttatgtttaatactcggaaagcatttagaggcgttgcaagacttggatttcttacttggtacgggacttatccaaccagacgtatttgtcaggaaggcggactgtttgctaaaattgagacagtgggaagaggctagggcaacatgcgagagaggtttagctttagccccagaggatatgaaacttagagcccttttaatagaaactgcaagaaatctggccgaatataacggtgaataa

SEQ ID NO: 7764 - DNA, 582 bp, Artificial Sequence
  Description of Artificial Sequence: Synthetic polynucleotide
atggttacccttgaatacaatgcaaacagtaaattaatcactgcgagtgatgctgttgttgcattatctaccgaaactaatatcgatcaaataaatgttctcactacatctttgattggagaaaccaacccaaattttacaccacaaccgaatgaagctttgagcaaaatgatcaagggtttatttgaaagtggtatgaagaatttacaacaaaaaaaattgaatgaggcattgaagaatgtttctttagcaatcgaaatggcacaaagaaaaagagcgccttgggaagcttttgctattcagttaccagagttgcactttatgcttcgtagtaaaatagatttatgtttaatactcggaaagcatttagaggcgttgcaagacttggatttcttacttggtacgggacttatccaaccagacgtatttgtcaggaaggcggactgtttgttgaaattgagacagtgggaagaggctagggcaacatgcgagagaggtttagctttagccccagaggatatgaaacttagagcccttttaatagaaactgcaagaaatttggccgaatataacggtgaatga

SEQ ID NO: 7765 - DNA, 660 bp, Saccharomyces cerevisiae
atgtctgccccagctgctaacggtgaagttccaacattcaaactagttcttgtcggtgatggtggtactggtaagaccacttttgtcaagagacatttgaccggtgaattcgaaaagaagtacatcgccaccattggtgtcgaagtgcatcctttatccttttacaccaacttcggtgaaattaaatttgatgtctgggatactgccggccaagaaaaattcggtggtttaagagacggttactacattaacgcccaatgtgccatcatcatgttcgatgttacttccagaattacttacaagaacgttccaaactggcacagggatttagtccgtgtttgtgaaaacatcccaattgtcttgtgtggtaacaaggtcgatgtcaaagaaagaaaggtcaaggccaagactatcactttccacagaaagaaaaacttgcaatactacgatatttctgccaagtccaactacaactttgaaaagcctttcttatggttggccagaaaattggctggtaacccacaattagaatttgttgcttctccagctttagccccaccagaagtccaagtcgatgaacaattgatgcaacaataccaacaagaaatggaacaagctactgctttgccattgcctgatgaagatgatgctgatttataa

SEQ ID NO: 7766 - DNA, 660 bp, Artificial Sequence
  Description of Artificial Sequence: Synthetic polynucleotide
atgtctgccccagctgctaacggtgaagttccaacattcaaattggttcttgtcggtgatggtggtactggtaagaccacttttgtcaagagacatttgaccggtgaattcgaaaagaagtacatcgccaccattggtgtcgaagtgcatcctttatccttttacaccaacttcggtgaaattaaatttgatgtctgggatactgccggccaagaaaaattcggtggtttaagagacggttactacattaacgcccaatgtgccatcatcatgttcgatgttacttccagaattacttacaagaacgttccaaactggcacagggatttagtccgtgtttgtgaaaacatcccaattgtcttgtgtggtaacaaggtcgatgtcaaagaaagaaaggtcaaggccaagactatcactttccacagaaagaaaaacttgcaatactacgatatttctgccaagtccaactacaactttgaaaagcctttcttatggttggccagaaaattggctggtaacccacaattagaatttgttgcttctccagctttagccccaccagaagtccaagtcgatgaacaattgatgcaacaataccaacaagaaatggaacaagctactgctttgccattgcctgatgaagatgatgctgatttatga

SEQ ID NO: 7767 - DNA, 375 bp, Saccharomyces cerevisiae
atgttccctatcgcttccagaagaatactgctcaatgcttcagttctgccattgagactgtgcaatagaaatttcactaccacaagaatatcctacaacgtcatacaagatttgtatttgagggaactaaaagacaccaaactggctccaagtaccttgcaagatgctgaaggtaatgttaagccttggaacccaccacaaaaaccaaatctaccagaattggaacttcaaggcccagaggctttaaaggcttacaccgagcaaaatgtagaaactgctcatgttgctaaagagtctgaagagggtgagtcagagccaattgaagaggattggctagttttggatgatgctgaggaaaccaaagaaagtcattga

SEQ ID NO: 7768 - DNA, 375 bp, Artificial Sequence
  Description of Artificial Sequence: Synthetic polynucleotide
atgttccctatcgcttccagaagaatattactcaatgcttctgttttgccattgagattgtgcaatagaaatttcactaccacaagaatatcctacaacgtcatacaagatttgtatttgagggaattgaaagacaccaaattggctccaagtaccttgcaagatgctgaaggtaatgttaagccttggaacccaccacaaaaaccaaatttaccagaattggaacttcaaggcccagaggctttaaaggcttacaccgagcaaaatgtagaaactgctcatgttgctaaagagtctgaagagggtgagagtgagccaattgaagaggattggttagttttggatgatgctgaggaaaccaaagaaagtcattga

SEQ ID NO: 7769 - DNA, 327 bp, Saccharomyces cerevisiae
atgggcagttctcgcgttattcgtcatcaggcaagtaattatgcccaatcagcttaccaatgtcacataaaggaaccactattatccctttttggtaatgaaaaacaacactcttccggtacgacagccgctgcggcaattacttttccccaaaagctcataatcgatcaattaacgcgtaaacgaaaaacaaaaaaaaaaaaaatacgtaaattaggtcttcatacgagcgtttttttttttttgaggatcgtttgcatgtctagcgcggcaagcgtgtttacaggcattcgttgtgtgttcatgtttagaacaaatgctaagtga

SEQ ID NO: 7770 - DNA, 327 bp, Artificial Sequence
  Description of Artificial Sequence: Synthetic polynucleotide
atgggcagttctcgcgttattcgtcatcaggcaagtaattatgcccaatctgcttaccaatgtcacataaaggaaccattattatccctttttggtaatgaaaaacaacactcttccggtacgacagccgctgcggcaattacttttccccaaaagctcataatcgatcaattaacgcgtaaaagaaaaacaaaaaaaaaaaaaatacgtaaattaggtcttcatacgagcgtttttttttttttgaggatcgtttgcatgtctagcgcggcaagcgtgtttacaggcattcgttgtgtgttcatgtttagaacaaatgctaagtga

SEQ ID NO: 7771 - DNA, 390 bp, Saccharomyces cerevisiae
atggtcgaaggtgattttgtcgatgagcaatcgaacattgccttactaagctccaaatccatgtgtggtgatcatcatagcgtcaagaatagcataggggatgagatctttaaattattgacaaagattttaaattcggatgagaaagcaagcggagatgtgcacacactcgtttctgggaccccggatctctcaaattttaacctcgataatgaaccactggaaaacatactcgctgttttcataatatcttttattattgtagtggttggagttttactacttgggttgattggcatgatattcatatctctccgttcaggcagcagtaatgataagaaactacagtccaacgatgaagaaaagcaagcacttgctgaaaaagcatga

SEQ ID NO: 7772 - DNA, 390 bp, Artificial Sequence
  Description of Artificial Sequence: Synthetic polynucleotide
atggtcgaaggtgattttgtcgatgagcaaagtaacattgccttattaagctccaaatccatgtgtggtgatcatcatagcgtcaagaatagcataggggatgagatctttaaattattgacaaagattttaaattctgatgagaaagcaagcggagatgtgcacacactcgtttctgggaccccggatctctctaattttaacctcgataatgaaccattggaaaacatactcgctgttttcataatatcttttattattgtagtggttggagttttattacttgggttgattggcatgatattcatatctctccgtagcggcagcagtaatgataagaaattacagtccaacgatgaagaaaagcaagcacttgctgaaaaagcatga

SEQ ID NO: 7773 - DNA, 696 bp, Saccharomyces cerevisiae
atgacgagatactattgtgaatactgtcattcgtatttgacccatgacacgttgagcgttcgtaaatcgcacttggtcggtaagaatcaccttcgtataacagctgactattataggaacaaagcaagagacattattaataaacataatcataaaagacgccacattggaaaaagaggcaggaaagaaagagaaaacagtagtcaaaatgagacgctaaaagttacatgcctttcaaataaggagaaaagacacatcatgcatgtgaagaaaatgaaccaaaaagaactggcacaaacctcaatagataccttgaaattgttatacgatggctcaccaggatattccaaagtatttgtggatgctaacaggtttgatataggagatttggttaaagccagcaaattaccccaaagagccaatgaaaaatctgcacaccattccttcaagcaaacttcaagatccagagatgagacgtgcgagagcaatccatttcctaggttgaataacccaaagaagctagaacccccaaagatattatcacaatggagtaacaccattccaaaaacttctatattttacagtgtagatatactgcaaaccacgatcaaggagtccaagaagcggatgcattccgacggcatacggaaaccgtcgagtgccaacggatataaaaggaggcggtatggaaattaa

SEQ ID NO: 7774 - DNA, 696 bp, Artificial Sequence
  Description of Artificial Sequence: Synthetic polynucleotide
atgacgagatactattgtgaatactgtcattcttatttgacccatgacacgttgagcgttcgtaaatctcacttggtcggtaagaatcaccttcgtataacagctgactattataggaacaaagcaagagacattattaataaacataatcataaaagacgccacattggaaaaagaggcaggaaagaaagagaaaacagtagtcaaaatgagacgttgaaagttacatgcctttctaataaggagaaaagacacatcatgcatgtgaagaaaatgaaccaaaaagaattggcacaaaccagtatagataccttgaaattgttatacgatggctctccaggatattccaaagtatttgtggatgctaacaggtttgatataggagatttggttaaagccagcaaattaccccaaagagccaatgaaaaatctgcacaccattccttcaagcaaacttccagatccagagatgagacgtgcgagagcaatccatttcctaggttgaataacccaaagaagttggaacccccaaagatattatctcaatggagtaacaccattccaaaaacttctatattttacagtgtagatatattgcaaaccacgatcaaggagtccaagaagagaatgcattccgacggcataagaaaaccgtccagtgccaacggatataaaaggaggagatatggaaattga

SEQ ID NO: 7775 - DNA, 1983 bp, Saccharomyces cerevisiae
atgctgttgtgtaatagaaaagtccccaagactttaaatacctgttttatactgcatatattcactctgttaacactgggtgtgttagtgtccggaatgccgtcaaaaatggtatcattcgcctctcaggagactttgcagagaataaataatctccttcgagggtctgccaatcgagatgttgacattattgcagaatatttgaaaaaagacgacgatgatgatggcggcgataaggatcaccataacatcgatattgaccctttacctcgccgtcctagtttaacgcctgataggcaacttctaaaagtcggtttgcatggtgctataagttcagatttagaagtctgtagtaatttgactataaatgaggtactcctgaaatttcccggttctaacgctgcagacgctgcagtaacacaagctctttgtaagggtatggtgaatttttttaatagtgggattggaggtggtggctacgtagttttttctggcaaagacgatgaagatcatctatccattgattttagagaaaaagcacccatggattcacataagttcatgttcgaaaactgctctctatgctcaaaaatagggggtcttgctgtcggtgttccaggtgaattgatgggtctctatcgcctctttaaagaaagaggtagcggccaagttgattggcgtgatctaattgaaccagtcgcaaagctgggaagcgtgggttggcaaataggcgaagcactcggtgccactttagaactttatgaggatgttttcctgacattgaaggaagattggtcgtttgtattgaattctacccatgacggtgttttgaaagaaggcgattggatcaagaggccggcactatctaacatgctaatggaactggctaaaaatggttccgtggccccattttatgaccccgatcactggattgcaaaatccatgattgatactgtcgcaaaatacaatggaataatgaacttgcaggatgtttcatcgtatgatgttcatgttactaaaccactgtccatgaaaattaggaagggcgccaatttcatccctgataacgatatgaccgtattaacaagtagcggctcaagttccggggctgcactacttgcggcgttaaggataatggataatttccagaatcaagaagggggcgattatgaaaaagaaactacctatcatttgcttgaaagcatgaaatggatggcaagcgcaagaagcaggttaggcgattttgaaggcgaagcattacctaagcatatagaagaggtattggatccagaatgggctttgaaagcagtgaaatcaatcaaaagaaactctcaagacggaaattttaaaactttagaaaactggacgctttatgatccggcatacgatatcaataacccgcatggaactgcccacttcagtatagtagattcacatgggaatgctgtttccttgacaaccaccatcaacttgttgttcggttccttagtacacgacccaaaaaccggggtgatcttcaataatgaaatggacgatttcgctcaattcaacaaatctaatagttttgaattggcaccctccatatacaactttcccgagcccgggaaaagacccctatcatccactgcacccactattgtgctgtcagaattaggcatcccagacctcgtggtcggcgcttccggcggctcaagaatcactacgagtgttttacaaacaattgtgaggacgtactggtataacatgcctatattggaaacgatagcctatccacgtatacaccaccagttactgcccgaccgcatagaactggaaagcttccccatgatcggtaaagccgtactaagcactctcaaggaaatgggatatacgatgaaagaagtatttcccaagagcgtagttaatgctatacgcaatgtcaggggagaatggcatgcggtgagtgactattggagaaaaagaggaatctcctccgtatactaa

SEQ ID NO: 7776 - DNA, 1983 bp, Artificial Sequence
  Description of Artificial Sequence: Synthetic polynucleotide
atgcttttgtgtaatagaaaagtccccaagactttaaatacctgttttatattacatatattcactttattaacattaggtgtgttagtgtccggaatgccgtccaaaatggtatctttcgcctctcaggagactttgcagagaataaataatctccttagggggtctgccaatagagatgttgacattattgcagaatatttgaaaaaagacgacgatgatgatggcggcgataaggatcaccataacatcgatattgaccctttacctcgccgtcctagtttaacgcctgataggcaacttttgaaagtcggtttgcatggtgctataagttctgatttagaagtctgtagtaatttgactataaatgaggtactcttgaaatttcccggttctaacgctgcagacgctgcagtaacacaagctctttgtaagggtatggtgaatttttttaatagtgggattggaggtggtggctacgtagttttttctggcaaagacgatgaagatcatttgtccattgattttagagaaaaagcacccatggattctcataagttcatgttcgaaaactgctctttatgctccaaaatagggggtcttgctgtcggtgttccaggtgaattgatgggtctctatcgcctctttaaagaaagaggtagcggccaagttgattggcgtgatttgattgaaccagtcgcaaagttgggaagcgtgggttggcaaataggcgaagcactcggtgccactttagaactttatgaggatgttttcttaacattgaaggaagattggtcttttgtattgaattctacccatgacggtgttttgaaagaaggcgattggatcaagaggccggcattatctaacatgttaatggaattggctaaaaatggttccgtggccccattttatgaccccgatcactggattgcaaaatccatgattgatactgtcgcaaaatacaatggaataatgaacttgcaggatgtttcttcttatgatgttcatgttactaaaccattgtccatgaaaattaggaagggcgccaatttcatccctgataacgatatgaccgtattaacaagtagcggctccagttccggggctgcattacttgcggcgttaaggataatggataatttccagaatcaagaagggggcgattatgaaaaagaaactacctatcatttgcttgaaagcatgaaatggatggcaagcgcaagaagcaggttaggcgattttgaaggcgaagcattacctaagcatatagaagaggtattggatccagaatgggctttgaaagcagtgaaatctatcaaaagaaactctcaagacggaaattttaaaactttagaaaactggacgctttatgatccggcatacgatatcaataacccgcatggaactgcccacttcagtatagtagattctcatgggaatgctgtttccttgacaaccaccatcaacttgttgttcggttccttagtacacgacccaaaaaccggggtgatcttcaataatgaaatggacgatttcgctcaattcaacaaatctaatagttttgaattggcaccctccatatacaactttcccgagcccgggaaaagacccttatcttccactgcacccactattgtgctttctgaattaggcatcccagacctcgtggtcggcgcttccggcggctccagaatcactacgagtgttttacaaacaattgtgaggacgtactggtataacatgcctatattggaaacgatagcctatccacgtatacaccaccagttattgcccgaccgcatagaattggaaagcttccccatgatcggtaaagccgtattgagcactctcaaggaaatgggatatacgatgaaagaagtatttcccaagagcgtagttaatgctatacgcaatgtcaggggagaatggcatgcggtgagtgactattggagaaaaagaggaatctcctccgtatactga

SEQ ID NO: 7777 - DNA, 1347 bp, Saccharomyces cerevisiae
atgctttcgcttaaaacgttactgtgtacgttgttgactgtgtcatcagtactcgctaccccagtccctgcaagagacccttcttccattcaatttgttcatgaggagaacaagaaaagatactacgattatgaccacggttccctcggagaaccaatccgtggtgtcaacattggtggttggttacttcttgaaccatacattactccatctttgttcgaggctttccgtacaaatgatgacaacgacgaaggaattcctgtcgacgaatatcacttctgtcaatatttaggtaaggatttggctaaaagccgtttacagagccattggtctactttctaccaagaacaagatttcgctaatattgcttcccaaggtttcaaccttgtcagaattcctatcggttactgggctttccaaactttggacgatgatccttatgttagcggcctacaggaatcttacctagaccaagccatcggttgggctagaaacaacagcttgaaagtttgggttgatttgcatggtgccgctggttcgcagaacgggtttgataactctggtttgagagattcatacaagtttttggaagacagcaatttggccgttactacaaatgtcttgaactacatattgaaaaaatactctgcggaggaatacttggacactgttattggtatcgaattgattaatgagccattgggtcctgttctagacatggataaaatgaagaatgactacttggcacctgcttacgaatacttgagaaacaacatcaagagtgaccaagttatcatcatccatgacgctttccaaccatacaattattgggatgacttcatgactgaaaacgatggctactggggtgtcactatcgaccatcatcactaccaagtctttgcttctgatcaattggaaagatccattgatgaacatattaaagtagcttgtgaatggggtaccggagttttgaatgaatcccactggactgtttgtggtgagtttgctgccgctttgactgattgtacaaaatggttgaatagtgttggcttcggcgctagatacgacggttcttgggtcaatggtgaccaaacatcttcttacattggctcttgtgctaacaacgatgatatagcttactggtctgacgaaagaaaggaaaacacaagacgttatgtggaggcacaactagatgcctttgaaatgagagggggttggattatctggtgttacaagacagaatctagtttggaatgggatgctcaaagattgatgttcaatggtttattccctcaaccattgactgacagaaagtatccaaaccaatgtggcacaatttctaactaa

SEQ ID NO: 7778 - DNA, 1347 bp, Artificial Sequence
  Description of Artificial Sequence: Synthetic polynucleotide
atgctttctcttaaaacgttattatgtacgttgttgactgtgtcttctgtactcgctaccccagtccctgcaagagacccttcttccattcaatttgttcatgaggagaacaagaaaagatactacgattatgaccacggttccctcggagaaccaatccgtggtgtcaacattggtggttggttacttcttgaaccatacattactccatctttgttcgaggctttccgtacaaatgatgacaacgacgaaggaattcctgtcgacgaatatcacttctgtcaatatttaggtaaggatttggctaaaagccgtttacagagccattggtctactttctaccaagaacaagatttcgctaatattgcttcccaaggtttcaaccttgtcagaattcctatcggttactgggctttccaaactttggacgatgatccttatgttagcggcttgcaggaatcttacttggaccaagccatcggttgggctagaaacaacagcttgaaagtttgggttgatttgcatggtgccgctggttctcagaacgggtttgataactctggtttgagagattcttacaagtttttggaagacagcaatttggccgttactacaaatgtcttgaactacatattgaaaaaatactctgcggaggaatacttggacactgttattggtatcgaattgattaatgagccattgggtcctgttttggacatggataaaatgaagaatgactacttggcacctgcttacgaatacttgagaaacaacatcaagagtgaccaagttatcatcatccatgacgctttccaaccatacaattattgggatgacttcatgactgaaaacgatggctactggggtgtcactatcgaccatcatcactaccaagtctttgcttctgatcaattggaaagatccattgatgaacatattaaagtagcttgtgaatggggtaccggagttttgaatgaatcccactggactgtttgtggtgagtttgctgccgctttgactgattgtacaaaatggttgaatagtgttggcttcggcgctagatacgacggttcttgggtcaatggtgaccaaacatcttcttacattggctcttgtgctaacaacgatgatatagcttactggtctgacgaaagaaaggaaaacacaagacgttatgtggaggcacaattggatgcctttgaaatgagagggggttggattatctggtgttacaagacagaatctagtttggaatgggatgctcaaagattgatgttcaatggtttattccctcaaccattgactgacagaaagtatccaaaccaatgtggcacaatttctaactga

SEQ ID NO: 7779 - DNA, 735 bp, Saccharomyces cerevisiae
atgccagcattattaaaaagattattgtttcaagtgggtcctcatccaaacgaaagaacattcaccttatcctctgtttcaactgatgggcactatatttccttgagaccatttgttaagccaagcggtgatgagttatcttttcctttcgaatgggcctttgccggtacaaacgaaacagttaaagctaatgatcaaggaaacggtgtcgttactcaagatttcaatttctggttggatacaaatgtgtacttgaacgttccaaacacccatcgtggcgaagtgaacaccacttggaaaaattgggattctggttgtgtcgaggaaacaggcgctgtttacccattcggtgccgacaaagaaagcgtctctttcagagaattgtggcaaccagttgacccatcaagagaagatctagtcatcgtctcaccaaacaatgagaagttctcgtcgaatgctaggtcaattgtcctcaaagttactgacgaagcttatgatggtttggttattgttattggtagatggattcaagggtttttgtcccaaaagaataataacactattgaaggcttgaacttcatcagattacttgaaaaagattcaggtaaatctgagttcttattaagctacggtaaggaagtaaacaaaattccacaaagctacgaaaatttgaagaaaggttccactgtaaccagcaatgggttgaactgggaagttattgaatatcacgcttaa

SEQ ID NO: 7780 - DNA, 735 bp, Artificial Sequence
  Description of Artificial Sequence: Synthetic polynucleotide
atgccagcattattaaaaagattattgtttcaagtgggtcctcatccaaacgaaagaacattcaccttatcctctgtttccactgatgggcactatatttccttgagaccatttgttaagccaagcggtgatgagttatcttttcctttcgaatgggcctttgccggtacaaacgaaacagttaaagctaatgatcaaggaaacggtgtcgttactcaagatttcaatttctggttggatacaaatgtgtacttgaacgttccaaacacccatcgtggcgaagtgaacaccacttggaaaaattgggattctggttgtgtcgaggaaacaggcgctgtttacccattcggtgccgacaaagaaagcgtctctttcagagaattgtggcaaccagttgacccatctagagaagatttggtcatcgtctctccaaacaatgagaagttctcttccaatgctaggtctattgtcctcaaagttactgacgaagcttatgatggtttggttattgttattggtagatggattcaagggtttttgtcccaaaagaataataacactattgaaggcttgaacttcatcagattacttgaaaaagattctggtaaatctgagttcttattaagctacggtaaggaagtaaacaaaattccacaaagctacgaaaatttgaagaaaggttccactgtaaccagcaatgggttgaactgggaagttattgaatatcacgcttga

SEQ ID NO: 7781 - DNA, 363 bp, Saccharomyces cerevisiae
atgagatggcattgtatggatgggggtaatagaattgtatctatgtatctgacgaccctgtattacacgaaggaaatagtagatgaaaagacaagagagcaagaaaaaggaaaaacttcctttctaacagacgctttacttaaccttatatatatcttatttttttcatcgagcgtgttcaattggacaaggtgccaccttttcgacacttcggttattatgttacacagttttcatgaggatggcgccttgactaacttaattagtcatttgccaaccaccacagttccccaatatcgacagcttcacgtgccatttgccattttgcgatcatgtgacctcaagagaaaaagcaaaaaataa

SEQ ID NO: 7782 - DNA, 363 bp, Artificial Sequence
  Description of Artificial Sequence: Synthetic polynucleotide
atgagatggcattgtatggatgggggtaatagaattgtatctatgtatttgacgaccttatattacacgaaggaaatagtagatgaaaagacaagagagcaagaaaaaggaaaaacttcctttttaacagacgctttacttaaccttatatatatcttatttttttcttctagcgtgttcaattggacaaggtgccaccttttcgacacttctgttattatgttacacagttttcatgaggatggcgccttgactaacttaattagtcatttgccaaccaccacagttccccaatataggcagcttcacgtgccatttgccattttgagatcttgtgacctcaagagaaaaagcaaaaaatga

SEQ ID NO: 7783 - DNA, 1335 bp, Saccharomyces cerevisiae
atgccatctcatttcgatactgttcaactacacgccggccaagagaaccctggtgacaatgctcacagatccagagctgtaccaatttacgccaccacttcttatgttttcgaaaactctaagcatggttcgcaattgtttggtctagaagttccaggttacgtctattcccgtttccaaaacccaaccagtaatgttttggaagaaagaattgctgctttagaaggtggtgctgctgctttggctgtttcctccggtcaagccgctcaaacccttgccatccaaggtttggcacacactggtgacaacatcgtttccacttcttacttatacggtggtacttataaccagttcaaaatctcgttcaaaagatttggtatcgaggctagatttgttgaaggtgacaatccagaagaattcgaaaaggtctttgatgaaagaaccaaggctgtttatttggaaaccattggtaatccaaagtacaatgttccggattttgaaaaaattgttgcaattgctcacaaacacggtattccagttgtcgttgacaacacatttggtgccggtggttacttctgtcagccaattaaatacggtgctgatattgtaacacattctgctaccaaatggattggtggtcatggtactactatcggtggtattattgttgactctggtaagttcccatggaaggactacccagaaaagttccctcaattctctcaacctgccgaaggatatcacggtactatctacaatgaagcctacggtaacttggcatacatcgttcatgttagaactgaactattaagagatttgggtccattgatgaacccatttgcctctttcttgctactacaaggtgttgaaacattatctttgagagctgaaagacacggtgaaaatgcattgaagttagccaaatggttagaacaatccccatacgtatcttgggtttcataccctggtttagcatctcattctcatcatgaaaatgctaagaagtatctatctaacggtttcggtggtgtcttatctttcggtgtaaaagacttaccaaatgccgacaaggaaactgacccattcaaactttctggtgctcaagttgttgacaatttaaagcttgcctctaacttggccaatgttggtgatgccaagaccttagtcattgctccatacttcactacccacaaacaattaaatgacaaagaaaagttggcatctggtgttaccaaggacttaattcgtgtctctgttggtatcgaatttattgatgacattattgcagacttccagcaatcttttgaaactgttttcgctggccaaaaaccatga

SEQ ID NO: 7784 - DNA, 1335 bp, Artificial Sequence
  Description of Artificial Sequence: Synthetic polynucleotide
atgccatctcatttcgatactgttcaattacacgccggccaagagaaccctggtgacaatgctcacagatccagagctgtaccaatttacgccaccacttcttatgttttcgaaaactctaagcatggttctcaattgtttggtttggaagttccaggttacgtctattcccgtttccaaaacccaaccagtaatgttttggaagaaagaattgctgctttagaaggtggtgctgctgctttggctgtttcctccggtcaagccgctcaaacccttgccatccaaggtttggcacacactggtgacaacatcgtttccacttcttacttatacggtggtacttataaccagttcaaaatctctttcaaaagatttggtatcgaggctagatttgttgaaggtgacaatccagaagaattcgaaaaggtctttgatgaaagaaccaaggctgtttatttggaaaccattggtaatccaaagtacaatgttccggattttgaaaaaattgttgcaattgctcacaaacacggtattccagttgtcgttgacaacacatttggtgccggtggttacttctgtcagccaattaaatacggtgctgatattgtaacacattctgctaccaaatggattggtggtcatggtactactatcggtggtattattgttgactctggtaagttcccatggaaggactacccagaaaagttccctcaattctctcaacctgccgaaggatatcacggtactatctacaatgaagcctacggtaacttggcatacatcgttcatgttagaactgaattattaagagatttgggtccattgatgaacccatttgcctctttcttgttattacaaggtgttgaaacattatctttgagagctgaaagacacggtgaaaatgcattgaagttagccaaatggttagaacaatccccatacgtatcttgggtttcttaccctggtttagcatctcattctcatcatgaaaatgctaagaagtatttatctaacggtttcggtggtgtcttatctttcggtgtaaaagacttaccaaatgccgacaaggaaactgacccattcaaactttctggtgctcaagttgttgacaatttaaagcttgcctctaacttggccaatgttggtgatgccaagaccttagtcattgctccatacttcactacccacaaacaattaaatgacaaagaaaagttggcatctggtgttaccaaggacttaattcgtgtctctgttggtatcgaatttattgatgacattattgcagacttccagcaatcttttgaaactgttttcgctggccaaaaaccatga

SEQ ID NO: 7785 - DNA, 2337 bp, Saccharomyces cerevisiae
atgctgtctgcacgttctgccatcaagagacccattgttcgtggtcttgcgacagtctccaacttgactagagattcaaaagtcaaccaaaacttattagaagatcattcttttattaactacaagcagaatgtggaaacgctggatatcgtaagaaaaagattaaacaggccatttacctacgcggaaaagattttgtacggtcacttggatgaccctcatggtcaagatattcagagaggtgtttcatacctaaaattaagaccagatcgtgttgcctgtcaagatgctactgctcaaatggctattttacaatttatgtccgctggtttaccacaggttgctaagccagtcactgtccactgtgaccatttgattcaagcacaagttggtggtgaaaaagatttgaagagagctatagatctaaacaaggaagtttatgatttcttggcctctgccactgcgaaatataacatgggtttctggaagccaggttccggtatcattcaccaaattgttctggaaaactacgctttcccaggtgctttgatcattggtactgactcccatacaccaaatgctggtggtttaggtcaattggctattggtgttggtggtgctgatgccgttgatgttatggcaggtcgtccatgggaattgaaggctccaaagatcttaggtgttaagttgactggtaagatgaacggttggacttctccaaaggatattattttgaaattggctggtatcacaactgtcaaaggtggtactggtaaaattgttgaatatttcggtgatggtgttgacaccttctccgctactggtatgggtaccatttgtaatatgggtgctgaaatcggtgctaccacatctgttttcccattcaacaaatctatgattgaatatttggaagcaactggtcgtggtaagatcgctgactttgctaaattataccacaaggacctattatctgctgataaggatgctgaatacgatgaggtcgtcgaaattgacttgaacactctggaaccatacatcaatgggccatttacccccgatttggctactccagtttctaagatgaaggaagttgctgttgctaataactggccattggatgtcagagtcggtttgatcggttcttgtaccaattcctcttatgaagatatgtctcgttcagcatccattgtcaaggatgctgctgctcatggtttgaaatccaagaccattttcactgttactccaggttctgaacaaatcagagccactattgaacgtgatggccaattagaaaccttcaaagaatttggtggtatcgttttggcaaacgcctgtggcccatgtattggtcaatgggatcgtagagatatcaagaaaggtgacaagaatactatcgtttcctcttacaacagaaatttcacttctagaaatgatggtaacccacaaactcatgcttttgttgcatctccagaattagtaactgcgttcgccattgcgggtgatttgagattcaaccctctaacagacaaattaaaggacaaggatggtaatgagttcatgttgaaaccaccacatggtgatggtttgcctcaaagaggttatgatgctggtgagaacacttaccaagctccacctgcagaccgtagcaccgttgaagttaaagtttctccaacttcagaccgtctacaactgttgaaaccattcaaaccttgggatggtaaggatgctaaagacatgccaatcttgattaaggccgtcggtaagacaactactgatcatatttctatggctggtccatggttgaaatacagaggtcatttagaaaacatttctaataactatatgattggtgctattaatgctgaaaacaagaaggctaactgtgttaaaaatgtatatactggtgaatacaaaggtgttccagacactgctagagattacagagaccaaggtatcaagtgggttgttattggtgatgaaaactttggtgaaggttcctctcgtgaacacgctgctttggaaccaagattcttgggcggtttcgctatcatcacaaagtctttcgctcgtatccatgaaactaacttgaaaaaacaaggtctattgccattgaacttcaagaacccagctgactatgacaagatcaaccctgatgacagaatcgatattctgggtctagctgaattggctccaggtaagcctgtaacaatgagagttcatccaaagaatggtaagccatgggatgctgtgttgacccatactttcaacgatgagcaaattgaatggttcaaatatggttctgccttaaataaaattaaggccgatgagaagaaataa

SEQ ID NO: 7786 - DNA, 2337 bp, Artificial Sequence
  Description of Artificial Sequence: Synthetic polynucleotide
atgctttctgcacgttctgccatcaagagacccattgttcgtggtcttgcgacagtctccaacttgactagagattctaaagtcaaccaaaacttattagaagatcattcttttattaactacaagcagaatgtggaaacgttagatatcgtaagaaaaagattaaacaggccatttacctacgcggaaaagattttgtacggtcacttggatgaccctcatggtcaagatattcagagaggtgtttcttacttgaaattaagaccagatcgtgttgcctgtcaagatgctactgctcaaatggctattttacaatttatgtccgctggtttaccacaggttgctaagccagtcactgtccactgtgaccatttgattcaagcacaagttggtggtgaaaaagatttgaagagagctatagatttgaacaaggaagtttatgatttcttggcctctgccactgcgaaatataacatgggtttctggaagccaggttccggtatcattcaccaaattgttttggaaaactacgctttcccaggtgctttgatcattggtactgactcccatacaccaaatgctggtggtttaggtcaattggctattggtgttggtggtgctgatgccgttgatgttatggcaggtcgtccatgggaattgaaggctccaaagatcttaggtgttaagttgactggtaagatgaacggttggacttctccaaaggatattattttgaaattggctggtatcacaactgtcaaaggtggtactggtaaaattgttgaatatttcggtgatggtgttgacaccttctccgctactggtatgggtaccatttgtaatatgggtgctgaaatcggtgctaccacatctgttttcccattcaacaaatctatgattgaatatttggaagcaactggtcgtggtaagatcgctgactttgctaaattataccacaaggacttattatctgctgataaggatgctgaatacgatgaggtcgtcgaaattgacttgaacactttggaaccatacatcaatgggccatttacccccgatttggctactccagtttctaagatgaaggaagttgctgttgctaataactggccattggatgtcagagtcggtttgatcggttcttgtaccaattcctcttatgaagatatgtctcgttctgcatccattgtcaaggatgctgctgctcatggtttgaaatccaagaccattttcactgttactccaggttctgaacaaatcagagccactattgaacgtgatggccaattagaaaccttcaaagaatttggtggtatcgttttggcaaacgcctgtggcccatgtattggtcaatgggatcgtagagatatcaagaaaggtgacaagaatactatcgtttcctcttacaacagaaatttcacttctagaaatgatggtaacccacaaactcatgcttttgttgcatctccagaattagtaactgcgttcgccattgcgggtgatttgagattcaaccctttaacagacaaattaaaggacaaggatggtaatgagttcatgttgaaaccaccacatggtgatggtttgcctcaaagaggttatgatgctggtgagaacacttaccaagctccacctgcagaccgtagcaccgttgaagttaaagtttctccaacttctgaccgtttacaattattgaaaccattcaaaccttgggatggtaaggatgctaaagacatgccaatcttgattaaggccgtcggtaagacaactactgatcatatttctatggctggtccatggttgaaatacagaggtcatttagaaaacatttctaataactatatgattggtgctattaatgctgaaaacaagaaggctaactgtgttaaaaatgtatatactggtgaatacaaaggtgttccagacactgctagagattacagagaccaaggtatcaagtgggttgttattggtgatgaaaactttggtgaaggttcctctcgtgaacacgctgctttggaaccaagattcttgggcggtttcgctatcatcacaaagtctttcgctcgtatccatgaaactaacttgaaaaaacaaggtttattgccattgaacttcaagaacccagctgactatgacaagatcaaccctgatgacagaatcgatattttgggtttagctgaattggctccaggtaagcctgtaacaatgagagttcatccaaagaatggtaagccatgggatgctgtgttgacccatactttcaacgatgagcaaattgaatggttcaaatatggttctgccttaaataaaattaaggccgatgagaagaaatga

SEQ ID NO: 7787 - DNA, 5703 bp, Saccharomyces cerevisiae
atgagatttaccagaggattgaaagcctcttcatctttaagagcgaaagctattggaagactaactaaactttcgacgggtgcaccaaatgatcaaaacagtaatggtacaacattagatttgataactcatacattgcctattttttattccacaaatacgtcaaagatatatactataccacttacattgagtgaatgggaagtactaacttcgctttgtgttgcaatccctaccacgctcgatctggtagagacaatgcttaaagaaataattgcgccttattttctggaaactccaagacaaagaatttcagatgttctgtcctcgaaattcaagttggaacagatgagaaatccgattgaattgctaactttccagctgactaagtttatgattcaagcttgtgaacagtatcccgttctttatgaaaatataggcggcatcatttcaacttattttgagcgtgtattaaagatttttactattaaacaatctggtctactatcattagtgggctttattaatgcatttatccagtttcccaactctacagagcttactaaattcacctggaaaaagttagcgaaacttgtgcttcgtggatcatttctaaacgaagttgataagattttgaattcctcagcaacgtttaccaatgattcaatcgtccagtattacgatgctggaaatgagctatccagtgcctacttattggaattaatatctcgcttgcaagtttcgctaatatctcatctgttaaacacttcacatgtcggcgccaacttgagtgagttcttactaaatcaacaataccaattttacaaatttgatcaagaagtagccgatgaaaacgatgatacgaagtgtattgatgacttttttttcaacgtaagaagcaataaacagttttttacagacatgtgtaaaatttccctgcaattttgttctgagtcacatattctcgacctatctacagacaaccgtgcaagattttcttttgatactcgagcccactacctacaaacgctatgtttaattccgtttatagaagatacagaaagcgagctttttgaaagttttacaaacgttgtttctgaatctattgataaatttttcttatctgatgtcgttacaccatctttgataaaagcaattgtagcttctgcctcattactgaattttttcacggaaaaattgtcattaactctgattcgtatgtttcctttattggtagcgtctccacatatcacgactgaaacagttaatgatgttgcaaaaatattcaccacagggttataccctctaaatgaagatgcaattgtgagtacaatttattccatgaacaacttattagctgtttccgaggacggatcgcccgtcccggtgctccgtgagcgccaattaacaataacatctggaaaaaatattgagaaagactactttcccttgcgaaattcatctgccagtttggatggcactggtgctctgctcggaaatacaactgtgggccaactttcctcccatgatgtcaatagtggagctactatgacataccatgcctctttgatatctaattgtgtggctgcaacgactacaatcgcctcatactataacacccaaagcataacagctttgactatctctattcttacgcaaaaagttaattctatgtcaaaggaattagacggtgttattttgaattctttggcaagactggctccgaatacttcactgacagaattttcgcttttactaaagttcttcaaatcgagaactgttattgcaacaaaaattgatgatagcgcactattgaaaaatattattaaagcgaaatgtgtgatatcaaaagaattgttggccaggcatttttcaagtgacttatatttcatgtatcttcatgatctattggactcaatcattgccagtggggaagtagaacgattggaacatcacagacctcaaacggagatttcccgtgttgctgatcaaatcgctacctacttagagcccctcgccgctctactacctgttccaggcgatacgccattggacatcaataaggatgaagtcactacaaacaagtttaggaacgcctggtttaattttgtcatccatgggtaccacttgggcgggcctattgtcaaacgaaatttttctttcttattaactattgcctataattcaccaccgctggcttctgaatttcctgctaataacaaggagctttcattggaaatgaatacaattttgcgccgcggttcatctaacgaaaatatcaaacaacaaaaacagcagataaccgaatatttcaataccaatattgttcagtacagaacaacttcatcgtctaaaatcatgtttttagcggctgccgttcttctagaaacgataagatgcgaggcaggtgattgttcgaagactctactgtacttctcagacccctccattctttccggttcaattgagaagtgtattgcagttttgtcggtttccatgattagaaaatatgctaggttgattcaaaagggtaacgatgccatattcaactccaaaatgattgctcaacaacttaataacttgctactttgcctttctcatagggaaccaactttgcaggatgccgcttttcatgcctgtgaaatatttatcagatctattccatcatcgttatgtcatcatttgtctctctacaccttattagatatgttaacagccctatttgatagtatcttggactcagaggcgcataaatttgaaccacggtatgaatttaaattaaaacattctaagacaacaatattggttccaagctcatcgtcctggcgcgctacgacactatcaagattgcacaagtcagctaaagaatgggtaagaattctattgaatagaagcaaccaggatactaagattttgttgcaatcatacatatcagatctcggtgagtacagcaggctaaattctgttgaatttggtgtctcatttgccatggatatggctggtttgattttacctgcagataaggaattatcaaggcttacttattatggtccagagaaacctaacacgatttctggatttatatctttacattcttggaggtcaaaatatcttttcgataccgctattacatcatcaccagaggatatcaaaaggcaaataggtatttccactcaaaacataagaaaaaatttgaccttaggaaataagattataactaaagacgtaactgattttcttgatatggctaccgcgttgttaattcttggcaatggtgcaccagcgtcattgatatatgatattgtgcacatcccgttcgaagtcttcacctctgcatctttaaagattgctacaaacgtatggttaacaatcataactgagaagcccgaagttgcacatttgcttttagttgaagtatgctattgctggatgcgctccattgatgacaatattggtctctattctcgcgatcatgacttaaagggcgaagaataccaaaaaatggaatattccccttacgacaaagcaggtatcaacagagatgcaaaaaatgcatcccaagctatgcaaccacatcttcatgttattaaattttttgcttcccatttcgagggcacactatttcaaagtgactttttattgaaaattttcacgaaatgtgcgctttatggtatcaagaatctgtataaggcttcactacacccgttcgctagaatgattcgccacgaattattgttattcgcgactctcgtactaaacgcaagttataagcagggatccaagtatatgggccgtttgtcgcaagaaatcacaaacggtgccctaagttggtttaaaagaccagtagcgtggccattcggctcaaatgagctgaaaatcaaagcagatttatctgttactagggaccttttccttcagctcaacaaattaagctcgctaatgtcacgtcattgcgggaaagattacaagatcctgaactatttcttggcaagcgaaatccagcagattcaaacctggcttactccgactgagaagattgaaggagccgacagcaacgagcttacaagcgatatcgttgaagctacctttgctaaagatccaacattagcaataaatctcttacaacgatgttatagcaagaaagctgaggatgttttagtgggcttagttgcaaaacatgctttaatgtgtgtggggtccccaagtgctcttgacctgttcataaaaggaagccacctgagcagtaagaaagacctacacgcaaccttatactgggcgccagtgagcccgttaaaatctatcaaccttttccttcccgaatggcaaggtaattcttttatcttacaattcagcatatattcgttggaatcacaagatgtgaacttggcattcttctatgttcctcaaatcgtacaatgtttgagatacgataaaaccggatatgtcgaaagattgattttggatactgcgaaaattagtgtgttattttctcatcaaataatctggaatatgcttgcaaactgctacaaggatgatgaaggtatacaagaagatgaaatcaaaccaactctagatcgtattagggagcgtatggtttcaagtttcagccaatctcatcgcgatttttacgaacgtgaatttgaattcttcgacgaagtaactggcatatctggtaagttgaaaccatacataaaaaaaagtaaggctgaaaagaaacataagatcgatgaagaaatgagcaaaattgaggtgaaacctgatgtttatttaccttctaatcctgacggtgtagttattgatattgatcggaagagtggtaagccacttcaatctcacgcaaaggcgccttttatggcgacctttaaaataaagaaagacgtaaaagatcctttgacaggtaaaaacaaggaagttgaaaaatggcaagctgctatcttcaaagtcggtgatgactgtaggcaagatgttctagcgttacaattgatctcgctatttagaaccatttggtctagtattggcttggatgtctacgtttttccctacagagttactgcgacggcaccgggttgtggtgtcatcgatgtgctacccaattcggtatcccgtgatatgttaggacgtgaagctgttaatggattatatgaatatttcactagtaaatttggtaatgaatctactatcgaatttcaaaacgcacgaaacaactttgttaaatccttagcgggatatagcgtaatttcgtatttgttgcaattcaaggatagacataatggtaacattatgtacgatgatcaaggacattgtctacatatcgattttgggtttatttttgatattgtcccaggtggtatcaagtttgaagcagtaccattcaagctgacgaaagaaatggttaaagtgatgggaggttcgccccagaccccagcgtatctggactttgaagaactttgtatcaaggcatatctagccgcccgtccgcacgtggaggccataattgagtgtgtaaatcctatgttaggaagcggtctcccctgctttaagggtcacaagacaattaggaatctaagagcaagatttcaacctcaaaaaaccgatcacgaagctgcactatatatgaaggcgctaatccgtaaaagttatgaaagtatattcactaaaggttatgatgaattccaaaggctcacaaatggcattccgtactga

SEQ ID NO: 7788 - DNA, 5703 bp, Artificial Sequence
  Description of Artificial Sequence: Synthetic polynucleotide
atgagatttaccagaggattgaaagcctcttcttctttaagagcgaaagctattggaagattaactaaactttctacgggtgcaccaaatgatcaaaacagtaatggtacaacattagatttgataactcatacattgcctattttttattccacaaatacgtccaagatatatactataccacttacattgagtgaatgggaagtattgacttctctttgtgttgcaatccctaccacgctcgatttagtagagacaatgcttaaagaaataattgcgccttattttttggaaactccaagacaaagaatttctgatgttttatcctctaaattcaagttggaacagatgagaaatccgattgaattgttgactttccagttgactaagtttatgattcaagcttgtgaacagtatcccgttctttatgaaaatataggcggcatcatttctacttattttgagcgtgtattaaagatttttactattaaacaatctggtttattatctttagtgggctttattaatgcatttatccagtttcccaactctacagagcttactaaattcacctggaaaaagttagcgaaacttgtgcttcgtggaagttttttgaacgaagttgataagattttgaattcctctgcaacgtttaccaatgattctatcgtccagtattacgatgctggaaatgagctttccagtgcctacttattggaattaatatctcgcttgcaagtttctttgatatctcatcttttaaacacttctcatgtcggcgccaacttgagtgagttcttattgaatcaacaataccaattttacaaatttgatcaagaagtagccgatgaaaacgatgatacgaagtgtattgatgacttttttttcaacgtaagaagcaataaacagttttttacagacatgtgtaaaatttccttacaattttgttctgagtctcatattctcgacttgtctacagacaaccgtgcaagattttcttttgatactagagcccactacttacaaacgttgtgtttaattccgtttatagaagatacagaaagcgagctttttgaaagttttacaaacgttgtttctgaatctattgataaatttttcttatctgatgtcgttacaccatctttgataaaagcaattgtagcttctgcctctttattgaattttttcacggaaaaattgtctttaactttgattcgtatgtttcctttattggtagcgtctccacatatcacgactgaaacagttaatgatgttgcaaaaatattcaccacagggttataccctttaaatgaagatgcaattgtgagtacaatttattccatgaacaacttattagctgtttccgaggacggaagtcccgtcccggtgctccgtgagcgccaattaacaataacatctggaaaaaatattgagaaagactactttcccttgagaaattcttctgccagtttggatggcactggtgctttactcggaaatacaactgtgggccaactttcctcccatgatgtcaatagtggagctactatgacataccatgcctctttgatatctaattgtgtggctgcaacgactacaatcgcctcttactataacacccaaagcataacagctttgactatctctattcttacgcaaaaagttaattctatgtccaaggaattagacggtgttattttgaattctttggcaagattggctccgaatacttctttaacagaattttcccttttattgaagttcttcaaatctagaactgttattgcaacaaaaattgatgatagcgcattattgaaaaatattattaaagcgaaatgtgtgatatccaaagaattgttggccaggcatttttctagtgacttatatttcatgtatcttcatgatttattggactctatcattgccagtggggaagtagaaagattggaacatcacagacctcaaacggagatttcccgtgttgctgatcaaatcgctacctacttagagcccctcgccgctttgttacctgttccaggcgatacgccattggacatcaataaggatgaagtcactacaaacaagtttaggaacgcctggtttaattttgtcatccatgggtaccacttgggcgggcctattgtcaaaagaaatttttctttcttattaactattgcctataattctccaccgttagcttctgaatttcctgctaataacaaggagctttctttggaaatgaatacaattttgcgccgcggttcttctaacgaaaatatcaaacaacaaaaacagcagataaccgaatatttcaataccaatattgttcagtacagaacaacttcttcttctaaaatcatgtttttagcggctgccgttcttttagaaacgataagatgcgaggcaggtgattgttccaagactttattgtacttcagtgacccctccattctttccggttccattgagaagtgtattgcagttttgagtgtttccatgattagaaaatatgctaggttgattcaaaagggtaacgatgccatattcaactccaaaatgattgctcaacaacttaataacttgttactttgcctttctcatagggaaccaactttgcaggatgccgcttttcatgcctgtgaaatatttatcagatctattccatcttctttatgtcatcatttgtctctctacaccttattagatatgttaacagccttatttgatagtatcttggactctgaggcgcataaatttgaaccaagatatgaatttaaattaaaacattctaagacaacaatattggttccaagctcctcctcctggcgcgctacgacattatctagattgcacaagtctgctaaagaatgggtaagaattttattgaatagaagcaaccaggatactaagattttgttgcaatcttacatatctgatctcggtgagtacagcaggttgaattctgttgaatttggtgtcagttttgccatggatatggctggtttgattttacctgcagataaggaattatctaggcttacttattatggtccagagaaacctaacacgatttctggatttatatctttacattcttggaggtccaaatatcttttcgataccgctattacatcttctccagaggatatcaaaaggcaaataggtatttccactcaaaacataagaaaaaatttgaccttaggaaataagattataactaaagacgtaactgattttcttgatatggctaccgcgttgttaattcttggcaatggtgcaccagcgtctttgatatatgatattgtgcacatcccgttcgaagtcttcacctctgcatctttaaagattgctacaaacgtatggttaacaatcataactgagaagcccgaagttgcacatttgcttttagttgaagtatgctattgctggatgcgctccattgatgacaatattggtctctattctcgcgatcatgacttaaagggcgaagaataccaaaaaatggaatattccccttacgacaaagcaggtatcaacagagatgcaaaaaatgcatcccaagctatgcaaccacatcttcatgttattaaattttttgcttcccatttcgagggcacattatttcaaagtgactttttattgaaaattttcacgaaatgtgcgctttatggtatcaagaatttatataaggcttctttacacccgttcgctagaatgattcgccacgaattattgttattcgcgactctcgtattgaacgcaagttataagcagggatccaagtatatgggccgtttgtctcaagaaatcacaaacggtgccttgagttggtttaaaagaccagtagcgtggccattcggcagtaatgagttgaaaatcaaagcagatttatctgttactagggaccttttccttcagctcaacaaattaagctctttgatgtcccgtcattgcgggaaagattacaagatcttgaactatttcttggcaagcgaaatccagcagattcaaacctggcttactccgactgagaagattgaaggagccgacagcaacgagcttacaagcgatatcgttgaagctacctttgctaaagatccaacattagcaataaatctcttacaaagatgttatagcaagaaagctgaggatgttttagtgggcttagttgcaaaacatgctttaatgtgtgtggggtccccaagtgctcttgaccttttcataaaaggaagccacttgagcagtaagaaagacttgcacgcaaccttatactgggcgccagtgagcccgttaaaatctatcaaccttttccttcccgaatggcaaggtaattcttttatcttacaattcagcatatattctttggaatctcaagatgtgaacttggcattcttctatgttcctcaaatcgtacaatgtttgagatacgataaaaccggatatgtcgaaagattgattttggatactgcgaaaattagtgtgttattttctcatcaaataatctggaatatgcttgcaaactgctacaaggatgatgaaggtatacaagaagatgaaatcaaaccaactttagatcgtattagggagcgtatggtttctagtttcagccaatctcatcgcgatttttacgaacgtgaatttgaattcttcgacgaagtaactggcatatctggtaagttgaaaccatacataaaaaaaagtaaggctgaaaagaaacataagatcgatgaagaaatgagcaaaattgaggtgaaacctgatgtttatttaccttctaatcctgacggtgtagttattgatattgatagaaagagtggtaagccacttcaatctcacgcaaaggcgccttttatggcgacctttaaaataaagaaagacgtaaaagatcctttgacaggtaaaaacaaggaagttgaaaaatggcaagctgctatcttcaaagtcggtgatgactgtaggcaagatgttttggcgttacaattgatctctttatttagaaccatttggtctagtattggcttggatgtctacgtttttccctacagagttactgcgacggcaccgggttgtggtgtcatcgatgtgttacccaattctgtatcccgtgatatgttaggacgtgaagctgttaatggattatatgaatatttcactagtaaatttggtaatgaatctactatcgaatttcaaaacgcaagaaacaactttgttaaatccttagcgggatatagcgtaatttcttatttgttgcaattcaaggatagacataatggtaacattatgtacgatgatcaaggacattgtttgcatatcgattttgggtttatttttgatattgtcccaggtggtatcaagtttgaagcagtaccattcaagttgacgaaagaaatggttaaagtgatgggaggttctccccagaccccagcgtatttggactttgaagaactttgtatcaaggcatatttggccgcccgtccgcacgtggaggccataattgagtgtgtaaatcctatgttaggaagcggtctcccctgctttaagggtcacaagacaattaggaatttaagagcaagatttcaacctcaaaaaaccgatcacgaagctgcattatatatgaaggcgttgatccgtaaaagttatgaaagtatattcactaaaggttatgatgaattccaaaggctcacaaatggcattccgtactga

SEQ ID NO: 7789 - DNA, 567 bp, Saccharomyces cerevisiae
atgttgaaattacgccaattacaaaagaaaaagcaaaaagaaaatgaaaacagcagttctattcagcctaatttatcggcagcaagaattcgtttgaaaagggaccttgattcgctggacctcccaccaacagtgactttgaatgtaataacatcaccagatagtgcggatagatcacaatcgccgaaattggaggtaattgttaggcctgatgaaggatattataattatggatctattaatttcaatttggattttaacgaagtttatccgattgaaccaccaaaagttgtatgtttgaagaagatctttcatccaaatatcgatttaaaggggaacgtttgcctaaatattcttcgagaagactggtcgccagctctagatttgcagagtattataaccgggcttcttttcttgttcttggagcctaatcccaatgacccgttaaacaaggatgcagcaaagttactgtgtgagggtgagaaagaatttgctgaagctgtgagattgaccatgtctggaggttcaattgaacatgtcaaatatgataacatagtttctccttga

SEQ ID NO: 7790 - DNA, 567 bp, Artificial Sequence
  Description of Artificial Sequence: Synthetic polynucleotide
atgttgaaattacgccaattacaaaagaaaaagcaaaaagaaaatgaaaacagcagttctattcagcctaatttaagtgcagcaagaattcgtttgaaaagggaccttgattctttggacctcccaccaacagtgactttgaatgtaataacatctccagatagtgcggatagatctcaatctccgaaattggaggtaattgttaggcctgatgaaggatattataattatggatctattaatttcaatttggattttaacgaagtttatccgattgaaccaccaaaagttgtatgtttgaagaagatctttcatccaaatatcgatttaaaggggaacgtttgcttgaatattcttagagaagactggtctccagctttagatttgcagagtattataaccgggcttcttttcttgttcttggagcctaatcccaatgacccgttaaacaaggatgcagcaaagttattatgtgagggtgagaaagaatttgctgaagctgtgagattgaccatgtctggaggttccattgaacatgtcaaatatgataacatagtttctccttga

SEQ ID NO: 7791 - DNA, 906 bp, Saccharomyces cerevisiae
atgaaaattttcaatacaatacaatctgtgctgttcgcagcattttttctaaaacagggaaattgccttgcgtcaaatgggagtaccgcattgatgggggaagtagatatgcaaacgccctttccagagtggttaacagaatttactaatcttacacaatggcctggaattgacccaccttatattccgctagattacataaatcttactgaagtgccagaattagataggtactatcctggccagtgtcccaaaatttctagagagcagtgctcatttgactgctataactgcatcgatgttgatgatgtaacttcgtgtttcaaactttcccaaacatttgacgacggtccggccccggcgacagaggcattgctcaagaaattgagacaaagaaccactttttttgttctggggataaacactgttaattatcctgatatatatgagcatattttagagaggggtcatttgattggtacacacacgtggtcacatgaattcttgccaagtttatcaaacgaagaaattgtagcccaaattgaatggtcaatttgggctatgaatgccacaggcaaacatttccccaagtattttaggcctccatacggtgcaattgataatagggttagagctatagtaaaacagtttggcctaacggttgtcttgtgggatctcgatacttttgattggaaattaatcactaatgatgatttcagaacagaggaagaaatacttatggacataaatacttggaagggaaaacggaaaggtttgatcttagagcacgatggtgcacgaagaacagttgaggttgctattaaaatcaacgaacttattggtagtgaccaattgacaattgcagaatgtattggtgatacagactacatcgaacgctacgactag

SEQ ID NO: 7792 - DNA, 906 bp, Artificial Sequence
  Description of Artificial Sequence: Synthetic polynucleotide
atgaaaattttcaatacaatacaatctgtgcttttcgcagcattttttttgaaacagggaaattgccttgcgtctaatgggagtaccgcattgatgggggaagtagatatgcaaacgccctttccagagtggttaacagaatttactaatcttacacaatggcctggaattgacccaccttatattccgttagattacataaatcttactgaagtgccagaattagataggtactatcctggccagtgtcccaaaatttctagagagcagtgctcttttgactgctataactgcatcgatgttgatgatgtaacttcttgtttcaaactttcccaaacatttgacgacggtccggccccggcgacagaggcattgctcaagaaattgagacaaagaaccactttttttgttttggggataaacactgttaattatcctgatatatatgagcatattttagagaggggtcatttgattggtacacacacgtggtctcatgaattcttgccaagtttatctaacgaagaaattgtagcccaaattgaatggtctatttgggctatgaatgccacaggcaaacatttccccaagtattttaggcctccatacggtgcaattgataatagggttagagctatagtaaaacagtttggcttgacggttgtcttgtgggatctcgatacttttgattggaaattaatcactaatgatgatttcagaacagaggaagaaatacttatggacataaatacttggaagggaaaaagaaaaggtttgatcttagagcacgatggtgcaagaagaacagttgaggttgctattaaaatcaacgaacttattggtagtgaccaattgacaattgcagaatgtattggtgatacagactacatcgaacgctacgactga

SEQ ID NO: 7793 - DNA, 264 bp, Saccharomyces cerevisiae
atgtcactaagaaacatatcaatgatcacaaaaaatttgcaaacaactgccaagtgttatgtcccaaaaagttcacctacatcaacaactattccggttataagggatgctagtactactcaatgtcgcagaataactaccgtcatcaatattacgagtctgaaaggatattctccatctccaagaacagttcatgataagccaattgttatttgcactgacaacgaagaggtagagactgtatcggagcacgtaaaagtataa

SEQ ID NO: 7794 - DNA, 264 bp, Artificial Sequence
  Description of Artificial Sequence: Synthetic polynucleotide
atgtctttgagaaacatatccatgatcacaaaaaatttgcaaacaactgccaagtgttatgtcccaaaaagtagccctacatctacaactattccggttataagggatgctagtactactcaatgtcgcagaataactaccgtcatcaatattacgagtttgaaaggatattctccatctccaagaacagttcatgataagccaattgttatttgcactgacaacgaagaggtagagactgtatctgagcacgtaaaagtatga

SEQ ID NO: 7795 - DNA, 939 bp, Saccharomyces cerevisiae
atgagaatacaactaaatacaattgatttgcaatgtattattgcactttcctgtctggggcaatttgttcacgcggaagctaatagggaagatttaaagcagatagactttcaatttcctgtattggaaagggcagctacaaaaacgccttttccggattggcttagtgcatttaccgggttaaaagaatggcctgggttagatccaccttatatacctttagatttcattgatttcagtcaaattccagattataaggaatatgatcaaaaccattgcgacagtgttccaagggactcgtgctctttcgattgccatcactgcaccgaacacgatgatgtgtacacatgttccaaactttcccagacatttgacgatggtccttctgcttccactactaaattattggaccggttgaagcataattccaccttcttcaatttaggtgtcaatatagttcaacatccagatatctatcaaagaatgcaaaaggagggacacttaatcggctcacatacctggtctcacgtatatttgccaaatgtatcgaatgaaaaaattatagctcaaattgaatggtccatctgggcgatgaatgctactggcaaccatacccccaaatggttcagacctccatatggcggaatagataatagagtaagagcaataacaaggcaatttggcttacaagccgtcttatgggatcacgatacttttgattggagcctccttctcaatgattctgtcataactgaacaagaaattcttcaaaatgtaataaactggaacaagtcaggaaccggattaatattagaacacgattcaacggaaaaaactgtcgatcttgccattaaaataaataagttgataggtgatgatcaatcaacagtttctcattgtgtcggcggaattgattacataaaagaattcttgtcctaa

SEQ ID NO: 7796 - DNA, 939 bp, Artificial Sequence
  Description of Artificial Sequence: Synthetic polynucleotide
atgagaatacaattgaatacaattgatttgcaatgtattattgcactttcctgtttagggcaatttgttcacgcggaagctaatagggaagatttaaagcagatagactttcaatttcctgtattggaaagggcagctacaaaaacgccttttccggattggcttagtgcatttaccgggttaaaagaatggcctgggttagatccaccttatatacctttagatttcattgatttcagtcaaattccagattataaggaatatgatcaaaaccattgcgacagtgttccaagggacagctgctctttcgattgccatcactgcaccgaacacgatgatgtgtacacatgttccaaactttcccagacatttgacgatggtccttctgcttccactactaaattattggacagattgaagcataattccaccttcttcaatttaggtgtcaatatagttcaacatccagatatctatcaaagaatgcaaaaggagggacacttaatcggctctcatacctggtctcacgtatatttgccaaatgtatctaatgaaaaaattatagctcaaattgaatggtccatctgggcgatgaatgctactggcaaccatacccccaaatggttcagacctccatatggcggaatagataatagagtaagagcaataacaaggcaatttggcttacaagccgtcttatgggatcacgatacttttgattggagcctccttctcaatgattctgtcataactgaacaagaaattcttcaaaatgtaataaactggaacaagagtggaaccggattaatattagaacacgattctacggaaaaaactgtcgatcttgccattaaaataaataagttgataggtgatgatcaaagtacagtttctcattgtgtcggcggaattgattacataaaagaattcttgtcctga

SEQ ID NO: 7797 - DNA, 2736 bp, Saccharomyces cerevisiae
atgttcaaacagctgtcacaaattggtaagaatcttaccgatgaattagcgaagggcttagccgatgatatgagccctaccccgtcagaacaacaaatcgaagatgataagagtggcttgccaaaagaaatacaagctaaattaagaaaatttgagaaatatgaacaaaaataccctttgctactctccgcatacaaaaatgaaaaattaaagtcagagaagttagaggctgttgaaaagattttagcggaaaatacacccatatctaatattgacgacgcagtggatacgttgccagcttttttccaggatttaaacaacaaaaataacctattgaatgatgagatcaagagattaactaagcagaactcggaaattccagaaagcgcctctagtgaaactctgaaggataaagaagaggaatttttgaaaaaagagcaaaattataaaaatgacatagacgatctaaaaaaaaaaatggaagctttaaacatagaattggatactgtacaaaaagaaaaaaatgatactgtttcaggtttgagagaaaaaatagttgcactggaaaatatactaaaggaagaaagggaggccaaaaaacagaaagaagaagtatctatatccgaactgaaggaagaattggctataaagaaccattctctcgaggacagtcgaatgaagataaccgaattggagcaaaatttgtcttcgaaaagtactataatggaggaaaagtcctcagagttggcagaactaaatattactttaaaagagaaagagcgcaagctgagtgaattggaaaaaaaaatgaaggagttaccgaaggcgatatctcatcaaaatgtaggaaacaataacagaaggaaaaagaatagaaacaagggaaagaaaaataagggaggcataactacgggtgatatcagtgaagaggaaacggtcgataactcaatcaatactgaagaatatgataagcttaaagaaaatttgcaagaattacaagaaaaatataaagattgtgaagattggaagcaaaagtatgaagatatagaagcagaactaaaagatgctaaagaattggaaaactcacagctcgaaaaatcagcaaaggagctggaaacccttaacaccgagttgatcgataccaagaagtcattgaaagaaaaaaattcggagctagaggaggtgagagatatgctgaggactgtaggcaatgagcttgtggacgcaaaagatgagattaaagagtcttcgagtaaacaaaatgaagaagtgaaaaccgttaagctggagctcgatgatttacgccataaaaatgcaacgatgatcgaggcctacgaagctaaaaatactgagttgagaagtaagatagagttattgagcaagaaagtagagcatctgaagaatttatgtacagaaaaggagaaagagcagactacatcgcagaacaaggtagccaaattaaatgaggagatatctcaacttacctacgaaaaatcaaacataacaaaggagcttacttctttaagaacctcttataaacaaaaggaaaaaactgtgagttacttggaggaacaagttaaacaatttagtgagcaaaaggacgtggctgaaaaatccacagaacagctgagaaaagatcatgctaaaatttctaacagattagacttattaaaaaaggaaaatgagacactgcataatgatatcgcaaagaattctaattcctacgaggagtatttgaaagaaaatggtaaattatcggaaagattgaatattttgcaagaaaaatacaataccttgcaaaatgtaaaaagtaattcgaatgaacacatagattctatcaaaagacaatgtgaggaactaaatgtcaagttgaaggaatctacaaaaaaaattttatctttagaagatgaactaaatgaatatgctaatattgttcaagacaaaaccagagaagctaacacattgagaaggttagtttcggacagtcagacagatgattcgagcaaacaaaaagagttggagaataaattggcctatttaacggatgaaaagaataaattggaagcagaattagacttacaaacatccagaaaggccactgaattacaagagtggaagcatacagtaactgagctgaaatcggaaatacacgctttaaagcttcgtgaagagggactaaaatcagaggttgacgcattgaaacatgttaacaatgacatcaaaaggaagactcaagccacttcagatgattccgatcagttggaacagatcacatctaatttaaaactctcattgtctaaggctgatgaaaagaattttgagctacagtctgccaatgagaaacttctgaatttaaataacgaacttaacaagaaatttgatcgattactaaaaaattatcgttcattgtcctctcaattgaatgctttaaaggaaagacaatacagtgacaagtcaggaagagttagtaggtctggttctatcggtactctagctaacgcgaatattgattcctcaccagcgaataactctaatccaactaaattagagaagatacgatcatcaagttcattggagttagactctgagaaaaatgaaaaaattgcatatataaaaaatgttttgttgggatttttggagcacaaggaacaacggaaccaattacttcctgtaatttctatgttgttacaactggacagtactgatgaaaaaagactggttatgtctctgaagtaa

SEQ ID NO: 7798 - DNA, 2736 bp, Artificial Sequence
  Description of Artificial Sequence: Synthetic polynucleotide
atgttcaaacagttatctcaaattggtaagaatcttaccgatgaattagcgaagggcttagccgatgatatgagccctaccccgagtgaacaacaaatcgaagatgataagagtggcttgccaaaagaaatacaagctaaattaagaaaatttgagaaatatgaacaaaaataccctttgttgctctccgcatacaaaaatgaaaaattaaagagtgagaagttagaggctgttgaaaagattttagcggaaaatacacccatatctaatattgacgacgcagtggatacgttgccagcttttttccaggatttaaacaacaaaaataaccttttgaatgatgagatcaagagattaactaagcagaactctgaaattccagaaagcgcctctagtgaaactttgaaggataaagaagaggaatttttgaaaaaagagcaaaattataaaaatgacatagacgatttgaaaaaaaaaatggaagctttaaacatagaattggatactgtacaaaaagaaaaaaatgatactgtttctggtttgagagaaaaaatagttgcattggaaaatatattgaaggaagaaagggaggccaaaaaacagaaagaagaagtatctatatccgaattgaaggaagaattggctataaagaaccattctctcgaggacagtagaatgaagataaccgaattggagcaaaatttgtcttctaaaagtactataatggaggaaaagtcctctgagttggcagaattgaatattactttaaaagagaaagagcgcaagttgagtgaattggaaaaaaaaatgaaggagttaccgaaggcgatatctcatcaaaatgtaggaaacaataacagaaggaaaaagaatagaaacaagggaaagaaaaataagggaggcataactacgggtgatatcagtgaagaggaaacggtcgataactctatcaatactgaagaatatgataagcttaaagaaaatttgcaagaattacaagaaaaatataaagattgtgaagattggaagcaaaagtatgaagatatagaagcagaattgaaagatgctaaagaattggaaaactctcagctcgaaaaatctgcaaaggagttagaaacccttaacaccgagttgatcgataccaagaagtctttgaaagaaaaaaattctgagttagaggaggtgagagatatgttaaggactgtaggcaatgagcttgtggacgcaaaagatgagattaaagagtcttccagtaaacaaaatgaagaagtgaaaaccgttaagttggagctcgatgatttacgccataaaaatgcaacgatgatcgaggcctacgaagctaaaaatactgagttgagaagtaagatagagttattgagcaagaaagtagagcatttgaagaatttatgtacagaaaaggagaaagagcagactacatctcagaacaaggtagccaaattaaatgaggagatatctcaacttacctacgaaaaaagtaacataacaaaggagcttacttctttaagaacctcttataaacaaaaggaaaaaactgtgagttacttggaggaacaagttaaacaatttagtgagcaaaaggacgtggctgaaaaatccacagaacagttaagaaaagatcatgctaaaatttctaacagattagacttattaaaaaaggaaaatgagacattgcataatgatatcgcaaagaattctaattcctacgaggagtatttgaaagaaaatggtaaattatctgaaagattgaatattttgcaagaaaaatacaataccttgcaaaatgtaaaaagtaatagtaatgaacacatagattctatcaaaagacaatgtgaggaattgaatgtcaagttgaaggaatctacaaaaaaaattttatctttagaagatgaattgaatgaatatgctaatattgttcaagacaaaaccagagaagctaacacattgagaaggttagtttctgacagtcagacagatgattctagcaaacaaaaagagttggagaataaattggcctatttaacggatgaaaagaataaattggaagcagaattagacttacaaacatccagaaaggccactgaattacaagagtggaagcatacagtaactgagttgaaaagtgaaatacacgctttaaagcttcgtgaagagggattgaaaagtgaggttgacgcattgaaacatgttaacaatgacatcaaaaggaagactcaagccacttctgatgattccgatcagttggaacagatcacatctaatttaaaactctctttgtctaaggctgatgaaaagaattttgagttacagtctgccaatgagaaacttttgaatttaaataacgaacttaacaagaaatttgatagattattgaaaaattatcgttctttgtcctctcaattgaatgctttaaaggaaagacaatacagtgacaagagtggaagagttagtaggtctggttctatcggtactttggctaacgcgaatattgattcctctccagcgaataactctaatccaactaaattagagaagataagaagtagtagttctttggagttagactctgagaaaaatgaaaaaattgcatatataaaaaatgttttgttgggatttttggagcacaaggaacaaagaaaccaattacttcctgtaatttctatgttgttacaattggacagtactgatgaaaaaagattggttatgtctttgaagtga

SEQ ID NO: 7799 - DNA, 4770 bp, Saccharomyces cerevisiae
atgtccgatactaacacgtctattcccaatacaagttctgcaagggaggcaggcaatgcttcacaaactccatcgatcagctcttcatctaacacttccactaccactaacacagaatcatcctcagcttctctttcttcttccccctcgacaagtgagttgaccagcattcgtccaattggaatagtagtcgctgcttatgactttaattatcccattaaaaaagacagttcttcgcaacttttgtctgtacaacaaggggaaaccatttatatacttaacaaaaactcatctgggtggtgggatggattagttattgacgacagtaatgggaaagttaacagaggctggtttcctcaaaacttcggtagacctttaagagacagtcatctcagaaagcacagtcatccgatgaaaaaatatagttccagtaagagctcaaggcgcagcagcttaaatagcttgggcaatagtgcatatttacatgtgcctagaaatccgagcaagagcaggagggggagttctactttatcagcgtctttatcaaatgcccacaatgcagaaacaagttccggccacaataacaccgtatcgatgaataattctcccttttcagcgccaaacgatgcttcccacataacccctcaatcttcgaactttaattccaatgctagtctatcccaggatatgacaaagagtgcagatggctcatctgagatgaatacaaacgcaattatgaataacaatgaaacaaatttacaaacttctggtgagaaagcaggtcccccactagtagcagaagaaacaattaagatattaccgttggaagagatagaaatgattattaatggtatacgttcgaacattgcttcgacttggtcccccataccactgataacgaaaacatccgattacaagttggtatactataacaaagaccttgatatatactgttcagaattacccttgatttctaactcaattatggaatccgatgacatttgtgacagcgaaccaaaattcccgcccaatgatcatcttgttaacctatatactagagatctgaggaaaaatgcgaatattgaggacagttctacgagatcgaagcaatcggaaagtgaacaaaatagatcaagccttctaatggaaaaacaggattcaaaagaaactgatggaaataataacagtattaatgatgatgataataataacgaaaataacaaaaacgaattcaatgaggctggtccttcatcattaaattctttatctgctccagatttaacgcagaatattcaatcaagggtagttgccccaagtcgctcttctatactggccaagagtgacatcttttatcactattcaagagatataaaattgtggacagaattacaagacctaacagtttattatactaaaacggctcacaagatgttccttaaagagaatcgtctcaatttcacgaaatactttgatttgatatcagattcaatagtcttcacacagttaggctgcaggctaatgcaacatgaaattaaagccaaaagttgcagcaaggagattaagaagattttcaaaggtctaatctcttcattgtcaaggataagtatcaattctcatttatatttcgattcagcttttcacagaaaaaaaatggatactatgaatgacaaggataacgataatcaggaaaataattgttctaggacggaaggggatgatggtaaaattgaagtagatagtgtacatgatctagtttcagttccattgtccggtaaacgtaatgtaagtaccagtacaacggatacattgactccaatgagatcatcattcagtacagtcaatgagaacgatatggaaaatttctcagtcttaggtccaagaaatagtgttaattctgtcgtaacaccaaggacttcaatacaaaattctactttggaagatttttcaccgtccaacaaaaattttaagtcagctaaatcgatttacgaaatggttgatgtggaattctcgaaatttttaaggcatgttcagttactttattttgtgttacagagctcagtcttctcagatgataatactttaccacagttgctcccaagattttttaaaggttcatttagcggtggttcttggacaaatccattttcgacttttattacggatgaatttggtaatgcgacaaagaacaaagctgtcacatctaatgaagtgaccgcttcgtcgtccaaaaattcctcaatatcaaggattccaccaaagatggcagatgctattgcctctgcgtcaggatatagcgctaattcagaaacaaattcccaaattgatttaaaagcaagcagtgccgcgtctggttcagtttttacacctttcaaccgtccttctcataacagaaccttttcaagagcaagagtttcaaaaaggaagaaaaaatatccattaactgtagacactttgaatacaatgaagaagaaatcctcgcaaatttttgaaaaattaaataatgctacaggtgaacacttaaaaattataagtaaacccaaaagcagaattaggaatttggaaataaattcaagcacatacgaacaaataaatcagaatgttttactattggagatactggagaatttagatctgtcaattttcatcaatttgaaaaacctgattaagacacccagtattttgttggatttggaaagcgaggaatttttagttcacgccatgtcttcggtctcctcagtactaacagagttttttgatataaagcaggcttttcatgacatcgtcatcagattaataatgacaacgcaacaaacgaccttagacgacccgtatttgttttcctcaatgaggtccaatttccctgtcggacatcatgaacctttcaagaatatctctaatacacctttggtcaagggccccttccataaaaaaaatgaacaattggcactctccttatttcacgtattggtgagtcaagatgtggagttcaataaccttgaatttttaaacaactccgacgattttaaagatgcttgtgaaaagtatgtcgagatttctaatcttgcgtgtattattgttgatcaattgattgaagaaagagaaaatttgctgaactacgcagcaagaatgatgaagaataatttgactgcagaactattgaaaggtgagcaagaaaaatggtttgatatttattccgaggactatagtgatgacgattcagaaaatgatgaagctatcatcgatgacgaattaggatctgaggactatattgaacgcaaagctgcgaacatagagaaaaaccttccatggtttttaacttcagattatgaaactagtcttgtctatgactcaagaggaaaaattcgtggcgggacaaaagaggcactgattgaacatttaaccagtcatgaacttgttgatgcggctttcaatgttacaatgttaataactttcagaagtatattaaccacaagagagtttttttatgccctgatttacaggtacaacttgtatcctcctgaagggctgagttacgatgattacaatatttggatagaaaaaaagtcaaacccgattaaatgccgtgtggtcaacattatgagaacatttttgacgcagtattggacaagaaattattatgaacctggcataccactgattctaaattttgccaagatggttgtatcggagaaaataccgggggcagaggatcttttgcaaaagataaatgaaaaactgataaatgagaatgagaaagaaccagtggatcctaagcaacaagattcggtatcggcagtcgtacagacaactaaacgtgacaataaatcaccgatacacatgtcttcgtcttctttaccatcttctgcttcttcagcgttttttagattgaagaaattgaagctcttggatattgacccatacacatatgccacacaattgactgtacttgaacatgacttatacctcaggatcactatgtttgaatgcttggatagggcatggggtaccaagtattgtaatatgggtggttctccgaacattacgaaatttatagctaatgctaatacgctaactaattttgtttctcataccattgtaaaacaggcagatgtcaagacacgttcaaaattaacgcaatattttgttaccgttgcccagcattgtaaagagttgaataatttttcttcaatgactgccatagtgtccgctttgtattcctccccaatctaccgactgaaaaagacatgggatttagtttccactgagtcgaaggaccttctgaagaacctaaacaaccttatggattccaagagaaattttgtgaagtatagagagctgttgcgatccgtgacggacgttgcatgtgttcccttttttggtgtatacctatctgatttaacatttacgtttgtcggaaacccagattttcttcacaattcaaccaacataataaacttcagcaagaggactaaaatcgcaaatatagtggaggaaattataagctttaaaagattccattacaagctgaaacgattggatgatattcagaccgttatagaagcgtctttggaaaatgtcccccacattgaaaagcagtatcaattatcactgcaagtggaaccgagatcaggaaacaccaaaggcagtacgcatgcttcttctgctagcggtacaaaaactgcaaaattcctaagtgaatttacagatgataaaaatggcaattttttgaagctaggtaagaaaaaacctccttctaggttatttcgataa

SEQ ID NO: 7800 - DNA, 4770 bp, Artificial Sequence
  Description of Artificial Sequence: Synthetic polynucleotide
atgtccgatactaacacgtctattcccaatacaagttctgcaagggaggcaggcaatgcttctcaaactccatccatcagctcttcttctaacacttccactaccactaacacagaatcttcctctgcttctctttcttcttccccctccacaagtgagttgaccagcattcgtccaattggaatagtagtcgctgcttatgactttaattatcccattaaaaaagacagttcttctcaacttttgtctgtacaacaaggggaaaccatttatatacttaacaaaaactcttctgggtggtgggatggattagttattgacgacagtaatgggaaagttaacagaggctggtttcctcaaaacttcggtagacctttaagagacagtcatctcagaaagcacagtcatccgatgaaaaaatatagttccagtaagagcagtaggcgcagcagcttaaatagcttgggcaatagtgcatatttacatgtgcctagaaatccgagcaagagcaggagggggagttctactttatctgcgtctttatccaatgcccacaatgcagaaacaagttccggccacaataacaccgtatctatgaataattctcccttttctgcgccaaacgatgcttcccacataacccctcaatcttccaactttaattccaatgctagtttatcccaggatatgacaaagagtgcagatggctcttctgagatgaatacaaacgcaattatgaataacaatgaaacaaatttacaaacttctggtgagaaagcaggtcccccattagtagcagaagaaacaattaagatattaccgttggaagagatagaaatgattattaatggtatacgttctaacattgcttccacttggtcccccataccattgataacgaaaacatccgattacaagttggtatactataacaaagaccttgatatatactgttctgaattacccttgatttctaactctattatggaatccgatgacatttgtgacagcgaaccaaaattcccgcccaatgatcatcttgttaacttatatactagagatttaaggaaaaatgcgaatattgaggacagttctacgagatccaagcaaagtgaaagtgaacaaaatagaagcagccttttgatggaaaaacaggattctaaagaaactgatggaaataataacagtattaatgatgatgataataataacgaaaataacaaaaacgaattcaatgaggctggtccttcttctttaaattctttatctgctccagatttaacgcagaatattcaatccagggtagttgccccaagtcgctcttctatattggccaagagtgacatcttttatcactattctagagatataaaattgtggacagaattacaagacttgacagtttattatactaaaacggctcacaagatgttccttaaagagaatcgtctcaatttcacgaaatactttgatttgatatctgattctatagtcttcacacagttaggctgcaggttgatgcaacatgaaattaaagccaaaagttgcagcaaggagattaagaagattttcaaaggtttgatctcttctttgagtaggataagtatcaattctcatttatatttcgattctgcttttcacagaaaaaaaatggatactatgaatgacaaggataacgataatcaggaaaataattgttctaggacggaaggggatgatggtaaaattgaagtagatagtgtacatgatttggtttctgttccattgtccggtaaacgtaatgtaagtaccagtacaacggatacattgactccaatgagaagttctttcagtacagtcaatgagaacgatatggaaaatttctctgtcttaggtccaagaaatagtgttaattctgtcgtaacaccaaggacttccatacaaaattctactttggaagatttttctccgtccaacaaaaattttaagtctgctaaatccatttacgaaatggttgatgtggaattctccaaatttttaaggcatgttcagttactttattttgtgttacagagctctgtcttcagtgatgataatactttaccacagttgctcccaagattttttaaaggttcttttagcggtggttcttggacaaatccattttccacttttattacggatgaatttggtaatgcgacaaagaacaaagctgtcacatctaatgaagtgaccgcttcttcttccaaaaattcctccatatctaggattccaccaaagatggcagatgctattgcctctgcgtctggatatagcgctaattctgaaacaaattcccaaattgatttaaaagcaagcagtgccgcgtctggttctgtttttacacctttcaaccgtccttctcataacagaaccttttccagagcaagagtttccaaaaggaagaaaaaatatccattaactgtagacactttgaatacaatgaagaagaaatcctctcaaatttttgaaaaattaaataatgctacaggtgaacacttaaaaattataagtaaacccaaaagcagaattaggaatttggaaataaatagtagcacatacgaacaaataaatcagaatgttttattattggagatattggagaatttagatttatccattttcatcaatttgaaaaacttgattaagacacccagtattttgttggatttggaaagcgaggaatttttagttcacgccatgtcttctgtctcctctgtattaacagagttttttgatataaagcaggcttttcatgacatcgtcatcagattaataatgacaacgcaacaaacgaccttagacgacccgtatttgttttcctctatgaggtccaatttccctgtcggacatcatgaacctttcaagaatatctctaatacacctttggtcaagggccccttccataaaaaaaatgaacaattggcactctccttatttcacgtattggtgagtcaagatgtggagttcaataaccttgaatttttaaacaactccgacgattttaaagatgcttgtgaaaagtatgtcgagatttctaatcttgcgtgtattattgttgatcaattgattgaagaaagagaaaatttgttgaactacgcagcaagaatgatgaagaataatttgactgcagaattattgaaaggtgagcaagaaaaatggtttgatatttattccgaggactatagtgatgacgattctgaaaatgatgaagctatcatcgatgacgaattaggatctgaggactatattgaacgcaaagctgcgaacatagagaaaaaccttccatggtttttaacttctgattatgaaactagtcttgtctatgacagtagaggaaaaattcgtggcgggacaaaagaggcattgattgaacatttaaccagtcatgaacttgttgatgcggctttcaatgttacaatgttaataactttcagaagtatattaaccacaagagagtttttttatgccttaatttacaggtacaacttgtatcctcctgaagggttgagttacgatgattacaatatttggatagaaaaaaagtctaacccgattaaatgccgtgtggtcaacattatgagaacatttttgacgcagtattggacaagaaattattatgaacctggcataccattgattttgaattttgccaagatggttgtatctgagaaaataccgggggcagaggatcttttgcaaaagataaatgaaaaattgataaatgagaatgagaaagaaccagtggatcctaagcaacaagattctgtatctgcagtcgtacagacaactaaacgtgacaataaatctccgatacacatgtcttcttcttctttaccatcttctgcttcttctgcgttttttagattgaagaaattgaagctcttggatattgacccatacacatatgccacacaattgactgtacttgaacatgacttatacctcaggatcactatgtttgaatgcttggatagggcatggggtaccaagtattgtaatatgggtggttctccgaacattacgaaatttatagctaatgctaatacgttgactaattttgtttctcataccattgtaaaacaggcagatgtcaagacacgttctaaattaacgcaatattttgttaccgttgcccagcattgtaaagagttgaataatttttcttctatgactgccatagtgtccgctttgtattcctccccaatctacagattgaaaaagacatgggatttagtttccactgagtctaaggaccttttgaagaacttgaacaaccttatggattccaagagaaattttgtgaagtatagagagttattgcgttccgtgacggacgttgcatgtgttcccttttttggtgtatacttgtctgatttaacatttacgtttgtcggaaacccagattttcttcacaattctaccaacataataaacttcagcaagaggactaaaatcgcaaatatagtggaggaaattataagctttaaaagattccattacaagttgaaaagattggatgatattcagaccgttatagaagcgtctttggaaaatgtcccccacattgaaaagcagtatcaattatctttacaagtggaaccgagatctggaaacaccaaaggcagtacgcatgcttcttctgctagcggtacaaaaactgcaaaattcttaagtgaatttacagatgataaaaatggcaattttttgaagttgggtaagaaaaaacctccttctaggttatttcgctga

SEQ ID NO: 7801 - DNA, 1197 bp, Saccharomyces cerevisiae
atgtcagaagaagacgatcattggaatttagttagattacgtagattacgtaaagggagagaaggggaagaacagtcatcgaagtcagaaatatctttggatagtttgcatgaaagctcctttgcaggagaggacgacgaggacttcgatgcagatgtcctatcgaacactagcagtgaagagtctgcacagatgaatcgtatttacgattttagaacatctaatgaatttagtaatgctggagttaatattgatcaaactggagttcccactatttcagagtcatttgatactttgtccggctcaaatgttggcggaacggtattgccaagtatggaggggtcgaaactgaaggatagtacgataaggaattctagcacactatcggatcatatcatagataaaagtgagggtaaatctgctaaattgaagatgtggcatgttatcatgctatcttcattgctttccatgaccttttcatacctcgccctcgaatattccctgactggtgatgtgttggcaggttttaaatcacaacagtcattacgtaataatgaaaggaagctgttgtacggcaatatcgattttgttgataaaaaatcttacgattcatcaagtgactctttaagtcagtgggctccttcaggaaaatactacgtcgacttcgacaatcatattgcatacccattaaaggatgatgacctaatgggctggagacgatacaaaacagacttagttattttatggtatacaacaaaagctcgaatgaaagacggttggcacaagagaattaacaaaataaacggaggaagaataaagttacacctatttctcaagaattcttttaaatccgctcaagaaagtttaagggtattgcataaagaacagaaacgccgctggaaaaggctctttgtgctacttcataataaatacaggcaattttctccacatattaaaaggtatttcgatcattcttgccaaaaagcaaaacaatgttggtcgggatccagattgcagttgcgcaagcttcgtttcaagtcaatgaaaccattccgagtttttcagtttaaggttcgcaaagataccaactggtttgtaaagcagctgaaacggttcggattgaaattacagcattcgaggatgtataaagcgatgtcagaatgcaggaaaaaaaattattttaagtgcaaacactag

SEQ ID NO: 7802 - DNA, 1197 bp, Artificial Sequence
  Description of Artificial Sequence: Synthetic polynucleotide
atgtctgaagaagacgatcattggaatttagttagattacgtagattacgtaaagggagagaaggggaagaacagtcttccaagtctgaaatatctttggatagtttgcatgaaagctcctttgcaggagaggacgacgaggacttcgatgcagatgtcctttccaacactagcagtgaagagtctgcacagatgaatcgtatttacgattttagaacatctaatgaatttagtaatgctggagttaatattgatcaaactggagttcccactatttctgagtcttttgatactttgtccggcagtaatgttggcggaacggtattgccaagtatggaggggtctaaattgaaggatagtacgataaggaattctagcacattaagtgatcatatcatagataaaagtgagggtaaatctgctaaattgaagatgtggcatgttatcatgctttcttctttgctttccatgaccttttcttacctcgccctcgaatattccttgactggtgatgtgttggcaggttttaaatctcaacagtctttacgtaataatgaaaggaagttgttgtacggcaatatcgattttgttgataaaaaatcttacgattcttccagtgactctttaagtcagtgggctccttctggaaaatactacgtcgacttcgacaatcatattgcatacccattaaaggatgatgacttgatgggctggagaagatacaaaacagacttagttattttatggtatacaacaaaagctagaatgaaagacggttggcacaagagaattaacaaaataaacggaggaagaataaagttacacctttttctcaagaattcttttaaatccgctcaagaaagtttaagggtattgcataaagaacagaaacgccgctggaaaaggctctttgtgttgcttcataataaatacaggcaattttctccacatattaaaaggtatttcgatcattcttgccaaaaagcaaaacaatgttggtctggatccagattgcagttgcgcaagcttcgtttcaagtctatgaaaccattcagagtttttcagtttaaggttcgcaaagataccaactggtttgtaaagcagttgaaaagattcggattgaaattacagcattccaggatgtataaagcgatgtctgaatgcaggaaaaaaaattattttaagtgcaaacactga

SEQ ID NO: 7803 - DNA, 762 bp, Saccharomyces cerevisiae
atggaaaatagcatgatgtttatatcgcgttccttgcggagacccgttactgctttgaactgcaatttacaaagcgttagaacagtcatataccttcataagggtccgagaattaatggtttgagacgagatccagagtcgtacttgagaaatcctagcggggtactctttactgaagttaacgcaaaagagtgtcaagacaaagttagatccatactacaattgcccaagtacggaataaatttatcaaacgaactgattttgcagtgtttaacacataagtcgttcgcacacgggtcaaagccatacaacgaaaaactgaatctgctaggagcacagtttttgaaactacagacgtgcattcattcgttaaagaatggttcgccggccgagagttgcgagaacgggcaactttctttgcagttcagcaatctgggaacaaaattcgctaaggaattaacgtccaaaaacacagcatgcacattcgttaaattacataatctagaccctttcatattttggaagatgagagacccaataaaagatggccacataaatggtgaaaccacgatttttgctagtgtcttgaacgcatttattggtgcaattctgtcaacgaatggatctgaaaaagcagctaaatttatccaaggaagtttgctggataaagaagatcttcattccttggttaacattgctaatgaaaatgtagcatctgcaaaggcaaaaatatccgacaaggaaaataaagcatttctgtga

SEQ ID NO: 7804 - DNA, 762 bp, Artificial Sequence
  Description of Artificial Sequence: Synthetic polynucleotide
atggaaaatagcatgatgtttatatctcgttccttgagaagacccgttactgctttgaactgcaatttacaaagcgttagaacagtcatataccttcataagggtccgagaattaatggtttgagaagagatccagagagttacttgagaaatcctagcggggtactctttactgaagttaacgcaaaagagtgtcaagacaaagttagatccatattgcaattgcccaagtacggaataaatttatctaacgaattgattttgcagtgtttaacacataagagtttcgcacacgggtccaagccatacaacgaaaaattgaatttattaggagcacagtttttgaaattacagacgtgcattcattctttaaagaatggttctccggccgagagttgcgagaacgggcaactttctttgcagttcagcaatttaggaacaaaattcgctaaggaattaacgtccaaaaacacagcatgcacattcgttaaattacataatttggaccctttcatattttggaagatgagagacccaataaaagatggccacataaatggtgaaaccacgatttttgctagtgtcttgaacgcatttattggtgcaattttatctacgaatggatctgaaaaagcagctaaatttatccaaggaagtttgttggataaagaagatcttcattccttggttaacattgctaatgaaaatgtagcatctgcaaaggcaaaaatatccgacaaggaaaataaagcatttctctga

SEQ ID NO: 7805 - DNA, 1593 bp, Saccharomyces cerevisiae
atgattagctcagaattaacgaatgatcaaatcatagaccttatatcggattataagaatttcaaaagaattatagaggcctctgtaccagaagatgatagaagaaggaaccaaaaccgccaaaatagaaataaagacctgacaaaattgtcgaatgtacaattttggcaactgacgactgatgtcaacgatgaattgatgaaaagattgacagattcgggtgcggatgcatcactaaatgatcttgatctgaaaagaggtaaagcacaatctaaactgtctcgattgaaggacgcgaagttccataaattgattcttgatattttcacggaaattgaaaggagaaacttacatcatttggatatggggacgcataacaatgggttagacgagggtgatctaaatttctatttaaatgacacattatttgaatccttcaaaataaacgatgattttatgagcgtgaatggtattatatccattgaagtcttccgagaattaaaaactcaatttacactttattttcaaaacacgctccatcgaattgatcctgtggataccaccaccacacgcctgccgattctgcttgagactataattaagatagcaaagttgataggcgatctcttacctgtcctatcatcagtttcactgcaaagttctttagaaaacgaaatagtatacttaaagagtgctttatctcatgctatcacttcaacaagatattttctcacatatggggacctaataccacgaattgtagctcaatcatctatttcggaagtgatttttgcgttctgcaatattgctcagattgtgaagatcaaatccacctcacgtgatgatatatcacgcaatgaaggagaactcagtgatatcgaggcaggtatgaaaccgttgaagattattgaaaaagtgaaaaatgagaaaaacggtaaggatatatcatctctgggtgatagcggtagtactgctgttagttttccatcctctggtaagcccattacaaaaaaatcggacatgccagtggttgtagcatcgccatcaatttccatcatagaaaaatctgaatcttctattcgagagagtgggaaggtacgaaataatacatctggagaaacaaacttagcgtctgtgtcgccgttaaaaaacactaagaattcttcaagaattacgagtgagccatctccgcgagaaggtttgcctctgaaagttgtctcgaactcgagaagtccaagtcctcaaggtaacacattgccgctaattggtaaatttcggcaggattatcaggcatcacctccgaagaaagttatcactaaaccagtggcagaaacggcgaagccgtatgcaaatattccgccagctgcagacgtactttactcgccaaccgtgaccaaaatgaggaaattcagagagaaagtgcagaaatttgctcccaactctggtcttggattaagaatatctacttcagaagaaaacttgaataattctgatgtcaactcaaccacgcacaacgctaacataaataacctcgtcgaatttgttgagagtaaatcaatggttgttcttcctatggcaggcagggcattttga

SEQ ID NO: 7806 - DNA, 1593 bp, Artificial Sequence
  Description of Artificial Sequence: Synthetic polynucleotide
atgattagctctgaattaacgaatgatcaaatcatagaccttatatctgattataagaatttcaaaagaattatagaggcctctgtaccagaagatgatagaagaaggaaccaaaaccgccaaaatagaaataaagacttgacaaaattgagcaatgtacaattttggcaattaacgactgatgtcaacgatgaattgatgaaaagattgacagattctggtgcggatgcatctttgaatgatcttgatttgaaaagaggtaaagcacaatctaaattatctagattgaaggacgcgaagttccataaattgattcttgatattttcacggaaattgaaaggagaaacttacatcatttggatatggggacgcataacaatgggttagacgagggtgatttgaatttctatttaaatgacacattatttgaatccttcaaaataaacgatgattttatgagcgtgaatggtattatatccattgaagtcttcagagaattaaaaactcaatttacactttattttcaaaacacgctccatagaattgatcctgtggataccaccaccacacgcttaccgattttacttgagactataattaagatagcaaagttgataggcgatctcttacctgtcctttcttctgtttctttacaaagttctttagaaaacgaaatagtatacttaaagagtgctttatctcatgctatcacttctacaagatattttctcacatatggggacttgataccaagaattgtagctcaatcttctatttctgaagtgatttttgcgttctgcaatattgctcagattgtgaagatcaaatccacctctcgtgatgatatatctcgcaatgaaggagaactcagtgatatcgaggcaggtatgaaaccgttgaagattattgaaaaagtgaaaaatgagaaaaacggtaaggatatatcttctttgggtgatagcggtagtactgctgttagttttccatcctctggtaagcccattacaaaaaaaagtgacatgccagtggttgtagcatctccatctatttccatcatagaaaaatctgaatcttctattagagagagtgggaaggtaagaaataatacatctggagaaacaaacttagcgtctgtgtctccgttaaaaaacactaagaattcttctagaattacgagtgagccatctccgagagaaggtttgcctttgaaagttgtctccaactctagaagtccaagtcctcaaggtaacacattgccgttgattggtaaatttagacaggattatcaggcatctcctccgaagaaagttatcactaaaccagtggcagaaacggcgaagccgtatgcaaatattccgccagctgcagacgtactttactctccaaccgtgaccaaaatgaggaaattcagagagaaagtgcagaaatttgctcccaactctggtcttggattaagaatatctacttctgaagaaaacttgaataattctgatgtcaactctaccacgcacaacgctaacataaataacctcgtcgaatttgttgagagtaaatctatggttgttcttcctatggcaggcagggcattttga

SEQ ID NO: 7807 - DNA, 1563 bp, Saccharomyces cerevisiae
atgagtttaaaggaggaacaagtgtccattaagcaggacccggaacaagaagagcgtcagcatgatcaattcaatgatgttcagatcaaacaagagtcgcaggatcatgatggagtggactcgcagtacacgaacggtacgcaaaatgacgacagcgagagatttgaggcagctgaatccgatgtaaaggtggaacccggcctcggtatgggcatcacctcctctcagagcgaaaagggtcaagttctgcctgaccaaccggagattaagttcattcgtcgtcaaatcaatggttatgtagggtttgctaatttgcccaagcaatggcacagaaggtccataaagaacggattcagtttcaatctcctatgtgtcggccctgatggtattggtaagacaactttaatgaaaactttatttaataatgatgatattgaggccaatttagtgaaagattacgaggaggaacttgcaaatgatcaggaagaagaggagggtcagggcgagggtcacgagaaccaatcacaagaacaaaggcacaaggtcaaaattaagtcatatgagtcggttattgaagaaaatggtgttaaactgaatttgaacgtgatcgatactgaaggatttggtgattttttaaataatgatcaaaaatcatgggacccgatcattaaggagattgactctcgttttgatcaatacttggatgcggagaacaaaatcaacagacattcaataaacgataaaagaatccatgcatgtctttatttcattgaacctacaggacattacttaaagcccctggacctgaagtttatgcaatctgtatatgaaaaatgtaacttgattcctgtcattgctaaatctgacatcttaactgatgaagagatcttaagtttcaagaagaccattatgaaccagttaatccaatctaatatcgagctgttcaagcctccaatttattccaacgatgatgcagaaaatagccatttatccgaaagactatttagtagtttaccttatgctgttattggttccaacgatattgtagagaactacagtggtaatcaagtgagaggccgttcctatccatggggggtgatcgaagtggacaatgacaaccactctgatttcaaccttttgaaaaatttattgatcaagcaattcatggaggaattaaaggaaaggacaagcaagatactatacgaaaactacaggtcttctaaattggcaaaacttggtattaagcaagataattcagttttcaaagagttcgatccaatatctaaacaacaagaagaaaaaactttacatgaggcaaaactagccaaactagaaattgaaatgaaaacagttttccaacaaaaagtttccgaaaaggagaaaaaactacaaaaatcagaaactgaattgtttgctagacataaagaaatgaaggaaaaattaactaaacaattaaaagctttggaggacaagaaaaaacagctagaactttcaataaatagtgcttctcccaatgttaaccactcccccgtccctacaaagaagaagggatttttacgttag

SEQ ID NO: 7808 - DNA, 1563 bp, Artificial Sequence
  Description of Artificial Sequence: Synthetic polynucleotide
atgagtttaaaggaggaacaagtgtccattaagcaggacccggaacaagaagagcgtcagcatgatcaattcaatgatgttcagatcaaacaagagagccaggatcatgatggagtggactctcagtacacgaacggtacgcaaaatgacgacagcgagagatttgaggcagctgaatccgatgtaaaggtggaacccggcctcggtatgggcatcacctcctctcagagcgaaaagggtcaagttttacctgaccaaccggagattaagttcattcgtcgtcaaatcaatggttatgtagggtttgctaatttgcccaagcaatggcacagaaggtccataaagaacggattcagtttcaatctcttatgtgtcggccctgatggtattggtaagacaactttaatgaaaactttatttaataatgatgatattgaggccaatttagtgaaagattacgaggaggaacttgcaaatgatcaggaagaagaggagggtcagggcgagggtcacgagaaccaatctcaagaacaaaggcacaaggtcaaaattaagagttatgagtctgttattgaagaaaatggtgttaaattgaatttgaacgtgatcgatactgaaggatttggtgattttttaaataatgatcaaaaaagttgggacccgatcattaaggagattgactctcgttttgatcaatacttggatgcggagaacaaaatcaacagacattccataaacgataaaagaatccatgcatgtctttatttcattgaacctacaggacattacttaaagcccttagacttgaagtttatgcaatctgtatatgaaaaatgtaacttgattcctgtcattgctaaatctgacatcttaactgatgaagagatcttaagtttcaagaagaccattatgaaccagttaatccaatctaatatcgagcttttcaagcctccaatttattccaacgatgatgcagaaaatagccatttatccgaaagattatttagtagtttaccttatgctgttattggttccaacgatattgtagagaactacagtggtaatcaagtgagaggccgttcctatccatggggggtgatcgaagtggacaatgacaaccactctgatttcaaccttttgaaaaatttattgatcaagcaattcatggaggaattaaaggaaaggacaagcaagatattatacgaaaactacaggtcttctaaattggcaaaacttggtattaagcaagataattctgttttcaaagagttcgatccaatatctaaacaacaagaagaaaaaactttacatgaggcaaaattggccaaattagaaattgaaatgaaaacagttttccaacaaaaagtttccgaaaaggagaaaaaattacaaaaaagtgaaactgaattgtttgctagacataaagaaatgaaggaaaaattaactaaacaattaaaagctttggaggacaagaaaaaacagttagaactttccataaatagtgcttctcccaatgttaaccactcccccgtccctacaaagaagaagggatttttacgttga

SEQ ID NO: 7809 - DNA, 462 bp, Saccharomyces cerevisiae
atgaactctgaacagctgctgcataactatgtttcggattcgctactcactactctgataagttttcaagagttcaagcagcaactacagtcgtacacgagcgacgagcaacaactgcaacattggtacgaattgcttcaggccagggatgcgcgagtgacctctgagttagaagcacgaatcaagcagtttttcataacgttgcgctctagattactgcgatttctggaaagcgagcaactatcacactcccttagcctcgagacactgatcgacgcgctgtacaagattaatgacctgttgcaacagcgtttgcagattctggatgatgctattcaggaaaagacctcggaactagcagaatttgaaaatatggttcgctcaccgagtgcaggagacaatgccattcctggcctattacaaattatacaatcttatattaatctattagaggaaaactag

SEQ ID NO: 7810 - DNA, 462 bp, Artificial Sequence
  Description of Artificial Sequence: Synthetic polynucleotide
atgaactctgaacagttattacataactatgtttctgattctttactcactactttgataagttttcaagagttcaagcagcaattgcagtcttacacgagcgacgagcaacaattacaacattggtacgaattgcttcaggccagggatgcgcgtgtgacctctgagttagaagcaagaatcaagcagtttttcataacgttgcgctctagattacttagatttttggaaagcgagcaattatcccactcccttagcctcgagacattgatcgacgcgttgtacaagattaatgacttgttgcaacagcgtttgcagattttagatgatgctattcaggaaaagaccagtgaattggcagaatttgaaaatatggttcgcagtccgagtgcaggagacaatgccattcctggcttattacaaattatacaatcttatattaatttattagaggaaaactga

SEQ ID NO: 7811 - DNA, 969 bp, Saccharomyces cerevisiae
atggttaagaaagttaataatccgctaaaaatcgattatcagaacgggataatagaaaatcggcttctgcaaattagaaatttcaaagatgtaaatacgcccaaactaatcaatgtatggagtataagaatagatccaagagactcgaagaaagtaatagagctaattcgaaacgattttcagaaaaatgaccctgtttcattgagacatttgaaaaggatccgcaaggacatcgagacctccaccttggaagtggtgttgtgttcgaaagagtatatttgcgacgaaggtgaaataaacaataaattgaagagtatttgggttggaacgaaaaagtatgaactgagtgatgatatcgaagtgcctgagtttgcgcccagcacaaaggaactgaacaatgcctggtctgtgaagtactggccgttgatttggaacggcaaccccaatgatcaaatattgaacgactataaaatagacatgcaggaagtacgaaatgagctatcgcgtgcgtcgacgttgtctgtgaagatggcaacggcaggaaaacagtttccaatggtgagcgtctttgttgacccatcaagaaagaaggacaaagtggtggcagaagatggcagaaactgcgaaaactcgctacccatcgaccacagtgtaatggtgggcatccgtgcggtaggcgaaagactcagggagggtgtagacgaagacgcaaactcttatctgtgtcttgattacgacgtctatttgacccatgagccgtgctcaatgtgctccatggccctgatccattctcgtgtgagacgagtggtcttccttacagagatgcagcgcaccgggagcttaaaattaacgagtggtgacgggtactgcatgaacgataacaaacagctaaactcaacatacgaagcctttcaatggatcggcgaggaatatcctgtggggcaggttgaccgggatgtctgctgctag

SEQ ID NO: 7812 - DNA, 969 bp, Artificial Sequence
  Description of Artificial Sequence: Synthetic polynucleotide
atggttaagaaagttaataatccgttaaaaatcgattatcagaacgggataatagaaaatagacttttacaaattagaaatttcaaagatgtaaatacgcccaaattaatcaatgtatggagtataagaatagatccaagagactccaagaaagtaatagagttgattagaaacgattttcagaaaaatgaccctgtttctttgagacatttgaaaaggatccgcaaggacatcgagacctccaccttggaagtggtgttgtgttctaaagagtatatttgcgacgaaggtgaaataaacaataaattgaagagtatttgggttggaacgaaaaagtatgaattaagtgatgatatcgaagtgcctgagtttgcgcccagcacaaaggaattgaacaatgcctggtctgtgaagtactggccgttgatttggaacggcaaccccaatgatcaaatattgaacgactataaaatagacatgcaggaagtaagaaatgagttatctcgtgcgtctacgttgtctgtgaagatggcaacggcaggaaaacagtttccaatggtgagcgtctttgttgacccatctagaaagaaggacaaagtggtggcagaagatggcagaaactgcgaaaactctttacccatcgaccacagtgtaatggtgggcatccgtgcggtaggcgaaagactcagggagggtgtagacgaagacgcaaactcttatttatgtcttgattacgacgtctatttgacccatgagccgtgctctatgtgctccatggccttgatccattctcgtgtgagaagagtggtcttccttacagagatgcagcgcaccgggagcttaaaattaacgagtggtgacgggtactgcatgaacgataacaaacagttgaactccacatacgaagcctttcaatggatcggcgaggaatatcctgtggggcaggttgacagagatgtctgctgctga

SEQ ID NO: 7813 - DNA, 2655 bp, Saccharomyces cerevisiae
atgaaaatcttattcgagttcattcaagacaagcttgacattgatctacagaccaacagtacttacaaagaaaatttaaaatgtggtcacttcaatggcctcgatgaaattctaactacgtgtttcgcactaccaaattcaagaaaaatagcattaccatgccttcctggtgacttaagccacaaagcagtcattgatcactgcatcatttacctgttgacgggcgaattatacaacaacgtactaacatttggctataaaatagctagaaatgaagatgtcaacaatagtcttttttgccattctgcaaatgttaacgttacgttactgaaaggcgctgcttggaaaatgttccacagtttggtcggtacatacgcattcgttgatttattgatcaattatacagtaattcaatttaatgggcagtttttcactcaaatcgtgggtaacagatgtaacgaacctcatctgccgcccaaatgggctcaacgatcatcctcatcatccgcaactgctgcgcaaatcaaacaacttacagaaccagtgacaaataaacaattcttacacaagctcaatataaattcctcttctttttttccttatagcaagatccttccttcatcatcatctatcaaaaagctaactgacttgagagaagctatttttcccacaaatttggttaaaattcctcagagactaaaggtacgaattaatttgacgctgcaaaagctattaaagagacataagcgtttgaattacgtttctattttgaatagtatttgcccaccattggaagggaccgtattggacttgtcgcatttgagtaggcaatcaccaaaggaacgagtcttgaaatttatcattgttattttacagaagttattaccccaagaaatgtttggctcaaagaaaaataaaggaaaaattatcaagaatctaaatcttttattaagtttacccttaaatggctatttaccatttgatagtttgttgaaaaagttaagattaaaggattttcggtggttgttcatttctgatatttggttcaccaagcacaattttgaaaacttgaatcaattggcgatttgtttcatttcctggctatttagacaactaattcccaaaattatacagacttttttttactgcaccgaaatatcttctacagtgacaattgtttactttagacatgatacttggaataaacttatcaccccttttatcgtagaatattttaagacgtacttagtcgaaaacaacgtatgtagaaaccataatagttacacgttgtccaatttcaatcatagcaaaatgaggattataccaaaaaaaagtaataatgagttcaggattattgccatcccatgcagaggggcagacgaagaagaattcacaatttataaggagaatcacaaaaatgctatccagcccactcaaaaaattttagaatacctaagaaacaaaaggccgactagttttactaaaatatattctccaacgcaaatagctgaccgtatcaaagaatttaagcagagacttttaaagaaatttaataatgtcttaccagagctttatttcatgaaatttgatgtcaaatcttgctatgattccataccaaggatggaatgtatgaggatactcaaggatgcgctaaaaaatgaaaatgggtttttcgttagatctcaatatttcttcaataccaatacaggtgtattgaagttatttaatgttgttaacgctagcagagtaccaaaaccttatgagctatacatagataatgtgaggacggttcatttatcaaatcaggatgttataaacgttgtagagatggaaatatttaaaacagctttgtgggttgaagataagtgctacattagagaagatggtctttttcagggctctagtttatctgctccgatcgttgatttggtgtatgacgatcttctggagttttatagcgagtttaaagccagtcctagccaggacacattaattttaaaactggctgacgatttccttataatatcaacagaccaacagcaagtgatcaatatcaaaaagcttgccatgggcggatttcaaaaatataatgcgaaagccaatagagacaaaattttagccgtaagctcccaatcagatgatgatacggttattcaattttgtgcaatgcacatatttgttaaagaattggaagtttggaaacattcaagcacaatgaataatttccatatccgttcgaaatctagtaaagggatatttcgaagtttaatagcgctgtttaacactagaatctcttataaaacaattgacacaaatttaaattcaacaaacaccgttctcatgcaaattgatcatgttgtaaagaacatttcggaatgttataaatctgcttttaaggatctatcaattaatgttacgcaaaatatgcaatttcattcgttcttacaacgcatcattgaaatgacagtcagcggttgtccaattacgaaatgtgatcctttaatcgagtatgaggtacgattcaccatattgaatggatttttggaaagcctatcttcaaacacatcaaaatttaaagataatatcattcttttgagaaaggaaattcaacacttgcaagcatatatatatatatatatacatatagttaattag

SEQ ID NO: 7814 - DNA, 2655 bp, Artificial Sequence
  Description of Artificial Sequence: Synthetic polynucleotide
atgaaaatcttattcgagttcattcaagacaagcttgacattgatttacagaccaacagtacttacaaagaaaatttaaaatgtggtcacttcaatggcctcgatgaaattttgactacgtgtttcgcattgccaaattctagaaaaatagcattaccatgccttcctggtgacttaagccacaaagcagtcattgatcactgcatcatttacttgttgacgggcgaattatacaacaacgtattaacatttggctataaaatagctagaaatgaagatgtcaacaatagtcttttttgccattctgcaaatgttaacgttacgttattgaaaggcgctgcttggaaaatgttccacagtttggtcggtacatacgcattcgttgatttattgatcaattatacagtaattcaatttaatgggcagtttttcactcaaatcgtgggtaacagatgtaacgaacctcatttaccgcccaaatgggctcaaagaagttcctcttcttccgcaactgctgcgcaaatcaaacaacttacagaaccagtgacaaataaacaattcttacacaagctcaatataaattcctcttctttttttccttatagcaagatccttccttcttcttcttctatcaaaaagttgactgacttgagagaagctatttttcccacaaatttggttaaaattcctcagagattaaaggtaagaattaatttgacgttacaaaagcttttaaagagacataagcgtttgaattacgtttctattttgaatagtatttgcccaccattggaagggaccgtattggacttgtctcatttgagtaggcaatctccaaaggaaagagtcttgaaatttatcattgttattttacagaagttattaccccaagaaatgtttggctccaagaaaaataaaggaaaaattatcaagaatttgaatcttttattaagtttacccttaaatggctatttaccatttgatagtttgttgaaaaagttaagattaaaggattttagatggttgttcatttctgatatttggttcaccaagcacaattttgaaaacttgaatcaattggcgatttgtttcatttcctggttatttagacaattgattcccaaaattatacagacttttttttactgcaccgaaatatcttctacagtgacaattgtttactttagacatgatacttggaataaacttatcaccccttttatcgtagaatattttaagacgtacttagtcgaaaacaacgtatgtagaaaccataatagttacacgttgtccaatttcaatcatagcaaaatgaggattataccaaaaaaaagtaataatgagttcaggattattgccatcccatgcagaggggcagacgaagaagaattcacaatttataaggagaatcacaaaaatgctatccagcccactcaaaaaattttagaatacttgagaaacaaaaggccgactagttttactaaaatatattctccaacgcaaatagctgaccgtatcaaagaatttaagcagagacttttaaagaaatttaataatgtcttaccagagctttatttcatgaaatttgatgtcaaatcttgctatgattccataccaaggatggaatgtatgaggatactcaaggatgcgttgaaaaatgaaaatgggtttttcgttagatctcaatatttcttcaataccaatacaggtgtattgaagttatttaatgttgttaacgctagcagagtaccaaaaccttatgagttatacatagataatgtgaggacggttcatttatccaatcaggatgttataaacgttgtagagatggaaatatttaaaacagctttgtgggttgaagataagtgctacattagagaagatggtctttttcagggctctagtttatctgctccgatcgttgatttggtgtatgacgatcttttggagttttatagcgagtttaaagccagtcctagccaggacacattaattttaaaattggctgacgatttccttataatatctacagaccaacagcaagtgatcaatatcaaaaagcttgccatgggcggatttcaaaaatataatgcgaaagccaatagagacaaaattttagccgtaagctcccaatctgatgatgatacggttattcaattttgtgcaatgcacatatttgttaaagaattggaagtttggaaacattctagcacaatgaataatttccatatccgttctaaatctagtaaagggatatttagaagtttaatagcgttatttaacactagaatctcttataaaacaattgacacaaatttaaattctacaaacaccgttctcatgcaaattgatcatgttgtaaagaacatttctgaatgttataaatctgcttttaaggatttatccattaatgttacgcaaaatatgcaatttcattctttcttacaacgcatcattgaaatgacagtcagcggttgtccaattacgaaatgtgatcctttaatcgagtatgaggtaagattcaccatattgaatggatttttggaaagcttgtcttccaacacaagtaaatttaaagataatatcattcttttgagaaaggaaattcaacacttgcaagcatatatatatatatatatacatatagttaattga

SEQ ID NO: 7815 - DNA, 2367 bp, Saccharomyces cerevisiae
atgaagatggccgtggatgaccctacgtatggcaccccaaagattaaaagaactgcttctagcagtagtagtattgaaacgacagtaacaaagttgctgatgtccaccaagcacctcctccaggtcttaacacaatggtctaaggggacaacctctggaagattagtatctgatgcatacgttcagttgggcaatgacttcaaagtcgtatcgaaattcttcatgcatgcgaaagttgacatgtcagatgttggtgatgtgccaatggctttaagacgtgtattggaagtgacattgagggaaccaccatctgatgaaactttaaataaacatctgccaaaaatcagagagattatagtgacacttttagacaaactaaaggttaaacaagcaattttgaagaatatgcagcaagagcatcggataagtgtaaaatcacatcatcaacaaaacccttcctttactagtaacctttcattgggtagtgaagggacccgtgaggggactccattaagtagcagaaaaagcagtattgtacgtgatcagaggcaaagcgattcagtcgaaaacagctatggggaaaaagtgaattctacttctacgggaacaccctctgctcagtcagcagaggcaacattgacaaaaccaagaactaatattaaacaaaaccttaaatctaacaatgctccaaacgcatctgatgatgatgatgcactttcacaattgaagaagggaactaatttacaaaggagagcctcaaagagatactctgcctaccatatggctaaattgacaaatcagtctacaacagaagctgctgcggctgccggcctcatgacaactccttcaccctcgatgttgcatctagaggaaaccgtaagaaagtcaaagttatacggaaataacaacaatgatgatgatagaaacattaattcagctgaaaataagggtaaaagcattgacgatgtatcaaaggcgagtccattggcgaaaacgccattgcctattgagaatgttcgtgcatctccacgaagattatcaagcgttgttacaacttcgccagataaagccatgaatggaacttgtccagtatttttaaggataggagacaaaacaaagaagtgtcatgtgcaactgcctactacaaaaaacgcattaaggctcctatttattgagcgctttgcgtattctcctggagcaaattccttcccagacatatatattatggatcctcaatatggagtattctatgaattagaggaactaaatcttctcgatattaaagaagggtttgttatcgagctaaagctcgaagagaatccaaataatacgatcaaggaattcattgacacagttaagatggagatatcgaatagtcagaatgatataataagacatttaaaagaaatgagttttggttctgcaattagcggcaagcaaacggaagttttaccacaacctggccttgaagctaacaaacacgatcttgtggggcaaaacaaaaaagatgatgataaaacgatcaaagatattcagtacgaattggggaaaataaaacaagtgcataatattaataggtcaaatattaatgagactattttcaacattttacgaaaggtcgataactttaagtctttatcattttctgccaaaaactcttccaacagaatgtacatggaaaaatcacagaccgaactcggtgatttatccgatactctgctaagtaaagtagatgatttgcaagatgtaatcgaaattatgaggaaagacgttgctgagcgtaggtctcagcccgctaaaaagaagctagaaaccgtatccaaggatttagaaaatgcccaagcagatgtacttaaactacaggagtttattgatactgaaaaaccacattggaaaaaaacttgggaagctgagctcgataaggtctgtgaagaacaacagtttctcacgttgcaggaagagttgattttagatttgaaggaagacttgggtaaggcattagaaactttcgatcttattaagttatgttgtgaagaacaagaaaaaaacccttcgagatcaaaaagtaatcctattttgcctattatgagaccgggcacatttaatcaggtaagggagcaagttatggtggccgtccaatctttaaaccctgaccacgatagtagggtcgaagctattgacaaggctgagaagatgtgggagatggaaagaaaacttaaagctagtaatgaatttgatgatgaactggaaaattttgtgggtaattcaaacctgaaaaaatcgggaggctttgaagaagtagaaaggataagaaagcagaaggatgaagcaaatttgagagcatattttgggccggggtttacttaa

SEQ ID NO: 7816 - DNA, 2367 bp, Artificial Sequence
  Description of Artificial Sequence: Synthetic polynucleotide
atgaagatggccgtggatgaccctacgtatggcaccccaaagattaaaagaactgcttctagcagtagtagtattgaaacgacagtaacaaagttgttgatgtccaccaagcacctcctccaggtcttaacacaatggtctaaggggacaacctctggaagattagtatctgatgcatacgttcagttgggcaatgacttcaaagtcgtatccaaattcttcatgcatgcgaaagttgacatgagtgatgttggtgatgtgccaatggctttaagacgtgtattggaagtgacattgagggaaccaccatctgatgaaactttaaataaacatttaccaaaaatcagagagattatagtgacacttttagacaaattgaaggttaaacaagcaattttgaagaatatgcagcaagagcatagaataagtgtaaaatctcatcatcaacaaaacccttcctttactagtaacctttctttgggtagtgaagggacccgtgaggggactccattaagtagcagaaaaagcagtattgtacgtgatcagaggcaaagcgattctgtcgaaaacagctatggggaaaaagtgaattctacttctacgggaacaccctctgctcagtctgcagaggcaacattgacaaaaccaagaactaatattaaacaaaaccttaaatctaacaatgctccaaacgcatctgatgatgatgatgcactttctcaattgaagaagggaactaatttacaaaggagagcctccaagagatactctgcctaccatatggctaaattgacaaatcagtctacaacagaagctgctgcggctgccggcctcatgacaactccttctccctctatgttgcatttagaggaaaccgtaagaaagtccaagttatacggaaataacaacaatgatgatgatagaaacattaattctgctgaaaataagggtaaaagcattgacgatgtatccaaggcgagtccattggcgaaaacgccattgcctattgagaatgttcgtgcatctccaagaagattatccagcgttgttacaacttctccagataaagccatgaatggaacttgtccagtatttttaaggataggagacaaaacaaagaagtgtcatgtgcaattacctactacaaaaaacgcattaaggctcttatttattgagcgctttgcgtattctcctggagcaaattccttcccagacatatatattatggatcctcaatatggagtattctatgaattagaggaattgaatcttctcgatattaaagaagggtttgttatcgagttgaagctcgaagagaatccaaataatacgatcaaggaattcattgacacagttaagatggagatatccaatagtcagaatgatataataagacatttaaaagaaatgagttttggttctgcaattagcggcaagcaaacggaagttttaccacaacctggccttgaagctaacaaacacgatcttgtggggcaaaacaaaaaagatgatgataaaacgatcaaagatattcagtacgaattggggaaaataaaacaagtgcataatattaataggtctaatattaatgagactattttcaacattttaagaaaggtcgataactttaagtctttatctttttctgccaaaaactcttccaacagaatgtacatggaaaaatctcagaccgaactcggtgatttatccgatactttattaagtaaagtagatgatttgcaagatgtaatcgaaattatgaggaaagacgttgctgagcgtaggtctcagcccgctaaaaagaagttggaaaccgtatccaaggatttagaaaatgcccaagcagatgtacttaaattacaggagtttattgatactgaaaaaccacattggaaaaaaacttgggaagctgagctcgataaggtctgtgaagaacaacagtttctcacgttgcaggaagagttgattttagatttgaaggaagacttgggtaaggcattagaaactttcgatcttattaagttatgttgtgaagaacaagaaaaaaacccttccagaagtaaaagtaatcctattttgcctattatgagaccgggcacatttaatcaggtaagggagcaagttatggtggccgtccaatctttaaaccctgaccacgatagtagggtcgaagctattgacaaggctgagaagatgtgggagatggaaagaaaacttaaagctagtaatgaatttgatgatgaattggaaaattttgtgggtaatagcaacttgaaaaaaagtggaggctttgaagaagtagaaaggataagaaagcagaaggatgaagcaaatttgagagcatattttgggccggggtttacttga

SEQ ID NO: 7817 - DNA, 4365 bp, Saccharomyces cerevisiae
atggatgttgatgaaccgaatcctattgtgatatcagattctgaggccactgatgaggaaattagtatcatatacgaacccgaattcaatgaaaattatttatgggcagaggaaaacgtccaagaagcaagcagatcacagaaaattgtcactgagaggttgagcctggattccactgctggagaatcttgtactccttccgtagtaactgatacacaagttactacggggcttcggtggtctttgaggaagaggaaggctattcaaaagatgccatacagtttagaacgcataaagcataggcagttgctagagggctatgatatctctagttttgacagcatttcgaatcagttgaccttaccgaagaacgcttctacagtgattcactcaaatgatattttacttacaaagagaactggtaaacccttagatgagcagaaagatgttacaatcgactccattaaacccgaaaacagctcggttcaatctcaaagatatgatagtgatgaagaaataccaaagaaaaggcatcgtacttttaaagacctcgaccaggatatagtatttcaatcaggtgattctacggaagatgaacaagacttggctagtacaaatttacagaatactcaaaatgacgaagtaatatttagaggaagagtattgaatgtaagaactggttaccgtggggtcctgccaagagttgcttgggaaaagtcgttgcaaaagcagcagtcttcaaaagtcacgaaaagaaaaactcaattattgaaccataagggtgtggctaagaggaaaatgaacagaagcgcccatattgaagatgaagaacagaacttattgaacgatcttattgcacctgatgacgaactggatatcgaggaaaacgcccctccagatatatacttaggaaatcttccagaggatcgtgaggctaacgaaaaggaattaaaggaattgcaagaatattatgagagcaagtatagtgaagacgcacaatcggctggaacttctggttttaatttaaatgaggaataccgcaatgaaccagtgtatgagctggaatatgacggaccggggagctgcatatcacatgtgtcttataaagaccagcctattatttatttgaattcacggcattcagatagcggatttagtgagcaatacaatatatctgccgaagataatcaaagtgtaatttccctagatgctgctgaagagcataacgatggtataattgacaagatgttggttaaacctaaaagaattaaagcaaccaatgatgccaactttttgaatacaaaaagtaagagagtgagaagatataagtacaaatatcgaaattcttgtctggccccaagtacaaaagctatcaaagtcggaaaacggtcagcgcataaatctcatttggcagctaataatccagtttcatttgtttctaagaagaatcatgtaattgatgattatttttttgaagaattagaatctcaatccctagaacaggatgacagctcttctctcaagccacagaaaaaaagaaggaagaagaaagcacctatatactcaagtttctccgctgatcttgaatcgagacgaaaaccagttttcaatactgttgtagaggttcccacgaaccgatacgctttcacaaagccaaatgtacgtaatagggacagcattaatcatgacatggaatttgaggaagaagactccaatcaagagcttggaccaataatggtcgtacttgactcaattttactaaaaaaaccttttgagccacctaatttcttcaagatccagttgtcagacaagagtttcttgctatcaaaattgaatcctgcagatatagctacatcattacagaaaatattcagagtaatcattgataaaggtatcactgatactgaactagttcactttaacgaaagccttattgcttttttggtgcaccttgacatgcctgaactattcgacttaataggtgaatttcatcgtgaatttagatcgaaggtcaatagcttgaggaaaaaagctaaaccaatccatttttttcaaattgcggcatgccaattaatgtttctagaaatatcaagatataacaaaatttcagccgctgcaaaattcgacatggatgtcaaactcttagatcatattgtgtctttcttcaaattactttctgtctgttatgattctgttatgaaaaatccaatgcaatatctgtacacaagttattatattctctctgctgtcgttgatgtcatacataaaaaggaagctttgtgggatttatttcaaaagcaccccttttcgcctcatatttcactgttgctggtcaacatatttcctacgaaagtctgccgctggcaggttttgagattagattctgaattccaacccttgagttcggcatttcggttcatcaattattgcattgagacttgtaattggaatgttacaaattctttgattctttctctcgatcgcatattcaaacggagaagattttcggactttgaagaagagtctgatttgtcacaaaacaataagataatttatcctccaacgaatcagcttacgagtcgattaatgtttaacagatatttgcatctactgacgttgtgtgaattgtctagttctgatacacaacgtgtgataccgatgggtgatatttctatgaatgattctctatctgttttgaagaaccgcctcaacctactaattgttctagctacacgttttgatttaaacttagagaagcgcttccaagagctaacacgaccgttatatagtaaggaatatttaaacttgcatacacagaacacagtcaggacgataacaacattgatcatgcaggccagcctttcattcctggaaatcagtcgaatcaaaaatcatccattcagtggaaaatttattgcgtcattatttgataaactagtacttcaacaaccttccatatcgggagtaacagaaaattttttgaaagaattcacaaatttagtctccaaaatgaaaagaaaaagcgtgagtatgctcaaatttctgtatccttcactggtggccatgtctcaagaaaatatattcgagtcgtctttttttttattattacaggtatatttgaagagcttagatgtgctgggtccaacttgggtgcaaaattatctttttcagtttataaagagcaaggctcaagaaaatgaaagatggatagaatgctattgtcagatcggaaaattcctcgtagattctggtatatttacctggtggactttctttacctataacggcttagatgctgcattacactttcagcttgcatttcactcccttattatcgatttctgtgatacagactcttttgaattactgaaaaaaccgctttattccattgcttctgatttgctgctcatttccaaagatgacgctttctatcactttctttccaatctgttgaagagggcacatatcatagtagcagatttgaaacctgtttccgatgagaatgaactcctgcgattggcttatattttttctaaagcattgaaaaaaaatgcatatcaagatctattagctgttttcttatccctggcgaaaaaacattacgatgaaggggacatcagtagaaatttcttggcaaaatatctcgaatttcttaacaaaaattgcttgactgagctaagaaataatcaactcttcatcagtctaagaagggaacttggtatttcaagtgatgaagacgaaaaatgtgcgttctgggactcattcaatgaagcaggtgatatactttccaaagctgcatttgttgaaaccggtattgttcaagcctgttgcactgggaatgaaattgatggatatcttgacaatttaagcactttattcacctccaccatgttagagagcccttttgcatttttttctgacctggtgatagcacacatatttgagaacagaccttttttcgacgtgaatatcaagaattttcttctatctcacttcatagaccttttcaacaaggttttaaaaatgaaattcgagcaggtatctcctgatgaatttgctgaactttgcaaagtatacagggcgttatgtattgagtgcgcaacagacgacacctttaatagtaatagtgatttgatcgccgcaaaagatgcgtttttggtatctgtgttgagaatcgcagatgggttttgggagcatgacaaacttttgcagctaaggatgcttgatagtaatatgaacatacctaatcagattcctcatactactttgcaaagttcgctatctgcgattgtaataaagataatagaaagtaatataggaaaaattgaggcgtctgaacctttcaaaaccttcaagaatacgtaa

SEQ ID NO: 7818 - DNA, 4365 bp, Artificial Sequence
  Description of Artificial Sequence: Synthetic polynucleotide
atggatgttgatgaaccgaatcctattgtgatatctgattctgaggccactgatgaggaaattagtatcatatacgaacccgaattcaatgaaaattatttatgggcagaggaaaacgtccaagaagcaagcagaagccagaaaattgtcactgagaggttgagcttagattccactgctggagaatcttgtactccttccgtagtaactgatacacaagttactacggggcttcgttggtctttgaggaagaggaaggctattcaaaagatgccatacagtttagaacgcataaagcataggcagttgttggagggctatgatatctctagttttgacagcatttctaatcagttgaccttaccgaagaacgcttctacagtgattcactctaatgatattttacttacaaagagaactggtaaacccttagatgagcagaaagatgttacaatcgactccattaaacccgaaaacagctctgttcaatctcaaagatatgatagtgatgaagaaataccaaagaaaaggcatcgtacttttaaagacctcgaccaggatatagtatttcaatctggtgattctacggaagatgaacaagacttggctagtacaaatttacagaatactcaaaatgacgaagtaatatttagaggaagagtattgaatgtaagaactggttaccgtggggtcttgccaagagttgcttgggaaaagtctttgcaaaagcagcagtcttctaaagtcacgaaaagaaaaactcaattattgaaccataagggtgtggctaagaggaaaatgaacagaagcgcccatattgaagatgaagaacagaacttattgaacgatcttattgcacctgatgacgaattagatatcgaggaaaacgcccctccagatatatacttaggaaatcttccagaggatcgtgaggctaacgaaaaggaattaaaggaattgcaagaatattatgagagcaagtatagtgaagacgcacaatctgctggaacttctggttttaatttaaatgaggaataccgcaatgaaccagtgtatgagttagaatatgacggaccggggagctgcatatctcatgtgtcttataaagaccagcctattatttatttgaattccagacattctgatagcggatttagtgagcaatacaatatatctgccgaagataatcaaagtgtaatttccttggatgctgctgaagagcataacgatggtataattgacaagatgttggttaaacctaaaagaattaaagcaaccaatgatgccaactttttgaatacaaaaagtaagagagtgagaagatataagtacaaatatagaaattcttgtttggccccaagtacaaaagctatcaaagtcggaaaaagatctgcgcataaatctcatttggcagctaataatccagtttcttttgtttctaagaagaatcatgtaattgatgattatttttttgaagaattagaatctcaatccttagaacaggatgacagctcttctctcaagccacagaaaaaaagaaggaagaagaaagcacctatatactctagtttctccgctgatcttgaatctagaagaaaaccagttttcaatactgttgtagaggttcccacgaacagatacgctttcacaaagccaaatgtacgtaatagggacagcattaatcatgacatggaatttgaggaagaagactccaatcaagagcttggaccaataatggtcgtacttgacagtattttattgaaaaaaccttttgagccacctaatttcttcaagatccagttgagtgacaagagtttcttgttatccaaattgaatcctgcagatatagctacaagtttacagaaaatattcagagtaatcattgataaaggtatcactgatactgaattggttcactttaacgaaagccttattgcttttttggtgcaccttgacatgcctgaattattcgacttaataggtgaatttcatcgtgaatttagatccaaggtcaatagcttgaggaaaaaagctaaaccaatccatttttttcaaattgcggcatgccaattaatgtttttggaaatatctagatataacaaaatttctgccgctgcaaaattcgacatggatgtcaaactcttagatcatattgtgtctttcttcaaattactttctgtctgttatgattctgttatgaaaaatccaatgcaatatttgtacacaagttattatattctctctgctgtcgttgatgtcatacataaaaaggaagctttgtgggatttatttcaaaagcaccccttttctcctcatatttctttgttgttggtcaacatatttcctacgaaagtctgccgctggcaggttttgagattagattctgaattccaacccttgagttctgcatttaggttcatcaattattgcattgagacttgtaattggaatgttacaaattctttgattctttctctcgatcgcatattcaaaagaagaagattttctgactttgaagaagagtctgatttgtctcaaaacaataagataatttatcctccaacgaatcagcttacgagtaggttaatgtttaacagatatttgcatttattgacgttgtgtgaattgtctagttctgatacacaacgtgtgataccgatgggtgatatttctatgaatgattctttatctgttttgaagaaccgcctcaacttattgattgttttggctacacgttttgatttaaacttagagaagcgcttccaagagttgacaagaccgttatatagtaaggaatatttaaacttgcatacacagaacacagtcaggacgataacaacattgatcatgcaggccagcctttctttcttggaaatcagtagaatcaaaaatcatccattcagtggaaaatttattgcgtctttatttgataaattagtacttcaacaaccttccatatctggagtaacagaaaattttttgaaagaattcacaaatttagtctccaaaatgaaaagaaaaagcgtgagtatgctcaaatttttatatccttctttggtggccatgtctcaagaaaatatattcgagtcttctttttttttattattacaggtatatttgaagagcttagatgtgttgggtccaacttgggtgcaaaattatctttttcagtttataaagagcaaggctcaagaaaatgaaagatggatagaatgctattgtcagatcggaaaattcctcgtagattctggtatatttacctggtggactttctttacctataacggcttagatgctgcattacactttcagcttgcatttcactcccttattatcgatttctgtgatacagactcttttgaattattgaaaaaaccgctttattccattgcttctgatttgttgctcatttccaaagatgacgctttctatcactttctttccaatttattgaagagggcacatatcatagtagcagatttgaaacctgtttccgatgagaatgaactcttaagattggcttatattttttctaaagcattgaaaaaaaatgcatatcaagatttattagctgttttcttatccttagcgaaaaaacattacgatgaaggggacatcagtagaaatttcttggcaaaatatctcgaatttcttaacaaaaattgcttgactgagttaagaaataatcaactcttcatcagtttgagaagggaacttggtatttccagtgatgaagacgaaaaatgtgcgttctgggactctttcaatgaagcaggtgatatactttccaaagctgcatttgttgaaaccggtattgttcaagcctgttgcactgggaatgaaattgatggatatcttgacaatttaagcactttattcacctccaccatgttagagagcccttttgcatttttttctgacttggtgatagcacacatatttgagaacagaccttttttcgacgtgaatatcaagaattttcttttatctcacttcatagaccttttcaacaaggttttaaaaatgaaattcgagcaggtatctcctgatgaatttgctgaactttgcaaagtatacagggcgttatgtattgagtgcgcaacagacgacacctttaatagtaatagtgatttgatcgccgcaaaagatgcgtttttggtatctgtgttgagaatcgcagatgggttttgggagcatgacaaacttttgcagttgaggatgcttgatagtaatatgaacatacctaatcagattcctcatactactttgcaaagttctttatctgcgattgtaataaagataatagaaagtaatataggaaaaattgaggcgtctgaacctttcaaaaccttcaagaatacgtga

SEQ ID NO: 7819 - DNA, 1281 bp, Saccharomyces cerevisiae
atgtcgcaccaaaaccagcttattccacaagcttatatttctaactttcataacagattgacaaacgaagatgatggtatccccatctttacaatggctcaacaaacaaggcagcataaaagggctaaagtggtcaactatgcggaatatgacaacgatctctttgatgaattcaatatgaacggttctaatttcaacaatgctgatacacactataaagataatgcagtgtctcatgaaaatactccggcacttacaaatggtgttaccatggacggttccgaatacaatgtcctagagaacatgaatggagctgatagtattatctctaacaacaaatacgatgcgggttcaaacatggttgtggaatctttatccggtttgaatagcaataacaacgccagcaatggtccgagcaacaaagcgcaggcacaggatattggaaacgccgttctaccggatctgcaagaccaacaccacaaccccttcaacatattgagataccctaaaataagagatactttcattaacggaaaagtggtgtctccatatagactcaacactgatcaagaaacgaaggcaaacgccaattctggagaggcaatcatgataccaattactttggatatagaacatatgggtcataccataaaagaccagtttctctggaactacaatgacgactccatatctccggaggaatttgcctctatatactgtaaagatcttgatatgacttccgctaccttacaaactcaaattgcgaatataataaaagagcagttgaaagacctcgaaaatattgcagccactgagataatgtctgacctccacgtgataatcaacctaacctgcaacttacaagacagattttttgaagataacttccagtggaacttgaacgacaaatcacttactccagaaagatttgctacatccattgtacaggaccttggcttaacaagagagttcatccccttaatatctcaatcgcttcatgaaactatcttgaagataaagaaggactgggtagatggccacttgattcaggaccatgtcccaaacgatgccgcatttgggtacttatctggtataaggctggatattgatgaactgggctccaattggtgcccaagggtggaaatattaacaaaagaagaaatacaaaagagagaaattgaaaaagaaagaaacttaagaagattgaaaagagaaactgatagattatctagaaggggcaggagaagattagatgacttagaaaccacaatgagaatgtag

SEQ ID NO: 7820 - DNA, 1281 bp, Artificial Sequence
  Description of Artificial Sequence: Synthetic polynucleotide
atgtctcaccaaaaccagcttattccacaagcttatatttctaactttcataacagattgacaaacgaagatgatggtatccccatctttacaatggctcaacaaacaaggcagcataaaagggctaaagtggtcaactatgcggaatatgacaacgatctctttgatgaattcaatatgaacggttctaatttcaacaatgctgatacacactataaagataatgcagtgtctcatgaaaatactccggcacttacaaatggtgttaccatggacggttccgaatacaatgtcttggagaacatgaatggagctgatagtattatctctaacaacaaatacgatgcgggttccaacatggttgtggaatctttatccggtttgaatagcaataacaacgccagcaatggtccgagcaacaaagcgcaggcacaggatattggaaacgccgttttaccggatttgcaagaccaacaccacaaccccttcaacatattgagataccctaaaataagagatactttcattaacggaaaagtggtgtctccatatagactcaacactgatcaagaaacgaaggcaaacgccaattctggagaggcaatcatgataccaattactttggatatagaacatatgggtcataccataaaagaccagtttctctggaactacaatgacgactccatatctccggaggaatttgcctctatatactgtaaagatcttgatatgacttccgctaccttacaaactcaaattgcgaatataataaaagagcagttgaaagacctcgaaaatattgcagccactgagataatgtctgacctccacgtgataatcaacttgacctgcaacttacaagacagattttttgaagataacttccagtggaacttgaacgacaaatctcttactccagaaagatttgctacatccattgtacaggaccttggcttaacaagagagttcatccccttaatatctcaatctcttcatgaaactatcttgaagataaagaaggactgggtagatggccacttgattcaggaccatgtcccaaacgatgccgcatttgggtacttatctggtataaggttagatattgatgaattaggctccaattggtgcccaagggtggaaatattaacaaaagaagaaatacaaaagagagaaattgaaaaagaaagaaacttaagaagattgaaaagagaaactgatagattatctagaaggggcaggagaagattagatgacttagaaaccacaatgagaatgtga

SEQ ID NO: 7821 - DNA, 780 bp, Saccharomyces cerevisiae
atgttcagaaagagattagtgaacaaaagctcttctgatgaaaagaaccagaaaaagaggcagaaaattaattttagcgaagagaaactagtggccagcgatgaagaaaagggttccagtgacctcatgagcttagccaagagtggaaatagcaggacacttcaactttcacatgagaatgaaggtaaactacagaaaaagggtgaggatttagataaatacactttaacggtcaacgacgacagcactaaagaagatcttctaaactttgagagaaaagagctggctgagaaggcaaagaagaggcgacctagtgatgacaatgagctggtactgaacatgagcggtaaaaataaacgcctcactaaacagattaaccaaccaacgaatatccggaccacggtgctgatggattttcagcccgacgtttgcaaagattacaaacagacgggatactgtggttacggagatagctgcaagttcttacactcgagggatgatttcaagactggctggaagctgaaccaagaatggaatgcggataaagaggactccaaagcggttactctagacttggaaaagataccgttcaagtgcactctttgtaaggaagattacaagtctccagtggtcacaaactgtggccattatttttgtggatcgtgttttgccaaagatatgaaaaagggcaccaaatgctttatatgccacaaggagacccacggcagtgcaaaagtagcatctgacttacagaagatgctaaataaaaggaaaagttga

SEQ ID NO: 7822 - DNA, 780 bp, Artificial Sequence
  Description of Artificial Sequence: Synthetic polynucleotide
atgttcagaaagagattagtgaacaaaagctcttctgatgaaaagaaccagaaaaagaggcagaaaattaattttagcgaagagaaattagtggccagcgatgaagaaaagggttccagtgacctcatgagcttagccaagagtggaaatagcaggacacttcaactttctcatgagaatgaaggtaaattacagaaaaagggtgaggatttagataaatacactttaacggtcaacgacgacagcactaaagaagatcttttgaactttgagagaaaagagttggctgagaaggcaaagaagaggagacctagtgatgacaatgagttggtattgaacatgagcggtaaaaataaacgcctcactaaacagattaaccaaccaacgaatatcagaaccacggtgttgatggattttcagcccgacgtttgcaaagattacaaacagacgggatactgtggttacggagatagctgcaagttcttacactctagggatgatttcaagactggctggaagttgaaccaagaatggaatgcggataaagaggactccaaagcggttactttggacttggaaaagataccgttcaagtgcactctttgtaaggaagattacaagtctccagtggtcacaaactgtggccattatttttgtggatcttgttttgccaaagatatgaaaaagggcaccaaatgctttatatgccacaaggagacccacggcagtgcaaaagtagcatctgacttacagaagatgttgaataaaaggaaaagttga

SEQ ID NO: 7823 - DNA, 1572 bp, Saccharomyces cerevisiae
atgagtggtaacacaactaacgtgcatgagactagagccaagtttgcagagacgctgcaaccgaggattggtggcaatactacaaaagtgatacgagctgctttggaaaagaacgaagctgaaagcggggtgtctgaggataatgataacgggtcattggagaaagttaacgtagctacttcgccgcttttgacatcaacaccgcccacaatctcaaaggcgttggtgaaattgtacccttatttaattctcattgacgaattcctaaacgttgttacatggacaggaaagaatatttggagcagtgttttgatgctgtgtctctttattactaccgttgagtattttgaaacgctggtgaagtactttggacatcttgccatcattgctattttgtggggttattccctattggacaattatattgagggtacgttgagctcctcaccaacattagaagatattgctctcttaatgaacagagtatccttgaagtcagatattttgctctcccccatggttaaccttggaacgcaagatattcaacggcttctatatactacggtcatattatctccaatatacgtgatgataacctggctacttttaccaccgagaagcttgatgctgatggtgggcatgttccttttaacgtatcactcaccatggtctaaagtagcaagaaggcttttatggaagtttaagattgtcaggctgcttgttttctacgtcacgggtttagaccttggtggaataaataaggaccagggtatttttgctacagtgcagaagcaagtgaaaaagttggcatcaacagaaaacagtaatggcgtattatccgattccaagcctatccgttttacttatgttttgtacgagaaccagcgtcgttggttaggtattggatggaagcctagtatgttgagttatgagaggactccatggaccgatgaatttttgaatgaggctccctctcctgaaaacttccatctacctgaagagactaacactatggtttggagatgggtcgacaagacatggaggctagacatgactaatgacggtgccattcaagtgcccaattcaaaggcaagaacttccgcagatccctcccctgacgagggatttatatattacgacaatacctggaaaaaaccaagtaaagaagattccttttctaaatatacaagaagaagaagatgggtaagaaccgcagaattggtcaaaacttctgactttgatgaaagcgtgataaattcgaatagaaattctgccattgaacaaaaggttgaagaaaacagcacgaatggtttaaccgctgagcaagagcttgggagcaacaagcaagagaaagataatgcgaaaaaagtaggagagcctacaacagaagagacaaaagaatttgccgaagcatcaaacatcaacgaaggcgagtttgaaagaatttcctcgaccgatgaagaagttttaaaatctagggcaagagatcgactggcaaaagtattagatgatactgaagagaaagagcaatcaaatccaaccattggtcgcgatagcaagaaggccgtatga

SEQ ID NO: 7824 - DNA, 1572 bp, Artificial Sequence
  Description of Artificial Sequence: Synthetic polynucleotide
atgagtggtaacacaactaacgtgcatgagactagagccaagtttgcagagacgttacaaccgaggattggtggcaatactacaaaagtgataagagctgctttggaaaagaacgaagctgaaagcggggtgtctgaggataatgataacgggtctttggagaaagttaacgtagctacttctccgcttttgacatctacaccgcccacaatctccaaggcgttggtgaaattgtacccttatttaattctcattgacgaattcttgaacgttgttacatggacaggaaagaatatttggagcagtgttttgatgctttgtctctttattactaccgttgagtattttgaaacgttagtgaagtactttggacatcttgccatcattgctattttgtggggttattccttattggacaattatattgagggtacgttgagctcctctccaacattagaagatattgctctcttaatgaacagagtatccttgaagagtgatattttgctctcccccatggttaaccttggaacgcaagatattcaaaggcttttatatactacggtcatattatctccaatatacgtgatgataacctggttacttttaccaccgagaagcttgatgttaatggtgggcatgttccttttaacgtatcactctccatggtctaaagtagcaagaaggcttttatggaagtttaagattgtcaggttacttgttttctacgtcacgggtttagaccttggtggaataaataaggaccagggtatttttgctacagtgcagaagcaagtgaaaaagttggcaagcacagaaaacagtaatggcgtattatccgattccaagcctatccgttttacttatgttttgtacgagaaccagcgtcgttggttaggtattggatggaagcctagtatgttgagttatgagaggactccatggaccgatgaatttttgaatgaggctccctctcctgaaaacttccatttacctgaagagactaacactatggtttggagatgggtcgacaagacatggaggttggacatgactaatgacggtgccattcaagtgcccaattctaaggcaagaacttccgcagatccctcccctgacgagggatttatatattacgacaatacctggaaaaaaccaagtaaagaagattccttttctaaatatacaagaagaagaagatgggtaagaaccgcagaattggtcaaaacttctgactttgatgaaagcgtgataaatagtaatagaaattctgccattgaacaaaaggttgaagaaaacagcacgaatggtttaaccgctgagcaagagcttgggagcaacaagcaagagaaagataatgcgaaaaaagtaggagagcctacaacagaagagacaaaagaatttgccgaagcatctaacatcaacgaaggcgagtttgaaagaatttcctccaccgatgaagaagttttaaaatctagggcaagagatagattagcaaaagtattagatgatactgaagagaaagagcaaagcaatccaaccattggtcgcgatagcaagaaggccgtatga

SEQ ID NO: 7825 - DNA, 237 bp, Saccharomyces cerevisiae
atggctagagaaatcaccgacatcaaacaatttttggaattgaccagaagagctgacgttaagaccgccactgttaagattaacaaaaaattgaacaaggccggtaagccattcagacaaaccaagttcaaggttagaggctcttcttctttgtacactttggttatcaacgatgctggtaaggctaagaaattgatccaatctttgccaccaactttgaaggttaacagattataa

SEQ ID NO: 7826 - DNA, 237 bp, Artificial Sequence
  Description of Artificial Sequence: Synthetic polynucleotide
atggctagagaaatcaccgacatcaaacaatttttggaattgaccagaagagctgacgttaagaccgccactgttaagattaacaaaaaattgaacaaggccggtaagccattcagacaaaccaagttcaaggttagaggctcttcttctttgtacactttggttatcaacgatgctggtaaggctaagaaattgatccaatctttgccaccaactttgaaggttaacagattatga

SEQ ID NO: 7827 - DNA, 723 bp, Saccharomyces cerevisiae
atgtcagggttcattaagagcacgttgcttggtctaggccaagattacttagaagatcaatatcaagagttcgcagaacagcatttccagccaaccagggatccgttttatgaaacgaataaagatggtaaaaagcaccgccgcagactgccatattattgcactaaggatgaaagtaaagcgtggaaaaaggtccaaaacaaagcctggctgcatgacaaatcactgtgcggatgctgttgctggacaaacactataggatgggcaccattacttgcacttctaccggttataggacccttattgatgtattgggtgcatgataagttgattgaattggcagatgacaggtataaattgcctgcggaaatcaaggtgaagatgcatggtaatatcgttatcgatttacttattagtttagttcctattctgggaagtgtttttgcatggttgcacgcatgttccacgagaaacgcagctatagtttacaattttgttggaaaaagggcattggaaagaaagcaagcggagctcatgcatcaaaaagaagaaaatgagaaacattccaatgccaatactgcacctccagtagttggtggcaacaaaaatgtgaatggaaacagaaataatagtaaaatgtataacagaccgcctgtgacagctccacctgcaccagcatacacgcgcagtactaacggtcgcccccaaagaggttacaggtga

SEQ ID NO: 7828 - DNA, 723 bp, Artificial Sequence
  Description of Artificial Sequence: Synthetic polynucleotide
atgagtgggttcattaagagcacgttgcttggtcttggccaagattacttagaagatcaatatcaagagttcgcagaacagcatttccagccaaccagggatccgttttatgaaacgaataaagatggtaaaaagcaccgccgcagattaccatattattgcactaaggatgaaagtaaagcgtggaaaaaggtccaaaacaaagcctggttacatgacaaatctttatgcggatgctgttgctggacaaacactataggatgggcaccattacttgcacttttgccggttataggacccttattgatgtattgggtgcatgataagttgattgaattggcagatgacaggtataaattgcctgcggaaatcaaggtgaagatgcatggtaatatcgttatcgatttacttattagtttagttcctattttaggaagtgtttttgcatggttgcacgcatgttccacgagaaacgcagctatagtttacaattttgttggaaaaagggcattggaaagaaagcaagcggagctcatgcatcaaaaagaagaaaatgagaaacattccaatgccaatactgcacctccagtagttggtggcaacaaaaatgtgaatggaaacagaaataatagtaaaatgtataacagaccgcctgtgacagctccacctgcaccagcatacacgcgcagtactaacggtcgcccccaaagaggttacaggtga

SEQ ID NO: 7829 - DNA, 261 bp, Saccharomyces cerevisiae
atgaccagaactagcaaatggacagtccacgaagcaaagtctaacccaaagtatttcacccataacggcaactttggggagtctcccaaccacgtcaagagaggaggctatgggaaaggcaattggggcaagcctggcgatgagattaatgacttaatcgattctggcgaaattaagacagtcttcaacaagaccagaaggggctctaactcccaaaacaatgaaagaaggctttctgatttgcaacaataccacatctaa

SEQ ID NO: 7830 - DNA, 261 bp, Artificial Sequence
  Description of Artificial Sequence: Synthetic polynucleotide
atgaccagaactagcaaatggacagtccacgaagcaaagtctaacccaaagtatttcacccataacggcaactttggggagtctcccaaccacgtcaagagaggaggctatgggaaaggcaattggggcaagcctggcgatgagattaatgacttaatcgattctggcgaaattaagacagtcttcaacaagaccagaaggggctctaactcccaaaacaatgaaagaaggctttctgatttgcaacaataccacatctga

SEQ ID NO: 7831 - DNA, 1206 bp, Saccharomyces cerevisiae
atggatcccacaagagctccggatttcaaaccgccatctgcagacgaggaattgattcctccacccgacccggaatctaaaattcccaaatctattccaattattccatacgtcttagccgatgcgaattcctctatagatgcaccttttaatattaagaggaagaaaaagcatcctaagcatcatcatcaccatcatcacagtcgtaaagaaggcaatgataaaaaacatcagcatattccattgaaccaagacgactttcaaccactttccgcagaagtgtcttccgaagatgatgacgcggattttagatccaaggagagatacggttcagattcaaccacagaatcagaaactagaggtgttcagaaatatcagattgctgatttagaagaagttccacatggaatcgttcgtcaagcaagaaccttggaagactacgaattcccctcacacagattatcgaaaaaattactggatccaaataaactgccgttagtaatagtagcatgtgggtctttttcaccaatcacctacttgcatctaagaatgtttgaaatggctttagatgcaatctctgaacaaacaaggtttgaagtcataggtggatattactcccctgttagtgataactatcaaaagcaaggcttggccccatcctaccatagagtacgtatgtgtgaattggcctgcgaaagaacctcatcttggttgatggtggatgcatgggagtcattgcaaccttcatacacaagaactgccaaggtcttggatcatttcaatcacgaaatcaatattaagagaggtggtgtagctactgttactggagaaaaaattggtgtgaaaataatgttgctggctggtggtgacctaatagagtcaatgggtgaaccaaacgtttgggcggacgccgatttacatcacattctcggtaattacggttgtttgattgtcgaacgtactggttctgatgtaaggtcttttttgttatcccatgatattatgtatgaacatagaaggaatattcttatcatcaagcaactcatctataatgatatttcttccacgaaagttcgtctatttatcagacgcgccatgtctgtacaatatttgttacctaattcggtcatcaggtatatccaagaacatagactatatgtggaccaaaccgaacctgttaagcaagttcttggaaacaaagaatga

SEQ ID NO: 7832 - DNA, 1206 bp, Artificial Sequence
  Description of Artificial Sequence: Synthetic polynucleotide
atggatcccacaagagctccggatttcaaaccgccatctgcagacgaggaattgattcctccacccgacccggaatctaaaattcccaaatctattccaattattccatacgtcttagccgatgcgaattcctctatagatgcaccttttaatattaagaggaagaaaaagcatcctaagcatcatcatcaccatcatcacagtcgtaaagaaggcaatgataaaaaacatcagcatattccattgaaccaagacgactttcaaccactttccgcagaagtgtcttccgaagatgatgacgcggattttagatccaaggagagatacggttctgattctaccacagaaagtgaaactagaggtgttcagaaatatcagattgctgatttagaagaagttccacatggaatcgttcgtcaagcaagaaccttggaagactacgaattcccctctcacagattatccaaaaaattattagatccaaataaattaccgttagtaatagtagcatgtgggtctttttctccaatcacctacttgcatttaagaatgtttgaaatggctttagatgcaatctctgaacaaacaaggtttgaagtcataggtggatattactcccctgttagtgataactatcaaaagcaaggcttggccccatcctaccatagagtacgtatgtgtgaattggcctgcgaaagaacctcttcttggttgatggtggatgcatgggagtctttgcaaccttcttacacaagaactgccaaggtcttggatcatttcaatcacgaaatcaatattaagagaggtggtgtagctactgttactggagaaaaaattggtgtgaaaataatgttgttggctggtggtgacttgatagagtccatgggtgaaccaaacgtttgggcggacgccgatttacatcacattctcggtaattacggttgtttgattgtcgaacgtactggttctgatgtaaggtcttttttgttatcccatgatattatgtatgaacatagaaggaatattcttatcatcaagcaactcatctataatgatatttcttccacgaaagttcgtttgtttatcagacgcgccatgtctgtacaatatttgttacctaattctgtcatcaggtatatccaagaacatagattatatgtggaccaaaccgaacctgttaagcaagttcttggaaacaaagaatga

SEQ ID NO: 7833 - DNA, 795 bp, Saccharomyces cerevisiae
atggcaagagatatcacatttttgaccgtatttttagaaagttgtggcgctgtaaataatgatgaggcaggaaaattgttatctgcttggacttcaaccgtacgcattgagggaccggaatcaaccgactctaattcattatatattccactgctaccacctggaatgttgaaaattaaactgaattttaaaatgaacgatcgattagttacggaagagcaagagttgtttacaaaattgcgcgagattgtaggttcaagtattcgcttttgggaggaacaactgttttatcaagttcaagatgtaagcaccatagaaaaccacgtcattctcagtttaaaatgtacaattttaacggatgctcagataagtacgttcataagcaaacccagagagcttcatacgcatgccaaaggatatcctgaaatctattacctttccgagttatcaacaactgtcaattttttttctaaagagggaaactatgtcgaaataagccaggttattcctcattttaatgaatatttttcctctttaatagtgtctcaattggaatttgaatacccgatggtcttctccatgatttcaaggctccgattgaagtggcaacaaagttcgctcgctccgatatcctacgccctaacgagcaattcagtacttcttccaataatgcttaacatgattgcccaagacaaatcttcaacaaccgcgtatcaaattctgtgtcgaagaagaggtcctccaattcagaattttcaaattttttccttaccggctgtaacgtacaataagtag

SEQ ID NO: 7834 - DNA, 795 bp, Artificial Sequence
  Description of Artificial Sequence: Synthetic polynucleotide
atggcaagagatatcacatttttgaccgtatttttagaaagttgtggcgctgtaaataatgatgaggcaggaaaattgttatctgcttggacttctaccgtacgcattgagggaccggaaagtaccgactctaattctttatatattccattgttaccacctggaatgttgaaaattaaattgaattttaaaatgaacgatagattagttacggaagagcaagagttgtttacaaaattgcgcgagattgtaggtagtagtattcgcttttgggaggaacaattattttatcaagttcaagatgtaagcaccatagaaaaccacgtcattctcagtttaaaatgtacaattttaacggatgctcagataagtacgttcataagcaaacccagagagcttcatacgcatgccaaaggatatcctgaaatctattacctttccgagttatctacaactgtcaattttttttctaaagagggaaactatgtcgaaataagccaggttattcctcattttaatgaatatttttcctctttaatagtgtctcaattggaatttgaatacccgatggtcttctccatgatttctaggctccgtttgaagtggcaacaaagtagcctcgctccgatatcctacgccttgacgagcaattctgtacttcttccaataatgcttaacatgattgcccaagacaaatcttctacaaccgcgtatcaaattctttgtagaagaagaggtcctccaattcagaattttcaaattttttccttaccggctgtaacgtacaataagtga

SEQ ID NO: 7835 - DNA, 2016 bp, Saccharomyces cerevisiae
atgtcttcagttgatgtactgttaacagtaggtaagttggatgcctcattggcgttactgactactcaggatcatcatgttattgagtttcctacagtattattaccagaaaatgttaaagctggatctatcataaaaatgcaagtttcacaaaatttagaggaggaaaaaaaacaaaggaatcattttaagagtatacaagccaaaattttggagaagtatggtacccataaaccggagagcccagttttgaaaattgttaacgttacgcaaacgagctgtgttctagcatgggatccattgaaacttggctcagcaaaattgaaatcactgatcctttataggaagggaatacgttcaatggtaattccaaatccattcaaagtgactaccacgaaaatatccggtctttccgttgatacgccatacgaatttcaattgaaactgataaccacgtcaggaacattatggtctgaaaaggttatattgcgtacacataagatgactgacatgtctggtatcactgtatgtttgggtccattggatccattgaaagaaatttcagacttacagatatcccaatgtttgtctcacatcggggcgagacctttacaacgtcatgttgcgatagatactacgcattttgtctgtaacgatctagacaatgaagaaagcaatgaagagcttataagggcaaaacataacaacataccaattgtcagaccggaatgggtgagagcttgtgaggttgagaaaagaatcgttggtgttagaggattttacttagatgcagatcaaagtatactgaaaaactacacattcccaccagttaatgaggaagaactttcgtactcaaaggagaatgagccggtagccgaagtagcggatgaaaataagatgcccgaggacacaacagatgtcgaacaggttgcatcacctaatgacaatgagagtaatccttcagaagctaaggaacaaggagaaaagagtggacatgaaactgccccagtaagtcctgtagaagatccattgcatgcttcgacggctttggagaatgaaaccaccatcgaaaccgtcaacccctccgtaagaagtttgaaaagcgaacctgttggtactcccaatatagaggaaaacaaagcggactcttccgcagaagccgtggtagaagaaccgaatgaagctgtggctgaaagttctccaaatgaagaagcaacgggacagaaaagtgaggataccgatacacattctaacgaacaagctgataatggatttgtacagactgaagaagtagctgaaaacaacataaccacagaaagtgcaggggaaaataacgaacctgcagatgatgcagcaatggaatttggacgtccagaagctgaaattgaaactccagaagtaaatgagtctatagaagatgccaatgaacctgcggaggattccaatgaacctgtggaggattccaacaaacctgtgaaggattccaacaaacctgtggaggattccaacaaacctgtggaggattccaacaaacctgtggaggattccaacaaacctgtggaggatgccaatgaacctgtggaagataccagtgaacctgtggaggatgccggtgaacccgtacaagaaaccaacgagtttactaccgacattgcctctccaagacatcaagaagaagatatagaacttgaagccgaacctaaagatgctaccgaaagtgttgcagtcgagccatccaatgaagatgtaaaaccagaagaaaaaggttcagaggcagaagacgatatcaacaacgtttccaaggaggctgcctctggtgagagtactacccaccaaaaaactgaggcctctgcttctcttgaaagcagtgccgtcacggaagaacaagagacaacggaagccgaagtaaatacagatgacgttttgtccactaaagaagctaaaaaaaatactggcaacagcaacagtaataagaagaagaataagaagaataagaagaaagggaaaaagaaatga

SEQ ID NO: 7836 - DNA, 2016 bp, Artificial Sequence
  Description of Artificial Sequence: Synthetic polynucleotide
atgtcttctgttgatgtattgttaacagtaggtaagttggatgcctctttggcgttattaactactcaggatcatcatgttattgagtttcctacagtattattaccagaaaatgttaaagctggatctatcataaaaatgcaagtttctcaaaatttagaggaggaaaaaaaacaaaggaatcattttaagagtatacaagccaaaattttggagaagtatggtacccataaaccggagagcccagttttgaaaattgttaacgttacgcaaacgagctgtgttttagcatgggatccattgaaacttggcagtgcaaaattgaaatctttgatcctttataggaagggaatacgttccatggtaattccaaatccattcaaagtgactaccacgaaaatatccggtctttccgttgatacgccatacgaatttcaattgaaattgataaccacgtctggaacattatggtctgaaaaggttatattgcgtacacataagatgactgacatgtctggtatcactgtatgtttgggtccattggatccattgaaagaaatttctgacttacagatatcccaatgtttgtctcacatcggggcgagacctttacaacgtcatgttgcgatagatactacgcattttgtctgtaacgatttggacaatgaagaaagcaatgaagagcttataagggcaaaacataacaacataccaattgtcagaccggaatgggtgagagcttgtgaggttgagaaaagaatcgttggtgttagaggattttacttagatgcagatcaaagtatattgaaaaactacacattcccaccagttaatgaggaagaactttcttactccaaggagaatgagccggtagccgaagtagcggatgaaaataagatgcccgaggacacaacagatgtcgaacaggttgcatctcctaatgacaatgagagtaatccttctgaagctaaggaacaaggagaaaagagtggacatgaaactgccccagtaagtcctgtagaagatccattgcatgcttccacggctttggagaatgaaaccaccatcgaaaccgtcaacccctccgtaagaagtttgaaaagcgaacctgttggtactcccaatatagaggaaaacaaagcggactcttccgcagaagccgtggtagaagaaccgaatgaagctgtggctgaaagttctccaaatgaagaagcaacgggacagaaaagtgaggataccgatacacattctaacgaacaagctgataatggatttgtacagactgaagaagtagctgaaaacaacataaccacagaaagtgcaggggaaaataacgaacctgcagatgatgcagcaatggaatttggacgtccagaagctgaaattgaaactccagaagtaaatgagtctatagaagatgccaatgaacctgcggaggattccaatgaacctgtggaggattccaacaaacctgtgaaggattccaacaaacctgtggaggattccaacaaacctgtggaggattccaacaaacctgtggaggattccaacaaacctgtggaggatgccaatgaacctgtggaagataccagtgaacctgtggaggatgccggtgaacccgtacaagaaaccaacgagtttactaccgacattgcctctccaagacatcaagaagaagatatagaacttgaagccgaacctaaagatgctaccgaaagtgttgcagtcgagccatccaatgaagatgtaaaaccagaagaaaaaggttctgaggcagaagacgatatcaacaacgtttccaaggaggctgcctctggtgagagtactacccaccaaaaaactgaggcctctgcttctcttgaaagcagtgccgtcacggaagaacaagagacaacggaagccgaagtaaatacagatgacgttttgtccactaaagaagctaaaaaaaatactggcaacagcaacagtaataagaagaagaataagaagaataagaagaaagggaaaaagaaatga

SEQ ID NO: 7837 - DNA, 378 bp, Saccharomyces cerevisiae
atggaaaaggatgaggaggatgaagaatctgaagaagcagaggaagagctgctggtgcttgaatctgatgagaaactgaatgatgtgaacgatatggaggcaatgctggtagacgaactcgtatgtgacacgagggacctacttgatgtcgatgaagtaagggaagatgagtcagcacttgaggaagaaaccatactggatgacaaaatggaacttgaagaactaactctacttacggaagaacgtgcagtagatactgctgaagaattcgaagatgatgattgcacgaaaaattgtgcgcgtatcgtcgatatgcatgacagtattaaaagtaataagcggaaactattcttggttgtgaaagacaacatactatga

SEQ ID NO: 7838 - DNA, 378 bp, Artificial Sequence
  Description of Artificial Sequence: Synthetic polynucleotide
atggaaaaggatgaggaggatgaagaatctgaagaagcagaggaagagttattggtgcttgaatctgatgagaaattgaatgatgtgaacgatatggaggcaatgttggtagacgaactcgtatgtgacacgagggacttacttgatgtcgatgaagtaagggaagatgagtctgcacttgaggaagaaaccatattggatgacaaaatggaacttgaagaattgactttacttacggaagaacgtgcagtagatactgctgaagaattcgaagatgatgattgcacgaaaaattgtgcgcgtatcgtcgatatgcatgacagtattaaaagtaataagagaaaattattcttggttgtgaaagacaacatattatga

SEQ ID NO: 7839 - DNA, 1131 bp, Saccharomyces cerevisiae
atgttgtctttcacaaccaagaatagtttccgcttattacttttaatactgtcatgcatatcgacgatacgcgcacaatttttcgtgcaatcatcatcttcgaattcttcagcagtatctactgcacgttcttccgtaagtagagttagttcttcaagttccattttgtcatccagtatggtttcttcctcaagtgctgactcatcttcccttacttcatcgacatcaagtaggtccctcgtgtcacatacgagttcgtctaccagcattgcctccatatcgttcacatcattcagtttctcatcagattcaagcaccagcagctcttcctctgcttcttcagattcttcatcctcctcatccttttccatctcttcgacatccgcaacttctgaatcatcgacgtcttctacgcaaacgtcaacatcatcttcatcctcactgtcgtcaacgccgtcctcttcatcatccccatcaacaatcacttctgcaccttcaacctcctccacaccatccactactgcctataatcaaggaagcactatcaccagtattattaacggtaagacgattctctcaaatcattatactaccgttacgtacacaccatcagcaaccgctgattcaagcaataaatccaaaagttcgggtctttctaaaaaaaatagaaacatcgtcattggttgtgtggttggtattggtgtaccactgattctggtgatactggctttaatttacatgttttgtatccaatcatcaaggacggactttattgactcagatggtaaggtcgttacggcatatagagctaacaaatttacgaaatggtggtatatgcttttgggtaagaaagttagtgatgaataccactccgattcaccattaggtggtagtgcatcgtccgcaggtggtttagacctagatgaagcagatgatgtgatggagcaaagctcccttttcgacgtcagaataagagatagcgatagcgtattaccaaacgccaacaccgccgaccataataataccaatagcggtggagagcctataaatagtagcgttgcgtcaaatgacataatagaagaaaaattctatgatgaacaaggtaacgaattatcaccacgaaattattaa

SEQ ID NO: 7840 - DNA, 1131 bp, Artificial Sequence
  Description of Artificial Sequence: Synthetic polynucleotide
atgttgtctttcacaaccaagaatagtttccgcttattacttttaatattaagttgcatatctacgatacgcgcacaatttttcgtgcaatcttcttcttccaattcttctgcagtatctactgcacgttcttccgtaagtagagttagttcttccagttccattttgtcttccagtatggtttcttcctccagtgctgactcttcttcccttacttcttctacatctagtaggtccctcgtgtctcatacgagttcttctaccagcattgcctccatatctttcacatctttcagtttctcttctgattctagcaccagcagctcttcctctgcttcttctgattcttcttcctcctcctccttttccatctcttctacatccgcaacttctgaaagttccacgtcttctacgcaaacgagtacatcttcttcttcctctttatcttctacgccgtcctcttcttcttccccatctacaatcacttctgcaccttctacctcctccacaccatccactactgcctataatcaaggaagcactatcaccagtattattaacggtaagacgattctctctaatcattatactaccgttacgtacacaccatctgcaaccgctgattctagcaataaatccaaaagttctggtctttctaaaaaaaatagaaacatcgtcattggttgtgtggttggtattggtgtaccattgattttggtgatattggctttaatttacatgttttgtatccaatcttccaggacggactttattgacagtgatggtaaggtcgttacggcatatagagctaacaaatttacgaaatggtggtatatgcttttgggtaagaaagttagtgatgaataccactccgattctccattaggtggtagtgcatcttccgcaggtggtttagacttggatgaagcagatgatgtgatggagcaaagctcccttttcgacgtcagaataagagatagcgatagcgtattaccaaacgccaacaccgccgaccataataataccaatagcggtggagagcctataaatagtagcgttgcgtctaatgacataatagaagaaaaattctatgatgaacaaggtaacgaattatctccaagaaattattga

SEQ ID NO: 7841 - DNA, 327 bp, Saccharomyces cerevisiae
atgcctccaaagcaacaattgtctaaagctgccaaagccgctgccgctcttgctggtggtaagaagtccaagaagaagtggtccaaaaagtccatgaaggacagagctcaacacgctgttattttggatcaagaaaaatacgacagaatcttgaaggaggttccaacttacagatacgtctctgtttccgttttggttgatagattaaagattggtggttctcttgccagaattgctttgaggcacttggaaaaggaaggtatcatcaagccaatctcgaagcattccaagcaagctatctataccagagctgctgcttccgaataa

SEQ ID NO: 7842 - DNA, 327 bp, Artificial Sequence
  Description of Artificial Sequence: Synthetic polynucleotide
atgcctccaaagcaacaattgtctaaagctgccaaagccgctgccgctcttgctggtggtaagaagtccaagaagaagtggtccaaaaagtccatgaaggacagagctcaacacgctgttattttggatcaagaaaaatacgacagaatcttgaaggaggttccaacttacagatacgtctctgtttccgttttggttgatagattaaagattggtggttctcttgccagaattgctttgaggcacttggaaaaggaaggtatcatcaagccaatctccaagcattccaagcaagctatctataccagagctgctgcttccgaatga

SEQ ID NO: 7843 - DNA, 2163 bp, Saccharomyces cerevisiae
atggccaaaagagttgccgatgcgcaaatacagagagaaacgtacgattctaacgagtctgacgatgacgtgactccctccactaaggttgcgtcatctgctgtgatgaatagaagaaaaattgccatgccaaagcgcaggatggcgttcaaaccttttggttctgcaaaatcggatgaaaccaagcaggctagttcctttagcttcctgaaccgggcggacggcactggagaagctcaggttgataatagccctaccacagaaagcaattccagactaaaagcattgaacctccagttcaaggctaaggttgatgacttagttctaggcaagccgttagcggacttgaggccccttttcaccaggtacgaattatacataaagaatatcttagaagctcccgtgaaatctatcgagaatccaacgcagacaaagggaaatgatgctaaacctgccaaagtagaagatgtccaaaaaagttccgattcttcatctgaagatgaggttaaggtggagggacccaagttcacaatagatgctaaaccgcctatttcagattccgttttctcatttggcccaaaaaaagaaaatcgcaagaaagatgaaagtgatagcgaaaacgatatagaaatcaagggccctgaatttaaattttctggaactgtatcaagtgatgtatttaagctgaatccaagcaccgataaaaatgaaaagaaaaccgagactaatgctaaaccattttcattttcttcggccacttcaactactgaacaaacgaagagtaaaaatcccctttcattgacagaagctaccaagaccaatgtggacaacaacagtaaagccgaggcttccttcacttttggaacaaaacatgctgcggattctcaaaataataaaccatcttttgtatttggtcaagcagctgcaaaaccatcgctagaaaagagctcattcacgtttggttcaacaacaattgaaaaaaaaaatgacgaaaactcaacctctaactcaaaacctgaaaagtctagtgatagcaatgattcaaacccatctttttccttttccatacccagtaagaatacacctgatgcatctaagccatcttttagttttggggtcccaaactcttccaaaaacgaaacttcaaaaccggtattttcgtttggtgcagcaacaccatcggccaaagaagctagtcaggaagatgacaacaacaacgttgaaaaaccttcctctaagcctgccttcaatttaatatctaacgctggtaccgagaaagagaaggaaagtaaaaaggactcaaagccagctttttcatttggcatatcaaacggaagtgaaagcaaagactctgacaaaccctctttaccctctgcggttgatggtgaaaatgacaagaaagaagcaacaaaacctgctttttcgtttggaataaatacaaatactactaaaaccgcggatactaaagctccaacttttacatttggctcctctgcactcgctgacaataaagaggatgttaagaaacctttttcattcggtacctcccagcctaataatactccatccttctcattcggaaaaacaacagcaaacttgcctgctaattcttcaacatctcctgctccctctataccatcgacggggttcaaattttctttgccatttgaacaaaaaggtagtcaaacaactacaaatgatagcaaggaagaatcaacaacagaagcaactggaaatgagtcgcaagatgcaaccaaagtagatgctaccccagaagaatcaaagccaataaacttgcaaaacggtgaggaagacgaagtggctttattttcgcaaaaagcaaaattaatgacattcaatgctgaaaccaaatcgtacgattcaagaggcgtaggcgaaatgaagcttttgaagaaaaaggacgatccttctaaagtgcgcctactttgtaggtctgacggtatgggtaatgtattactaaatgcaactgttgtagactccttcaaatatgagcctttagctcccggaaatgataatctcattaaagctcctactgttgcggctgatgggaaacttgtaacttatatcgtcaagtttaagcagaaggaagaaggccgctcatttacgaaagctattgaagatgctaaaaaagaaatgaaataa

SEQ ID NO: 7844 - DNA, 2163 bp, Artificial Sequence
  Description of Artificial Sequence: Synthetic polynucleotide
atggccaaaagagttgccgatgcgcaaatacagagagaaacgtacgattctaacgagtctgacgatgacgtgactccctccactaaggttgcgtcttctgctgtgatgaatagaagaaaaattgccatgccaaagcgcaggatggcgttcaaaccttttggttctgcaaaatctgatgaaaccaagcaggctagttcctttagcttcttgaacagggcggacggcactggagaagctcaggttgataatagccctaccacagaaagcaattccagattgaaagcattgaacctccagttcaaggctaaggttgatgacttagttttaggcaagccgttagcggacttgaggccccttttcaccaggtacgaattatacataaagaatatcttagaagctcccgtgaaatctatcgagaatccaacgcagacaaagggaaatgatgctaaacctgccaaagtagaagatgtccaaaaaagttccgattcttcttctgaagatgaggttaaggtggagggacccaagttcacaatagatgctaaaccgcctatttctgattccgttttctcctttggcccaaaaaaagaaaatcgcaagaaagatgaaagtgatagcgaaaacgatatagaaatcaagggccctgaatttaaattttctggaactgtatctagtgatgtatttaagttgaatccaagcaccgataaaaatgaaaagaaaaccgagactaatgctaaaccattttctttttcttctgccacttctactactgaacaaacgaagagtaaaaatcccctttctttgacagaagctaccaagaccaatgtggacaacaacagtaaagccgaggcttccttcacttttggaacaaaacatgctgcggattctcaaaataataaaccatcttttgtatttggtcaagcagctgcaaaaccatctttggaaaagagctctttcacgtttggttctacaacaattgaaaaaaaaaatgacgaaaactctacctctaactccaaacctgaaaagtctagtgatagcaatgattccaacccatctttttccttttccatacccagtaagaatacacctgatgcatctaagccatcttttagttttggggtcccaaactcttccaaaaacgaaacttctaaaccggtattttcttttggtgcagcaacaccatctgccaaagaagctagtcaggaagatgacaacaacaacgttgaaaaaccttcctctaagcctgccttcaatttaatatctaacgctggtaccgagaaagagaaggaaagtaaaaaggactccaagccagctttttcttttggcataagcaacggaagtgaaagcaaagactctgacaaaccctctttaccctctgcggttgatggtgaaaatgacaagaaagaagcaacaaaacctgctttttcttttggaataaatacaaatactactaaaaccgcggatactaaagctccaacttttacatttggctcctctgcactcgctgacaataaagaggatgttaagaaacctttttctttcggtacctcccagcctaataatactccatccttcagtttcggaaaaacaacagcaaacttgcctgctaattcttctacatctcctgctccctctataccatctacggggttcaaattttctttgccatttgaacaaaaaggtagtcaaacaactacaaatgatagcaaggaagaatctacaacagaagcaactggaaatgagtctcaagatgcaaccaaagtagatgctaccccagaagaatccaagccaataaacttgcaaaacggtgaggaagacgaagtggctttattttctcaaaaagcaaaattaatgacattcaatgctgaaaccaaatcttacgattccagaggcgtaggcgaaatgaagcttttgaagaaaaaggacgatccttctaaagtgcgcttactttgtaggtctgacggtatgggtaatgtattattgaatgcaactgttgtagactccttcaaatatgagcctttagctcccggaaatgataatctcattaaagctcctactgttgcggctgatgggaaacttgtaacttatatcgtcaagtttaagcagaaggaagaaggccgctcctttacgaaagctattgaagatgctaaaaaagaaatgaaatga

SEQ ID NO: 7845 - DNA, 2700 bp, Saccharomyces cerevisiae
atgcaaaaaacagatggtattagaattccaggcgttattttggacgagttgaagactcttgactacagtcaagatgaaaggttttctatttcagaaggaaaaaagagaagacgaggaaatggcaaacatttaagccgtaaagaaaagagaaagatggaacgggccgacaagaaacgtaaaattatatcaactagagaaatcaattccagccggctaaaatcagcaccaacgtccgaaaagaggagtgctaatgcaggtgtgaaaaacgtaggcaagcaggctaacggtaaaaatccgatttcttcagatgaatcagaaagtaatgaaaactgggatagtgacgaagtgcttactgatgaagtagcagaagaaagcggtgagcaggcaatgtctgcggaagaaacaatgaaaaaactagaatcattgaaacggaaagcaaagggtatacaaggagctgaaaactcgggagaaataaaaggtaactcatatgaaaagaaacatattcgtaacagagatacaaatgagaattttgtgagttatccgctggccccttcagacagatcagcgtttgaaagggacgagatggacatgcaatattacgcaaaaaagttgggcttgaaaggagaaaggaaggctatacatgcaaaagatgaatttgatgctattggtggacttcttgaaggtttggaatactttgaaaattatggcaaaagtgacgaagagtatggagattttgccacagaaactaattctatgagaaaagatgatgaagcaagcgagaaagcattttcctcggatgatgatctttcagcttctgattttgaagactcagatgggcttagtgaatctgataacgacagcgttgcggactcggatgataattatagaagagaaaaggaaaatccctatgtagctcccacacaatctgtagagagctatgttcccccatcactgagaaagaaattggatgatagtgaaaacaatagtactttgtctgaaattagcaagaaggtcaactcctctttgaataagctttcagactccaatattactattattatcactgatttaaacagattgtatgattccctgcctaggcagtacgttacagaatcgttaacgaaagggatattgaatattataagccaaaatcagaagttgttggacggatttataatgaattatgctgctcttgcgtatacattatcaaaactaagaggtattgaggtgggtgcttttttcattcaaaaaacggtagaggcatttctgcatcattacgaagaggaaatggaaaatatattaaaggatcagcagagcaaaatttcctctaaaatatgcatcaatattgcaaccttactatcgtattgttataattttggatttgtttcgtgtcgcttaatctatgacattattcgaatatttgtagcagatcctaatgaattcactactgagttacttttacgaattatatcgatttcaggacaactgatccggggtgatgatccatccgccctgagagatatacgatcagaactgttgaagaacgccaagaatttaaaagagcagagcccaagattgagatttttaatggataccatgtctgacttgaaaaacaacaggttaaagccttctattttggcgactgatcatcatccattaaagaaaaacttgcaaagcattttgaattcttcttcttcttgggagcctttacaggtttctctggaagacattaaaaacattgattccaaggggaaatggtggctggttggtgcttcttggcgaggaaacatggaaaatgcttttgaagtttcgatcaataatgaaaatgatgccagcaagtccaagaaatctaaaatttcaatcgaggatgatcttcttgatgatattccagattggaatattatcgccagacaacagcgtatgaatactgacattcgaagggctatatttataagtattatgtctgcacaagattacctggatgcatttagtaaacttgaaaagttaagcttgaaaaataagcaagttcttgaaattccaagaattgttttacattgtcttttggctgatagtggatccaatggttataatcattactacgcattggtcgcgaacaaaatatgtgaaaggtatagccatttatcgaagtcgtttcaattcctattctgggatgtgataaaaaaatttgaagacaaagaattcgattctgaaagcgatactgacgaagaagatgatttagatgataaagaaaaactgcttcgcatctcaaatcaggggagattttttggatcgttgcttgctaatgacattttgaaattagatgttttcaagcatgttccatttatgggtggattaaacacagaagggatgttatttatggagatattgctatttcagttatttttaactgtagctaaaaaaagtgagaagaaactcaagatggatgaaagtggaaataagcgtataatctactccgatgattatttgcgcgatgttttaacgaagaacgttaaatcggaaaatatgctattcattctcaaaggtttgaagtggtttattaacaagaaatttagataccataatttccttgcaggaaagaaaggagataaagcttttgatagggatgaaagaagattggcttgggcttcaaaagctgccaaatctattatagacaaagaactggaaaatatagattcgtag

SEQ ID NO: 7846 - DNA, 2700 bp, Artificial Sequence
  Description of Artificial Sequence: Synthetic polynucleotide
atgcaaaaaacagatggtattagaattccaggcgttattttggacgagttgaagactcttgactacagtcaagatgaaaggttttctatttctgaaggaaaaaagagaagaagaggaaatggcaaacatttaagccgtaaagaaaagagaaagatggaaagagccgacaagaaacgtaaaattatatctactagagaaatcaattccagcaggttgaaatctgcaccaacgtccgaaaagaggagtgctaatgcaggtgtgaaaaacgtaggcaagcaggctaacggtaaaaatccgatttcttctgatgaaagtgaaagtaatgaaaactgggatagtgacgaagtgcttactgatgaagtagcagaagaaagcggtgagcaggcaatgtctgcggaagaaacaatgaaaaaattagaatctttgaaaagaaaagcaaagggtatacaaggagctgaaaactctggagaaataaaaggtaacagttatgaaaagaaacatattcgtaacagagatacaaatgagaattttgtgagttatccgttagccccttctgacagatctgcgtttgaaagggacgagatggacatgcaatattacgcaaaaaagttgggcttgaaaggagaaaggaaggctatacatgcaaaagatgaatttgatgctattggtggacttcttgaaggtttggaatactttgaaaattatggcaaaagtgacgaagagtatggagattttgccacagaaactaattctatgagaaaagatgatgaagcaagcgagaaagcattttccagtgatgatgatctttctgcttctgattttgaagacagtgatgggcttagtgaatctgataacgacagcgttgcggacagtgatgataattatagaagagaaaaggaaaatccctatgtagctcccacacaatctgtagagagctatgttcccccatctttgagaaagaaattggatgatagtgaaaacaatagtactttgtctgaaattagcaagaaggtcaactcctctttgaataagctttctgactccaatattactattattatcactgatttaaacagattgtatgattccttacctaggcagtacgttacagaatctttaacgaaagggatattgaatattataagccaaaatcagaagttgttggacggatttataatgaattatgctgctcttgcgtatacattatccaaattgagaggtattgaggtgggtgcttttttcattcaaaaaacggtagaggcatttttacatcattacgaagaggaaatggaaaatatattaaaggatcagcagagcaaaatttcctctaaaatatgcatcaatattgcaaccttattatcttattgttataattttggatttgtttcttgtcgcttaatctatgacattattagaatatttgtagcagatcctaatgaattcactactgagttacttttaagaattatatctatttctggacaattgatcagaggtgatgatccatccgccttgagagatataagaagtgaattattgaagaacgccaagaatttaaaagagcagagcccaagattgagatttttaatggataccatgtctgacttgaaaaacaacaggttaaagccttctattttggcgactgatcatcatccattaaagaaaaacttgcaaagcattttgaattcttcttcttcttgggagcctttacaggtttctttggaagacattaaaaacattgattccaaggggaaatggtggttagttggtgcttcttggagaggaaacatggaaaatgcttttgaagtttccatcaataatgaaaatgatgccagcaagtccaagaaatctaaaatttccatcgaggatgatcttcttgatgatattccagattggaatattatcgccagacaacagcgtatgaatactgacattagaagggctatatttataagtattatgtctgcacaagattacttggatgcatttagtaaacttgaaaagttaagcttgaaaaataagcaagttcttgaaattccaagaattgttttacattgtcttttggctgatagtggatccaatggttataatcattactacgcattggtcgcgaacaaaatatgtgaaaggtatagccatttatccaagagctttcaattccttttctgggatgtgataaaaaaatttgaagacaaagaattcgattctgaaagcgatactgacgaagaagatgatttagatgataaagaaaaattacttcgcatctctaatcaggggagattttttggatctttgcttgctaatgacattttgaaattagatgttttcaagcatgttccatttatgggtggattaaacacagaagggatgttatttatggagatattgttatttcagttatttttaactgtagctaaaaaaagtgagaagaaactcaagatggatgaaagtggaaataagcgtataatctactccgatgattatttgcgcgatgttttaacgaagaacgttaaaagtgaaaatatgcttttcattctcaaaggtttgaagtggtttattaacaagaaatttagataccataatttccttgcaggaaagaaaggagataaagcttttgatagggatgaaagaagattggcttgggcttccaaagctgccaaatctattatagacaaagaattggaaaatatagatagttga

SEQ ID NO: 7847 - DNA, 2454 bp, Saccharomyces cerevisiae
atggcaggtgctccagctcctcctcctccaccgcctccaccagcattaggtggtagtgctcctaaaccggcaaaatctgtgatgcagggccgtgacgccctgttaggtgacattagaaagggaatgaaactaaagaaagctgagaccaatgatagaagtgccccaatcgtgggaggtggtgtcgtttcatcggcctcaggaagttctggtaccgtcagtagtaaaggaccctctatgtcagctcctccaatccctgggatgggcgctccgcagttgggcgatattttagctggaggtataccgaagttaaaacatatcaataacaatgcaagcactaaaccctctccatcggcgagcgcaccgccaattccgggcgcggtgccatctgttgcggctccccccattcctaatgcaccattatcaccagcacccgctgttcctagtattccctcgtcttctgcacctccaattcctgatattccatcttctgcggcccctcctattcccattgtaccatcatctccagcaccaccgcttccattatcaggtgcctctgctccaaaggtaccgcaaaatagaccgcatatgccttcagtaaggccagcacacagaagccaccaaagaaaaagctctaatatttctcttcctagtgtgtcagcaccccctttgccttcagcgtctctgccaacacatgttagcaaccctccacaagctccaccccctcccccaactccaacaattggcctggactcaaaaaacattaaacctacagataacgcagtctcaccaccatcttctgaagttcctgcaggcgggttgccatttttggcagaaattaatgccaggaggtctgaacgaggagccgtcgagggcgtttcttccacaaagattcaaaccgaaaatcataaatctccttcacaaccaccacttccatcatctgctccgcccattcctacatcacatgctccgccattaccgcctactgcaccacctccaccatcgttaccaaatgtgacctctgcacctaaaaaagcaacttcagctccagctccgcctccaccaccactaccagcagccatgagctctgcgtcgactaacagcgtaaaagcaaccccggttcccccaactttagcaccaccgttaccaaatactacatcagttcctcctaacaaagcatcgtcaatgcccgcgccaccacctcctcctcccccaccacctggtgctttttcaacatcctctgccttgtcagcatcatctattcctttagcaccactaccacctcctcctcctccttcggttgcaacgtcagtaccatcggctcctcctcctcctccaacactcacgacaaacaaaccctcagcgtccagtaagcaatccaaaatatcttcatccagttcttcctcggccgtaacacctgggggacccttaccatttcttgctgagatccaaaagaagagagatgatagattcgtggttggtggtgatactggatacactacccaagataaacaagaggatgtaataggttcatctaaggatgataacgtaagaccttctcctatttctccatctataaacccgcctaaacagagtagccaaaatggtatgtcgtttctggatgaaattgaatccaaattacataagcaaacatcatcgaatgcttttaacgcaccacccccccatacggatgctatggcgcctcctttgcctcctagtgcacctcctcctcctataacatcgctaccgactccaactgcatcaggtgatgaccacaccaatgataagagtgagactgtgttagggatgaaaaaagcaaaggcccctgcactgcctggacacgttccacctccaccagttccaccagttttatcagatgatagcaagaataatgtccccgccgcttctttattacacgatgttcttccctcctcgaatctcgaaaaacctccttctcctcctgttgcagctgctccgccattgccaacatttagtgcaccaagtctgcctcagcaatccgtgtctacatcaataccatcacctcctcctgttgcgcctacactttccgttcgtaccgaaactgaatcaatttcgaagaaccccactaagtcgccacccccaccaccaagtccatctacgatggataccggtacctctaatagccccagtaaaaaccttaaacaacggttattttctacaggtggatcgacgctgcaacacaagcataatacgcatacaaatcaaccagatgttgatgtaggtaggtatacgatagggggatcgaattctatcgttggggccaaatctggaaatgaaagaattgttatagatgattcaagatttaaatggactaatgtgtcacaaatgcctaagccacgtccctttcaaaataaaacaaaactgtatccaagtggaaagggtagtagtgtgccattggacttaacattatttacgtga

SEQ ID NO: 7848 - DNA, 2454 bp, Artificial Sequence
  Description of Artificial Sequence: Synthetic polynucleotide
atggcaggtgctccagctcctcctcctccaccgcctccaccagcattaggtggtagtgctcctaaaccggcaaaatctgtgatgcagggccgtgacgccttattaggtgacattagaaagggaatgaaattgaagaaagctgagaccaatgatagaagtgccccaatcgtgggaggtggtgtcgtttcttctgccagtggaagttctggtaccgtcagtagtaaaggaccctctatgtctgctcctccaatccctgggatgggcgctccgcagttgggcgatattttagctggaggtataccgaagttaaaacatatcaataacaatgcaagcactaaaccctctccatctgcgagcgcaccgccaattccgggcgcggtgccatctgttgcggctccccccattcctaatgcaccattatctccagcacccgctgttcctagtattccctcttcttctgcacctccaattcctgatattccatcttctgcggcccctcctattcccattgtaccatcttctccagcaccaccgcttccattatctggtgcctctgctccaaaggtaccgcaaaatagaccgcatatgccttctgtaaggccagcacacagaagccaccaaagaaaaagctctaatatttctcttcctagtgtgagcgcaccccctttgccttctgcgtctttaccaacacatgttagcaaccctccacaagctccaccccctcccccaactccaacaattggccttgactctaaaaacattaaacctacagataacgcagtctctccaccatcttctgaagttcctgcaggcgggttgccatttttggcagaaattaatgccaggaggtctgaaagaggagccgtcgagggcgtttcttccacaaagattcaaaccgaaaatcataaatctccttctcaaccaccacttccatcttctgctccgcccattcctacatctcatgctccgccattaccgcctactgcaccacctccaccatctttaccaaatgtgacctctgcacctaaaaaagcaactagtgctccagctccgcctccaccaccattaccagcagccatgagctctgcgtctactaacagcgtaaaagcaaccccggttcccccaactttagcaccaccgttaccaaatactacatctgttcctcctaacaaagcatcttctatgcccgcgccaccacctcctcctcccccaccacctggtgctttttctacatcctctgccttgagtgcatcttctattcctttagcaccattaccacctcctcctcctccttctgttgcaacgtctgtaccatctgctcctcctcctcctccaacactcacgacaaacaaaccctctgcgtccagtaagcaatccaaaatatcttcttccagttcttcctctgccgtaacacctgggggacccttaccatttcttgctgagatccaaaagaagagagatgatagattcgtggttggtggtgatactggatacactacccaagataaacaagaggatgtaataggttcttctaaggatgataacgtaagaccttctcctatttctccatctataaacccgcctaaacagagtagccaaaatggtatgagttttttggatgaaattgaatccaaattacataagcaaacatcttccaatgcttttaacgcaccacccccccatacggatgctatggcgcctcctttgcctcctagtgcacctcctcctcctataacatctttaccgactccaactgcatctggtgatgaccacaccaatgataagagtgagactgtgttagggatgaaaaaagcaaaggcccctgcattacctggacacgttccacctccaccagttccaccagttttaagtgatgatagcaagaataatgtccccgccgcttctttattacacgatgttcttccctcctctaatctcgaaaaacctccttctcctcctgttgcagctgctccgccattgccaacatttagtgcaccaagtttacctcagcaatccgtgtctacatctataccatctcctcctcctgttgcgcctacactttccgttcgtaccgaaactgaaagtatttccaagaaccccactaagtctccacccccaccaccaagtccatctacgatggataccggtacctctaatagccccagtaaaaaccttaaacaaagattattttctacaggtggaagtacgttacaacacaagcataatacgcatacaaatcaaccagatgttgatgtaggtaggtatacgatagggggaagtaattctatcgttggggccaaatctggaaatgaaagaattgttatagatgattccagatttaaatggactaatgtgagtcaaatgcctaagccacgtccctttcaaaataaaacaaaactttatccaagtggaaagggtagtagtgtgccattggacttaacattatttacgtga

SEQ ID NO: 7849 - DNA, 939 bp, Saccharomyces cerevisiae
atgggaggcattcgtgaaaagaaagctgaatactttgctaaattaagagaatacttggaagaatacaagtctttgttcgttgttggtgttgacaatgtttcttcccaacaaatgcacgaagtcagaaaggaattgagaggcagagctgtcgtcttgatgggtaagaacaccatggttagaagagccatcagaggtttcttatccgacttgccagacttcgaaaagttgttgccttttgtcaaaggtaacgttggtttcgttttcactaacgaaccattgactgaaatcaagaacgttattgtctctaacagagttgctgctccagccagagctggtgccgttgctccagaagacatctgggttagagccgtcaacactggtatggaaccaggtaagacttctttcttccaagctttgggtgtcccaaccaagattgccagaggtaccattgaaattgtttctgatgtcaaggtcgttgacgccggtaacaaggtcggtcaatctgaagcttccttgttgaacttgttgaacatctctccattcactttcggtttgactgttgttcaagtttacgacaacggtcaagtgttcccatcttctatcttggatatcaccgatgaagaattggtttctcacttcgtttccgctgtcagcaccattgcttctatctctttggctattggttacccaaccttgccatctgtcggtcacactttgatcaacaactacaaggacttgttagctgttgccattgctgcttcctaccactaccctgaaattgaagatttggttgacagaattgaaaacccagaaaagtacgctgctgctgctccagctgctacctccgctgcttccggtgacgctgctccagctgaagaagctgctgctgaagaagaagaagaatctgatgacgacatgggtttcggtttattcgattaa

SEQ ID NO: 7850 - DNA, 939 bp, Artificial Sequence
  Description of Artificial Sequence: Synthetic polynucleotide
atgggaggcattcgtgaaaagaaagctgaatactttgctaaattaagagaatacttggaagaatacaagtctttgttcgttgttggtgttgacaatgtttcttcccaacaaatgcacgaagtcagaaaggaattgagaggcagagctgtcgtcttgatgggtaagaacaccatggttagaagagccatcagaggtttcttatccgacttgccagacttcgaaaagttgttgccttttgtcaaaggtaacgttggtttcgttttcactaacgaaccattgactgaaatcaagaacgttattgtctctaacagagttgctgctccagccagagctggtgccgttgctccagaagacatctgggttagagccgtcaacactggtatggaaccaggtaagacttctttcttccaagctttgggtgtcccaaccaagattgccagaggtaccattgaaattgtttctgatgtcaaggtcgttgacgccggtaacaaggtcggtcaatctgaagcttccttgttgaacttgttgaacatctctccattcactttcggtttgactgttgttcaagtttacgacaacggtcaagtgttcccatcttctatcttggatatcaccgatgaagaattggtttctcacttcgtttccgctgtcagcaccattgcttctatctctttggctattggttacccaaccttgccatctgtcggtcacactttgatcaacaactacaaggacttgttagctgttgccattgctgcttcctaccactaccctgaaattgaagatttggttgacagaattgaaaacccagaaaagtacgctgctgctgctccagctgctacctccgctgcttccggtgacgctgctccagctgaagaagctgctgctgaagaagaagaagaatctgatgacgacatgggtttcggtttattcgattga

SEQ ID NO: 7851 - DNA, 1434 bp, Saccharomyces cerevisiae
atgtttcgaaggggagataattcaaattttaacgtacaaaatagcttctttcttcctttggaatacgaatataccgtaaaagataatgtaccttcaaaaaaaaagagtagtataggtttttttccattagatgattctttattcacatcaaaaaacaattcagggcaccataaaagcgaacagctccatcgcggtaatgcagaaactatcagaagccagtttggaactgacgcagttccgataaggatcgatgagaaagaaggaaagtgggatagaattcaagatgataattcttctaatttaaactaccaaattaacaacagtaatgacccagcttcgagtggtaaatatacccagagtattgactgtaaccatatagcggagtcaaaattttcaaaaaaaaatggaaacattgatagtcttcgttcaaactcagcaacttttatgctaaatactgcagatgaagacgtgatagaatttagttttgacgataatgtcccttatgctgagttattatctggtgccacccttgaaaaatgttcgttgactctaaatgaaataaacaaaaaactattcaatacgctctatgactttcgagtaagcaaagataatcccgaagaaaatttggtagaactaatacttccgaactgcgtggtgttattaaacttttttgaagacattgaactcttggccgactcttctgatgaggctttcgaaaaatctactttcattaacacaattgagttcattgtgcacgatatttgggtcgaaacgttgataaagaacataaacttattacaaatgtttgatgcagatttgaaatgctacaatgacaagtacataatttgcaagctaaagggtcagtatccctccacaaatatagtggacataatgtgccgtttgaagcatttttccaattctattttggaaactttcaaattcggaatcgagctaaaagaacaagatcaatgccacaatagaaacactattatcaactacgttcttttcagtagagtattttcaacgattgttttagagattcaaaaatgctttatcttgatcgttaagttcatgtattctgtcaattttttagaaaaattttccgatgaagtatttttgtcatttattgaaattctcataaaaattgtctttgagcaccagattccgcagttatttttgggaattgatgaaattattcaactctggttaaagaacaatgaaggaaaacggcaacaactcttgagcgcttggtgcaacggaactgttcaagatatgaagcaaagccaacaaagagagtcctcaaacgcagaatctgaatcaatcacttcaagtacagaagaggacgaagaaggcctccaattcaataaatgggatgtgattgaaccatttattgataatatcaaggctttgaatcaatcaaaatcccatatgtga

SEQ ID NO: 7852 - DNA, 1434 bp, Artificial Sequence
  Description of Artificial Sequence: Synthetic polynucleotide
atgtttagaaggggagataatagtaattttaacgtacaaaatagcttctttcttcctttggaatacgaatataccgtaaaagataatgtaccttccaaaaaaaagagtagtataggtttttttccattagatgattctttattcacaagtaaaaacaatagtgggcaccataaaagcgaacagctccatcgcggtaatgcagaaactatcagaagccagtttggaactgacgcagttccgataaggatcgatgagaaagaaggaaagtgggatagaattcaagatgataattcttctaatttaaactaccaaattaacaacagtaatgacccagcttccagtggtaaatatacccagagtattgactgtaaccatatagcggagagtaaattttccaaaaaaaatggaaacattgatagtcttcgttctaactctgcaacttttatgttgaatactgcagatgaagacgtgatagaatttagttttgacgataatgtcccttatgctgagttattatctggtgccacccttgaaaaatgttctttgactttgaatgaaataaacaaaaaattattcaatacgctctatgactttagagtaagcaaagataatcccgaagaaaatttggtagaattgatacttccgaactgcgtggtgttattaaacttttttgaagacattgaactcttggccgactcttctgatgaggctttcgaaaaatctactttcattaacacaattgagttcattgtgcacgatatttgggtcgaaacgttgataaagaacataaacttattacaaatgtttgatgcagatttgaaatgctacaatgacaagtacataatttgcaagttgaagggtcagtatccctccacaaatatagtggacataatgtgccgtttgaagcatttttccaattctattttggaaactttcaaattcggaatcgagttgaaagaacaagatcaatgccacaatagaaacactattatcaactacgttcttttcagtagagtattttctacgattgttttagagattcaaaaatgctttatcttgatcgttaagttcatgtattctgtcaattttttagaaaaattttccgatgaagtatttttgagttttattgaaattctcataaaaattgtctttgagcaccagattccgcagttatttttgggaattgatgaaattattcaactctggttaaagaacaatgaaggaaaaagacaacaactcttgagcgcttggtgcaacggaactgttcaagatatgaagcaaagccaacaaagagagtccagtaacgcagaatctgaaagtatcacttctagtacagaagaggacgaagaaggcctccaattcaataaatgggatgtgattgaaccatttattgataatatcaaggctttgaatcaaagtaaatcccatatgtga

SEQ ID NO: 7853 - DNA, 5631 bp, Saccharomyces cerevisiae
atgaacactgatcaacaaccttatcagggccaaacggactatacccagggaccaggtaacgggcaaagtcaggaacaagactatgaccaatatggccagcctttgtatccttcacaagctgatggttactacgatccaaatgtcgctgctggtactgaagctgatatgtatggtcaacaaccaccaaacgagtcttacgaccaagactacacaaacggtgaatactatggtcaaccgccaaatatggctgctcaagacggtgaaaacttctcggattttagcagttacggccctcctggaacacctggatatgatagctatggtggtcagtataccgcttctcaaatgagttatggagaaccaaattcgtcgggtacctcgactccaatttacggtaattatgacccaaatgctatcgctatggctttgccaaatgaaccttatcccgcttggactgctgactctcaatctcccgtttcgatcgagcaaatcgaagatatctttattgatttgaccaacagactcgggttccaaagagactccatgagaaatatgtttgatcattttatggttctcttggactctaggtcctcgagaatgtctcctgatcaagctttactatctttacatgccgactacattggtggcgatactgctaactataaaaaatggtattttgctgctcagttagatatggatgatgaaattggttttagaaatatgagtcttggaaaactctcaaggaaggcaagaaaagctaagaagaaaaacaagaaagcaatggaagaggccaatcccgaagacactgaagaaactttaaacaaaattgaaggcgacaactccctagaggctgctgattttagatggaaggccaagatgaaccagttgtctcccctggaaagagttcgtcatatcgccttatatctgttatgttggggtgaagctaatcaagtcagattcactgctgaatgtttatgttttatctacaagtgtgctcttgactacttggattcccctctttgccaacaacgccaagaacctatgccagaaggtgatttcttgaatagagtcattacgccaatttatcatttcatcagaaatcaagtttatgaaattgttgatggtcgttttgtcaagcgtgaaagagatcataacaaaattgtcggttatgatgatttaaaccaattgttctggtatccagaaggtattgcaaagattgttcttgaagatggaacaaaattgatagaactcccattggaagaacgttatttaagattaggcgatgtcgtctgggatgatgtattcttcaaaacatataaagagacccgtacttggttacatttggtcaccaacttcaaccgtatttgggttatgcatatctccattttttggatgtactttgcatataattcaccaacattttacactcataactatcaacaattggtcgacaaccaacctttggctgcttacaagtgggcatcttgcgcattaggtggtactgtcgcaagtttgattcaaattgtcgctactttgtgtgaatggtcattcgttccaagaaaatgggctggtgctcaacatctatctcgtagattctggtttttatgcatcatctttggtattaatttgggtcctattatttttgtttttgcttacgacaaagatacagtctactccactgctgcacacgttgttgctgctgttatgttctttgttgcggttgctaccatcatattcttctccattatgccattgggggggttgtttacgtcatatatgaaaaaatctacaaggcgttatgttgcatctcaaacattcactgctgcatttgcccctctacatgggttagatagatggatgtcctatttagtttgggttactgtttttgctgccaaatattcagaatcgtactactttttagttttatctttgagagatccaattagaattttgtccaccactgcaatgaggtgtacaggtgaatactggtggggtgcggtactttgtaaagtgcaacccaagattgtcttaggtttggttatcgctaccgacttcattcttttcttcttggatacctacttatggtacattattgtgaataccattttctctgttgggaaatctttctatttaggtatttctatcttaacaccatggagaaatatcttcacaagattgccaaaaagaatatactccaagattttggctactactgatatggaaattaaatacaaaccaaaggttttgatttctcaagtatggaatgccatcattatttcaatgtacagagaacatctcttagccatcgaccatgtacaaaaattactatatcatcaagttccatctgaaatcgaaggtaaaagaactttgagagctcctaccttctttgtttctcaagatgacaataattttgagactgaatttttccctagggattcagaggctgagcgtcgtatttctttctttgctcaatctttgtctactccaattcccgaaccacttccagttgataacatgccaacgttcacagtattgactcctcactacgcggaaagaattctgctgtcattaagagaaattattcgtgaagatgaccaattttctagagttactcttttagaatatctaaaacaattacatcccgttgaatgggaatgttttgttaaggatactaagattttggctgaagaaaccgctgcctatgaaggaaatgaaaatgaagctgaaaaggaagatgctttgaaatctcaaatcgatgatttgccattttattgtattggttttaaatctgctgctccagaatatacacttcgtacgagaatttgggcttctttgaggtcgcagactctatatcgtaccatttcagggttcatgaattattcaagagctatcaaattactgtatcgtgtggaaaatcctgaaattgttcaaatgtttggtggtaatgctgaaggcttagaaagagagctagaaaagatggcaagaagaaagtttaaatttttggtctctatgcagagattggctaaattcaaaccacatgaactggaaaatgctgagtttttgttgagagcttacccagacttacaaattgcctacttggatgaagagccacctttgactgaaggtgaggagccaagaatctattccgctttgattgatggacattgtgaaattctagataatggtcgtagacgtcccaagtttagagttcaattatctggtaacccaattcttggtgacggtaaatctgataaccaaaaccatgctttgattttttacagaggtgaatacattcaattaattgatgccaaccaagataactacttggaagaatgtctgaagattagatctgtattggctgaatttgaggaattgaacgttgaacaagttaatccatatgctcccggtttaaggtatgaggagcaaacaactaatcatcctgttgctattgttggtgccagagaatacattttctctgaaaactctggtgtgctgggtgatgtggccgctggtaaagaacaaacttttggtacattatttgcgcgtactttatctcaaattggtggtaaattgcattatggtcatccggatttcattaatgctacgtttatgaccactagaggtggtgtttccaaagcacaaaagggtttgcatttaaacgaagatatttatgctggtatgaatgctatgcttcgtggtggtcgtatcaagcattgtgagtattatcaatgtggtaaaggtagagatttgggtttcggtacaattctaaatttcactactaagattggtgctggtatgggtgaacaaatgttatctcgtgaatattattatctgggtacccaattaccagtggaccgtttcctaacattctattatgcccatcctggtttccatttgaacaacttgttcattcaattatctttgcaaatgtttatgttgactttggtgaatttatcttccttggcccatgaatctattatgtgtatttacgataggaacaaaccaaaaacagatgttttggttccaattgggtgttacaacttccaacctgcggttgattgggtgagacgttatacattgtctattttcattgttttctggattgccttcgttcctattgttgttcaagaactaattgaacgtggtctatggaaagccacccaaagatttttctgccacctattatcattatcccctatgttcgaagtgtttgcgggccaaatctactcttctgcgttattaagtgatttagcaattggtggtgctcgttatatatccaccggtcgtggttttgcaacttctcgtataccattttcaattttgtattcaagatttgcaggatctgctatctacatgggtgcaagatcaatgttaatgttgctgttcggtactgtcgcacattggcaagctccactactgtggttttgggcctctctatcttcattaatttttgcgcctttcgttttcaatccacatcagtttgcttgggaagatttctttttggattacagggattatatcagatggttatcaagaggtaataatcaatatcatagaaactcgtggattggttacgtgaggatgtctagggcacgtattactgggtttaaacgtaaactggttggcgatgaatctgagaaagctgctggtgacgcaagcagggctcatagaaccaatttgatcatggctgaaatcataccctgtgcaatttatgcagctggttgttttattgccttcacgtttattaatgctcaaaccggtgtcaagactactgatgatgatagggtgaattctgttttacgtatcatcatttgtaccttggcgccaatcgccgttaacctcggtgttctattcttctgtatgggtatgtcatgctgctctggtcccttatttggtatgtgttgtaagaagacaggttctgtaatggctggaattgcccacggtgttgctgttattgtccacattgcctttttcattgtcatgtgggttttggagagcttcaactttgttagaatgttaatcggagtcgttacttgtatccaatgtcaaagactcatttttcattgcatgacagcgttaatgttgactcgtgaatttaaaaacgatcatgccaatacagccttctggactggtaagtggtatggtaaaggtatgggttacatggcttggacccagccaagtagagaattaaccgccaaggtaattgagctttcagaatttgcagctgattttgttctaggtcatgtgattttaatctgtcaactgccactcattataatcccaaaaatagataaattccactcgattatgctattctggctaaagccctctcgtcaaattcgtcccccaatttactctctgaagcaaactcgtttgcgtaagcgtatggtcaagaagtactgctctttgtactttttagtattggctatttttgcaggatgcattattggtcctgctgtagcctctgctaagatccacaaacacattggagattcattggatggcgttgttcacaatctattccaaccaataaatacaaccaataatgacactggttcccaaatgtcaacttatcaaagtcactactatactcatacgccatcattaaagacctggtcaactataaaataa

SEQ ID NO: 7854 - DNA, 5631 bp, Artificial Sequence
  Description of Artificial Sequence: Synthetic polynucleotide
atgaacactgatcaacaaccttatcagggccaaacggactatacccagggaccaggtaacgggcaaagtcaggaacaagactatgaccaatatggccagcctttgtatccttctcaagctgatggttactacgatccaaatgtcgctgctggtactgaagctgatatgtatggtcaacaaccaccaaacgagtcttacgaccaagactacacaaacggtgaatactatggtcaaccgccaaatatggctgctcaagacggtgaaaacttcagtgattttagcagttacggccctcctggaacacctggatatgatagctatggtggtcagtataccgcttctcaaatgagttatggagaaccaaattcttctggtacctctactccaatttacggtaattatgacccaaatgctatcgctatggctttgccaaatgaaccttatcccgcttggactgctgactctcaatctcccgtttccatcgagcaaatcgaagatatctttattgatttgaccaacagactcgggttccaaagagactccatgagaaatatgtttgatcattttatggttctcttggactctaggtccagcagaatgtctcctgatcaagctttattatctttacatgccgactacattggtggcgatactgctaactataaaaaatggtattttgctgctcagttagatatggatgatgaaattggttttagaaatatgagtcttggaaaactctccaggaaggcaagaaaagctaagaagaaaaacaagaaagcaatggaagaggccaatcccgaagacactgaagaaactttaaacaaaattgaaggcgacaactccttggaggctgctgattttagatggaaggccaagatgaaccagttgtctcccttagaaagagttcgtcatatcgccttatatcttttatgttggggtgaagctaatcaagtcagattcactgctgaatgtttatgttttatctacaagtgtgctcttgactacttggattcccctctttgccaacaacgccaagaacctatgccagaaggtgatttcttgaatagagtcattacgccaatttatcatttcatcagaaatcaagtttatgaaattgttgatggtcgttttgtcaagcgtgaaagagatcataacaaaattgtcggttatgatgatttaaaccaattgttctggtatccagaaggtattgcaaagattgttcttgaagatggaacaaaattgatagaactcccattggaagaacgttatttaagattaggcgatgtcgtctgggatgatgtattcttcaaaacatataaagagacccgtacttggttacatttggtcaccaacttcaaccgtatttgggttatgcatatctccattttttggatgtactttgcatataattctccaacattttacactcataactatcaacaattggtcgacaaccaacctttggctgcttacaagtgggcatcttgcgcattaggtggtactgtcgcaagtttgattcaaattgtcgctactttgtgtgaatggagtttcgttccaagaaaatgggctggtgctcaacatttatctcgtagattctggtttttatgcatcatctttggtattaatttgggtcctattatttttgtttttgcttacgacaaagatacagtctactccactgctgcacacgttgttgctgctgttatgttctttgttgcggttgctaccatcatattcttctccattatgccattgggggggttgtttacgtcctatatgaaaaaatctacaaggcgttatgttgcatctcaaacattcactgctgcatttgcccctttgcatgggttagatagatggatgtcctatttagtttgggttactgtttttgctgccaaatattctgaatcttactactttttagttttatctttgagagatccaattagaattttgtccaccactgcaatgaggtgtacaggtgaatactggtggggtgcggtactttgtaaagtgcaacccaagattgtcttaggtttggttatcgctaccgacttcattcttttcttcttggatacctacttatggtacattattgtgaataccattttctctgttgggaaatctttctatttaggtatttctatcttaacaccatggagaaatatcttcacaagattgccaaaaagaatatactccaagattttggctactactgatatggaaattaaatacaaaccaaaggttttgatttctcaagtatggaatgccatcattatttccatgtacagagaacatctcttagccatcgaccatgtacaaaaattattatatcatcaagttccatctgaaatcgaaggtaaaagaactttgagagctcctaccttctttgtttctcaagatgacaataattttgagactgaatttttccctagggattctgaggctgagcgtcgtatttctttctttgctcaatctttgtctactccaattcccgaaccacttccagttgataacatgccaacgttcacagtattgactcctcactacgcggaaagaattttattatctttaagagaaattattcgtgaagatgaccaattttctagagttactcttttagaatatttgaaacaattacatcccgttgaatgggaatgttttgttaaggatactaagattttggctgaagaaaccgctgcctatgaaggaaatgaaaatgaagctgaaaaggaagatgctttgaaatctcaaatcgatgatttgccattttattgtattggttttaaatctgctgctccagaatatacacttcgtacgagaatttgggcttctttgaggagccagactttatatcgtaccatttctgggttcatgaattattctagagctatcaaattattatatcgtgtggaaaatcctgaaattgttcaaatgtttggtggtaatgctgaaggcttagaaagagagttagaaaagatggcaagaagaaagtttaaatttttggtctctatgcagagattggctaaattcaaaccacatgaattggaaaatgctgagtttttgttgagagcttacccagacttacaaattgcctacttggatgaagagccacctttgactgaaggtgaggagccaagaatctattccgctttgattgatggacattgtgaaattttagataatggtcgtagacgtcccaagtttagagttcaattatctggtaacccaattcttggtgacggtaaatctgataaccaaaaccatgctttgattttttacagaggtgaatacattcaattaattgatgccaaccaagataactacttggaagaatgtttgaagattagatctgtattggctgaatttgaggaattgaacgttgaacaagttaatccatatgctcccggtttaaggtatgaggagcaaacaactaatcatcctgttgctattgttggtgccagagaatacattttctctgaaaactctggtgtgttgggtgatgtggccgctggtaaagaacaaacttttggtacattatttgcgcgtactttatctcaaattggtggtaaattgcattatggtcatccggatttcattaatgctacgtttatgaccactagaggtggtgtttccaaagcacaaaagggtttgcatttaaacgaagatatttatgctggtatgaatgctatgcttcgtggtggtcgtatcaagcattgtgagtattatcaatgtggtaaaggtagagatttgggtttcggtacaattttgaatttcactactaagattggtgctggtatgggtgaacaaatgttatctcgtgaatattattatttgggtacccaattaccagtggaccgtttcttaacattctattatgcccatcctggtttccatttgaacaacttgttcattcaattatctttgcaaatgtttatgttgactttggtgaatttatcttccttggcccatgaatctattatgtgtatttacgataggaacaaaccaaaaacagatgttttggttccaattgggtgttacaacttccaacctgcggttgattgggtgagacgttatacattgtctattttcattgttttctggattgccttcgttcctattgttgttcaagaattgattgaacgtggtttatggaaagccacccaaagatttttctgccacttattatctttatcccctatgttcgaagtgtttgcgggccaaatctactcttctgcgttattaagtgatttagcaattggtggtgctcgttatatatccaccggtcgtggttttgcaacttctcgtataccattttctattttgtattctagatttgcaggatctgctatctacatgggtgcaagaagtatgttaatgttgttattcggtactgtcgcacattggcaagctccattattatggttttgggcctctttatcttctttaatttttgcgcctttcgttttcaatccacatcagtttgcttgggaagatttctttttggattacagggattatatcagatggttatctagaggtaataatcaatatcatagaaacagttggattggttacgtgaggatgtctagggcacgtattactgggtttaaacgtaaattggttggcgatgaatctgagaaagctgctggtgacgcaagcagggctcatagaaccaatttgatcatggctgaaatcataccctgtgcaatttatgcagctggttgttttattgccttcacgtttattaatgctcaaaccggtgtcaagactactgatgatgatagggtgaattctgttttacgtatcatcatttgtaccttggcgccaatcgccgttaacctcggtgttttgttcttctgtatgggtatgagttgctgctctggtcccttatttggtatgtgttgtaagaagacaggttctgtaatggctggaattgcccacggtgttgctgttattgtccacattgcctttttcattgtcatgtgggttttggagagcttcaactttgttagaatgttaatcggagtcgttacttgtatccaatgtcaaagactcatttttcattgcatgacagcgttaatgttgactcgtgaatttaaaaacgatcatgccaatacagccttctggactggtaagtggtatggtaaaggtatgggttacatggcttggacccagccaagtagagaattaaccgccaaggtaattgagctttctgaatttgcagctgattttgttttaggtcatgtgattttaatctgtcaattaccactcattataatcccaaaaatagataaattccactctattatgcttttctggttaaagccctctcgtcaaattcgtcccccaatttactctttgaagcaaactcgtttgcgtaagcgtatggtcaagaagtactgctctttgtactttttagtattggctatttttgcaggatgcattattggtcctgctgtagcctctgctaagatccacaaacacattggagattctttggatggcgttgttcacaatttattccaaccaataaatacaaccaataatgacactggttcccaaatgtctacttatcaaagtcactactatactcatacgccatctttaaagacctggtctactataaaatga

SEQ ID NO: 7855 - DNA, 174 bp, Saccharomyces cerevisiae
atgaatgtgtttatgccaataagggtttttttgtacagttatgtgattataaacagtcttttgtctagtttttttcaccagtatcggcctctatttataaaaaacggagcagctttcggtgtcagtaattctgaaaaaatttgtgtcactctgattgtaaatgaattaatttag

SEQ ID NO: 7856 - DNA, 174 bp, Artificial Sequence
  Description of Artificial Sequence: Synthetic polynucleotide
atgaatgtgtttatgccaataagggtttttttgtacagttatgtgattataaacagtcttttgtctagtttttttcaccagtataggcctttatttataaaaaacggagcagctttcggtgtcagtaattctgaaaaaatttgtgtcactttgattgtaaatgaattaatttga

SEQ ID NO: 7857 - DNA, 1668 bp, Saccharomyces cerevisiae
atgaacaagaaacaaaatttttacgcagccattattgtggctatttttctttgtttgcaattgtctcatggctcttcaggtgtcagctttgaaaaaacccctgctattaaaattgtaggaaacaaattctttgactctgagagtggggaacagttcttcatcaagggcattgcttaccaattgcagagaagtgaagaggagcttagcaatgcaaatggggcttttgagacaagttatattgatgccttagcggacccaaaaatatgcttaagagatattccatttttgaaaatgctaggagtgaacacactgcgtgtttatgcaatagatccgacaaaatcacatgatatatgtatggaagctctatctgccgaaggaatgtacgtcctattagatctttcagagcctgatatttcaataaatagagaaaatccatcttgggatgtacatatttttgaaaggtacaaatctgtaattgatgcaatgtcatcctttccaaatttgttggggtattttgcagggaatgaagtgacaaatgaccatacaaatacctttgcatcacccttcgtgaaggccgcaatccgagatgccaaggagtatatttcgcattctaatcatagaaaaatccctgtcggctattcaactaatgacgatgctatgacaagagacaatttagcaaggtacttcgtttgcggagacgttaaagctgatttctatgggataaatatgtacgaatggtgtgggtattccacgtatggtactagtggatatagggaaagaacgaaagaatttgaaggttatccaattcccgtgtttttttcggaattcggctgcaatcttgtaagaccaaggccattcactgaagttagtgccctttatggcaataaaatgtcctctgtttggtctggtggccttgcatacatgtattttgaagaagaaaatgaatacggagttgttaagataaatgataatgatggagtggatattcttcctgatttcaagaatttgaagaaagaatttgcaaaggcagatcctaaaggcattacagaggaagaatacttaacggcaaaagaaccaactgaagtagaaagtgttgaatgtccacatattgctgtcggagtttgggaggcaaacgaaaaactacctgaaacacctgatagaagcaagtgcgcctgtttggatgagattttgccctgtgaaatagtcccttttggtgctgaatctggaaaatatgaagaatattttagttatttgtgctctaaggttgactgttccgatattcttgcaaatggcaaaaccggtgagtacggtgaattctcagattgttctgtcgaacaaaaactttcccttcagctgagtaaattgtattgcaaaatcggcgcaaatgatcgccattgtcctctaaatgataagaacgtttacttcaacttagaaagcctgcagccccttacaagcgagtcgatctgtaagaatgtttttgattctataaggaacatcacatacaatcatggcgattattcaaaatcaaatccatcgcgtagcaaggaaagtttgaacgtaaagtacccatcgagtgaagagagagaaaatgacggcaccatcgcatttaaaacttcagggtttgttatacttctaatttctatgatagctgctggaattcttctataa

SEQ ID NO: 7858 - DNA, 1668 bp, Artificial Sequence
  Description of Artificial Sequence: Synthetic polynucleotide
atgaacaagaaacaaaatttttacgcagccattattgtggctatttttctttgtttgcaattgtctcatggctcttctggtgtcagctttgaaaaaacccctgctattaaaattgtaggaaacaaattctttgactctgagagtggggaacagttcttcatcaagggcattgcttaccaattgcagagaagtgaagaggagcttagcaatgcaaatggggcttttgagacaagttatattgatgccttagcggacccaaaaatatgcttaagagatattccatttttgaaaatgcttggagtgaacacattacgtgtttatgcaatagatccgacaaaatctcatgatatatgtatggaagctttatctgccgaaggaatgtacgtccttttagatctttctgagcctgatatttctataaatagagaaaatccatcttgggatgtacatatttttgaaaggtacaaatctgtaattgatgcaatgtcttcctttccaaatttgttggggtattttgcagggaatgaagtgacaaatgaccatacaaatacctttgcatctcccttcgtgaaggccgcaatcagagatgccaaggagtatatttctcattctaatcatagaaaaatccctgtcggctattctactaatgacgatgctatgacaagagacaatttagcaaggtacttcgtttgcggagacgttaaagctgatttctatgggataaatatgtacgaatggtgtgggtattccacgtatggtactagtggatatagggaaagaacgaaagaatttgaaggttatccaattcccgtgtttttttctgaattcggctgcaatcttgtaagaccaaggccattcactgaagttagtgccctttatggcaataaaatgtcctctgtttggtctggtggccttgcatacatgtattttgaagaagaaaatgaatacggagttgttaagataaatgataatgatggagtggatattcttcctgatttcaagaatttgaagaaagaatttgcaaaggcagatcctaaaggcattacagaggaagaatacttaacggcaaaagaaccaactgaagtagaaagtgttgaatgtccacatattgctgtcggagtttgggaggcaaacgaaaaattacctgaaacacctgatagaagcaagtgcgcctgtttggatgagattttgccctgtgaaatagtcccttttggtgctgaatctggaaaatatgaagaatattttagttatttgtgctctaaggttgactgttccgatattcttgcaaatggcaaaaccggtgagtacggtgaattcagtgattgttctgtcgaacaaaaactttcccttcagttgagtaaattgtattgcaaaatcggcgcaaatgatcgccattgtcctttaaatgataagaacgtttacttcaacttagaaagcttacagccccttacaagcgagagtatctgtaagaatgtttttgattctataaggaacatcacatacaatcatggcgattattctaaatctaatccatctcgtagcaaggaaagtttgaacgtaaagtacccatctagtgaagagagagaaaatgacggcaccatcgcatttaaaacttctgggtttgttatacttttgatttctatgatagctgctggaattcttttgtga

SEQ ID NO: 7859 - DNA, 384 bp, Saccharomyces cerevisiae
atggctaaacaatcattagacgtttcctccgacagaagaaaggctagaaaggcttatttcaccgccccatcctcccaacgtcgtgttttgctatctgctccattatctaaggagttgagagctcaatacggtatcaaggccttgccaatcagaagagatgatgaagttttggttgttcgtggttccaagaagggtcaagaaggtaagatttcatctgtttacagattgaaatttgccgttcaagttgacaaggttaccaaggaaaaggtcaacggtgcttccgttccaattaacttgcacccatccaagcttgtcattactaaattacatttggacaaggacagaaaagctttgatccaaagaaagggcggtaagttggaataa

SEQ ID NO: 7860 - DNA, 384 bp, Artificial Sequence
  Description of Artificial Sequence: Synthetic polynucleotide
atggctaaacaatctttagacgtttcctccgacagaagaaaggctagaaaggcttatttcaccgccccatcctcccaacgtcgtgttttgttatctgctccattatctaaggagttgagagctcaatacggtatcaaggccttgccaatcagaagagatgatgaagttttggttgttcgtggttccaagaagggtcaagaaggtaagatttcttctgtttacagattgaaatttgccgttcaagttgacaaggttaccaaggaaaaggtcaacggtgcttccgttccaattaacttgcacccatccaagcttgtcattactaaattacatttggacaaggacagaaaagctttgatccaaagaaagggcggtaagttggaatga

SEQ ID NO: 7861 - DNA, 1530 bp, Saccharomyces cerevisiae
atgccaaatgtgctttctgatgatgaagagctccttaatggactaggaagtgagattatgaaaccctctagacaaggtaaccatatggcaaggaccgtcaaaaggtgggtaaataaagaacgtgctaccacagccgatctgaaaaatgttaatattgatggagttcatggaccggtaaataccgaaagttatatatcaccaggacagctttactccactgactcgggcaatttatttcatgctggaagaatccttgtcgttctagtcggtcttccagcaacatcaaagacactattgtcagtagcgattacaagatatacaagatggttaggagttaggacgaaatcgttccatttttcagaatataaagaatcagctaaaaatataccctcagactatttttgcgtagtgccaacgtcaaaagaaggtgtagcgtttgttgaaaagcttcgcatgcagatgttgaatgatatactggcatttttcaacgacttgtcaggtcagctggccatttatgatgccctaaacatccgtaaaattgacagaaagaatttggagacaacgttttctgaaattggagttaaagtactcttcatagaatcaatcgtgtctgatcaagaaatcatgaatagaaacatagctcttgcactggagtcgaacgattacaagggactttcaactgatgaagccattgacgaatatatgagacgtttatcagtgaacgaaccatactatgaaatgatgacacatgacgaagaattatcgtacattaaatatataaatttgggaaagcagataattgtgaaagataacatacatggttatttggtcaacaaaatagtatttttcttaatgaatttgaggcagaaaaaggggtgtgtatattttgctcgctgtggcaccagcgataaagacaactacatacatgatgaggaactaaacgaggagggaatccattactctcaagttctcaaggattttgtcctccaacgaattaaacagaagagacaggccaaaaaaaattcggattccttagtcgaagtaatagatggaagtcatgatgaagatttgaagacttccttgatagtttggacaggtcccaggaaaagaacccacgatactgcactctttttttcaaaagaaggtattaaagttcagcaacggtcagagttgagacagttgaacccaggaagtattgctgatcttactgatcaacagataatggacaaatttccatcagaatataaagaatcattaaaagacccatatcattttcgattccctagggcggaatcttaccatgacttagccgttcgtatggaacctttactattagaaatggagcatacgagcaaggacattctcatcattgcacatgagtcaacattaagagtattatatggctatttaatggcttgcacctgcgtagagttaccaaatctaaatttcacaagagacaaattagttgaaatttcattcagccctttctgtaatactgtagagttactgaacattcctttaactagctaa

SEQ ID NO: 7862 - DNA, 1530 bp, Artificial Sequence
  Description of Artificial Sequence: Synthetic polynucleotide
atgccaaatgtgctttctgatgatgaagagctccttaatggacttggaagtgagattatgaaaccctctagacaaggtaaccatatggcaaggaccgtcaaaaggtgggtaaataaagaacgtgctaccacagccgatttgaaaaatgttaatattgatggagttcatggaccggtaaataccgaaagttatatatctccaggacagctttactccactgacagtggcaatttatttcatgctggaagaatccttgtcgttttggtcggtcttccagcaacatccaagacattattgagtgtagcgattacaagatatacaagatggttaggagttaggacgaaatctttccatttttctgaatataaagaatctgctaaaaatataccctctgactatttttgcgtagtgccaacgtccaaagaaggtgtagcgtttgttgaaaagcttcgcatgcagatgttgaatgatatattggcatttttcaacgacttgtctggtcagttggccatttatgatgccttgaacatccgtaaaattgacagaaagaatttggagacaacgttttctgaaattggagttaaagtactcttcatagaaagtatcgtgtctgatcaagaaatcatgaatagaaacatagctcttgcattagagagcaacgattacaagggactttctactgatgaagccattgacgaatatatgagacgtttatctgtgaacgaaccatactatgaaatgatgacacatgacgaagaattatcttacattaaatatataaatttgggaaagcagataattgtgaaagataacatacatggttatttggtcaacaaaatagtatttttcttaatgaatttgaggcagaaaaaggggtgtgtatattttgctcgctgtggcaccagcgataaagacaactacatacatgatgaggaattgaacgaggagggaatccattactctcaagttctcaaggattttgtcctccaaagaattaaacagaagagacaggccaaaaaaaattctgattccttagtcgaagtaatagatggaagtcatgatgaagatttgaagacttccttgatagtttggacaggtcccaggaaaagaacccacgatactgcactctttttttccaaagaaggtattaaagttcagcaaagaagtgagttgagacagttgaacccaggaagtattgctgatcttactgatcaacagataatggacaaatttccatctgaatataaagaatctttaaaagacccatatcattttaggttccctagggcggaatcttaccatgacttagccgttcgtatggaacctttattattagaaatggagcatacgagcaaggacattctcatcattgcacatgagtctacattaagagtattatatggctatttaatggcttgcacctgcgtagagttaccaaatttgaatttcacaagagacaaattagttgaaatttctttcagccctttctgtaatactgtagagttattaaacattcctttaactagctga

SEQ ID NO: 7863 - DNA, 306 bp, Saccharomyces cerevisiae
atgcaatcgatcagtaattgtcccatcgggttagtttcaaaaaacacaatcaattcagcttccactattgcagagtgggtagcatgtccatggaaatatatcaacgttgttggttcaggcagatatgtgagcaataaacctgataaaattaccagatatgatttactcaaggctgcccaggaagcggaaatgcaggagttgcttacaagaaatgatatgaaaggtagacataaacgtaataagaaaagtaagatagcattggagactatagcggaagaaaactcttcaactgaaagccttttttaa

SEQ ID NO: 7864 - DNA, 306 bp, Artificial Sequence
  Description of Artificial Sequence: Synthetic polynucleotide
atgcaatccatcagtaattgtcccatcgggttagtttccaaaaacacaatcaattctgcttccactattgcagagtgggtagcatgtccatggaaatatatcaacgttgttggttctggcagatatgtgagcaataaacctgataaaattaccagatatgatttactcaaggctgcccaggaagcggaaatgcaggagttgcttacaagaaatgatatgaaaggtagacataaacgtaataagaaaagtaagatagcattggagactatagcggaagaaaactcttctactgaaagccttttttga

SEQ ID NO: 7865 - DNA, 2586 bp, Saccharomyces cerevisiae
atgtccaccgctgaatttgctcaactattggagaacagtatcttaagtcccgaccaaaacattcggttgactagtgaaacgcaattaaagaaattatctaatgacaacttcttacaatttgcaggtctttcttcgcaagtgcttatcgatgaaaatacaaagctagaagggcgtattctagcggcgctaactttgaagaacgagctggtgtccaaggactcagtcaagacgcagcaatttgcacaacgttggattacacaggttagtccagaagctaaaaaccaaattaaaactaacgcgctgaccgcattggtctccatagaaccgcgtatagcaaatgcagcagctcaattgattgcggctatagcagatattgagttgccccatggcgcatggccagagttgatgaaaattatggttgacaatacaggtgcggaacaaccagaaaatgtcaagagagcctctttattggccttgggttatatgtgtgaaagtgcagaccctcaaagtcaagccttagtttcttcatcaaacaatatcttaatcgctattgtccagggtgcgcaatctacggaaacttccaaagcagtcagactggcagctctgaatgctcttgcagactctttaattttcatcaaaaataacatggaacgcgaaggtgaaagaaactaccttatgcaagtcgtctgtgaagccactcaagctgaagatatagaagttcaagcagctgcctttggttgtttgtgtaaaatcatgtcactatactatacatttatgaaaccttacatggagcaagccctatatgcattgaccatagctacaatgaaatctccaaatgataaagtagcttccatgactgtggaattctggtccactatttgtgaagaagaaatcgatattgcctatgagctcgctcaatttcctcaatctcctttacagagttataatttcgctctctcttctattaaagatgttgtccccaatttgttgaaccttctaacgagacaaaatgaagatccagaagatgacgattggaatgtttccatgtccgcaggtgcatgcttgcagttgtttgcccaaaactgtggcaatcatatcttagaacctgtattggaatttgttgaacaaaatattaccgctgacaactggaggaatcgtgaagctgctgtaatggcctttggttccattatggatggccctgataaggtccaaagaacctattacgttcaccaagccttaccatctattttgaatttaatgaacgatcaatccctacaagttaaggaaaccactgcttggtgtattggtagaattgctgattctgttgctgaatctatcgacccacaacagcatcttccaggtgtcgttcaagcttgtttaattgggttgcaagatcacccaaaagtggccacaaactgttcttggaccattatcaacttagtcgaacaattagcagaagccacaccatctccaatctataacttctatcccgctcttgtagatggtttgatcggtgctgcaaatagaattgataatgagttcaatgcccgtgcatccgccttttcagccttgacaacaatggttgaatacgccacggacacggtagctgaaacttccgcctccatttctacgtttgttatggacaaattagggcagacaatgagtgttgatgaaaatcaattaacgttagaagatgcgcaaagtttgcaagaattgcagtcaaatatattgactgttctagcagccgttattagaaaaagtccaagtagtgtagaaccggttgcagatatgcttatgggactgttcttcaggttgttggaaaaaaaggactctgcgtttattgaagacgatgtgttttatgctatttcagctctagctgcttctttgggtaaaggatttgagaaatacctggaaacattttctccctatttattaaaggctttaaatcaagtagattcgccagtttcaatcaccgcagtgggcttcatcgctgatatttcaaattcgttagaagaagatttcagaagatattccgatgctatgatgaatgtcttggctcaaatgatctctaatccaaatgcaaggagagagttgaaaccagccgtcttgagcgtgttcggtgatattgcttccaatataggtgctgattttattccctacttgaatgacatcatggcgttgtgtgttgctgcccaaaacacgaagccggaaaacggcacattagaagcccttgattatcaaataaaagtactagaagcagtactagatgcttatgtgggtatagtagcgggtcttcatgataaacctgaagctctgttcccttatgttggtactatattccagttcattgcacaagttgcagaagatcctcagctgtacagtgaggatgctacctcaagagcagcagtcggattgattggtgatatagcagcgatgtttccagacggctcaatcaaacaattttatggacaagactgggttattgattacattaaaagaactaggagtggccaattgttcagtcaagccacaaaagatacagcaagatgggctagagagcaacagaagcgtcaattatccttataa

SEQ ID NO: 7866 - DNA, 2586 bp, Artificial Sequence
  Description of Artificial Sequence: Synthetic polynucleotide
atgtccaccgctgaatttgctcaattattggagaacagtatcttaagtcccgaccaaaacattagattgactagtgaaacgcaattaaagaaattatctaatgacaacttcttacaatttgcaggtctttcttctcaagtgcttatcgatgaaaatacaaagttggaagggcgtattttggcggcgttgactttgaagaacgagttggtgtccaaggactctgtcaagacgcagcaatttgcacaacgttggattacacaggttagtccagaagctaaaaaccaaattaaaactaacgcgttgaccgcattggtctccatagaaccgcgtatagcaaatgcagcagctcaattgattgcggctatagcagatattgagttgccccatggcgcatggccagagttgatgaaaattatggttgacaatacaggtgcggaacaaccagaaaatgtcaagagagcctctttattggccttgggttatatgtgtgaaagtgcagaccctcaaagtcaagccttagtttcttcttccaacaatatcttaatcgctattgtccagggtgcgcaatctacggaaacttccaaagcagtcagattagcagctttgaatgctcttgcagactctttaattttcatcaaaaataacatggaacgcgaaggtgaaagaaactaccttatgcaagtcgtctgtgaagccactcaagctgaagatatagaagttcaagcagctgcctttggttgtttgtgtaaaatcatgtctttgtactatacatttatgaaaccttacatggagcaagccttatatgcattgaccatagctacaatgaaatctccaaatgataaagtagcttccatgactgtggaattctggtccactatttgtgaagaagaaatcgatattgcctatgagctcgctcaatttcctcaatctcctttacagagttataatttcgctctctcttctattaaagatgttgtccccaatttgttgaaccttttgacgagacaaaatgaagatccagaagatgacgattggaatgtttccatgtccgcaggtgcatgcttgcagttgtttgcccaaaactgtggcaatcatatcttagaacctgtattggaatttgttgaacaaaatattaccgctgacaactggaggaatcgtgaagctgctgtaatggcctttggttccattatggatggccctgataaggtccaaagaacctattacgttcaccaagccttaccatctattttgaatttaatgaacgatcaatccttacaagttaaggaaaccactgcttggtgtattggtagaattgctgattctgttgctgaatctatcgacccacaacagcatcttccaggtgtcgttcaagcttgtttaattgggttgcaagatcacccaaaagtggccacaaactgttcttggaccattatcaacttagtcgaacaattagcagaagccacaccatctccaatctataacttctatcccgctcttgtagatggtttgatcggtgctgcaaatagaattgataatgagttcaatgcccgtgcatccgccttttctgccttgacaacaatggttgaatacgccacggacacggtagctgaaacttccgcctccatttctacgtttgttatggacaaattagggcagacaatgagtgttgatgaaaatcaattaacgttagaagatgcgcaaagtttgcaagaattgcagtctaatatattgactgttttagcagccgttattagaaaaagtccaagtagtgtagaaccggttgcagatatgcttatgggattattcttcaggttgttggaaaaaaaggactctgcgtttattgaagacgatgtgttttatgctatttctgctttggctgcttctttgggtaaaggatttgagaaatacttggaaacattttctccctatttattaaaggctttaaatcaagtagattctccagtttccatcaccgcagtgggcttcatcgctgatatttctaattctttagaagaagatttcagaagatattccgatgctatgatgaatgtcttggctcaaatgatctctaatccaaatgcaaggagagagttgaaaccagccgtcttgagcgtgttcggtgatattgcttccaatataggtgctgattttattccctacttgaatgacatcatggcgttgtgtgttgctgcccaaaacacgaagccggaaaacggcacattagaagcccttgattatcaaataaaagtattggaagcagtattggatgcttatgtgggtatagtagcgggtcttcatgataaacctgaagctttattcccttatgttggtactatattccagttcattgcacaagttgcagaagatcctcagttatacagtgaggatgctacctccagagcagcagtcggattgattggtgatatagcagcgatgtttccagacggctccatcaaacaattttatggacaagactgggttattgattacattaaaagaactaggagtggccaattgttcagtcaagccacaaaagatacagcaagatgggctagagagcaacagaagcgtcaattatccttatga

SEQ ID NO: 7867 - DNA, 897 bp, Saccharomyces cerevisiae
atgtcaaccaacgcaaaagagtctgccggtaagaatatcaagtatccatggtggtacggaggtgcagcgggtatctttgctaccatggtgacacatcctcttgacttggccaaagtcagactgcaggcggctcctatgcccaagcccacactcttcaggatgttggagagtatcttggcgaatgaaggtgtggtggggttatattccggcctgagcgctgctgtgttgaggcaatgtacatacacgacggtgagattcggtgcatacgacttgttgaaagagaatgtgatcccacgcgagcaattgactaacatggcgtatcttttaccttgctccatgttcagtggtgccattggggggcttgcagggaattttgcagatgttgtaaatatcagaatgcaaaacgactctgctttggaggcagcgaagaggagaaactacaaaaacgctatcgatggtgtgtacaagatatatcgctacgagggtggactgaaaaccttgtttaccggttggaagcctaacatggttaggggcatactgatgacggcaagtcaggtcgttacgtatgacgtgtttaagaactacttggtcacaaaattagatttcgacgcatccaagaactatacacacttgacagcgtccctgttggctggcctggtggccaccactgtgtgctctccagcagacgtcatgaagacacgtatcatgaacggcagcggagaccatcaaccggctttgaagatccttgccgacgctgtccgcaaagagggcccatctttcatgttccgggggtggttgccaagtttcactagactgggtccattcacaatgttaattttctttgcaattgagcaattgaaaaaacatagggttggcatgccaaaggaagacaagtag

SEQ ID NO: 7868 - DNA, 897 bp, Artificial Sequence
  Description of Artificial Sequence: Synthetic polynucleotide
atgtctaccaacgcaaaagagtctgccggtaagaatatcaagtatccatggtggtacggaggtgcagcgggtatctttgctaccatggtgacacatcctcttgacttggccaaagtcagattacaggcggctcctatgcccaagcccacactcttcaggatgttggagagtatcttggcgaatgaaggtgtggtggggttatattccggcttaagcgctgctgtgttgaggcaatgtacatacacgacggtgagattcggtgcatacgacttgttgaaagagaatgtgatcccacgcgagcaattgactaacatggcgtatcttttaccttgctccatgttcagtggtgccattggggggcttgcagggaattttgcagatgttgtaaatatcagaatgcaaaacgactctgctttggaggcagcgaagaggagaaactacaaaaacgctatcgatggtgtgtacaagatatatcgctacgagggtggattgaaaaccttgtttaccggttggaagcctaacatggttaggggcatattaatgacggcaagtcaggtcgttacgtatgacgtgtttaagaactacttggtcacaaaattagatttcgacgcatccaagaactatacacacttgacagcgtccttattggctggcttggtggccaccactgtgtgctctccagcagacgtcatgaagacacgtatcatgaacggcagcggagaccatcaaccggctttgaagatccttgccgacgctgtccgcaaagagggcccatctttcatgttccgtgggtggttgccaagtttcactagattaggtccattcacaatgttaattttctttgcaattgagcaattgaaaaaacatagggttggcatgccaaaggaagacaagtga

SEQ ID NO: 7869 - DNA, 651 bp, Saccharomyces cerevisiae
atgattgaccgcactaaaaacgaatctccagcttttgaagagtctccgcttacccccaatgtgtctaacctgaaaccattcccttctcaaagcaacaaaatatccactccagtgaccgaccataggagaagacggtcatccagcgtaatatcacatgtggaacaggaaaccttcgaagacgaaaatgaccagcagatgcttcccaacatgaacgctacgtgggtcgaccagcgaggcgcgtggttgattcatatcgtcgtaatagtactcttgaggctcttctactccttgttcgggtcgacgcccaaatggacgtggactttaacaaacatgacctacatcatcggattctatatcatgttccaccttgtcaaaggtacgcccttcgactttaacggtggtgcgtacgacaacctgaccatgtgggagcagattaacgatgagactttgtacacacccactagaaaatttctgctgattgtacccattgtgttgttcctgattagcaaccagtactaccgcaacgacatgacactattcctctccaacctcgccgtgacggtgcttattggtgtcgttcctaagctgggaattacgcatagactaagaatatccatccctggtattacgggccgtgctcaaattagttag

SEQ ID NO: 7870 - DNA, 651 bp, Artificial Sequence
  Description of Artificial Sequence: Synthetic polynucleotide
atgattgaccgcactaaaaacgaatctccagcttttgaagagtctccgcttacccccaatgtgtctaacttgaaaccattcccttctcaaagcaacaaaatatccactccagtgaccgaccataggagaagaagaagttccagcgtaatatctcatgtggaacaggaaaccttcgaagacgaaaatgaccagcagatgcttcccaacatgaacgctacgtgggtcgaccagagaggcgcgtggttgattcatatcgtcgtaatagtactcttgaggctcttctactccttgttcgggtccacgcccaaatggacgtggactttaacaaacatgacctacatcatcggattctatatcatgttccaccttgtcaaaggtacgcccttcgactttaacggtggtgcgtacgacaacttgaccatgtgggagcagattaacgatgagactttgtacacacccactagaaaatttttattgattgtacccattgtgttgttcttgattagcaaccagtactaccgcaacgacatgacattgttcctctccaacctcgccgtgacggtgcttattggtgtcgttcctaagttgggaattacgcatagattgagaatatccatccctggtattacgggccgtgctcaaattagttga

SEQ ID NO: 7871 - DNA, 876 bp, Saccharomyces cerevisiae
atgagtgcttcgaagattctttcacaaaaaattaaagttgcgttggtccaactgtcaggctcgagtcctgacaaaatggccaatcttcaaagggctgcaacgttcattgaaagggctatgaaggaacagccggataccaagttggtcgtattgccagaatgcttcaattctccgtactccactgatcagtttagaaagtattcagaagttatcaatccgaaagagccttcgacgtcagttcaatttctgtctaatttagccaataagtttaaaatcatcttggtaggaggaacaattccggaattggatccaaagacagacaaaatctacaacacctctataattttcaacgaggatggcaagttgattgacaagcatcggaaggtccatcttttcgatgtagacattcctaacggtatatcgttccatgaaagtgaaaccttgagccctggagagaagtctactaccattgacacgaaatatggtaagtttggcgtaggtatatgctatgacatgaggtttccggaactcgcaatgctaagtgcacgcaagggtgcgtttgccatgatctaccctagtgcattcaacactgtcacagggcccttgcattggcatttactggcaagaagcagggcagttgacaaccaagtgtacgtgatgttatgttctcccgcaaggaatctacagagttcttaccatgcatatggccactctatagtggtggaccctagaggcaagattgtagctgaagctggcgagggagaagagattatttatgctgaattagatcccgaagtcattgagtcatttagacaagcggtacccttaaccaaacaaagaagatttgacgtgtactccgatgtaaatgcgcattag

SEQ ID NO: 7872 - DNA, 876 bp, Artificial Sequence
  Description of Artificial Sequence: Synthetic polynucleotide
atgagtgcttccaagattctttctcaaaaaattaaagttgcgttggtccaattaagtggctccagtcctgacaaaatggccaatcttcaaagggctgcaacgttcattgaaagggctatgaaggaacagccggataccaagttggtcgtattgccagaatgcttcaattctccgtactccactgatcagtttagaaagtattctgaagttatcaatccgaaagagccttctacgtctgttcaatttttatctaatttagccaataagtttaaaatcatcttggtaggaggaacaattccggaattggatccaaagacagacaaaatctacaacacctctataattttcaacgaggatggcaagttgattgacaagcatagaaaggtccatcttttcgatgtagacattcctaacggtatatctttccatgaaagtgaaaccttgagccctggagagaagtctactaccattgacacgaaatatggtaagtttggcgtaggtatatgctatgacatgaggtttccggaactcgcaatgttaagtgcacgcaagggtgcgtttgccatgatctaccctagtgcattcaacactgtcacagggcccttgcattggcatttattggcaagaagcagggcagttgacaaccaagtgtacgtgatgttatgttctcccgcaaggaatttacagagttcttaccatgcatatggccactctatagtggtggaccctagaggcaagattgtagctgaagctggcgagggagaagagattatttatgctgaattagatcccgaagtcattgagtcttttagacaagcggtacccttaaccaaacaaagaagatttgacgtgtactccgatgtaaatgcgcattga

SEQ ID NO: 7873 - DNA, 2424 bp, Saccharomyces cerevisiae
atgccagatttgaagtccaagaccttgtcaagccaatctttgggagcggctattcctccagaaattgtgtaccaaatacttacataccagtttagggatttgttaagaaatgaccatccaggtacggcagaaaagtttaacgaaaacttaactacatttgtcaaaagtaatttaactgttaataagacattctcccatatttgtcaagttctcatttatagatattgtaatttaactaccgcaaagagatttcacggtcttttacagactttaaagggaaatagatgcctttgcaataagattgaagtagccgatttccaagaattaacgtctattggactggggaggtccagtgagatgaataaaatgattaaaaatctaactaacgaaactcttcttgagtttctaatgctcacaaaagcaaacttaagggaattcttagcatgtgaaaatattcaagacgatttagacgataatatcataaagtatattctatctccaggaaaagtcttgagtgtagtggatttctgtggctgttcaggcaccactttcacagaaagttttattaaggccctggataaatactaccctaataaatcgattgatcagtaccggctggaacctattcaacaaaattatcagattacctgcttaggcctaaatgattgtattgatctaccatcacacgtcctttggaagatcttaaaaatgttaccagaactacaaaaacttgatttatctcatacctccattgatgatagtaccttatatcacggcatacctcactggaaaaatttaactcatctttccctcgctacttgtcttcaagttactccaagagcggttctggagttttttagtcatcacccaacaattacagaccctgacaacacttctacattagaatggctgaatgttagtgtcattgcccattcctcatcttggaatgaggtgcacacaatgtttttactaaaaaaactttgtcaacatggccataacaaaactttgcaatatctaaatatcggcggtttaccgcttcatgttgcaccttctttcggcgaggaccctattagcgaatccacttattattaccaatgccgcgatagcttacagttcataaagtggaattttccgaagttaaaaagtttgagtataaaaggtaatagtatcccgatatctacgctcgtagaatttttgacaccaattgatcaagaccatcctaattgtgctcaaaaattgaagtttttgaatatttctggtaactcttatgtgaataaatggactattcaggactcattattgtacacttgttctccaagtttagtcgcgttagaagtttcctttgactcgtggcaacagattgaaaaactaaatgatagacatgaaattattgcatacagatataaaaacccaaattcggtaattaaagatatttcaacagcagaacaagtaaagtggaaatgttacattgattcttcttatggtaggagatattggttatataagactgatcctttcctgaatcgtgatgacttggattctaagtcaaatttaactaggtatgattttgagggtcacaaaatcatagaaattataaaccagccggatttcctaaagtttgcccaaagtaaaatcatgcttggatgtggtctagttcctcaaagtggtattagacgtaaactatgttacagagatttaaagccaccagtttctcaattcttaaatagaaaaggtgcgatcagccttggtgatactccactaccaataattaccccaacattacctcgtggtgggtggagaatcatccataatgaggacgacaacaacagtcatgtggaagatagccaaaatcacgtgaatgccatcccaagaaggaattctctgttgagcagacccactttaagaagcaacaatggttcttcctctgccaacccctttgctatcaatgtttctcctgcatctcaaatcagggatggtttgtactgggataggtcggtccatgatttacgtgagctatcattgcaagaacaaagaattcaggagttagctgatgagcagcaggaactaagaacaatcgcaaactttgaagagactgacgacgaatatttgcacgatcccgacttgcaacggagaaggtcccaacttcacttatttgaaagttcgcgctcacgttcaggaaataaaacaagaccaagtttaactggtgaacactcgtcctcggcatcgtttctatccttctcccacttcaaccaccttcacaagcgtaagaattattatttcacgcatcccgatgaatttgtctatgatccaaaggatcctctgacgactcaaagatatagattacattttgaaatagtcaacgaatatcaagtttttgggtgcattgagcgtggaatgtatagatactacagtttaaaagcatag

SEQ ID NO: 7874 - DNA, 2424 bp, Artificial Sequence
  Description of Artificial Sequence: Synthetic polynucleotide
atgccagatttgaagtccaagaccttgagtagccaatctttgggagcggctattcctccagaaattgtgtaccaaatacttacataccagtttagggatttgttaagaaatgaccatccaggtacggcagaaaagtttaacgaaaacttaactacatttgtcaaaagtaatttaactgttaataagacattctcccatatttgtcaagttctcatttatagatattgtaatttaactaccgcaaagagatttcacggtcttttacagactttaaagggaaatagatgcctttgcaataagattgaagtagccgatttccaagaattaacgtctattggattagggaggtccagtgagatgaataaaatgattaaaaatttaactaacgaaactcttcttgagtttttgatgctcacaaaagcaaacttaagggaattcttagcatgtgaaaatattcaagacgatttagacgataatatcataaagtatattttatctccaggaaaagtcttgagtgtagtggatttctgtggctgttctggcaccactttcacagaaagttttattaaggccttggataaatactaccctaataaatccattgatcagtacagattagaacctattcaacaaaattatcagattacctgcttaggcttgaatgattgtattgatttaccatctcacgtcctttggaagatcttaaaaatgttaccagaattacaaaaacttgatttatctcatacctccattgatgatagtaccttatatcacggcatacctcactggaaaaatttaactcatctttccctcgctacttgtcttcaagttactccaagagcggttttggagttttttagtcatcacccaacaattacagaccctgacaacacttctacattagaatggttaaatgttagtgtcattgcccattcctcttcttggaatgaggtgcacacaatgtttttattgaaaaaactttgtcaacatggccataacaaaactttgcaatatttgaatatcggcggtttaccgcttcatgttgcaccttctttcggcgaggaccctattagcgaatccacttattattaccaatgccgcgatagcttacagttcataaagtggaattttccgaagttaaaaagtttgagtataaaaggtaatagtatcccgatatctacgctcgtagaatttttgacaccaattgatcaagaccatcctaattgtgctcaaaaattgaagtttttgaatatttctggtaactcttatgtgaataaatggactattcaggactctttattgtacacttgttctccaagtttagtcgcgttagaagtttcctttgactcttggcaacagattgaaaaattgaatgatagacatgaaattattgcatacagatataaaaacccaaattctgtaattaaagatatttctacagcagaacaagtaaagtggaaatgttacattgattcttcttatggtaggagatattggttatataagactgatcctttcttgaatcgtgatgacttggattctaagagcaatttaactaggtatgattttgagggtcacaaaatcatagaaattataaaccagccggatttcttgaagtttgcccaaagtaaaatcatgcttggatgtggtttagttcctcaaagtggtattagacgtaaattatgttacagagatttaaagccaccagtttctcaattcttaaatagaaaaggtgcgatcagccttggtgatactccattaccaataattaccccaacattacctcgtggtgggtggagaatcatccataatgaggacgacaacaacagtcatgtggaagatagccaaaatcacgtgaatgccatcccaagaaggaattctttgttgagcagacccactttaagaagcaacaatggttcttcctctgccaacccctttgctatcaatgtttctcctgcatctcaaatcagggatggtttgtactgggataggtccgtccatgatttacgtgagttatctttgcaagaacaaagaattcaggagttagctgatgagcagcaggaattgagaacaatcgcaaactttgaagagactgacgacgaatatttgcacgatcccgacttgcaaagaagaaggtcccaacttcacttatttgaaagttctcgcagtcgttctggaaataaaacaagaccaagtttaactggtgaacactcttcctctgcaagttttctttccttctcccacttcaaccaccttcacaagcgtaagaattattatttcacgcatcccgatgaatttgtctatgatccaaaggatcctttgacgactcaaagatatagattacattttgaaatagtcaacgaatatcaagtttttgggtgcattgagcgtggaatgtatagatactacagtttaaaagcatga

SEQ ID NO: 7875 - DNA, 1812 bp, Saccharomyces cerevisiae
atgatacaatcagacgaagataatttggactcttctgaaacgacagcatcaacttcatatagtggtacttcctctgtatcatccagactacaactaagaacatccttgttttttgaaaatcttaatggagcacatgggaaccccgatgcggagacagagatggctactgttgcctatgaaaccacaagtagaggtcaaggatttgctgtatacatcaacaatgaaaggttttctcaaataatgggagcatccacaagctctagctctagtagcaactcgtcctctattacacaatttcacgatacccaagataataatataccaagcaacactactgtaaggccaacttcacttcgacgagacaacgaggataccgtaccgttaaggaacgtaactccttcacaaaacgcggcggtacggccagaaagagcagtgaattcaccatcttcgcagagattaagttgcgcactgacaatatcaacttcagttcttatgggagaagatgttgaaggaagccctatagagcaagagcatagtagggtcgtatcttcattatactcatctttggcgaatcgcgggaacgacgagtcaaagaatggaacacctccacgtcctacctcaattgaacctaatgaaacaacggaacactcatttttctcataccattacgatgacaccttagaaccagatgttgaagaggcagtgaggctaacgaagaataaaacttctaatgttaattttataagctcaactggcagtaaaggtgaaggcgagaccgaggatgaagtcatagatcaatacgaacctgtgaatgaatcaaaatttataccgcacaaactaaaaattccagagaaggctggatcaataaagtcgtcgacaagtgatgattcgcattcgccaggtgcgccaggtacgtcggcaaggaagattaaaattcctcagagtccatcgttaattggtaacatattgattccttcacacaatagtgacagtagtaacgaaagttctcctaaagaccatatagggcataataatgaagaaaaattcagttcaaaatctacgcgcaagccctccacatccctagaagaagaaggtccaccaattggactaccttcaattcccgtattaagaagtgtgtccggaccaagcaaatggacgaagacacctttacgcttagaatctggaaattcaactaagtctgatccattttcacgctatgaaggacacaagacgccctctccattgaccaagatgaacaagaagaaaaataaaacgttgccagaacatggacaacccctcgtgctagctccaattaaatctcaaagctcggagtcagacacgggacagaactccattatagaaaagccagctcgaagcatacgacgaaagcaacaagaaaaaactgataataggaaagaagacaggcacgatgctgaaaatatagacctggaggcgagaatgccaattcaacatatcgataccgcttccattcattcgtttgattcaggtcaaaatggattcagggacgtttacagcatcgaaaacatcattgtgatcctcctatgttgtagtatagtgccgccattattttttattattggctgcagctcaagaaggaaattagtttcagactatagattaatgaggttgcttatgaataaagaacaccgagcggctttgctgcaaggattcatatgggacgttgatttaaggtggttccggatgttttgtctgatcttaggggctgccgaaacagtgattgtgatggccggtattgctattggatttggtgtgggtataacacgtgaataa

SEQ ID NO: 7876 - DNA, 1812 bp, Artificial Sequence
  Description of Artificial Sequence: Synthetic polynucleotide
atgatacaatctgacgaagataatttggactcttctgaaacgacagcatctacttcttatagtggtacttcctctgtatcttccagattacaattgagaacatccttgttttttgaaaatcttaatggagcacatgggaaccccgatgcggagacagagatggctactgttgcctatgaaaccacaagtagaggtcaaggatttgctgtatacatcaacaatgaaaggttttctcaaataatgggagcatccacaagctctagctctagtagcaactcttcctctattacacaatttcacgatacccaagataataatataccaagcaacactactgtaaggccaacttctcttagaagagacaacgaggataccgtaccgttaaggaacgtaactccttctcaaaacgcggcggtaagaccagaaagagcagtgaattctccatcttctcagagattaagttgcgcattaacaatatctacttctgttcttatgggagaagatgttgaaggaagccctatagagcaagagcatagtagggtcgtatcttctttatactcttctttggcgaatcgcgggaacgacgagtctaagaatggaacacctccacgtcctacctctattgaacctaatgaaacaacggaacacagttttttctcttaccattacgatgacaccttagaaccagatgttgaagaggcagtgaggttgacgaagaataaaacttctaatgttaattttataagctctactggcagtaaaggtgaaggcgagaccgaggatgaagtcatagatcaatacgaacctgtgaatgaaagtaaatttataccgcacaaattgaaaattccagagaaggctggatccataaagtcttctacaagtgatgattctcattctccaggtgcgccaggtacgtctgcaaggaagattaaaattcctcagagtccatctttaattggtaacatattgattccttctcacaatagtgacagtagtaacgaaagttctcctaaagaccatatagggcataataatgaagaaaaattcagttctaaatctacgcgcaagccctccacatccttagaagaagaaggtccaccaattggattgccttctattcccgtattaagaagtgtgtccggaccaagcaaatggacgaagacacctttacgcttagaatctggaaattctactaagtctgatccatttagccgctatgaaggacacaagacgccctctccattgaccaagatgaacaagaagaaaaataaaacgttgccagaacatggacaacccctcgtgttggctccaattaaatctcaaagctctgagagtgacacgggacagaactccattatagaaaagccagctagaagcataagaagaaagcaacaagaaaaaactgataataggaaagaagacaggcacgatgctgaaaatatagacttggaggcgagaatgccaattcaacatatcgataccgcttccattcattcttttgattctggtcaaaatggattcagggacgtttacagcatcgaaaacatcattgtgatcctcttatgttgtagtatagtgccgccattattttttattattggctgcagcagcagaaggaaattagtttctgactatagattaatgaggttgcttatgaataaagaacacagggcggctttgttgcaaggattcatatgggacgttgatttaaggtggttccgcatgttttgtttaatcttaggggctgccgaaacagtgattgtgatggccggtattgctattggatttggtgtgggtataacacgtgaatga

SEQ ID NO: 7877 - DNA, 1008 bp, Saccharomyces cerevisiae
atgtctgaaccagctcaaaagaaacaaaaggttgctaacaactctctagaacaattgaaagcctccggcactgtcgttgttgccgacactggtgatttcggctctattgccaagtttcaacctcaagactccacaactaacccatcattgatcttggctgctgccaagcaaccaacttacgccaagttgatcgatgttgccgtggaatacggtaagaagcatggtaagaccaccgaagaacaagtcgaaaatgctgtggacagattgttagtcgaattcggtaaggagatcttaaagattgttccaggcagagtctccaccgaagttgatgctagattgtcttttgacactcaagctaccattgaaaaggctagacatatcattaaattgtttgaacaagaaggtgtctccaaggaaagagtccttattaaaattgcttccacttgggaaggtattcaagctgccaaagaattggaagaaaaggacggtatccactgtaatttgactctattattctccttcgttcaagcagttgcctgtgccgaggcccaagttactttgatttccccatttgttggtagaattctagactggtacaaatccagcactggtaaagattacaagggtgaagccgacccaggtgttatttccgtcaagaaaatctacaactactacaagaagtacggttacaagactattgttatgggtgcttctttcagaagcactgacgaaatcaaaaacttggctggtgttgactatctaacaatttctccagctttattggacaagttgatgaacagtactgaacctttcccaagagttttggaccctgtctccgctaagaaggaagccggcgacaagatttcttacatcagcgacgaatctaaattcagattcgacttgaatgaagacgctatggccactgaaaaattgtccgaaggtatcagaaaattctctgccgatattgttactctattcgacttgattgaaaagaaagttaccgcttaa

SEQ ID NO: 7878 - DNA, 1008 bp, Artificial Sequence
  Description of Artificial Sequence: Synthetic polynucleotide
atgtctgaaccagctcaaaagaaacaaaaggttgctaacaactctttggaacaattgaaagcctccggcactgtcgttgttgccgacactggtgatttcggctctattgccaagtttcaacctcaagactccacaactaacccatctttgatcttggctgctgccaagcaaccaacttacgccaagttgatcgatgttgccgtggaatacggtaagaagcatggtaagaccaccgaagaacaagtcgaaaatgctgtggacagattgttagtcgaattcggtaaggagatcttaaagattgttccaggcagagtctccaccgaagttgatgctagattgtcttttgacactcaagctaccattgaaaaggctagacatatcattaaattgtttgaacaagaaggtgtctccaaggaaagagtccttattaaaattgcttccacttgggaaggtattcaagctgccaaagaattggaagaaaaggacggtatccactgtaatttgactttattattctccttcgttcaagcagttgcctgtgccgaggcccaagttactttgatttccccatttgttggtagaattttggactggtacaaatccagcactggtaaagattacaagggtgaagccgacccaggtgttatttccgtcaagaaaatctacaactactacaagaagtacggttacaagactattgttatgggtgcttctttcagaagcactgacgaaatcaaaaacttggctggtgttgactatttgacaatttctccagctttattggacaagttgatgaacagtactgaacctttcccaagagttttggaccctgtctccgctaagaaggaagccggcgacaagatttcttacatcagcgacgaatctaaattcagattcgacttgaatgaagacgctatggccactgaaaaattgtccgaaggtatcagaaaattctctgccgatattgttactttattcgacttgattgaaaagaaagttaccgcttga
